United States Patent Application Publication US 2024/0398993 A1 - sequence listing, part 18

SEQ ID NO: 71204 - protein, 1115 aa, Homo sapiens
MVWRLVLLALWVWPSTQAGHQDKDTTFDLFSISNINRKTIGAKQFRGPDPGVPAYRFVRFDYIPPVNADDLSKITKIMRQKEGFFLTAQLKQDGKSRGTLLALEGPGLSQRQFEIVSNGPADTLDLTYWIDGTRHVVSLEDVGLADSQWKNVTVQVAGETYSLHVGCDLIDSFALDEPFYEHLQAEKSRMYVAKGSARESHFRGLLQNVHLVFENSVEDILSKKGCQQGQGAEINAISENTETLRLGPHVTTEYVGPSSERRPEVCERSCEELGNMVQELSGLHVLVNQLSENLKRVSNDNQFLWELIGGPPKTRNMSACWQDGRFFAENETWVVDSCTTCTCKKFKTICHQITCPPATCASPSFVEGECCPSCLHFRQDGGWSHWSPWSSCSVTCGVGNITRIRLCNSPVPQMGGKNCKGSGRETKACQGAPCPIDGRWSPWSPWSACTVTCAGGIRERTRVCNSPEPQYGGKACVGDVQERQMCNKRSCPVDGCLSNPCFPGAQCSSFPDGSWSCGSCPVGFLGNGTHCEDLDECALVPDICFSTSKVPRCVNTQPGFHCLPCPPRYRGNQPVGVGLEAAKTEKQVCEPENPCKDKTHNCHKHAECIYLGHFSDPMYKCECQTGYAGDGLICGEDSDLDGWPNLNLVCATNATYHCIKDNCPHLPNSGQEDFDKDGIGDACDDDDDNDGVTDEKDNCQLLFNPRQADYDKDEVGDRCDNCPYVHNPAQIDTDNNGEGDACSVDIDGDDVFNERDNCPYVYNTDQRDTDGDGVGDHCDNCPLVHNPDQTDVDNDLVGDQCDNNEDIDDDGHQNNQDNCPYISNANQADHDRDGQGDACDPDDDNDGVPDDRDNCRLVFNPDQEDLDGDGRGDICKDDFDNDNIPDIDDVCPENNAISETDFRNFQMVPLDPKGTTQIDPNWVIRHQGKELVQTANSDPGIAVGFDEFGSVDFSGTFYVNTDRDDDYAGFVFGYQSSSRFYVVMWKQVTQTYWEDQPTRAYGYSGVSLKVVNSTTGTGEHLRNALWHTGNTPGQVRTLWHDPRNIGWKDYTAYRWHLTHRPKTGYIRVLVHEGKQVMADSGPIYDQTYAGGRLGLFVFSQEMVYFSDLKYECRDI

SEQ ID NO: 71205 - protein, 116 aa, Homo sapiens
MPNVHSKTENSWGEPSSPSTLVDNGTAAWGKPPSSGSGWGDHPAEPPVAFGRAGAPVAASALCKPASKSMQEGWGSGGDEMNLSTSQWEDEEGDVWNNAASQESTSSCSSWGNAPK

SEQ ID NO: 71206 - protein, 65 aa, Homo sapiens
  MOD_RES (1)..(1): Any amino acid
XRLMNQLIDHFAEPLTMPGYGGAASAGASVFGASGLDNQPPEEIVAIITSMGFQRNQAIQALRAT

SEQ ID NO: 71207 - protein, 62 aa, Homo sapiens
MDEDVLTTLKILIIGESGVGKSSLLLRFTDDTFDPELAATIGKSLNHEKVVSPELEALWPSA

SEQ ID NO: 71208 - protein, 134 aa, Homo sapiens
  MOD_RES (1)..(1): Any amino acid
XEEPKVGIKTIKVYCQRMQEENITRALIVVQQGMTPSAKQSLVDMAPKYILEQFLQQELLINITEHELVPEHVVMTKEEVTELLARYKLRENQLPRIQAGDPVARYFGIKRGQVVKIIRPSETAGRYITYRLVQ

SEQ ID NO: 71209 - protein, 109 aa, Homo sapiens
MMSDASDMLAAALEQMDGIIAGSKALEYSNGIFDCQSPTSPFMGSLRALHLVEDLRGLLEMMETDEKEGLRCQIPDSTAETLVEWLQSQMVGSACSKFCYKSFVAYSKI

SEQ ID NO: 71210 - protein, 320 aa, Homo sapiens
MWQLWASLCCLLVLANARSRPSFHPLSDELVNYVNKRNTTWQAGHNFYNVDMSYLKRLCGTFLGGPKPPQRVMFTEDLKLPASFDAREQWPQCPTIKEIRDQGSCGSCWAFGAVEAISDRICIHTNAHVSVEVSAEDLLTCCGSMCGDGCNGGYPAEAWNFWTRKGLVSGGLYESHVGCRPYSIPPCEHHVNGSRPPCTGEGDTPKCSKICEPGYSPTYKQDKHYGYNSYSVSNSEKDIMAEIYKNGPVEGAFSVYSDFLLYKSGLDRASHQWMNTQGGPCPGSVPTRHRRDDGWPCHPHPGLGSGEWHTLLAGCQLLEH

SEQ ID NO: 71211 - protein, 339 aa, Homo sapiens
MSDHGDVSLPPEDRVRALSQLGSAVEVNEDIPPRRYFRSGVEIIRMASIYSEEGNIEHAFILYNKYITLFIEKLPKHRDYKSAVIPEKKDTVKKLKEIAFPKAEELKAELLKRYTKEYTEYNEEKKKEAEELARNMAIQQELEKEKQRVAQQKQQQLEQEQFHAFEEMIRNQELEKERLKIVQEFGKVDPGLGGPLVPDLEKPSLDVFPTLTVSSIQPSDCHTTVRPAKPPVVDRSLKPGALSNSESIPTIDGLRHVVVPGRLCPQFLQLASANTARGVETCGILCGKLMRNEFTITHVLIPKQSAGSDYCNTENEEELFLIQDQQGLITLGWIHNWIL

SEQ ID NO: 71212 - protein, 539 aa, Homo sapiens
MYMCFLFCSRYCTSITNFLVMGGFQLLAKPAIDFLNKNQELLQDLSEVNDENTQLMEILNTLFFLPIRRLHNYAKVLLKLATCFEVASPEYQKLQDSSSCYECLALHLGRKRKEAEYTLGFWKTFPGKMTDSLRKPERRLLCESSNRALSLQHAGRFSVNWFILFNDALVHAQFSTHHVFPLATLWAEPLSEEAGGVNGLKITTPEEQFTLISSTPQEKTKWLRAISQAVDQALRGMSDLPPYGSGSSVQRQEPPISRSAKYTFYKDPRLKDATYDGRWLSGKPHGRGVLKWPDGKMYSGMFRNGLEDGYGEYRIPNKAMNKEDHYVGHWKEGKMCGQGVYSYASGEVFEGCFQDNMRHGHGLLRSGKLTSSSPSMFIGQWVMDKKAGYGVFDDITRGEKYMGMWQDDVCQGNGVVVTQFGLYYEGNFHLNKMMGNGVLLSEDDTIYEGEFSDDWTLSGKGTLTMPNGDYIEGYFSGEWGSGIKITGTYFKPSLYESDKDRPKVLWSLTLSPRLDCSGVISAHCNLHLPGSSDSPASAS

SEQ ID NO: 71213 - protein, 1466 aa, Homo sapiens
MTPACPLLLSVILSLRLATAFDPAPSACSALASGVLYGAFSLQDLFPTIASGCSWTLENPDPTKYSLYLRFNRQEQVCAHFAPRLLPLDHYLVNFTCLRPSPEEAVAQAESEVGRPEEEEAEAAAGLELCSGSGPFTFLHFDKNFVQLCLSAEPSEAPRLLAPAALAFRFVEVLLINNNNSSQFTCGVLCRWSEECGRAAGRACGFAQPGCSCPGEAGAGSTTTTSPGPPAAHTLSNALVPGGPAPPAEADLHSGSSNDLFTTEMRYGEEPEEEPKVKTQWPRSADEPGLYMAQTGDPAAEEWSPWSVCSLTCGQGLQVRTRSCVSSPYGTLCSGPLRETRPCNNSATCPVEGQWLEWGPWGPCSTSCANGTQQRSRKCSVAGPAWATCTGALTDTRECSNLECPATDSKWGPWNAWSLCSKTCDTGWQRRFRMCQATGTQGYPCEGTGEEVKPCSEKRCPAFHEMCRDEYVMLMTWKKAAAGEIIYNKCPPNASGSASRRCLLSAQGVAYWGLPSFARCISHEYRYLYLSLREHLAKGQRMLAGEGMSQVVRSLQELLARRTYYSGDLLFSVDILRNVTDTFKRATYVPSADDVQRFFQVVSFMVDAENKEKWDDAQQVSPGSVHLLRVVEDFIHLVGDALKAFQSSLIVTDNLVISIQREPVSAVSSDITFPMRGRRGMKDWVRHSEDRLFLPKEVLSLSSPGKPATSGAAGSPGRGRGPGTVPPGPGHSHQRLLPADPDESSYFVIGAVLYRTLGLILPPPRPPLAVTSRVMTVTVRPPTQPPAEPLITVELSYIINGTTDPHCASWDYSRADASSGDWDTENCQTLETQAAHTRCQCQHLSTFAVLAQPPKDLTLELAGSPSVPLVIGCAVSCMALLTLLAIYAAFWRFIKSERSIILLNFCLSILASNILILVGQSRVLSKGVCTMTAAFLHFFFLSSFCWVLTEAWQSYLAVIGRMRTRLVRKRFLCLGWGLPALVVAVSVGFTRTKGYGTSSYCWLSLEGGLLYAFVGPAAVIVLVNMLIGIIVFNKLMARDGISDKSKKQRAGASLWSSCVVLPLLALTWMSAVLAMTDRRSVLFQALFAVFNSAQGFVITAVHCFLRREVQDVVKCQMGVCRADESEDSPDSCKNGQLQILSDFEKDVDLACQTVLFKEVNTCNPSTITGTLSRLSLDEDEEPKSCLVGPEGSLSFSPLPGNILVPMAASPGLGEPPPPQEANPVYMCGEGGLRQLDLTWLRPTEPGSEGDYMVLPRRTLSLQPGGGGGGGEDAPRARPEGTPRRAAKTVAHTEGYPSFLSVDHSGLGLGPAYGSLQNPYGMTFQPPPPTPSARQVPEPGERSRTMPRTVPGSTMKMGSLERKKLRYSDLDFEKVMHTRKRHSELYHELNQKFHTFDRYRSQSTAKDKPSPGERPSLSQHRRHQSWSTFKSMTLGSLPPKPRERLTLHRAAAWEPTEPPDGDFQTEV

SEQ ID NO: 71214 - protein, 359 aa, Homo sapiens
MQASPIRIPTVSNDIDWDFCFHMSQQTEIPAHQQTDELYPTGGCGESEEETKAKEKEKAIDCMSHPKEKLAQSQKKVAQLIKEKMNTQANKELIRCVILSRIIFGDHHWKCARALANLAYGYLTLRGLPVQAKKHATSAKNTLLTWKANTTSNKEKEEILEALVKLYYTLGVAWLLQNRGREAYFNLQKAERNMKELKELYKGGVCELQVSENDLTLALGRASLAIHRLNLALAYFEKAIGDVIAAKGDRTSDLISLYEEAAQIEQLRRNHNQAIQYLQQAHSVCVSLFTEVSPKTAEMSALLAKAYAMSGEAQHRDAVEIYFIRSINAYRATLGSEDFETLSTTEEFCKWLVQNGEKQ

SEQ ID NO: 71215 - protein, 219 aa, Homo sapiens
LQYNRLQLSRIYPKGQRLDSSNYDPLPMWICGSQLVALNFQTPDKPMQMNQALFMTGRHCGYVLQPSTMRDEAFDPFDKSSLRGLEPCAISIEVLGARHLPKNGRGIVCPFVEIEVAGAEYDSTKQKTEFVVDNGLNPVWPAKPFHFQISNPEFAFLRFVVYEEDMFSDQNFLAQATFPVKGLKTGYRAVPLKNNYSEDLELASLLIKIDIFPAKKLLC

SEQ ID NO: 71216 - protein, 136 aa, Homo sapiens
MNMSVLTLQEYEFEKQFNENEAIQWMQENWKKSFLFSALYAAFIFGGRHLMNKRAKFELRKPLVLWSLTLAVFSIFGALRTGAYMVYILMTKGLKQSVCDQGFYNGPVSKFWAYAFVLSKAPELGDTIFIILRKQK

SEQ ID NO: 71217 - protein, 48 aa, Homo sapiens
MGTQKVTPALIFAITVATIGSFQFGYNTGVINAPEKSVLPPTLLFCRS

SEQ ID NO: 71218 - protein, 121 aa, Homo sapiens
MGCKVLLNIGQQMLRRKVVDCSREETRLSRCLNTFDLVALGVGSTLGAGVYVLAGAVARENAGPAIVISFLIAALASVLAGLCYGEFGARVPKTGSAYLYSYVTVGELWAFITGWNLILSY

SEQ ID NO: 71219 - protein, 281 aa, Homo sapiens
MAPWALLSPGVLVRTGHTVLTWGITLVLFLHDTGEPDPERPRTHPIPQLRQWEEQGELLLPLTFLLLVLGSLLLYLAVSLMDPGYVNVQPQPQEELKEEQTAMVPPAIPLRRCRYCLVLQPLRARHCRECRRCVRRYDHHCPWMENCVGERNHPLFVVYLALQLVVLLWGLYLAWSGLRFFQPWGQWLRSSGLLFATFLLLSLFSLVASLLLVSHLYLVASNTTTWEFISSHRIAYLRQRPSNPFDRGLTRNLAHFFCGWPSGSWETLWAEEEEEGSSPAV

SEQ ID NO: 71220 - protein, 69 aa, Homo sapiens
  MOD_RES (1)..(1): Any amino acid
XRRYHLRYYKTGICIHETDSKGNCTKNGLHCAFAHGPHDLRSPVYDIRWAGCWAGLMAVGWGPGQGPGG

SEQ ID NO: 71221 - protein, 74 aa, Homo sapiens
  MOD_RES (1)..(1): Any amino acid
XWVLYHLAKHPEYQERCRQEVQELLKDREPKEIEWSTTPFALTQRTSRRGHLWLLFPSRQGPGTASGRRSRWRR

SEQ ID NO: 71222 - protein, 175 aa, Homo sapiens
LPWLARLIASVSQDLVHVVVTQNSLAEGISETLRTLSEMRHYQRLPDYVVVICASKIRGNEFCVVVLGQHQSRALAESMLTTSEFLKEISYELITGKVSFLASHFKTTSLGDDLDKLLEKMQQRRGDSVVTPFDGDLNECVSPQEAAAMIPTQNLGNVISDQEEEVSPWDRHCKN

SEQ ID NO: 71223 - protein, 44 aa, Homo sapiens
MFQTAWRQRQSYSVSQAECSGAITAHCSLHLPGLSDPPKELRLS

SEQ ID NO: 71224 - protein, 133 aa, Homo sapiens
MGPSCPVFLSFTKLSLWWLLLTPAGGEEAKRPPPRAPGDPLSSPSPTALPQGGSHTETEDRLFKHLFRGYNRWARPVPNTSDVVIVRFGLSIAQLIDVVRLSSHRWPEEGDPRPPTAFPLLLPLPQPCPHAQQ

SEQ ID NO: 71225 - protein, 71 aa, Homo sapiens
MAWSLGSWLGGCLLVSALGMVPPPENVRMNSVNFKNILQWESPAFAKGNLTFTAQYLSHYWTPWNASRSTC

SEQ ID NO: 71226 - protein, 438 aa, Homo sapiens
MLSRWSASFTVTKGKSSTQEATGQAVSTAHPPTGKRLKKTPEKKTGNKDCKADIAFLIDGSFNIGQRRFNLQKNFVGKVALMLGIGTEGPHVGLVQASEHPKIEFYLKNFTSAKDVLFAIKEVGFRGGNSNTGKALKHTAQKFFTVDAGVRKGIPKVVVVFIDGWPSDDIEEAGIVAREFGVNVFIVSVAKPIPEELGMVQDVTFVDKAVCRNNGFFSYHMPNWFGTTKYVKPLVQKLCTHEQMMCSKTCYNSVNIAFLIDGSSSVGDSNFRLMLEFVSNIAKTFEISDIGAKIAAVQFTYDQRTEFSFTDYSTKENVLAVIRNIRYMSGGTATGDAISFTVRNVFGPIRESPNKNFLVIVTDGQSYDDVQGPAAAAHDAGITIFSVGVAWAPLDDLKDMASKPKESHAFFTREFTGLEPIVSDVIRGICRDFLESQQ

SEQ ID NO: 71227 - protein, 124 aa, Homo sapiens
  MOD_RES (1)..(1): Any amino acid
XIRNLERRNHQPIVEGLRWLLAVIDTCQLPPTSSISISKNNTGSGERCSSHSFSTRTGMSKEKRQHLEQCSIEAKPLKSILQKEGTRLWSKKNMSVTFALDEPMKEGECSRRMRAQNTTKLCYN

SEQ ID NO: 71228 - protein, 143 aa, Homo sapiens
MTCGSYCGGRAFSCISACGPRPGRCCITAAPYRGISCYRGLTGGFGSHSVCGGFRAGSCGRSFGYRSGGVCGPSPPCITTVSVNESLLTPLNLEIDPNAQCVKQEEKEQIKSLNSRFAAFIDKVRFLEQQNKLLETKLQFYQN

SEQ ID NO: 71229 - protein, 135 aa, Homo sapiens
  MOD_RES (1)..(1): Any amino acid
XESGAYGAAKAGGSFDLRRFLTQPQVVARAVCLVFALIVFSCIYGEGYSNAHESKQMYCVFNRNEDACRYGSAIGVLAFLASAFFLVVDAYFPQISNATDRKYLVIGDLLFSGCAGLPGLPALQGWRGRLHPELR

SEQ ID NO: 71230 - protein, 175 aa, Homo sapiens
MDPDPQAGVQVGMRVVRGVDWKWGQQDGGEGGVGTVVELGRHGSPSTPDRTVVVQWDQGTRTNYRAGYQGAHDLLLYDNAQIGVRHPNIICDCCKKHGLRGMRWKCRVCLDYDLCTQCYMHNKHELAHAFDRYETAHSRPVTLSPRQGLPRIPLRGIFQGAKVVRGPDWEWGSQD

SEQ ID NO: 71231 - protein, 598 aa, Homo sapiens
MAAASAVSVLLVAAERNRWHRLPSLLLPPRTWVWRQRTMKYTTATDEAYSIGPAPSQQSYLSMEKIIQVAKTSAAQAIHPGCGFLSENMEFAELCKQEGIIFIGPPPSAIRDMGIKSTSKSIMAAAGVPVVEGYHGEDQSDQCLKEHARRIGYPVMIKAVRGGGGKGMRIVRSEQEFQEQLESARREAKKSFNDDAMLIEKFVDTPRHVEVQVFGDHHGNAVYLFERDCSVQRRHQKIIEEAPAPGIKSEVRKKLGEAAVRAAKAVNYVGAGTVEFIMDSKHNFCFMEMNTRLQVEHPVTEMITGTDLVEWQLRIAAGEKIPLSQEEITLQGHAFEARIYAEDPSNNFMPVAGPLVHLSTPRADPSTRIETGVRQGDEVSVHYDPMIAKLVVWAADRQAALTKLRYSLRQYNIVGLHTNIDFLLNLSGHPEFEAGNVHTDFIPQHHKQLLLSRKAAAKESLCQAALGLILKEKAMTDTFTLQAHDQFSPFSSSSGRRLNISYTRNMTLKDGKNNVAIAVTYNHDGSYSMQIEDKTFQVLGNLYSEGDCTYLKCSVNGVASKAKLIILENTIYLFSKEGSIEIDIPVPKYLSSVSSQET

SEQ ID NO: 71232 - protein, 63 aa, Homo sapiens
MSLLLLVVSALHILILILLFVATLDKSWWTLPGKESLNLWYDCTWNNDTKTWACSNVSENGEG

SEQ ID NO: 71233 - protein, 774 aa, Homo sapiens
MPPPPPLSCLRGLQAPHQPGQPGFKFTVAESCDRIKDEFQFLQAQYHSLKVEYDKLANEKTEMQRHYVMYYEMSYGLNIEMHKQTEIAKRLNTILAQIMPFLSQEHQQQVAQAVERAKQVTMTELNAIIGQQLQAQHLSHATHGPPVQLPPHPSGLQPPGIPPVTGSSSGLLALGALGSQAHLTVKDEKNHHELDHRERESSANNSVSPSESLRASEKHRGSADYSMEAKKRKAEEKDSLSRYDSDGDKSDDLVVDVSNEDPATPRVSPAHSPPENGLDKARSLKKDAPTSPASVASSSSTPSSKTKDLGHNDKSSTPGLKSNTPTPRNDAPTPGTSTTPGLRSMPGKPPGMDPIASALRTPISITSSYAAPFAMMSHHEMNGSLTSPGAYAGLHNIPPQMSAAAAAAAAAYGRSPMVSFGAVGFDPHPPMRATGLPSSLASIPGGKPAYSFHVSADGQMQPVPFPHDALAGPGIPRHARQINTLSHGEVVCAVTISNPTRHVYTGGKGCVKIWDISQPGSKSPISQLDCLNRDNYIRSCKLLPDGRTLIVGGEASTLTIWDLASPTPRIKAELTSSAPACYALAISPDAKVCFSCCSDGNIAVWDLHNQTLVRQFQGHTDGASCIDISHDGTKLWTGGLDNTVRSWDLREGRQLQQHDFTSQIFSLGYCPTGEWLAVGMESSNVEVLHHTKPDKYQLHLHESCVLSLKFAYCGKWFVSTGKDNLLNAWRTPYGASIFQSKESSSVLSCDISADDKYIVTGSGDKKATVYEVIY

SEQ ID NO: 71234 - protein, 206 aa, Homo sapiens
MPGSAAKGSELSERIESFVETLKRGGGPRSSEEMARETLGLLRQIITDHRWSNAGELMELIRREGRRMTAAQPSETTVGNMVRRVLKIIREEYGRLHGRSDESDQQESLHKLLTSGGLNEDFSFHYAQLQSNIIEAINELLVELEGTMENIAAQALEHIHSNEVIMTIGFSRTVEAFLKEAARKRKFHVIVAECAPFCQQVLRQLS

SEQ ID NO: 71235 - protein, 228 aa, Homo sapiens
MPALHRHEEEKFFLNAKGQKETLPSIWDSPTKQLSVVVPSYNEEKRLPVMMDEALSYLEKRQKRDPAFTYEVIVVDDGSKDQTSKVAFKYCQKYGSDKVRVITLVKNRGKGGAIRMGIFSSRGEKILMADADGATKFPDVEKLEKGLNDLQPWPRWGFAMLPRLVSNAWSQVMCPLRPPKVLGLQNQMAIACGSRAHLEKESIAQHKCSFGGLISQPVFIGSILYGRH

SEQ ID NO: 71236 - protein, 43 aa, Homo sapiens
MLCTDGQQLLRQVLHPEASRKNLVLPDMFFSFYDLRREFHMQH

SEQ ID NO: 71237 - protein, 188 aa, Homo sapiens
MELTQPAEDLIQTQQTPASELGDPEDPGEEAADGSDTVVLSLFPCTPEPVNPEPDASVSSPQAGSSLKHSTTLTNRQRGNEVSALPATLDCDNLVNKPDERGFTPLIWASAFGEIETVRFLLEWGADPHILAKERESALSLASTGGYTDIVGLLLERDVDINIYDWNGGTPLLYAVRGNHVKCVEALL

SEQ ID NO: 71238 - protein, 122 aa, Homo sapiens
QAAEISLEEKDQRIGELDRLIERMEKERHQLQLQLLEHETEMSGELTDSDKERYQQLEEASASLRERIRHLDDMVHCQQKKVKQMVEEIESLKKKLQQKQLLILQLLEKISFLEGEPNRQDS

SEQ ID NO: 71239 - protein, 69 aa, Homo sapiens
MEIPAPEPEKTALSSQDPALSLKENLEDISGWGLPEARSKSLALVTQAGVQWRNLGSLQPPPLGFKQFS

SEQ ID NO: 71240 - protein, 74 aa, Homo sapiens
TAAQKDVQIIVFPEDGIHGFNFTRTSIYPFLDFMPSPQVVRWNPCLEPHRFNDTELLFLRPKFTFCTASAPPDL

SEQ ID NO: 71241 - protein, 1249 aa, Homo sapiens
MRYKKYIGILEAAVGITPLNKRELLPESRRHVNLWQQPGVRSTTLLSSPCEWDWHPGCSSRSKYSRKHRAVPVHGPRCQAPGMEELIWEQYTVTLQKDSKRGFGIAVSGGRDNPHFENGETSIVISDVLPGGPADGLLQENDRVVMVNGTPMEDVLHSFAVQQLRKSGKVAAIVVKRPRKVQVAALQASPPLDQDDRAFEVMDEFDGRSFRSGYSERSRLNSHGGRSRSWEDSPERGRPHERARSRERDLSRDRSRGRSLERGLDQDHARTRDRSRGRSLERGLDHDFGPSRDRDRDRSRGRSIDQDYERAYHRAYDPDYERAYSPEYRRGARHDARSRGPRSRSREHPHSRSPSPEPRGRPGPIGVLLMKSRANEEYGLRLGSQIFVKEMTRTGLATKDGNLHEGDIILKINGTVTENMSLTDARKLIEKSRGKLQLVVLRDSQQTLINIPSLNDSDSEIEDISEIESNRSFSPEERRHQYSDYDYHSSSEKLKERPSSREDTPSRLSRMGATPTPFKSTGDIAGTVVPETNKEPRYQEDPPAPQPKAAPRTFLRPSPEDEAIYGPNTKMVRFKKGDSVGLRLAGGNDVGIFVAGIQEGTSAEQEGLQEGDQILKVNTQDFRGLVREDAVLYLLEIPKGEMVTILAQSRADVYRDILACGRGDSFFIRSHFECEKETPQSLAFTRGEVFRVVDTLYDGKLGNWLAVRIGNELEKGLIPNKSRAEQMASVQNAQRDNAGDRADFWRMRGQRSGVKKNLRKSREDLTAVVSVSTKFPAYERVLLREAGFKRPVVLFGPIADIAMEKLANELPDWFQTAKTEPKDAGSEKSTGVVRLNTVRQIIEQDKHALLDVTPKAVDLLNYTQWFPIVIFFNPDSRQGVKTMRQRLNPTSNKSSRKLFDQANKLKKTCAHLFTATINLNSANDSWFGSLKDTIQHQQGEAVWVSEGKMEGMDDDPEDRMSYLTAMGADYLSCDSRLISDFEDTDGEGGAYTDNELDEPAEEPLVSSITRSSEPVQHEESIRKPSPEPRAQMRRAASSDQLRDNSPPPAFKPEPPKAKTQNKEESYDFSKSYEYKSNPSAVAGNETPGASTKGYPPPVAAKPTFGRSILKPSTPIPPQEGEEVGESSEEQDNAPKSVLGKVKIFEKMDHKARLQRMQELQEAQNARIEIAQKHPDIYAVPIKTHKPDPGTPQHTSSRPPEPQKAPSRPYQDTRGSYGSDAEEEEYRQQLSEHSKRGYYGQSARYRDTEL

SEQ ID NO: 71242 - protein, 354 aa, Homo sapiens
MTNKMYAIYIKNLNYFSFLIVQCLQPTMAIFNNTTSSSSNFLLTAFPGLECAHVWISIPVCCLYTIALLGNSMIFLVIITKRRLHKPMYYFLSMLAAVDLCLTITTLPTVLGVLWFHAREISFKACFIQMFFVHAFSLLESSVLVAMAFDRFVAICNPLNYATILTDRMVLVIGLVICIRPAVFLLPLLVAINTVSFHGGHELSHPFCYHPEVIKYTYSKPWISSFWGLFLQLYLNGTDVLFILFSYVLILRTVLGIVARKKQQKALSTCVCHICAVTIFYVPLISLSLAHRLFHSTPRVLCSTLANIYLLLPPVLNPIIYSLKTKTIRQAMFQLLQSKGSWGFNVRGLRGRWD

SEQ ID NO: 71243 - protein, 30 aa, Homo sapiens
ASLLQPFKELCTHLMEKSRRGGCGAQESHS

SEQ ID NO: 71244 - protein, 464 aa, Homo sapiens
MASAAVESFVTKQLDLLELERDAEVEERRSWQENISLKELQSRGVCLLKLQVSSQRTGLYGRLLVTFEPRRYGSAAALPSNSFTSGDIVGLYDAANEGSQLATGILTRVTQKSVTVAFDESHDFQLSLDRENSYRLLKLANDVTYRRLKKALIALKKYHSGPASSLIEVLFGRSAPSPASEIHPLTFFNTCLDTSQKEAVLFALSQKELAIIHGPPGTGKTTTVVEIILQAVKQGLKVLCCAPSNIAVDNLVERLALCKQRILRLGHPARLLESIQQHSLDAVLARSDSAQIVADIRKDIDQVFVKNKKTQDKREKSNFRNEIKLLRKELKEREEAAMLESLTSANVVLATNTGASADGPLKLLPESYFDVVVIDECAQALEASCWIPLLKARKCILAGDHKQLPPTTVSHKSYELGTFVVFRGPEEDVQEILSSRISSQGRGQPRSWRGCAGRTVTQPDGTPG

SEQ ID NO: 71245 - protein, 94 aa, Homo sapiens
  MOD_RES (1)..(1): Any amino acid
XYGWSASKTNFLLVLDAFLCAVGLTSYSVLVIRIVQPELKALAIGFHSMIMRSLGGILVPIYFGALIDTTCMKWSTNSCGARGACRIYNSTYLG

SEQ ID NO: 71246 - protein, 429 aa, Homo sapiens
  MOD_RES (1)..(1): Any amino acid
XEQESLKRSKELNLVLDEIKRAVSERQALRDGDGNRTWGRLTEDPRLKPWNGSHRHVLHLPTVFHHLPHLLAKESSLQPAVRVGQGRTGVSVVMGIPSVRREVHSYLTDTLHSLISELSPQEKEDSVIVVLIAETDSQYTSAVTENIKALFPTEIHSGLLEVISPSPHFYPDFSRLRESFGDPKERVRWRTKQNLDYCFLMMYAQSKGIYYVQLEDDIVAKPNYLSTMKNFALQQPSEDWMILEFSQLGFIGQRLWKAGAAEGACEPASRGEHEPEDIPALHPGESLPARGLLLGLHPCRGGLHPLPLLPTSKTGAVLLPQWEHRAPGGQALQHVCGGAALRQPSVRQGGPAGGPHRHPPVPSEPRRLPPDRLLLQGSGRGRGGPSLRPSGSTAPLDPDGLPCVGDSERDLPEKGRLSCGLLRVPCGQP

SEQ ID NO: 71247 - protein, 320 aa, Homo sapiens
  MOD_RES (1)..(1): Any amino acid
XVVFGRPRLALMYRMQVANIDKFEEKLRAAEDELNIEAKDRIPVSYKRTGFFGNALYSVGMTAVGLAILWYVFRLAGMTGREGGFSAFNQLKMARFTIVDGKMGKGVSFKDVAGMHEAKLEVREFVDYLKSPERFLQLGAKVPKGALLLGPPGCGKTLLAKAVATEAQVPFLAMAGPEFVEVIGGLGAARVRSLFKEARARAPCIVYIDEIDAVGKKRSTTMSGFSNTEEEQTLNQLLVEMDGMGTTDHVIVLASTNRADILDGALMRPGRLDRHVFIDLPTLQGLPKRARSCPRKNRKWLRFMSRATPWWAGCWSTRRP

SEQ ID NO: 71248 - protein, 672 aa, Homo sapiens
MEIARIVARCLWEESRLLQTAATAAQQGGQANHPTAAVVTEKQQMLEQHLQDVRKRVQDLEQKMKVVENLQDDFDFNYKTLKSQGDMQDLNGNNQSVTRQKMQQLEQMLTALDQMRRSIVSELAGLLSAMEYVQKTLTDEELADWKRRQQIACIGGPPNICLDRLENWITSLAESQLQTRQQIKKLEELQQKVSYKGDPIVQHRPMLEERIVELFRNLMKSAFVVERQPCMPMHPDRPLVIKTGVQFTTKVRLLVKFPELNYQLKIKVCIDKDSGDVAALRGSRKFNILGTNTKVMNMEESNNGSLSAEFKHLTLREQRCGNGGRANCDASLIVTEELHLITFETEVYHQGLKIDLETHSLPVVVISNICQMPNAWASILWYNMLTNNPKNVNFFTKPPIGTWDQVAEVLSWQFSSTTKRGLSIEQLTTLAEKLLGPGVNYSGCQITWAKFCKENMAGKGFSFWVWLDNIIDLVKKYILALWNEGYIMGFISKERERAILSTKPPGTFLLRFSESSKEGGVTFTWVEKDISGKTQIQSVEPYTKQQLNNMSFAEIIMGYKIMDATNILVSPLVYLYPDIPKEEAFGKYCRPESQEHPEADPGSAAPYLKTKFICVTPTTCSNTIDLPMSPRTLDSLMQFGNNGEGAEPSAGGQFESLTFDMELTSECATSPM

SEQ ID NO: 71249 - protein, 13 aa, Homo sapiens
MEMDGDPYNLPAQ

SEQ ID NO: 71250 - protein, 120 aa, Homo sapiens
MGKNLKEAVKMLEDSQRRTEEENGKKLISGDIPGPLQGSGQDMVSILQLVQNLMHGDEDEEPQSPRIQNIGEQGHMALLGHSLGAYISTLDKEKLRKLTTRILSDTTLWLCRIFRYENGC

SEQ ID NO: 71251 - protein, 493 aa, Homo sapiens
MGRKKKKQLKPWCWYCNRDFDDEKILIQHQKAKHFKCHICHKKLYTGPGLAIHCMQVHKETIDAVPNAIPGRTDIELEIYGMEGIPEKDMDERRRLLEQKTQESQKKKQQDDSDEYDDDDSAASTSFQPQPVQPQQGYIPPMAQPGLPPVPGAPGMPPGIPPLMPGVPPLMPGMPPVMPGMPPGLHHQRKYTQSFCGENIMMPMGGMMPPGPGIPPLMPGMPPGMPPPVPRPGIPPMTQAQAVSAPGILNRPPAPTATVPAPQPPVTKPLFPSAGQMGTPVTSSSTASSNSESLSASSKALFPSTAQAQAAVQGPVGTDFKPLNSTPATTTEPPKPTFPAYTQSTASTTSTTNSTAAKPAASITSKPATLTTTSATSKLIHPDEDISLEERRAQLPKYQRNLPRPGQAPIGNPPVGPIGGMMPPQPGIPQQQGMRPPMPPHGQYGGHHQGMPGYLPGAMPPYGQGPPMVPPYQGGPPRPPMGMRPPVMSQALP

SEQ ID NO: 71252 - protein, 92 aa, Homo sapiens
MSKSKVDNQFYSVEVGDSTFTVLKRYQNLKPIGSGAQGIVCAAYDAVLDRNVAIKKLSRPFQNQTHAKRAYRELVLMKCVNHKNIISLLNVF

SEQ ID NO: 71253 - protein, 47 aa, Homo sapiens
MAAPDLAHGGHVSRDSVCLHEEQTQAAGMVAGWLINCYQDITCSNPV

SEQ ID NO: 71254 - protein, 174 aa, Homo sapiens
MEFSKAAVSRVVEASDRLQRRVEELCQRVYSRGDSEPLSEAAQAHTRELGRENRRLQDLATQLQEKHHRISLEYSELQDKVTSAETKVLEMETTVEDLQWDIEKLRKREQKLNKHLAEALEQLNSGYYVSGSSSGFQGGQITLSMQKFEMLNAELEENQELANSRMAELEKLQA

SEQ ID NO: 71255 - protein, 103 aa, Homo sapiens
EGLNLPSQLAHRLAEKSCRNLRKALLMCEACRVQQYPFTADQEIPETDWEVYLRETANAIVSQQTPQRLLEVRGRLYELLTHCIPPEIIMKACKEESRSCDIF

SEQ ID NO: 71256 - protein, 234 aa, Homo sapiens
YKPFHGDIQCGGHAPGSSKSFPCGSEHLPYPLGSRDGLRGTAVLQRGGLNLTAVTVAAENNHTVAFLEWRPGSTAQILSDLDLTSQREGRWKRVNTLMHYNVRDGATLILSKVGVSQQPEDSQQDLPGERHALLEEENRVWHLVRPTDEVDEGKSKRGSVKEKERTKAITEIYLTRLLSVKGTLQQFVDNFFQSVLAPGHAVPPAVKYFFDFLDEQAEKHNIQDEDTIHIWKTN

SEQ ID NO: 71257 - protein, 153 aa, Homo sapiens
SPLHAAAEAGHVDICHMLVQAGANIDTCSEDQRTPLMEAAENNHLEAVKYLIKAGALVDPKDAEGSTCLHLAAKKGHYEVVQYLLSNGQMDVNCQDDGGWTPMIWATEYKHVDLVKLLLSKGSDINIRDNDDGTMKRGALSRQKEEKREAEEP

SEQ ID NO: 71258 - protein, 71 aa, Homo sapiens
ETTVMTDAAIFAVMSRVNKVIIGTKTILANGALRAVTGTHTLALAAKHHSTPLIVCAPMFKLSPQGLSFVT

SEQ ID NO: 71259 - protein, 101 aa, Homo sapiens
MDKKSFEMVLDEIRKVVDLLRYFSWAEPQLKAMKALQHKMVAVQPTEVVNILNCFTFSKDKLVALELLASNIIDAQNSRPIEDLFRVNMSEKKRCKRILEQ

SEQ ID NO: 71260 - protein, 179 aa, Homo sapiens
MASRKENAKSANRVLRISQLDALELNKALEQLVWSQFTQCFHGFKPGLLARFEPEVKACLWVFLWRFTIYSKNATVGQSVLNIKYKNDFSPNLRYQPPSKNQKIWYAVCTIGGRWLEERCYDLFRNHHLASFGKVKQCVNFVIGLLKLGGLINFLIFLQRGKFATLTERLLGIHSVFCK

SEQ ID NO: 71261 - protein, 99 aa, Homo sapiens
MMCEVMPTISEAEGPPGGGGGHGSGSPSQPDADSHFEQLMVSMLEERDRLLDTLRETQETLALTQGKLHEVGHERDSLQRQLNTALPQEFAALTKELNV

SEQ ID NO: 71262 - protein, 122 aa, Homo sapiens
  MOD_RES (1)..(1): Any amino acid
XKDEKEYALKQIEGTGISMSACREIALLRELKHPNVIALQKVFLSHSDRKVWLLFDYAEHDLWHIIKFHRASKANKKPMQLPRSMVKSLLYQILDGIHYLHANWVLHRDLLTWVLPDYSILL

SEQ ID NO: 71263 - protein, 478 aa, Homo sapiens
  MOD_RES (465)..(465): Any amino acid
MSLHFLYYCSEPTLDVKIAFCQGFDKQVDVSYIAKHYNMSKSKVDNQFYSVEVGDSTFTVLKRYQNLKPIGSGAQGIVCAAYDAVLDRNVAIKKLSRPFQNQTHAKRAYRELVLMKCVNHKNIISLLNVFTPQKTLEEFQDVYLVMELMDANLCQVIQMELDHERMSYLLYQMLCGIKHLHSAGIIHRDLKPSNIVVKSDCTLKILDFGLARTAGTSFMMTPYVVTRYYRAPEVILGMGYKENVDIWSVGCIMGEMVRHKILFPGRDYIDQWNKVIEQLGTPCPEFMKKLQPTVRNYVENRPKYAGLTFPKLFPDSLFPADSEHNKLKASQARDLLSKMLVIDPAKRISVDDALQHPYINVWYDPAEVEAPPPQIYDKQLDEREHTIEEWKELIYKEVMNSEEKTKNGVVKGQPSPSGAAVNSSESLPPSSSVNDISSMSTDQTLASDTDSSLEASAGPLGCCRXLAACLRNPAFFRR

SEQ ID NO: 71264 - protein, 217 aa, Homo sapiens
MASTEEQYDLKIVKVEEDPIWDQETHLRGNNFSGQEASRQLFRQFCYQETPGPREALSRLRELCHQWLRPEIHTKEQILELLVLEQFLTILPEELQAWVREHHPESGEEAVAVVEDLEQELSEPGNQAPDHEHGHSEVLLEDVEHLKVKQEPTDIQLQPMVTQLRYESFCLHQFQEQDGESIPENQELASKQEILKEMEHLGDSKLQRDVSLDSKYR

SEQ ID NO: 71265 - protein, 96 aa, Homo sapiens
MIMEDWTCKLQNRVLPSEDPALSQKGYLKKENMAALCRTAESQAELQCTQLDLERKLKLNENAISRLQANQKSVLVSVSEVKAVAEMQFGELLAAV

SEQ ID NO: 71266 - protein, 158 aa, Homo sapiens
MAKDAGLIEANGELKVFIDQNLSPGKGVVSLVAVHPSTVNPLGKQLLPKTFGQSNVNIAQQVVIGTPQRPAASNTLVVGSPHTPSTHFASQNQPSDSSPWSAGKRNRKGEKNGKGLRHFSMKVCEKVQRKGTTSYNEVADELVAEFSAADNHILPNES

SEQ ID NO: 71267 - protein, 62 aa, Homo sapiens
  MOD_RES (1)..(1): Any amino acid
XLPSSAWWTRSKGTSSLMALTSPNCRCTPCAHASPSSCRTPSSSAAPSGPGSLWKGIPHPWV

SEQ ID NO: 71268 - protein, 143 aa, Homo sapiens
MDKDKGVFAIVEMGDVGAREAVLSQSQHSLGGHRLRVRPREQKEFQSPASKSPKGAAPDSHQLAKALAEAADVGAQMIKLVGLRELSEAERQLRSLVVALMQEVFTEFFPGCVVHPFGSSINSFDVHGCDLDLFLDLGDLEEP

SEQ ID NO: 71269 - protein, 94 aa, Homo sapiens
MAERTPKESWPNLGDSGKAFLKPWIISLSVTTHSECGKHHKIPVLQTNNGPSLTGLTTIAAHLVKQANKEYLLGSTAEEKAIVQQWLEYRVTQV

SEQ ID NO: 71270 - protein, 58 aa, Homo sapiens
MLSRGWFHRDLSGLDAETLLKGRGVHGSFLARPSRKNQGDFSLSVRTATAPSSTSSTR

SEQ ID NO: 71271 - protein, 147 aa, Homo sapiens
MAGPWTFTLLCGLLAATLIQATLSPTAVLILGPKVIKEKLTQELKDHNATSILQQLPLLSAMREKPAGGIPVLGSLVNTVLKHIIWLKVITANILQLQVKPSANDQELLVKIPLDMVAGFNTPLVKTIVEFHMTTEAQATIRMDTSA

SEQ ID NO: 71272 - protein, 31 aa, Homo sapiens
MVSACWGRKASGLPGAGLWAGGAEFSVLVLG

SEQ ID NO: 71273 - protein, 89 aa, Homo sapiens
MGSSEPLPIADGDRRRKKKRRGRATDSLPGKFEDMYKLTSELLGEGAYAKVQGAVSLQNGKEYAVKIIEKQAGHSRSRVFREVETLYQC

SEQ ID NO: 71274 - protein, 170 aa, Homo sapiens
HDRSTRPLYISVGHRMSLEAAVRLTCCCCRFRIPEPVRQVHLLLCSRRSWESTDGVSVGLLSPWLRAGPSWWPHGHRRCGAPGCQVQALLPGQAGPLQGKADICSREHIRKSLGLPGPPTPRSPKAQRPVACPKGDSGESSGGAPSPQRQADRTTPGGRRSTAQHQVGQR

SEQ ID NO: 71275 - protein, 122 aa, Homo sapiens
MPDRENTFVVKVEGPSEYIMETVDAQHVKAWVSDIQECLSPGENTDSLELSCLNHSESLPSQDLLLGPSESNDRLSQGAYGGLSDRPSASISPSSASIAASHFDSMELLPPELPPRIPIEEG

SEQ ID NO: 71276 - protein, 254 aa, Homo sapiens
  MOD_RES (1)..(1): Any amino acid
XRGPLRGKGDQKSAASQKPRSRGILHSLFCCVCRDDGEALPAHSGAPLLVEENGAIPKTPVQYLLPEAKAQDSDKICVVIDLDETLVHSSFKPVNNADFIIPVEIDGVVHQPPHWPAPQVYVLKRPHVDEFLQRMGELFECVLFTASLAKYADPVADLLDKWGAFRARLFRESCVFHRGNYVKDLSRLGRDLRRVLILDNSPASYVFHPDNAVPVASWFDNMSDTELHDLLPFFEQLSRVDDVYSVLRQPRPGS

SEQ ID NO: 71277 - protein, 109 aa, Homo sapiens
MADPWQECMDYAVTLARQAGEVVCEAIKNEMNVMLKSSPVDLVTATDQKVEKMLISSIKEKYPSHSFIGEESVAAGEKSILTDNPTWIIDPIDGTTNFVHSCFNWLCCK

SEQ ID NO: 71278 - protein, 277 aa, Homo sapiens
MAAAAAVEAAAPMGALWGLVHDFVVGQQEGPADQVAADVKSGNYTVLQVVEALGSSLENPEPRTRARAIQLLSQVLLHCHTLLLEKEGAESLIGKKEGRRKKLPCTETERGSKAKRGNSACHRYQLVVHLILFYENRLKDHHLVIPSVLQGLKALSLCVALPPGLAVSVLKAIFQEVHVQSLPQVDRHTVYNIITNFMRTREEELKSLGADFTFGFIQVMDGEKDPRNLLVAFRIVHDLISRDYSLGPFVEELFEVTSCYFPIDFTPPPNDPHGIQR

SEQ ID NO: 71279 - protein, 1192 aa, Homo sapiens
  MOD_RES (1)..(1): Any amino acid
XRRDTALETALNAKAYKRSKRQSLREARITEKLEKQQKIEQERKRRQKHQEYLNSILQHAKDFKEYHRSVTGKIQKLTKAVATYHANTEREQKKENERIEKERMRRLMAEDEEGYRKLIDQKKDKRLAYLLQQTDEYVANLTELVRQHKAAQVAKEKKKKKKKKAENAEGQTPAIGPDGEPLDETSQMSDLPVKVIHVESGKILTGTDAPKAGQLEAWLEMNPGYEVAPRSDSEESGSEEEEEEEEEEQPQAAQPPTLPVEEKKKIPDPDSDDVSEVDARHIIENAKQDVDDEYGVSQALARGLQSYYAVAHAVTERVDKQSALMVNGVLKQYQIKGLEWLVSLYNNNLNGILADEMGLGKTIQTIALITYLMEHKRINGPFLIIVPLSTLSNWAYEFDKWAPSVVKVSYKGSPAARRAFVPQLRSGKFNVLLTTYEYIIKDKHILAKIRWKYMIVDEGHRMKNHHCKLTQVLNTHYVAPRRLLLTGTPLQNKLPELWALLNFLLPTIFKSCSTFEQWFNAPFAMTGEKVDLNEEETILIIRRLHKVLRPFLLRRLKKEVEAQLPEKVEYVIKCDMSALQRVLYRHMQAKGVLLTDGSEKDKKGKGGTKTLMNTIMQLRKICNHPYMFQHIEESFSEHLGFTGGIVQGLDLYRASGKFELLDRILPKLRATNHKVLLFCQMTSLMTIMEDYFAYRGFKYLRLDGTTKAEDRGMLLKTFNEPGSEYFIFLLSTRAGGLGLNLQSADTVIIFDSDWNPHQDLQAQDRAHRIGQQNEVRVLRLCTVNSVEEKILAAAKYKLNVDQKVIQAGMFDQKSSSHERRAFLQAILEHEEQDEEEDEVPDDETVNQMIARHEEEFDLFMRMDLDRRREEARNPKRKPRLMEEDELPSWIIKDDAEVERLTCEEEEEKMFGRGSRHRKEVDYSDSLTEKQWLKTLKAIEEGTLEEIEEEVRQKKSSRKRKRDSDAGSSTPTTSTRSRDKDDESKKQKKRGRPPAEKLSPNPPNLTKKMKKIVDAVIKYKDSSGRQLSEVFIQLPSRKELPEYYELIRKPVDFKKIKERIRNHKYRSLNDLEKDVMLLCQNAQTFNLEGSLIYEDSIVLQSVFTSVRQKIEKEDDSEGEESEEEEEGEEEGSESESRSVKVKIKLGRKEKAQDRLKGGRRRPSRGSRAKPVVSDDDSEEEQEEDRSGSGSEED

SEQ ID NO: 71280 - protein, 848 aa, Homo sapiens
MKVVPTSPTPTDARRPRLGQIWITPVERTSTQAALVQGAGRRAQGTCLRPSPADGYLETPGHRKPSHGCRAASKARLEAKPANSPFPSHPSLAHITQFRMMVSLGHLAKGASLDDLIDSCIQSFDADGNLCRSNQLLQVMLTMHRIVISSAELLQKVITLYKDALAKNSPGLCLKICYFVRYWITEFWVMFKMDASLTDTMEEFQELVKAKGEELHCRLIDTTQINARDWSRKLTQRIKSNTSKKRKVSLLFDHLEPEELSEHLTYLEFKSFRRISFSDYQNYLVNSCVKENPTMERSIALCNGISQWVQLMVLSRPTPQLRAEVFIKFIQVAQKLHQLQNFNTLMAVIGGLCHSSISRLKETSSHVPHEINKVLGEMTELLSSSRNYDNYRRAYGECTDFKIPILGVHLKDLISLYEAMPDYLEDGKVNVHKLLALYNHISELVQLQEVAPPLEANKDLVHLLTLSLDLYYTEDEIYELSYAREPRNHRAPPLTPSKPPVVVDWASGVSPKPDPKTISKHVQRMVDSVFKNYDHDQDGYISQEEFEKIAASFPFSFCVMDKDREGLISRDEITAYFMRASSIYSKLGLGFPHNFQETTYLKPTFCDNCAGFLWGVIKQGYRCKDCGMNCHKQCKDLVVFECKKRAKNPVAPTENNTSVGPVSNLCSLGAKDLLHAPEEGPFTFPNGEAVEHGEESKDRTIMLMGVSSQKISLRLKRAVAHKATQTESQPWIGSEGPSGPFVLSSPRKTAQDTLYVLPSPTSPCPSPVLVRKRAFVKWENKDSLIKSKEELRHLRLPTYQELEQEINTLKADNDALKIQLKYAQKKIESLQLEKSNHVLAQMEQGDCS

SEQ ID NO: 71281 - protein, 50 aa, Homo sapiens
MAAPCEGQAFAVGVEKNWGAVVRSPEGTPQKIRQLIDEGIAPEEGGVDAP

SEQ ID NO: 71282 - protein, 4950 aa, Homo sapiens
DDEVVLQCTATIHKEQQKLCLAAEGFGNRLCFLESTSNSKNVPPDLSICTFVLEQSLSVRALQEMLANTVEKSEGQVDVEKWLFSLKTAQGGGHRTLLYGHAILLRHSYSGMYLCCLSTSRSSTDKLAFDVGLQEDTTGEACWWTIHPASKQRSEGEKVRVGDDLILVSVSSERYLHLSYGNGSLHVDAAFQQTLWSVAPISSGSEAAQGYLIGGDVLRLLHGHMDECLTVPSGEHGEEQRRTVHYEGGAVSVHARSLWRLETLRVAWSGSHIRWGQPFRLRHVTTGKYLSLMEDKNLLLMDKEKADVKSTAFTFRSSKEKLDVGVRKEVDGMGTSEIKYGDSVCYIQHVDTGLWLTYQSVDVKSVRMGSIQRKAIMHHEGHMDDGISLSRSQHEESRTARVIRSTVFLFNRFIRGLDALSKKAKASTVDLPIESVSLSLQDLIGYFHPPDEHLEHEDKQNRLRALKNRQNLFQEEGMINLVLECIDRLHVYSSAAHFADVAGREAGESWKSILNSLYELLAALIRGNRKNCAQFSGSLDWLISRLERLEASSGILEVLHCVLVESPEALNIIKEGHIKSIISLLDKHGRNHKVLDVLCSLCVCHGVAVRSNQHLICDNLLPGRDLLLQTRLVNHVSSMRPNIFLGVSEGSAQYKKWYYELMVDHTEPFVTAEATHLRVGWASTEGYSPYPGGGEEWGGNGVGDDLFSYGFDGLHLWSGCIARTVSSPNQHLLRTDDVISCCLDLSAPSISFRINGQPVQGMFENFNIDGLFFPVVSFSAGIKVRFLLGGRHGEFKFLPPPGYAPCYEAVLPKEKLKVEHSREYKQERTYTRDLLGPTVSLTQAAFTPIPVDTSQIVLPPHLERIREKLAENIHELWVMNKIELGWQYGPVRDDNKRQHPCLVEFSKLPEQERNYNLQMSLETLKTLLALGCHVGISDEHAEDKVKKMKLPKNYQLTSGYKPAPMDLSFIKLTPSQEAMVDKLAENAHNVWARDRIRQGWTYGIQQDVKNRRNPRLVPYTLLDDRTKKSNKDSLREAVRTLLGYGYNLEAPDQDHAARAEVCSGTGERFRIFRAEKTYAVKAGRWYFEFETVTAGDMRVGWSRPGCQPDQELGSDERAFAFDGFKAQRWHQGNEHYGRSWQAGDVVGCMVDMNEHTMMFTLNGEILLDDSGSELAFKDFDVGDGFIPVCSLGVAQVGRMNFGKDVSTLKYFTICGLQEGYEPFAVNTNRDITMWLSKRLPQFLQVPSNHEHIEVTRIDGTIDSSPCLKVTQKSFGSQNSNTDIMFYRLSMPIECAEVFSKTVAGGLPGAGLFGPKNDLEDYDADSDFEVLMKTAHGHLVPDRVDKDKEATKPEFNNHKDYAQEKPSRLKQRFLLRRTKPDYSTSHSARLTEDVLADDRDDYDFLMQTSTYYYSVRIFPGQEPANVWVGWITSDFHQYDTGFDLDRVRTVTVTLGDEKGKVHESIKRSNCYMVCAGESMSPGQGRNNNGLEIGCVVDAASGLLTFIANGKELSTYYQVEPSTKLFPAVFAQATSPNVFQFELGRIKNVMPLSAGLFKSEHKNPVPQCPPRLHVQFLSHVLWSRMPNQFLKVDVSRISERQGWLVQCLDPLQFMSLHIPEENRSVDILELTEQEELLKFHYHTLRLYSAVCALGNHRVAHALCSHVDEPQLLYAIENKYMPGLLRAGYYDLLIDIHLSSYATARLMMNNEYIVPMTEETKSITLFPDENKKHGLPGIGLSTSLRPRMQFSSPSFVSISNECYQYSPEFPLDILKSKTIQMLTEAVKEGSLHARDPVGGTTEFLFVPLIKLFYTLLIMGIFHNEDLKHILQLIEPSVFKEAATPEEESDTLEKELSVDDAKLQGAGEEEAKGGKRPKEGLLQMKLPEPVKLQMCLLLQYLCDCQVRHRIEAIVAFSDDFVAKLQDNQRFRYNEVMQALNMSAALTARKTKEFRSPPQEQINMLLNFKDDKSECPCPEEIRDQLLDFHEDLMTHCGIELDEDGSLDGNSDLTIRGRLLSLVEKVTYLKKKQAEKPVESDSKKSSTLQQLISETMVRWAQESVIEDPELVRAMFVLLHRQYDGIGGLVRALPKTYTINGVSVEDTINLLASLGQIRSLLSVRMGKEEEKLMIRGLGDIMNNKVFYQHPNLMRALGMHETVMEVMVNVLGGGESKEITFPKMVANCCRFLCYFCRISRQNQKAMFDHLSYLLENSSVGLASPAMRGSTPLDVAAASVMDNNELALALREPDLEKVVRYLAGCGLQSCQMLVSKGYPDIGWNPVEGERYLDFLRFAVFCNGESVEENANVVVRLLIRRPECFGPALRGEGGNGLLAAMEEAIKIAEDPSRDGPSPNSGSSKTLDTEEEEDDTIHMGNAIMTFYSALIDLLGRCAPEMHLIHAGKGEAIRIRSILRSLIPLGDLVGVISIAFQMPTIAKDGNVVEPDMSAGFCPDHKAAMVLFLDRVYGIEVQDFLLHLLEVGFLPDLRAAASLDTAALSATDMALALNRYLCTAVLPLLTRCAPLFAGTEHHASLIDSLLHTVYRLSKGCSLTKAQRDSIEVCLLSICGQLRPSMMQHLLRRLVFDVPLLNEHAKMPLKLLTNHYERCWKYYCLPGGWGNFGAASEEELHLSRKLFWGIFDALSQKKYEQELFKLALPCLSAVAGALPPDYMESNYVSMMEKQSSMDSEGNFNPQPVDTSNITIPEKLEYFINKYAEHSHDKWSMDKLANGWIYGEIYSDSSKVQPLMKPYKLLSEKEKEIYRWPIKESLKTMLAWGWRIERTREGDSMALYNRTRRISQTSQVSVDAAHGYSPRAIDMSNVTLSRDLHAMAEMMAENYHNIWAKKKKMELESKGGGNHPLLVPYDTLTAKEKAKDREKAQDILKFLQINGYAVSRGFKDLELDTPSIEKRFAYSFLQQLIRYVDEAHQYILEFDGGSRGKGEHFPYEQEIKFFAKVVLPLIDQYFKNHRLYFLSAASRPLCSGGHASNKEKEMVTSLFCKLGVLVRHRISLFGNDATSIVNCLHILGQTLDARTVMKTGLESVKSALRAFLDNAAEDLEKTMENLKQGQFTHTRNQPKGVTQIINYTTVALLPMLSSLFEHIGQHQFGEDLILEDVQVSCYRILTSLYALGTSKSIYVERQRSALGECLAAFAGAFPVAFLETHLDKHNIYSIYNTKSSRERAALSLPTNVEDVCPNIPSLEKLMEEIVELAESGIRYTQMPHVMEVILPMLCSYMSRWWEHGPENNPERAEMCCTALNSEHMNTLLGNILKIIYNNLGIDEGAWMKRLAVFSQPIINKVKPQLLKTHFLPLMEKLKKKAATVVSEEDHLKAEARGDMSEAELLILDEFTTLARDLYAFYPLLIRFVDYNRAKWLKEPNPEAEELFRMVAEVFIYWSKSHNFKREEQNFVVQNEINNMSFLITDTKSKMSKAAVSDQERKKMKRKGDRYSMQTSLIVAALKRLLPIGLNICAPGDQELIALAKNRFSLKDTEDEVRDIIRSNIHLQGKLEDPAIRWQMALYKDLPNRTDDTSDPEKTVERVLDIANVLFHLEQKSKRVGRRHYCLVEHPQRSKKAVWHKLLSKQRKRAVVACFRMAPLYNLPRHRAVNLFLQGYEKSWIETEEHYFEDKLIEDLAKPGAEPPEEDEGTKRVDPLHQLILLFSRTALTEKCKLEEDFLYMAYADIMAKSCHDEEDDDGEEEVKSFEEKEMEKQKLLYQQARLHDRGAAEMVLQTISASKGETGPMVAATLKLGIAILNGGNSTVQQKMLDYLKEKKDVGFFQSLAGLMQSCSVLDLNAFERQNKAEGLGMVTEEGSGEKVLQDDEFTCDLFRFLQLLCEGHNSDFQNYLRTQTGNNTTVNIIISTVDYLLRVQESISDFYWYYSGKDVIDEQGQRNFSKAIQVAKQVFNTLTEYIQGPCTGNQQSLAHSRLWDAVVGFLHVFAHMQMKLSQDSSQIELLKELMDLQKDMVVMLLSMLEGNVVNGTIGKQMVDMLVESSNNVEMILKFFDMFLKLKDLTSSDTFKEYDPDGKGVISKRDFHKAMESHKHYTQSETEFLLSCAETDENETLDYEEFVKRFHEPAKDIGFNVAVLLTNLSEHMPNDTRLQTFLELAESVLNYFQPFLGRIEIMGSAKRIERVYFEISESSRTQWEKPQVKESKRQFIFDVVNEGGEKEKMELFVNFCEDTIFEMQLAAQISESDLNERSANKEESEKERPEEQGPRMAFFSILTVRSALFALRYNILTLMRMLSLKSLKKQMKKVKKMTVKDMVTAFFSSYWSIFMTLLHFVASVFRGFFRIICSLLLGGSLVEGAKKIKVAELLANMPDPTQDEVRGDGEEGERKPLEAALPSEDLTDLKELTEESDLLSDIFGLDLKREGGQYKLIPHNPNAGLSDLMSNPVPMPEVQEKFQVIYLVTAAFSRRAYVLFVCFHRGEDGEKEEKAKEDKGKQKLRQLHTHRYGEPEVPESAFWKKIIAYQQKLLNYFARNFYNMRMLALFVAFAINFILLFYKVSTSSVVEGKELPTRSSSENAKVTSLDSSSHRIIAVHYVLEESSGYMEPTLRILAILHTVISFFCIIGYYCLKVPLVIFKREKEVARKLEFDGLYITEQPSEDDIKGQWDRLVINTQSFPNNYWDKFVKRKVMDKYGEFYGRDRISELLGMDKAALDFSDAREKKKPKKDSSLSAVLNSIDVKYQMWKLGVVFTDNSFLYLAWYMTMSVLGHYNNFFFAAHLLDIAMGFKTLRTILSSVTHNGKQLVLTVGLLAVVVYLYTVVAFNFFRKFYNKSEDGDTPDMKCDDMLTCYMFHMYVGVRAGGGIGDEIEDPAGDEYEIYRIIFDITFFFFVIVILLAIIQGLIIDAFGELRDQQEQVKEDMETKCFICGIGNDYFDTVPHGFETHTLQEHNLANYLFFLMYLINKDETEHTGQESYVWKMYQERCWEFFPAGDCFRKQYEDQLN

SEQ ID NO: 71283 - protein, 38 aa, Homo sapiens
MAWKSGGASHSELIHNLRSMMAHTCNTSTLGGRGRWIT

SEQ ID NO: 71284 - protein, 239 aa, Homo sapiens
MSDEEVEQVEEEAQEEEEKPRPKLTAPKIPEGEKVDFDDIQKKRQNKDLMELQALIDSHFEARKKEEEELVALKERIEKRRAERAEQQRIRAEKERERQNRLAEEKARREEEDAKRRAEDDLKKKKALSSMGANYSSYLAKADQKRGKKQTAREMKKKILAERRKPLNIDHLGEDKLRDKAKELWETLHQLEIDKFEFGEKLKRQKYDIMNVRARVQMLAKFSKKAGTPAKGKVGGRWK

SEQ ID NO: 71285 - protein, 215 aa, Homo sapiens
MLEKFCNSTFWNSSFLDSPEADLPLCFEQTVLVWIPLGYLWLLAPWQLLHVYKSRTKRSSTTKLYLAKQVFVGFLLILAAIELALVLTEDSGQATVPAVRYTNPSLYLGTWLLVLLIQYSRQWCVQKNSWFLSLFWILSILCGTFQFQTLIRTLLQGDNSNLAYSCLFFISYGFQILILIFSAFSENNESSNNPSSIASFLSSITYSWYDSYLGG

SEQ ID NO: 71286 - protein, 21 aa, Homo sapiens
  MOD_RES (1)..(1): Any amino acid
XASGGSYIPTFGRGTSLIVHP

SEQ ID NO: 71287 - protein, 1758 aa, Homo sapiens
SPGTPGPTMGRSQGSPMDPMVMKRPQLYGMGSNPHSQPQQSSPYPGGSYGPPGPQRYPIGIQGRTPGAMAGMQYPQQQMPPQYGQQGVSGYCQQGQQPYYSQQPQPPHLPPQAQYLPSQSQQRYQPQQDMSQEGYGTRSQPPLAPGKPNHEDLNLIQQERPSSLPDLSGSIDDLPTGTEATLSSAVSASGSTSSQGDQSNPAQSPFSPHASPHLSSIPGGPSPSPVGSPVGSNQSRSGPISPASIPGFMAGTQRNPQMAQYGPQQTGPSMSPHPSPGGQMHAGISSFQQSNSSGTYGPQMSQYGPQGNYSRPPAYSGVPSASYSGPGPGMGISANNQMHGQGPSQPCGAVPLGRMPSAGMQNRPFPGNMSSMTPSSPGMSQQGGPGMGPPMPTVNRKAQEAAAAVMQAAANSAQSRQGSFPGMNQSGLMASSSPYSQPMNNSSSLMNTQAPPYSMAPAMVNSSAASVGLADMMSPGESKLPLPLKADGKEEGTPQPESKSKDSYSSQGISQPPTPGNLPVPSPMSPSSASISSFHGDESDSISSPGWPKTPSSPKSSSSTTTGEKITKVYELGNEPERKLWVDRYLTFMEERGSPVSSLPAVGKKPLDLFRLYVCVKEIGGLAQVNKNKKWRELATNLNVGTSSSAASSLKKQYIQYLFAFECKIERGEEPPPEVFSTGDTKKQPKLQPPSPANSGSLQGPQTPQSTGSNSMAEVPGDLKPPTPASTPHGQMTPMQGGRSSTISVHDPFSDVSDSSFPKRNSMTPNAPYQQGMSMPDVMGRMPYEPNKDPFGGMRKVPGSSEPFMTQGQMPNSSMQDMYNQSPSGAMSNLGMGQRQQFPYGASYDRRHEPYGQQYPGQGPPSGQPPYGGHQPGLYPQQPNYKRHMDGMYGPPAKRHEGDMYNMQYSSQQQEMYNQYGGSYSGPDRRPIQGQYPYPYSRERMQGPGQIQTHGIPPQMMGGPLQSSSSEGPQQNMWAARNDMPYPYQNRQGPGGPTQAPPYPGMNRTDDMMVPDQRINHESQWPSHVSQRQPYMSSSASMQPITRPPQPSYQTPPSLPNHISRAPSPASFQRSLENRMSPSKSPFLPSMKMQKVMPTVPTSQVTGPPPQPPPIRREITFPPGSVEASQPVLKQRRKITSKDIVTPEAWRVMMSLKSGLLAESTWALDTINILLYDDSTVATFNLSQLSGFLELLVEYFRKCLIDIFGILMEYEVGDPSQKALDHNAARKDDSQSLADDSGKEEEDAECIDDDEEDEEDEEEDSEKTESDEKSSIALTAPDAAADPKEKPKQASKFDKLPIKIVKKNNLFVVDRSDKLGRVQEFNSGLLHWQLGGGDTTEHIQTHFESKMEIPPRRRPPPPLSSAGRKKEQEGKGDSEEQQEKSIIATIDDVLSARPGALPEDANPGPQTESSKFPFGIQQAKSHRNIKLLEDEPRSRDETPLCTIAHWQDSLAKRCICVSNIVRSLSFVPGNDAEMSKHPGLVLILGKLILLHHEHPERKRAPQTYEKEEDEDKGVACSKDEWWWDCLEVLRDNTLVTLANISGQLDLSAYTESICLPILDGLLHWMVCPSAEAQDPFPTVGPNSVLSPQRLVLETLCKLSIQDNNVDLILATPPFSRQEKFYATLVRYVGDRKNPVCREMSMALLSNLAQGDALAARAIAVQKGSIGNLISFLEDGVTMAQYQQSQHNLMHMQPPPLEPPSVDMMCRAAKALLAMARVDENRSEFLLHEGRLLDISISAVLNSLVASVICDVLFQIGQL

SEQ ID NO: 71288 - protein, 24 aa, Homo sapiens
MSVDPMTYEAQFFGFTPQTCMLRI

SEQ ID NO: 71289 - protein, 135 aa, Homo sapiens
MCFLFSTFPRTGKCHVQTIQLCRRLTVEFMHYIIAARALRKVFLSIKGIYYQAEVLGQPIVWITPYAFSHDHPTDVDYRVMATFTEFYTTLLGFVNFRLYQLLNLHYPPKLEGQAQAEAKAGEGTYALDSESCME

SEQ ID NO: 71290 - protein, 1571 aa, Homo sapiens
MSSTLHSVFFTLKVSILLGSLLGLCLGLEFMGLPNQWARYLRWDASTRSDLSFQFKTNVSTGLLLYLDDGGVCDFLCLSLVDGRVQLRFSMDCAETAVLSNKQVNDSSWHFLMVSRDRLRTVLMLDGEGQSGELQPQRPYMDVVSDLFLGGVPTDIRPSALTLDGVQAMPGFKGLILDLKYGNSEPRLLGSRGVQMDAEGPCGERPCENGGICFLLDGHPTCDCSTTGYGGKLCSEDVSQDPGLSHLMMSEQAREENVATFRGSEYLCYDLSQNPIQSSSDEITLSFKTWQRNGLILHTGKSADYVNLALKDGAVSLVINLGSGAFEAIVEPVNGKFNDNAWHDVKVTRNLRQVTISVDGILTTTGYTQEDYTMLGSDDFFYVGGSPSTADLPGSPVSNNFMGCLKEVVYKNNDIRLELSRLARIADTKMKIYGEVVFKCENVATLDPINFETPEAYISLPKWNTKRMGSISFDFRTTEPNGLILFTHGKPQERKDARSQKNTKVDFFAVELLDGNLYLLLDMGSGTIKVKATQKKANDGEWYHVDIQRDGRSGTISVNSRRTPFTASGESEILDLEGDMYLGGLPENRAGLILPTELWTAMLNYGYVGCIRDLFIDGRSKNIRQLAEMQNAAGVKSSCSRMSAKQCDSYPCKNNAVCKDGWNRFICDCTGTGYWGRTCEREASILSYDGSMYMKIIMPMVMHTEAEDVSFRFMSQRAYGLLVATTSRDSADTLRLELDGGRVKLMVNLDCIRINCNSSKGPETLYAGQKLNDNEWHTVRVVRRGKSLKLTVDDDVAEGTMVGDHTRLEFHNIETGIMTEKRYISVVPSSFIGHLQSLMFNGLLYIDLCKNGDIDYCELKARFGLRNIIADPVTFKTKSSYLSLATLQAYTSMHLFFQFKTTSPDGFILFNSGDGNDFIAVELVKGYIHYVFDLGNGPNVIKGNSDRPLNDNQWHNVVITRDNSNTHSLKVDTKVVTQVINGAKNLDLKGDLYMAGLAQGMYSNLPKLVASRDGFQGCLASVDLNGRLPDLINDALHRSGQIERGCEGPSTTCQEDSCANQGVCMQQWEGFTCDCSMTSYSGNQCNDPGATYIFGKSGGLILYTWPANDRPSTRSDRLAVGFSTTVKDGILVRIDSAPGLGDFLQLHIEQGKIGVVFNIGTVDISIKEERTPVNDGKYHVVRFTRNGGNATLQVDNWPVNEHYPTGNTDNERFQMVKQKIPFKYNRPVEEWLQEKGRQLTIFNTQAQIAIGGKDKGRLFQGQLSGLYYDGLKVLNMAAENNPNIKINGSVRLVGEVPSILGTTQTTSMPPEMSTTVMETTTTMATTTTRKNRSTASIQPTSDDLVSSAECSSDDEDFVECEPSTDKSLSTSIFEGGYKAHAPKWESKDFRPNKVSETSRTTTTSLSPELIRFTASSSSGMVPKLPAGKMNNRDLKPQPDIVLLPLPTAYELDSTKLKSPLITSPMFRNVPTANPTEPGIRRVPGASEVIRESSSTTGMVVGIVAAAALCILILLYAMYKYRNRDEGSYQVDETRNYISNSAQSNGTLMKEKQQSSKSGHKKQKNKDREYYV

SEQ ID NO: 71291 - protein, 63 aa, Homo sapiens
MAQADIALIGLAVMGQNLILNMNDHGFVDFCPSRSVLLIGLSPKLMISWPMRQREPKWWVPSP

SEQ ID NO: 71292 - protein, 111 aa, Homo sapiens
MYASQWFLTLFTAKFPLCMVFHIIDLLLCEGLNIIFHVALALLKTSKEDLLQADFEGALKFFRVQLPKRYRAEENARRLMEQACNIKVPTKKLKKYEKEYQTMRESQLQQE

SEQ ID NO: 71293 - protein, 90 aa, Homo sapiens
MAVASDFYLRYYVGHKGKFGHEFLEFEFRPDGKLRYANNSNYKNDVMIRKEAYVHKSVMEELKRIIDDSEITKEDDALWPPPDRVGRQNK

SEQ ID NO: 71294 - protein, 48 aa, Homo sapiens
VSLPCPHPFSEAGRRGLSAAHRSHTQRGLPGDCWMKGMIAWEPRTLPG

SEQ ID NO: 71295 - protein, 184 aa, Homo sapiens
MDRKHGKYILNVEHSENQPPITHPNDQEAHSSICWCLPSNDITSDVSPNLTGVCVNPGILAHSRCLQSESCNTQVKEYCRNDWSMWKVFLACLLACVIMTAIGVLIICLVNNKGSANSSIVIQLSTNDGECVTVKPGTPSPACPPTMTTTSTVPASTATESTTSTATAATTSTEPITVAPTDHL

SEQ ID NO: 71296 - protein, 218 aa, Homo sapiens
MKLCRDAHRRLKYISLAVLVVQNASLILSIRYARTLPGDRFFATTAVVMAEVLKGLTCLLLLFAQKRGNVKHLVLFLHEAVLVQYVDTLKLAVPSLIYTLQNNLQYVAISNLPAATFQPSPRCSQSHSLCLCLRLRALRSPAASRAATTTAAVFPPWRPHHGALSAKVSAGEVRAGSNGGTQGRGTGVEGVGHLQDPSRHPPGPGSSGFGRWSFLPGH

SEQ ID NO: 71297 - protein, 382 aa, Homo sapiens
MDFTLRRKDVWVVGSVCLLSSSVLWCLIRFVMTRGGHWQTPALEDVQAKEVWSNADLTERMPVKSKRTSALAVDIPAPPAPFDHRIVTAKQGAVNSFYTVSKTEILGGGRFGQVHKCEETATGLKLAAKIIKTRGMKDKEEVKNEISVMNQLDHANLIQLYDAFESKNDIVLVMEYVDGGELFDRIIDESYNLTELDTILFMKQICEGIRHMHQMYILHLDLKPENILCVNRDAKQIKIIDFGLARRYKPREKLKVNFGTPEFLAPEVVNYDFVSFPTDMWSVGVIAYMLLSGLSPFLGDNDAETLNNILACRWDLEDEEFQDISEEAKEFISKLLIKEKSWRISASEALKHPWLSDHKLHSRLNAQKKKNRGSDAQDFVTK

SEQ ID NO: 71298 - protein, 117 aa, Homo sapiens
HNRIPYQSPVSSSESAPGTIMNGHGGGRSQQTLDTPKTTGPPSALPSVSSLPSTTSCTALLPSTSQHTGDLTSSPLSQLSSMPVWRAPLPTSPQPPSPRQRPPSQVPHPQAPACPVA

SEQ ID NO: 71299 - protein, 194 aa, Homo sapiens
TTLASSVDSAHSDVASGMSDGNENVPSSSGRHEGRTTKRHYRKSVRSRSRHEKTSRPKLRILNVNNDFILAIERESFVDQVREIIEKADEMLSEDVSVEPEGDQGLESLQGKDDYGFSGSQKLEGEFKQPIPASSMPQQIGIPTSSLTQVVHSAGRRFIVSPVPESRLRESKVFPSEITDTVAASTAQSPGMNL

SEQ ID NO: 71300 - protein, 184 aa, Homo sapiens
MAKPDMIRKLEQGEELWTQRIFPSYSYLEEDGKTEDVLVKFKEYQDRHSRPLIFINHKKLIKERSNIYGKTFTLGKNRISKTILCEYKPDGKVLKNISELVIRNISPIKEKFGDSTGWEKSLLNTKHEKIHPAVNLHKQTERVLSGKQELIQHQKVQAPEQPFDHNECEKSFLMKGMLFTHTRA

SEQ ID NO: 71301 - protein, 1689 aa, Homo sapiens
MTTMLQKSDSNASFLRAARAGNLDKVVEYLKGGIDINTCNQNGLNALHLAAKEGHVGLVQELLGRGSSVDSATKKGNTALHIASLAGQAEVVKVLVKEGANINAQSQNGFTPLYMAAQENHIDVVKYLLENGANQSTATEDGFTPLAVALQQGHNQAVAILLENDTKGKVRLPALHIAARKDDTKSAALLLQNDHNADVQSKSGFTPLHIAAHYGNVNVATLLLNRGAAVDFTARNGITPLHVASKRGNTNMVKLLLDRGGQIDAKTRDGLTPLHCAARSGHDQVVELLLERGAPLLARTKNGLSPLHMAAQGDHVECVKHLLQHKAPVDDVTLDYLTALHVAAHCGHYRVTKLLLDKRANPNARALRGETALHMAARAGQVEVVRCLLRNGALVDARAREEQTPLHIASRLGKTEIVQLLLQHMAHPDAATTNGYTPLHISAREGQVDVASVLLEAGAAHSLATKKGFTPLHVAAKYGSLDVAKLLLQRRAAADSAGKNGLTPLHVAAHYDNQKVALLLLEKGASPHATAKNGYTPLHIAAKKNQMQIASTLLNYGAETNIVTKQGVTPLHLASQEGHTDMVTLLLDKGANIHMSTKSGLTSLHLAAQEDKVNVADILTKHGADQDAHTKLGYTPLIVACHYGNVKMVNFLLKQGANVNAKTKNGYTPLHQAAQQGHTHIINVLLQHGAKPNATTANGNTALAIAKRLGYISVVDTLKVVTEEVTTTTTTITEKHKLNVPETMTEVLDVSDEEGDDTMTGDGGEYLRPEDLKELGDDSLPSSQFLDGMNYLRYSLEGGRSDSLRSFSSDRSHTLSHASYLRDSAVMDDSVVIPSHQVSTLAKEAERNSYRLSWGTENLDNVALSSSPIHSGFLVSFMVDARGGAMRGCRHNGLRIIIPPRKCTAPTRVTCRLVKRHRLATMPPMVEGEGLASRLIEVGPSGAQFLGPVIVEIPHFAALRGKERELVVLRSENGDSWKEHFCDYTEDELNEILNGMDEVLDSPEDLEKKRICRIITRDFPQYFAVVSRIKQDSNLIGPEGGVLSSTVVPQVQAVFPEGALTKRIRVGLQAQPMHSELVKKILGNKATFSPIVTLEPRRRKFHKPITMTIPVPKASSDVMLNGFGGDAPTLRLLCSITGGTTPAQWEDITGTTPLTFVNECVSFTTNVSARFWLIDCRQIQESVTFASQVYREIICVPYMAKFVVFAKSHDPIEARLRCFCMTDDKVDKTLEQQENFAEVARSRDVEVLEGKPIYVDCFGNLVPLTKSGQHHIFSFFAFKENRLPLFVKVRDTTQEPCGRLSFMKEPKSTRGLVHQAICNLNITLPIYTKESESDQEQEEEIDMTSEKNPQDEQERIEERLAYIADHLGFSWTELARELDFTEEQIHQIRIENPNSLQDQSHALLKYWLERDGKHATDTNLVECLTKINRMDIVHLMETNTEPLQERISHSYAEIEQTITLDHSEGFSVLQEELCTAQHKQKEEQAVSKESETCDHPPIVSEEDISVGYSTFQDGVPKTEGDSSATALFPQTHKEQVQQDFSGKMQDLPEESSLEYQQEYFVTTPGTETSETQKAMIVPSSPSKTPEEVSTPAEEEKLYLQTPTSSERGGSPIIQEPEEPSEHREESSPRKTSLVIVESADNQPETCERLDEDAAFEKGDDMPEIPPETVTEEEYIDEHGHTVVKKDNNE

SEQ ID NO: 71302 - protein, 102 aa, Homo sapiens
MHDVIKKVKKKGEWKVLVVDQLSMRMLSSCCKMTDIMTEGITIVEDINKRREPLPSLEAVYLITPSEKSVHSLISDFKDPPTAKYRAAHVFFTDSCPDALFN

SEQ ID NO: 71303 - protein, 126 aa, Homo sapiens
MEDSGKTFSSEEEEANYWKDLAMTYKQRAENTQEELREFQEGSREYEAELETQLQQIETRNRDLLSENNRLRMELETIKEKFEVQHSEGYRQISALEDDLAQTKAIKDQLQKYIRELEQANDDLER

SEQ ID NO: 71304 - protein, 295 aa, Homo sapiens
MDNKKRLAYAIIQFLHDQLRHGGLSSDAQESLEVAIQCLETAFGVTVEDSDLALPQTLPEIFEAAATGKEMPQDLRSPARTPPSEEDSAEAERLKTEGNEQMKVENFEAAVHFYGKAIELNPANAVYFCNRAAAYSKLGNYAGAVQDCERAICIDPAYSKAYGRMGLALSSLNKHVEAVAYYKKALELDPDNETYKSNLKIAELKLREAPSPTGGVGSFDIAGLLNNPGFMSMASNLMNNPQIQQLPSQNDLASLIQAGQQFAQQMQQQNPELIEQLRSQIRSRTPSASNDDQQE

SEQ ID NO: 71305 - protein, 237 aa, Homo sapiens
MLCFKRRHKVCKQIWLGLFDDRSSAIPDFRDPQKVKEFLQEKYEKKRWYVPPEQAKVVASVHASISGSSASSTSSTPEVKPLKSLLGDSAPTLHLNKGTPSQSPVVGRSQGQQQEKKQFDLLSDLGSDIFAAPAPQSTATANFANFAHFNSHAAQNSANADFANFDAFGQSSGSSNFGGFPTASHSPFQPQTTGGSAASVNANFAHFDNFPKSSSADFGTFNTSQSHQTASAVSKVS

SEQ ID NO: 71306 - protein, 44 aa, Homo sapiens
MGNRVCCGGSWSCPSTFQKKKKTGSQTRRTLKPQPQQLQQNLPK

SEQ ID NO: 71307 - protein, 455 aa, Homo sapiens
MFSEQAAQRAHTLLSPPSANNATFARVPVATYTNSSQPFRLGERSFSRQYAHIYATRLIQMRPFLENRAQQHWGSGVGVKKLCELQPEEKCCVVGTLFKAMPLQPSILREVSEEHNLLPQPPRSKYIHPDDELVLEDELQRIKLKGTIDVSKLVTGTVLAVFGSVRDDGKFLVEDYCFADLAPQKPAPPLDTDRFVLLVSGLGLGGGGGESLLGTQLLVDVVTGQLGDEGEQCSAAHVSRVILAGNLLSHSTQSRDSINKAKYLTKKTQAASVEAVKMLDEILLQLSASVPVDVMPGEFDPTNYTLPQQPLHPCMFPLATAYSTLQLVTNPYQATIDGVRFLGTSGQNVSDIFRYSSMEDHLEILEWTLRVRHISPTAPDTLECPHVYFCGNTPSFGSKIIRGPEDQTVLLVTVPDFSATQTACLVNLRSLACQPISFSGFGAEDDDLGGLGLGP

SEQ ID NO: 71308 - protein, 117 aa, Homo sapiens
MADKQISLPAKLINGGIAGLIGVTCVFPIDLAKTRLQNQQNGQRVYTSMSDCLIKTVRSEGYFGMYRGAAVNLTLVTPEKAIKLAANDFFRHQLSKDGQKLTLLKEMLAGCGAGTCQ

SEQ ID NO: 71309 - protein, 1376 aa, Homo sapiens
MSSEEDKSVEQPQPPPPPPEEPGAPAPSPAAADKRPRGRPRKDGASPFQRARKKPRSRGKTAVEDEDSMDGLETTETETIVETEIKEQSAEEDAEAEVDNSKQLIPTLQRSVSEESANSLVSVGVEAKISEQLCAFCYCGEKSSLGQGDLKQFRITPGFILPWRNQPSNKKDIDDNSNGTYEKMQNSAPRKQRGQRKERSPQQNIVSCVSVSTQTASDDQAGKLWDELSLVGLPDAIDIQALFDSTGTCWAHHRCVEWSLGVCQMEEPLLVNVDKAVVSGSTERCAFCKHLGATIKCCEEKCTQMYHYPCAAGAGTFQDFSHIFLLCPEHIDQAPERSKEDANCAVCDSPGDLLDQFFCTTCGQHYHGMCLDIAVTPLKRAGWQCPECKVCQNCKQSGEDSKMLVCDTCDKGYHTFCLQPVMKSVPTNGWKCKNCRICIECGTRSSSQWHHNCLICDNCYQQQDNLCPFCGKCYHPELQKDMLHCNMCKRWVHLECDKPTDHELDTQLKEEYICMYCKHLGAEMDRLQPGEEVEIAELTTDYNNEMEVEGPEDQMVFSEQAANKDVNGQESTPGIVPDAVQVHTEEQQKSHPSESLDTDSLLIAVSSQHTVNTELEKQISNEVDSEDLKMSSEVKHICGEDQIEDKMEVTENIEVVTHQITVQQEQLQLLEEPETVVSREESRPPKLVMESVTLPLETLVSPHEESISLCPEEQLVIERLQGEKEQKENSELSTGLMDSEMTPTIEGCVKDVSYQGGKSIKLSSETESSFSSSADISKADVSSSPTPSSDLPSHDMLHNYPSALSSSAGNIMPTTYISVTPKIGMGKPAITKRKFSPGRPRSKQGAWSTHNTVSPPSWSPDISEGREIFKPRQLPGSAIWSIKVGRGSGFPGKRRPRGAGLSGRGGRGRSKLKSGIGAVVLPGVSTADISSNKDDEENSMHNTVVLFSSSDKFTLNQDMCVVCGSFGQGAEGRLLACSQCGQCYHPYCVSIKITKVVLSKGWRCLECTVCEACGKATDPGRLLLCDDCDISYHTYCLDPPLQTVPKGGWKCKWCVWCRHCGATSAGLRCEWQNNYTQCAPCASLSSCPVCYRNYREEDLILQCRQCDRWMHAVCQNLNTEEEVENVADIGFDCSMCRPYMPASNVPSSDCCESSLVAQIVTKVKELDPPKTYTQDGVCLTESGMTQLQSLTVTVPRRKRSKPKLKLKIINQNSVAVLQTPPDIQSEHSRDGEMDDSREGELMDCDGKSESSPEREAVDDETKGVEGTDGVKKRKRKPYRPGIGGFMVRQRSRTGQGKTKRSVIRKDSSGSISEQLPCRDDGWSEQLPDTLVDESVSVTESTEKIKKRYRKRKNKLEETFPAYLQVIFCFTLFYMVC

SEQ ID NO: 71310 - protein, 132 aa, Homo sapiens
MVLKTALRLCLFRVNSWTRPRMTAISWQDAQDALPTVAAPRPVCQRCGQPLALVVQVYCPLEGSPFHRLLHVFACACPGCSTGGARSWKVFRSQCLQVPEREAQDAQKQGNSLAAEDWCEGADDWGSDTEEG

SEQ ID NO: 71311 - protein, 73 aa, Homo sapiens
MAGVKALVALSFSGAIGLTFLMLGCALEDYGSNGEPAALCWQAMQSFSLQFKGFSLYLEEEMILAGSSGSTLF

SEQ ID NO: 71312 - protein, 173 aa, Homo sapiens
  MOD_RES (1)..(1): Any amino acid
XKNAKEPFNNASPHLLKNLVEEPKKRKEVPNHLLESKVYAKLVNNKVIQARPGIIHFGGYQVEKQHQQILHLVNVSNEDTRVHILPPQTKYFEINYVRKEHHLVPGLSLTVTVTFSPDEWRYYYDCIRVHCKGDDTLLVPIHAYPVMNSLDFPSFINLSNVLLGERIRKHLTE

SEQ ID NO: 71313 - protein, 87 aa, Homo sapiens
MEGELGPALSRGEAYGHHTSSYQLLGNAQKLPFPPWPDTALQVARQFLLQQASGLSSPGNNDSKQSASAVQVPVSVAMMSPQMLTPQ

SEQ ID NO: 71314 - protein, 75 aa, Homo sapiens
MLCLCLYVPVIGEAQTEFQYFESKGLPAELKSIFKLSVFIPSQEFSTYRQWKQCPLCTKGDLQIQGRRQKEAQAL

SEQ ID NO: 71315 - protein, 589 aa, Homo sapiens
MEDVEARFAHLLQPIRDLTKNWEVDVAAQLGEYLEELDQICISFDEGKTTMNFIEAALLIQGSACVYSKKVEYLYSLVYQALDFISGKRRAKQLSSVQEDRANGVASSGVPQEAENEFLSLDDFPDSRTNVDLKNDQTPSEVLIIPLLPMALVAPDEMEKNNNPLYSRQGEVLASRKDFRMNTCVPHPRGAFMLEPEGMSPMEPAGVSPMPGTQKDTGRTEEQPMEVSVCRSPVPALGFSQEPGPSPEGPMPLGGGEDEDAEEAVELPEASAPKAALEPKESRSPQQSAALPRRYMLREREGAPEPASCVKETPDPWQSLDPFDSLESKPFKKGRPYSVPPCVEEALGQKRKRKGAAKLQDFHQWYLAAYADHADSRRLRRKGPSFADMEVLYWTHVKEQLETLRKLQRREVAEQWLRPAEEDHLEDSLEDLGAADDFLEPEEYMEPEGADPREAADLDAVPMSLSYEELVRRNVELFIATSQKFVQETELSQRIRDWEDTVQPLLQEQEQHVPFDIHTYGDQLVSRFPQLNEWCPFAELVAGQPAFEVCRSMLASLQLVSSLGYVGGGDGPQTLLMCHPCRPMTTQWR

SEQ ID NO: 71316 - protein, 201 aa, Homo sapiens
  MOD_RES (1)..(1): Any amino acid
XEEGFNTKMADGPDEYDTEAGCVPLLHPEEIKPQSHYNHGYGEPLGRKTHIDDYSTWDIVKATQYGIYERCRELVEAGYDVRQPDKENVTLLHWAAINNRIDLVKYYISKGAIVDQLGGDLNSTPLHWATRQGHLSMVVQLMKYGADPSLIDGEGCSCIHLAAQFGHTSIVAYLIAKGQDVDMMDQNGMTPLMWAAYRTHS

SEQ ID NO: 71317 - protein, 401 aa, Homo sapiens
YGDYDPSVHKRGFLAQEELLPKRVINLYQMTPEMWEERITAWYAEHRGRARDEAEMEYLKIAQDLEMYGVNYFAIRFTIKPLDKKIDVFKFNSSKLRVNKLILQLCIGNHDLFMRRRKADSLEVQQMKAQAREEKARKQMERQRLAREKQMREEAERTRDELERRLLQMKEEATMANEALMRSEETADLLAEKAQITEEEAKLLAQKAAEAEQEMQRIKATAIRTEEEKRLMEQKVLEAEVLALKMAEESERRAKEADQLKQDLQEAREAERRAKQKLLEIATKPTYPPMNPIPAPLPPDIPSFNLIGDSLSFDFKDTDMKRLSMEIEKEKVEYMEKSKHLQEQLNELKTEIEALKLKERETALDILHNENSDRGGSSKHNTIKKLTLQSAKSRVAFFEEL

SEQ ID NO: 71318 - protein, 413 aa, Homo sapiens
MPRVKAAQAGRQSSAKRHLAEQFAVGEIITDMAKKEWKVGLPIGQGGFGCIYLADMNSSESVGSDAPCVVKVEPSDNGPLFTELKFYQRAAKPEQIQKWIRTRKLKYLGVPKYWGSGLHDKNGKSYRFMIMDRFGSDLQKIYEANAKRFSRKTVLQLSLRILDILEYIHEHEYVHGDIKASNLLLNYKNPDQVYLVDYGLAYRYCPEGVHKEYKEDPKRCHDGTIEFTSIDAHNGVAPSRRGDLEILGYCMIQWLTGHLPWEDNLKDPKYVRDSKIRYRENIASLMDKCFPEKNKPGEIAKYMETVKLLDYTEKPLYENLRDILLQGLKAIGSKDDGKLDLSVVENGGLKAKTITKKRKKEIEESKEPGVEDTEWSNTQTEEAIQTRGPHERCGVLITGLPGDQNCLLNAIMT

SEQ ID NO: 71319 - protein, 182 aa, Homo sapiens
MCGNTMSVPLLTDAATVSGAERETAAVIFLHGLGDTGHSWADALSTIRLPHVKYICPHAPRIPVTLNMKMVMPSWFDLMGLSPDAPEDEAGIKKAAENIKALIEHEMKNGIPANRIVLGGFSQGGALSLYTALTCPHPLAGIVALSCWLPLHRAFPQGPVQDIPGCHAQLLSSGDGSCEGIS

SEQ ID NO: 71320 - protein, 244 aa, Homo sapiens
MALRLLKLAATSASARVVAAGAQRVRGIHSSVQCKLRYGMWHFLLGDKASKRLTERSRVITVDGNICTGKGKLAKEIAEKLGFKHFPEAGIHYPDSTTGDGKPLATDYNGNCSLEKFYDDPRSNDGNSYRLQSWLYSSRLLQYSDALEHLLTTGQGVVLERSIFSDFVFLEAMYNQGFIRKQLKNVRFYNILQGKLKIQKRVQDKFEVLNYTSIPIFLPEVTIGAHQTDRVLHQFRELPGRKYS

SEQ ID NO: 71321 - protein, 599 aa, Homo sapiens
MEPVSTGAEAGMEGAGGDPYRRPARRTQWLLSALAHHYGLDRGVENEIVVLATGLDQYLQEVFHHLDCRGAGRLPRADFRALCAVLGLRAEGATTAGQAAGDGNSRDVTPGDAAAELATDGDSDTDEEARLALRAEPPELTFRQFHARLCGYFGTRAGPRLPRGALSEHIETQIRLRRPRRRRRPPCAPGPDSGPDCERVARLEEENSSLRELVEDLRAALQSSDARCLALQVGLWKSQASTHEMGHGGPEAAVRELRQAQGALAAAEARAGRLRRGQAEVRRRAEEARQVVLRSLHRVRELEALAQQVPGLQRWVRRLEAELQRYRSEDSQLPTPQLANPEPGDKSNEPEDAGTRDPDPTPEGAWQSDSSSGSRALDEAVDEQLFRSVEGQAASDEEEVEEERWQEEKKTPAAEAKTLLARLSSCRGRCDDQTAEKLMTYFGHFGGANHAHTLGELEACIAMLVEQLRTQGCGGRTLGTSEEEAELQQKVEENEHLRLELQMVETERVRLSLLEEKLVDVLQLLQRLRDLNISKRALGKILLSTLDAFRDPTHEGRPSPAAILDALHQALAACQLLRRQPSAPASAAAALTNPLLVSC

SEQ ID NO: 71322 - protein, 172 aa, Homo sapiens
MPQAFLLGSIHEPAGALMEPQPCPGSLAESFLEEELRLNAELSQLQFSEPVGIIYNPVEYAWEPHRNYVTRYCQGPKEVLFLGMNPGPFGMAQTGVPFGEVSMVRDWLGIVGPVLTPPQEHPKRPVLGLECPQSEVSGARFWGFFRNLCGQPEVFFHHCFVHNLCPLLFLAP

SEQ ID NO: 71323 - protein, 118 aa, Homo sapiens
MDDLLAEMQQIEQSNFRQAPQRAPGVADLALSENWAQEFLAAGDAVDVTQDYNETDWSQEFISEVTDPLSVSPARWAEEYLEQSEEKLWLGEPEGTATDRWYDEYHPEEDLQHTASDF

SEQ ID NO: 71324 - protein, 174 aa, Homo sapiens
TSMKDVLKITTCVEMLIKEQMRKYKVKMEEISQLEAAESIAFRRLSLLRQNAPWPLKLGFSSPYEGVLNKSPKTRDIQEEELEVLLEEEAAGGDEDREKEILIERIQSIKEEKQDITYRLPELDPRGSDEENLDSETSASTESLLEERAGRGASEGHQAHWCNQGADDLRCGKT

SEQ ID NO: 71325 - protein, 13 aa, Homo sapiens
MSSNLLPTLNSGG

SEQ ID NO: 71326 - protein, 53 aa, Homo sapiens
MILNKALLLGALALTTVMSPCGGEDIVGSISDSLLLYRDGQWVCKTKVEKSDS

SEQ ID NO: 71327 - protein, 799 aa, Homo sapiens
ASGGCVRPARPERRLRSERAGVVRELCAQPGQVVAPGAVLVRLEGCSHPVVMKGLCAECGQDLTQLQSKNGKQQVPLSTATVSMVHSVPELMVSSEQAEQLGREDQQRLHRNRKLVLMVDLDQTLIHTTEQHCQQMSNKGIFHFQLGRGEPMLHTRLRPHCKDFLEKIAKLYELHVFTFGSRLYAHTIAGFLDPEKKLFSHRILSRDECIDPFSKTGNLRNLFPCGDSMVCIIDDREDVWKFAPNLITVKKYVYFQGTGDMNAPPGSRESQTRKKVNHSRGTEVSEPSPPVRDPEGVTQAPGVEPSNGLEKPARELNGSEAATPRDSPRPGKPDERDIWPPAQAPTSSQELAGAPEPQGSCAQGGRVAPGQRPAQGATGTDLDFDLSSDSESSSESEGTKSSSSASDGESEGKRGRQKPKAAPEGAGALAQGSSLEPGRPAAPSLPGEAEPGAHAPDKEPELGGQEEGERDGLCGLGNGCADRKEAETESQNSELSGVTAGESLDQSMEEEEEEDTDEDDHLIYLEEILVRVHTDYYAKYDRYLNKEIEEAPDIRKIVPELKSKVLADVAIIFSGLHPTNFPIEKTREHYHATALGAKILTRLVLSPDAPDRATHLIAARAGTEKVLQAQECGHLHVVNPDWLWSCLERWDKVEEQLFPLRDDHTKAQRENSPAAFPDREGVPPTALFHPMPVLPKAQPGPEVRIYDSNTGKLIRTGARGPPAPSSSLPIRQEPSSFRAVPPPQPQMFGEELPDAQDGEQPGPSRRKRQPSMSETMPLYTLCKEDLESMDKERPQEEAE

SEQ ID NO: 71328 - protein, 744 aa, Homo sapiens
MATQADLMELDMAMEPDRKAAVSHWQQQSYLDSGIHSGATTTAPSLSGKGNPEEEDVDTSQVLYEWEQGFSQSFTQEQVADIDGQYAMTRAQRMLKHAVVNLINYQDDAELATRAIPELTKLLNDEDQVVVNKAAVMVHQLSKKEASRHAIMRSPQMVSAIVRTMQNTNDVETARCTAGTLHNLSHHREGLLAIFKSGGIPALVKMLGSPVDSVLFYAITTLHNLLLHQEGAKMAVRLAGGLQKMVALLNKTNVKFLAITTDCLQILAYGNQESKLIILASGGPQALVNIMRTYTYEKLLWTTSRVLKVLSVCSSNKPAIVEAGGMQALGLHLTDPSQRLVQNCLWTLRNLSDAATKQEGMEGLLGTLVQLLGSDDINVVTCAAGILSNLTCNNYKNKMMVCQVGGIEALVRTVLRAGDREDITEPAICALRHLTSRHQEAEMAQNAVRLHYGLPVVVKLLHPPSHWPLIKATVGLIRNLALCPANHAPLREQGAIPRLVQLLVRAHQDTQRRTSMGGTQQQFVEGVRMEEIVEGCTGALHILARDVHNRIVIRGLNTIPLFVQLLYSPIENIQRVAAGVLCELAQDKEAAEAIEAEGATAPLTELLHSRNEGVATYAAAVLFRMSEDKPQDYKKRLSVELTSSLFRTEPMAWNETADLGLDIGAQGEPLGYRQDDPSYRSFHSGGYGQDALGMDPMMEHEMGGHHPGADYPVDGLPDLGHAQDLMDGLPPGDSNQLAWFDTDL

SEQ ID NO: 71329 - protein, 419 aa, Homo sapiens
MGAGPSLLLAALLLLLSGDGAVRCDTPANCTYLDLLGTWVFQVGSSGSQRDVNCSVMGPQEKKVVVYLQKLDTAYDDLGNSGHFTIIYNQGFEIVLNDYKWFAFFKYKEEGSKVTTYCNETMTGWVHDVLGRNWACFTGKKVGTASENVYVNIAHLKNSQEKYSNRLYKYDHNFVKAINAIQKSWTATTYMEYETLTLGDMIRRSGGHSRKIPRPKPAPLTAEIQQKILHLPTSWDWRNVHGINFVSPVRNQGCEGGFPYLIAGKYAQDFGLVEEACFPYTGTDSPCKMKEDCFRYYSSEYHYVGGFYGGCNEALMKLELVHHGPMAVAFEVYDDFLHYKKGIYHHTGLRDPFNPFELTNHAVLLVGYGTDSASGMDYWIVKNSWGTGWGENGYFRIRRGTDECAIESIAVAATPIPKL

SEQ ID NO: 71330 - protein, 453 aa, Homo sapiens
TVYSIFSKVHSDRNVYPSAGVLFVHVLEREYFKGEFPPYPKPGEISNDPITFNTNLMGYPDRPGWLRYIQRTPYSDGVLYGSPTAENVGKPTIIEITAYNRRTFETARHNLIINIMSAEDGVLLSSPRLECNGTISANCNLRLLGSGDSPASASRVDFPLPYQAEFFIKNMNVEEMLASEVLGDFLGAVKNVWQPERLNAINITSALDRGGRVPLPINDLKEGVYVMVGADVPFSSCLREVENPQNQLRCSQEMEPVITCDKKFRTQFYIDWCKISLVDKTKQVSTYQEVIRGEGILPDGGEYKPPSDSLKSRDYYTDFLITLAVPSAVALVLFLILAYIMCCRREGVIQLVHHSAIQKSTKELRDMSKNREIAWPLSTLPVFHPVTGEIIPPLHTDNYDSTNMPLMQTQQNLPHQTQIPQQQTTGDFRLTTFQRFEVNGIPEERKLTEAMNL

SEQ ID NO: 71331 - protein, 57 aa, Homo sapiens
MAAAAWLQVLPVILLLLGAHPSPLSFFSAGPATVAAADRSKWHIPIPSLMENLVTCL

SEQ ID NO: 71332 - protein, 37 aa, Homo sapiens
MKLYSLSVLYKGEAKVVLLKAAYDVSSFSFFQRSRNS

SEQ ID NO: 71333 - protein, 143 aa, Homo sapiens
  MOD_RES (1)..(1): Any amino acid
XAGNAVLFETVLTIMDIRSAAGLRVLAVNILGRFLLNSDRNIRYVALTSLLRLVQSDHSAVQRHRPTVVECLRETDASLSRRALELSLALVNSSNVRAMMQELQAFLESCPPDLRADCASGILLAAERHHPACADNGGHPCAG

SEQ ID NO: 71334 - protein, 192 aa, Homo sapiens
MLSSFNEWFWQDRFWLPPNVTWTELEDRDGRVYPHPQDLLAALPLALVLLAMRLAFERFIGLPLSRWLGVRDQTRRQVKPNATLEKHFLTEGHRPKEPQLSLLAAQCGLTLQQTQRWFRRRRNQDRPQLTKKFCEASWRFLFYLSSFVGGLSVLYHESWLWAPVMCWDRYPNQTLKPSLYWWYLLELGFYLS

SEQ ID NO: 71335 - protein, 61 aa, Homo sapiens
MLFQSHMATKTTCMSSQGSDDEQIKRENIRSLTMSGHVGFESLPDQLVNRSIQQGFCFNIL

SEQ ID NO: 71336 - protein, 33 aa, Homo sapiens
MVTQYWPDREPPPGEAIFPFNIHENDRQQIRDN

SEQ ID NO: 71337 - protein, 1036 aa, Homo sapiens
MDLYSTPAAALDRFVARRLQPRKEFVEKARRALGALAAALRERGGRLGAAAPRVLKTVKGGSSGRGTALKGGCDSELVIFLDCFKSYVDQRARRAEILSEMRASLESWWQNPVPGLRLTFPEQSVPGALQFRLTSVDLEDWMDVSLVPAFNVLGQAGSGVKPKPQVYSTLLNSGCQGGEHAACFTELRRNFVNIRPAKLKNLILLVKHWYHQVCLQGLWKETLPPVYALELLTIFAWEQGCKKDAFSLAEGLRTVLGLIQQHQHLCVFWTVNYGFEDPAVGQFLQRQLKRPRPVILDPADPTWDLGNGAAWHWDLLAQEAASCYDHPCFLRGMGDPVQSWKGPGLPRAGCSGLGHPIQLDPNQKTPENSKSLNAVYPRAGSKPPSCPAPGPTGAASIVPSVPGMALDLSQIPTKELDRFIQDHLKPSPQFQEQVKKAIDIILRCLHENCVHKASRVSKGGSFGRGTDLRDGCDVELIIFLNCFTDYKDQGPRRAEILDEMRAQLESWWQDQVPSLSLQFPEQNVPEALQFQLVSTALKSWTDVSLLPAFDAVGQLSSGTKPNPQVYSRLLTSGCQEGEHKACFAELRRNFMNIRPVKLKNLILLVKHWYRQVAAQNKGKGPAPASLPPAYALELLTIFAWEQGCRQDCFNMAQGFRTVLGLVQQHQQLCVYWTVNYSTEDPAMRMHLLGQLRKPRPLVLDPADPTWNVGHGSWELLAQEAAALGMQACFLSRDGTSVQPWDVMPALLYQTPAGDLDKFISEFLQPNRQFLAQVNKAVDTICSFLKENCFRNSPIKVIKVVKERQFEVKFEVSKWENPRVLSFSLTSQTMLDQSVDFDVLPAFDALGQLVSGSRPSSQVYVDLIHSYSNAGEYSTCFTELQRDFIISRPTKLKSLIRLVKHWYQQCTKISKGRGSLPPQHGLELLTVYAWEQGGKDSQFNMAEGFRTVLELVTQYRQLCIYWTINYNAKDKTVGDFLKQQLQKPRPIILDPADPTGNLGHNARWDLLAKEAAACTSALCCMGRNGIPIQPWPVKAAV

SEQ ID NO: 71338 - protein, 239 aa, Homo sapiens
MMGSPEQNHYLAQLFGLYGENGTLTAGGLARLLHSLGLGRVQGLRLGQHGPLTGRAASPAADNSTHRPQNPELSVDVWAGMPLGPSGWGDLEESKAPHLPRGPAPSGLDLLHRLLLLDHSLADHLNEDCLNGSQLLVNFGLSPAAPLTPRQFALLCPALLYQIDSRVCIGAPAPAPPGDLLSALLQSALAVLLLSLPSPLSLLLLRLLGPRLLRPLLGFLGALAVGTLCGDALLHLLPH

SEQ ID NO: 71339 - protein, 891 aa, Homo sapiens
MVPWVRTMGQKLKQRLRLDVGREICRQYPLFCFLLLCLSAASLLLNRYIHILMIFWSFVAGVVTFYCSLGPDSLLPNIFFTIKYKPKQLGLQELFPQGHSCAVCGKVKCKRHRPSLLLENYQPWLDLKISSKVDASLSEVLELVLENFVYPWYRDVTDDESFVDELRITLRFFASVLIRRIHKVDIPSIITKKLLKAAMKHIEVIVKARQKVKNTEFLQQAALEEYGPELHVALRSRRDELHYLRKLTELLFPYILPPKATDCRSLTLLIREILSGSVFLPSLDFLADPDTVNHLLIIFIDDSPPEKATEPASPLVPFLQKFAEPRNKKPSVLKLELKQIREQQDLLFRFMNFLKQEGAVHVLQFCLTVEEFNDRILRPELSNDEMLSLHEELQKIYKTYCLDESIDKIRFDPFIVEEIQRIAEGPYIDVVKLQTMRCLFEAYEHVLSLLENVFTPMFCHSDEYFRQLLRGAESPTRNSKLNRGSLSLDDFRNTQKRGESFGISRIGSKIKGVFKSTTMEGAMLPNYGVAEGEDDFIEEGIVVMEDDSPVEAVSTPNTPRNLAAWKISIPYVDFFEDPSSERKEKKERIPVFCIDVERNDRRAVGHEPEHWSVYRRYLEFYVLESKLTEFHGAFPDAQLPSKRIIGPKNYEFLKSKREEFQEYLQKLLQHPELSNSQLLADFLSPNGGETQFLDKILPDVNLGKIIKSVPGKLMKEKGQHLEPFIMNFINSCESPKPKPSRPELTILSPTSENNKKLFNDLFKNNANRAENTERKQNQNYFMEVMTVEGVYDYLMYVDAIFCENTEPRSLQDKQKGAKQTFEEMMNYIPDLLVKCIGEETKYESIRLLFDGLQQPVLNKQLTYVLLDIVIQELFPELNKVQKEVTSVTSWM

SEQ ID NO: 71340 - protein, 50 aa, Homo sapiens
MPKPSCCVPQAGLKLLTSRDPPTLAFQSAGTKDVRHHVQLLLCLLISTCP

SEQ ID NO: 71341 - protein, 135 aa, Homo sapiens
MTPGTQSPFFLLLLLTVLTATTAPKPATVVTGSGHASSTPGGEKETSATQRSSVPSSTEKNAALHQAQLLLWCTTAPLPGLPQPQPARALHSQFPATTLILLPPLPAIAPRLMPVALTIARSQHRLLPRAAERHF

SEQ ID NO: 71342 - protein, 107 aa, Homo sapiens
  MOD_RES (1)..(1): Any amino acid
XGDVGTPETMAPTIVVPPGNRSVVAGSSETTLECIASARPVEDLSVTWKRNGVRITSGLHSFGRRLTISNPTSADTGPYVCEAALPGSAFEPARATAFLFIIGPTLF

SEQ ID NO: 71343 - protein, 108 aa, Homo sapiens
MGSKKLKRVGLSQELCDRLSRHQILTCQDFLCLSPLELMKVTGLSYRGVHELLCMVSRACAPKMQTAYGIKAQRSADFSPAFLSTTLSALDEALHGGVACGSLTEDGT

SEQ ID NO: 71344 - protein, 53 aa, Homo sapiens
MNPAAEAEFNILLATDSYKVTHYKQYPPNTSKVYSYFECREKKTENSKLRKVK

SEQ ID NO: 71345 - protein, 372 aa, Homo sapiens
MLRACQLSGVTAAAQSCLCGKFVLRPLRPCRRYSTSGSSGLTTGKIAGAGLLFVGGGIGGTILYAKWDSHFRESVEKTIPYSDKLFEMVLGPAAYNVPLPKKSIQSGPLKISSVSEVMKESKQPASQLQKQKGDTPASATAGDTLSVPAPAVQPEESLKTDHPEIGEGKPTPALSEASSSSIRERPPEEVAARLAQQEKQEQVKIESLAKSLEDALRQTASVTLQAIAAIPPESLTRGVYSEETLRARFYAVQKLARRVAMIDETRNSLYQYFLSYLQSLLLFPPQQLKPPPELCPEDINTFKLLSYASYCIEHGDLELAAKFVNQLKGESRRVAQDWLKEARMTLETKQIVEILTAYASAVGIGTTQVQPE

SEQ ID NO: 71346 - protein, 245 aa, Homo sapiens
MAFLGLFSLLVLQSMATGATFPEEAIADLSVNMYNRLRATGEDENILFSPLSIALAMGMMELGAQGSTQKEIRHSMGYDSLKNGEEFSFLKEFSNMVTAKESQYVMKIANSLFVQNGFHVNEEFLQMMKKYFNAAVNHVDFSQNVAVANYINKWVENNTNNLVKDLVSPRDFDAATYLALINAVYFKGNWKSQFRPENTRTFSFTKDDESEVQIPMMYQQGEFYYGEFSDGSNEAGGIYQVLEIP

SEQ ID NO: 71347 - protein, 85 aa, Homo sapiens
MSGHKCSYPWDLQDRYAQDKSVVNKMQQKYWETKQAFIKATGKKEDEHVVASDADLDAKLELFHSIQRTCLDLSKAIVLYQKRIC

SEQ ID NO: 71348 - protein, 151 aa, Homo sapiens
MSQEGDYGRWTISSSDESEEEKPKPDKPSTSSLLCARQGAANEPRYTCSEAQKAAHKRKISPVKFSNTDSVLPPKRQKSGSQEDLGWCLSSSDDELQPEMPQKQAEKVVIKKEKDISAPNDGTAQRTENHGAPACHRLKEEEDEYETSGEG

SEQ ID NO: 71349 - protein, 30 aa, Homo sapiens
MSDILRELLCVSEKAANIARACRQQEALFQ

SEQ ID NO: 71350 - protein, 151 aa, Homo sapiens
  MOD_RES (1)..(1): Any amino acid
XCQWRGLSSALRALEAQRGREQREDSALRSFLAELSRAPRGASAPPQDPASSARNKRSHSGEPAPHIRAESHDMLMMMTYSMVPIRVMVDLCNSTKGICLTGPSGPPGPPGAGGLPGHNGLDGQPGPQGPKGEKGANGKRGKMGIFGNSSN

SEQ ID NO: 71351 - protein, 65 aa, Homo sapiens
MSTLFPSLFPRVTETLWFNLDRPCVEETELQQQEQQHQAWLQSIAEKDNNLVPIGKPASEHYDDE

SEQ ID NO: 71352 - protein, 125 aa, Homo sapiens
METNYLKRCFGNCLAQALAEVAKVRPSDPIEYLAHWLYHYRKTAKAKEENREKKIHLQEEYDSSLKEMEMTEMLKQEEYQIQQNCEKCHKELTSETVSTKKTIFMQEDTNPLEKEALKQEFLPGT

SEQ ID NO: 71353 - protein, 172 aa, Homo sapiens
MAAEEMHWPVPMKAIGAQNLLTMPGGVAKAGYLHKKGGTQLQLLKWPLRFVIIHKRCVYYFKSSTSASPQGAFSLSGYNRVMRAAEETTSNNVFPFKIIHISKKHRTWFFSASSEEERKSWMALLRREIGHFHEKKDLPLDTSDSSSDTDSFYGAVERPVDISLSPYPTDNE

SEQ ID NO: 71354 - protein, 175 aa, Homo sapiens
MWQLTSLLLFVATWGISGTPAPLDSVFSSSERAHQVLRIRKRANSFLEELRHSSLERECIEEICDFEEAKEIFQNVDDTLAFWSKHVDGDQCLVLPLEHPCASLCCGHGTCIDGIGSFSCDCRSGWEGRFCQREEVGWRRCSCAPGYKLGDDLLQCHPAVKFPCGRPWKRMEKKR

SEQ ID NO: 71355 - protein, 145 aa, Homo sapiens
MKVNRETKRLYVGGLSQDISEADLQNQFSRFGEVSDVEIITRKDDQGNPQKVFAYINISVAEADLKKCMSVLNKTKWKGGTLQIQLAKESFLHRLAQEREAAKAKKEESTTGNANLLEKTGGVDFHMKAVPGTEVPGHKNWVVSK

SEQ ID NO: 71356 - protein, 103 aa, Homo sapiens
  MOD_RES (1)..(1): Any amino acid
XSCVFHRGNYVKDLSRLGRELSKVIIVDNSPASYIFHPENAVPVQSWFDDMTDTELLDLIPFFEGLSREDDVYSMLHRLCNSWIHMELFGNFPCCYRAATKWN

SEQ ID NO: 71357 - protein, 85 aa, Homo sapiens
MYLQVETRTSSRLHLKRAPGIRSWSLLVDSLGWKLFYVTGCLFVAVQNLEDWEEAIFDKSTGKVVLKTFSLYKKLLTLFRAGHDQ

SEQ ID NO: 71358 - protein, 936 aa, Homo sapiens
MKQQALTEFEAYKHRVEDMQLCAEAQHVQRIVTMSREVEEIRRKFEEKLRSFGQLQVQFEKDKRLALEDLQAAHRREIQELLKSQQDHSASVNKGQEKAEELHRMEVESLNKMLEELRLERKKLIEDYEGKLNKAQSFYERELDTLKRSQLFTAESLQASKEKEADLRKEFQGQEAILRKTIGKLKTELQMVQDEAGSLLDKCQKLQTALAIAENNVQVLQKQLDDAKEGEMALLSKHKEVESELAAARERLQQQASDLVLKASHIGMLQATQMTQEVTIKDLESEKSRVNERLSQLEEERAFLRSKTQSLDEEQKQQILELEKKVNEAKRTQQEYYERELKNLQSRLEEEVTQLNEAHSKTLEELAWKHHMAIEAVHSNAIRDKKKLQMDLEEQHNKDKLNLEEDKNQLQQELENLKEVLEDKLNTANQEIGHLQDMVRKSEQGLGSAEGLIASLQDSQERLQNELDLTKDSLKETKDALLNVEGELEQERQQHEETIAAMKEEEKLKVDKMAHDLEIKWTENLRQECSKLREELRLQHEEDKKSAMSQLLQLKDREKNAARDSWQKKVEDLLNQISLLKQNLEIQLSQSQTSLQQLQAQFTQERQRLTQELEELEEQHQQRHKSLKEAHVLAFQTMEEEKEKEQRALENHLQQKHSAELQSLKDAHRESMEGFRIEMEQELQTLRFELEDEGKAMLASLRSELNHQHAAAIDLLRHNHHQELAAAKMELERSIDISRRQSKEHICRITDLQEELRHREHHISELDKEVQHLHENISALTKELEFKGKEILRIRSESNQQIRLEEMEEKYLMRESKPEDIQMITELKAMLTERDQIIKKLIQKKKNDKSPTNRFVSVPNLSALESGGVGNGHPNRLDPIPNSPVHDIEFNSSKPLPQPVPPKGPKTFLSPAQSEASPVASPDPQRQEWFARYFTF

SEQ ID NO: 71359 - protein, 797 aa, Homo sapiens
  MOD_RES (1)..(1): Any amino acid
XQCEQAMQHAFIPASPAPIIVNTDTLDTIPYVNGTEIEYEFEEITLERGNSGLGFSIAGGTDNPHIGDDPGIFITKIIPGGAAAEDGRLRVNDCILRVNEVDVSEVSHSKAVEALKEAGSIVRLYVRRRRPILETVVEIKLFKGPKGLGFSIAGGVGNQHIPGDNSIYVTKIIDGGAAQKDGRLQVGDRLLMVNNYSLEEVTHEEAVAILKNTSEVVYLKVGKPTTIYMTDPYGPPDITHSYSPPMENHLLSGNNGTLEYKTSLPPISPGRYSPIPKHMLVDDDYTRPPEPVYSTVNKLCDKPASPRHYSPVECDKSFLLSAPYSHYHLGLLPDSEMTSHSQHSTATRQPSMTLQRAVSLEGEPRKVVLHKGSTGLGFNIVGGEDGEGIFVSFILAGGPADLSGELQRGDQILSVNGIDLRGASHEQAAAALKGAGQTVTIIAQYQPEDYARFEAKIHDLREQMMNHSMSSGSGSLRTNQKRSLYVRAMFDYDKSKDSGLPSQGLSFKYGDILHVINASDDEWWQARRVMLEGDSEEMGVIPSKRRVERKERARLKTVKFNAKPGVIDSKGDIPGLGDDGYGTKTLRGQEDLILSYEPVTRQEINYTRPVIILGPMKDRINDDLISEFPDKFGSCVPHTTRPKRDYEVDGRDYHFVISREQMEKDIQEHKFIEAGQYNDNLYGTSVQSVRFVAERGKHCILDVSGNAIKRLQVAQLYPIAIFIKPRSLEPLMEMNKRLTEEQAKKTYDRAIKLEQEFGEYFTAIVQGDTLEDIYNQCKLVIEEQSGPFIWIPSKEKL

SEQ ID NO: 71360 - protein, 41 aa, Homo sapiens
  MOD_RES (1)..(1): Any amino acid
XPDGPLPGSDNNQEKKVRLSPAKMSTKNSTDLVEYVDKEVS

SEQ ID NO: 71361 - protein, 1184 aa, Homo sapiens
MRNLKLFRTLEFRDIQGPGNPQCFSLRTEQGTVLIGSEHGLIEVDPVSREVKNEVSLVAEGFLPEDGSGRIVGVQDLLDQESVCVATASGDVILCSLSTQQLECVGSVASGISVMSWSPDQELVLLATGQQTLIMMTKDFEPILEQQIHQDDFGESKFITVGWGRKETQFHGSEGRQAAFQMQMHESALPWDDHRPQVTWRGDGQFFAVSVVCPETGARKVRVWNREFALQSTSEPVAGLGPALAWKPSGSLIASTQDKPNQQDIVFFEKNGLLHGHFTLPFLKDEVKVNDLLWNADSSVLAVWLEDLQREESSIPKTCVQLWTVGNYHWYLKQSLSFSTCGKSKIVSLMWDPVTPYRLHVLCQGWHYLAYDWHWTTDRSVGDNSSDLSNVAVIDGNRVLVTVFRQTVVPPPMCTYQLLFPHPVNQVTFLAHPQKSNDLAVLDASNQISVYKCGDCPSADPTVKLGAVGGSGFKVCLRTPHLEKRYKIQFENNEDQDVNPLKLGLLTWIEEDVFLAVSHSEFSPRSVIHHLTAASSEMDEEHGQLNVSSSAAVDGVIISLCCNSKTKSVVLQLADGQIFKYLWESPSLAIKPWKNSGGFPVRFPYPCTQTELAMIGEEECVLGLTDRCRFFINDIEVASNITSFAVYDEFLLLTTHSHTCQCFCLRDASFKTLQAGLSSNHVSHGEVLRKVERGSRIVTVVPQDTKLVLQMPRGNLEVVHHRALVLAQIRKWLDKLMFKEAFECMRKLRINLNLIYDHNPKVFLGNVETFIKQIDSVNHINLFFTELKEEDVTKTMYPAPVTSSVYLSRDPDGNKIDLVCDAMRAVMESINPHKYCLSILTSHVKKTTPELEIVLQKVHELQGNAPSDPDAVSAEEALKYLLHLVDVNELYDHSLGTYDFDLVLMVAEKSQKDPKEYLPFLNTLKKMETNYQRFTIDKYLKRYEKAIGHLSKCGPEYFPECLNLIKDKNLYNEALKLYSPSSQQYQDISIAYGEHLMQEHMYEPAGLMFARCGAHEKALSAFLTCGNWKQALCVAAQLNFTKDQLVGLGRTLAGKLVEQRKHIDAAMVLEECAQDYEEAVLLLLEGAAWEEALRLVYKYNRLDIIETNVKPSILEAQKNYMAFLDSQTATFSRHKKRLLVVRELKEQAQQAGLGDHPRIAEKRSGRSTASKKAVRWRTWPSWRH

SEQ ID NO: 71362 - protein, 432 aa, Homo sapiens
YNPILGETFRCCWFHPQTDSRTFYIAEQVSHHPPVSAFHVSNRKDGFCISGSITAKSRFYGNSLSALLDGKATLTFLNRAEDYTLTMPYAHCKGILYGTMTLELGGKVTIECAKNNFQAQLEFKLKPFFGGSTSINQISGKITSGEEVLASLSGHWDRDVFIKEEGSGSSALFWTPSGEVRRQRLRQHTVPLEEQTELESERLWQHVTRAISKGDQHRATQEKFALEEAQRQRARERQESLMPWKPQLFHLDPITQEWHYRYEDHSPWDPLKDIAQFEQDGILRTLQQEAVARQTTFLGSPGPRHERSGPDQRLRKASDQPSGHSQATESSGSTPESCPELSDEEQDGDFVPGGESPCPRCRKEARRLQALHEAILSIREAQQELHRHLSAMLSSTARAAQAPTPGLLQSPRSWFLLCVFLACQLFINHILK

SEQ ID NO: 71363 - protein, 148 aa, Homo sapiens
MDAELEFAIQPNTTGKQLFDQVVKTVGLREVWFFGLQYVDSKGYSTWLKLNKKVTQQDVKKENPLQFKFRAKFFPEDVSEELIQEITQRLFFLQVKEAILNDEIYCPPETAVLLASYAVQAKYGDYNKEIHKPGYLANDRLLPQRVLE

SEQ ID NO: 71364 - protein, 48 aa, Homo sapiens
  MOD_RES (1)..(1): Any amino acid
XAGASGGAYGSQMMGGMGLCKYPNQSSYGGPASQQLSGGYGGGYGGQS

SEQ ID NO: 71365 - protein, 188 aa, Homo sapiens
MYEGDLEGQSMNWTSEEGRGDIIRSGTNIDRAWQCQNTKRESGRKVQSGNINAAKIQVQHPAAKSMIEISRTQDEEVGDGTTSVIILAGEMLSVAEHFLEQQMHPTVVISAYRKALDDMISTLKKISIPVDISDSDMMLNIINSSITTKAISRWSSLACNIALDAVKMVQFEENGRKEIDIKKYARVE

SEQ ID NO: 71366 - protein, 38 aa, Homo sapiens
LTQVLRAVLSACTWVSRKGDLQRMKQTHKGKRTFSQDG

SEQ ID NO: 71367 - protein, 771 aa, Homo sapiens
MTVMSLSRDLKDDFHSDTVLSILNEQRIRGILCDVTIIVEDTKFKAHSNVLAASSLYFKNIFWSHTICISSHVLELDDLKAEVFTEILNYIYSSTVVVKRQETVTDLAAAGKKLGISFLEDLTDRNFSNSPGPYVFCITEKGVVKEEKNEKRHEEPAITNGPRITNAFSIIETENSNNMFSPLDLRASFKKVSDSMRTASLCLERTDVCHEAEPVRTLAEHSYAVSSVAEAYRSQPVREHDGSSPGNTGKENCEALAAKPKTCRKPKTFSIPQDSDSATENIPPPPVSNLEVNQERSPQPAAVLTRSKSPNNEGDVHFSREDENQSSDVPGPPAAEVPPLVYNCSCCSKAFDSSTLLSAHMQLHKPTQEPLVCKYCNKQFTTLNRLDRHEQICMRSSHMPIPGGNQRFLENYPTIGQNGGSFTGPEPLLSENRIGEFSSTGSTLPDTDHMVKFVNGQMLYSCVVCKRSYVTLSSLRRHANVHSWRRTYPCHYCNKVFALAEYRTRHEIWHTGERRYQCIFCLETFMTYYILKNHQKSFHAIDHRLSISKKTANGGLKPSVYPYKLYRLLPMKCKRAPYKSYRNSSYENARENSQMNESAPGTYVVQNPHSSELPTLNFQDTVNTLTNSPAIPLETSACQDIPTSANVQNAEGTKWGEEALKMDLDNNFYSTEVSVSSTENAVSSDLRAGDVPVLSLSNSSENAASVISYSGSAPSVIVHSSQFSSVIMHSNAIAAMTSSNHRAFSDPAVSQSLKDDSKPEPDKVGRFASRP

SEQ ID NO: 71368 - protein, 139 aa, Homo sapiens
MASYFDEHDCEPSDPEQETRTNMLLELARSLFNRMDFEDLGLVVDWDHHLPPPAAKTVVENLPRTVIRGSQAELKCPVCLLEFEEEETAIEMPCHHLFHSSCILPWLSKTNSCPLCRYELPTDDDTYEEHRRDKVGADA

SEQ ID NO: 71369 - protein, 684 aa, Homo sapiens
MASLRNANPRLKNYFKENYIPQVCEALLCGILVTCPEDPLRYLEGMIMVIIKSGLQNLLWDMCITPSMKPNIRRLSETYLEQLFELDDQLMTPELMIKACSFYTGHLVKTHFCTWRDIARTNENVVLAEKMNRAVTCYNFRLQKSVFHHWHSYMEDQKEKLKNILLRIQQIIYCHKLTIILTKWRNTARHKSKKKEDELILKHELQLKKWKNRLILKRAAAEESNFPERSSSEVFLVDETLKCDISLLPERAILQIFFYLSLKDVIICGQVNHAWMLMTQLNSLWNAIDFSSVKNVIPDKYIVSTLQRWRLNVLRLNFRGCLLRPKTFRSVSHCRNLQELNVSDCPTFTDESMRHISEGCPGVLCLNLSNTTITNRTMRLLPRHFHNLQNLSLAYCRRFTDKGLQYLNLGNGCHKLIYLDLSGCTQISVQGFRYIANSCTGIMHLTINDMPTLTDNCVKALVEKCSRITSLVFTGAPHISDCTFRALSACKLRKIRFEGNKRVTDASFKFIDKNYPNLSHIYMADCKGITDSSLRSLSPLKQLTVLNLANCVRIGDMGLKQFLDGPASMRIRELNLSNCVRLSDASVMKLSERCPNLNYLSLRNCEHLTAQGIGYIVNIFSLVSIDLSGTDISNEGLNVLSRHKKLKELSVSECYRITDDGIQIARMEASANKEGLPKTPIADY

SEQ ID NO: 71370 - protein, 726 aa, Homo sapiens
MEPGDAARPGSGRATGAPPPRLLLLPLLLGWGLRVAAAASASSSGAAAEDSSAMEELATEKEAEESHRQDSVSLLTFILLLTLTILTIWLFKHRRVRFLHETGLAMIYGLIVGVILRYGTPATSGRDKSLSCTQEDRAFSTLLVNVSGKFFEYTLKGEISPGKINSVEQNDMLRKVTFDPEVFFNILLPPIIFHAGYSLKKRHFFRNLGSILAYAFLGTAVSCFIIGNLMYGVVKLMKIMGQLSDKFYYTDCLFFGAIISATDPVTVLAIFNELHADVDLYALLFGESVLNDAVAIVLSSSIVAYQPAGLNTHAFDAAAFFKSVGIFLGIFSGSFTMGAVTGVVTALVTKFTKLHCFPLLETALFFLMSWSTFLLAEACGFTGVVAVLFCGITQAHYTYNNLSVESRSRTKQLFEVLHFLAENFIFSYMGLALFTFQKHVFSPIFIIGAFVAIFLGRAAHIYPLSFFLNLGRRHKIGWNFQHMMMFSGLRGAMAFALAIRDTASYARQMMFTTTLLIVFFTVWIIGGGTTPMLSWLNIRVGVEEPSEEDQNEHHWQYFRVGVDPDQDPPPNNDSFQVLQGDGPDSARGNRTKQESAWIFRLWYSFDHNYLKPILTHSGPPLTTTLPAWCGLLARCLTSPQVYDNQEPLREEDSDFILTEGDLTLTYGDSTVTANGSSSSHTASTSLEGSRRTKSSSEEVLERDLGMGDQKVSSRGTRLVFPLEDNA

SEQ ID NO: 71371 - protein, 326 aa, Homo sapiens
MGPLPAPSCTQRITWKGLLLTASLLNFWNPPTTAEVTIEAQPPKVSEGKDVLLLVHNLPQNLPGYFWYKGEMTDLYHYIISYIVDGKIIIYGPAYSGRETVYSNASLLIQNVTRKDAGTYTLHIIKRGDETREEIRHFTFTLYSKLPIPYITINNLNPRENKDVLAFTCEPKSENYTYIWWLNGQSLPVSPGVKRPIENRILILPSVTRNETGPYQCEIRDRYGGLRSNPVILNVLYGPDLPRIYPSFTYYRSGENLDLSCFTESNPPAEYFWTINGKFQQSGQKLFIPQITRNHSGLYACSVHNSATGKEISKSMTVKVSDWILP

SEQ ID NO: 71372 - protein, 1359 aa, Homo sapiens
MPLAFCGSENHSAAYRVDQGVLNNGCFVDALNVVPHVFLLFITFPILFIGWGSQSSKVHIHHSTWLHFPGHNLRWILTFMLLFVLVCEIAEGILSDGVTESHHLHLYMPAGMAFMAAVTSVVYYHNIETSNFPKLLIALLVYWTLAFITKTIKFVKFLDHAIGFSQLRFCLTGLLVILYGMLLLVEVNVIRVRRYIFFKTPREVKPPEDLQDLGVRFLQPFVNLLSKGTYWWMNAFIKTAHKKPIDLRAIGKLPIAMRALTNYQRLCEAFDAQRKDIQGTQGARAIWQALSHAFGRRLVLSSTFRILADLLGFAGPLCIFGIVDHLGKENDVFQPKTQFLGVYFVSSQEFLANAYVLAVLLFLALLLQRTFLQASYYVAIETGINLRGAIQTKIYNKIMHLSTSNLSMGEMTAGQICNLVAIDTNQLMWFFFLCPNLWAMPVQIIVGVILLYYILGVSALIGAAVIILLAPVQYFVATKLSQAQRSTLEYSNERLKQTNEMLRGIKLLKLYAWENIFRTRVETTRRKEMTSLRAFAIYTSISIFMNTAIPIAAVLITFVGHVSFFKEADFSPSVAFASLSLFHILVTPLFLLSSVVRSTVKALVSVQKLSEFLSSAEIREEQCAPHEPTPQGPASKYQAVPLRVVNRKRPAREDCRGLTGPLQSLVPSADGDADNCCVQIMGGYFTWTPDGIPTLSNITIRIPRGQLTMIVGQVGCGKSSLLLAALGEMQKVSGAVFWSSLPDSEIGEDPSPERETATDLDIRKRGPVAYASQKPWLLNATVEENIIFESPFNKQRYKMVIEACSLQPDIDILPHGDQTQIGERGINLSGGQRQRISVARALYQHANVVFLDDPFSALDIHLSDHLMQAGILELLRDDKRTVVLVTHKLQYLPHADWIIAMKDGTIQREGTLKDFQRSECQLFEHWKTLMNRQDQELEKETVTERKATEPPQGLSRAMSSRDGLLQDEEEEEEEAAESEEDDNLSSMLHQRAEIPWRACAKYLSSAGILLLSLLVFSQLLKHMVLVAIDYWLAKWTDSALTLTPAARNCSLSQECTLDQTVYAMVFTVLCSLGIVLCLVTSVTVEWTGLKVAKRLHRSLLNRIILAPMRFFETTPLGSILNRFSSDCNTIDQHIPSTLECLSRSTLLCVSALAVISYVTPVFLVALLPLAIVCYFIQKYFRVASRDLQQLDDTTQLPLLSHFAETVEGLTTIRAFRYEARFQQKLLEYTDSNNIASLFLTAANRWLEVRMEYIGACVVLIAAVTSISNSLHRELSAGLVGLGLTYALMVSNYLNWMVRNLADMELQLGAVKRIHGLLKTEAESYEGLLDRDLRPHRQWEVLLLSCLLPHGGHVRRAHHH

SEQ ID NO: 71373 - protein, 87 aa, Homo sapiens
MASLGDLVRAWHLGAQAVDRGDWARALHLFSGVPAPPARLCFNAGCVHLLAGDPEAALRAFDQAVTKDTCMAVGFFQRGVANFQLAS

SEQ ID NO: 71374 - protein, 183 aa, Homo sapiens
MAAMAVGGAGGSRVSSGRDLNCVPEIADTLGAVAKQGFDFLCMPVFHPRFKREFIQEPAKNRPGPQTRSDLLLSGRDWNTLIVGKLSPWIRPDSKVEKIRRNSEALEVQFIITGTNHHSEKEFCSYLQYLEYLSQNRPPPNAYELFAKGYEDYLQSPLQPLMDNLESQTYEVFEKDPIKYSQY

SEQ ID NO: 71375 - protein, 589 aa, Homo sapiens
MSQEGDYGRWTISSSDESEEEKPKPDKPSTSSLLCARQGAANEPRYTCSEAQKAAHKRKISPVKFSNTDSVLPPKRQKSGSQEDLGWCLSSSDDELQPEMPQKQAEKVVIKKEKDISAPNDGTAQRTENHGAPACHRLKEEEDEYETSGEGQDIWDMLDKGNPFQFYLTRVSGVKPKYNSGALHIKDILSPLFGTLVSSAQFNYCFDVDWLVKQYPPEFRKKPILLVHGDKREAKAHLHAQAKPYENISLCQAKLDIAFGTHHTKMMLLLYEEGLRVVIHTSNLIHADWHQKTQGIWLSPLYPRIADGTHKSGESPTHFKADLISYLMAYNAPSLKEWIDVIHKHDLSETNVYLIGSTPGRFQGSQKDNWGHFRLKKLLKDHASSMPNAESWPVVGQFSSVGSLGADESKWLCSEFKESMLTLGKESKTPGKSSVPLYLIYPSVENVRTSLEGYPAGGSLPYSIQTAEKQNWLHSYFHKWSAETSGRSNAMPHIKTYMRPSPDFSKIAWFLVTSANLSKAAWGALEKNGTQLMIRSYELGVLFLPSAFAPAKRIKDEVEASFSGSRQFQSETEVLRWQPGANGHLSCAI

SEQ ID NO: 71376 - protein, 256 aa, Homo sapiens
MEPPGRSSSVEGDAPGSDLSTAVDSPGSQPPYRLSQLPPSSSHMGGPPAGVGLPWAQRARLQPASVALRKQEEEEIKRSKALSDSYELSTDLQDKKVEMLERKYGGSFLSRRAARTIQTAFRQYRMNKNFERLRSSASESRMSRRIILSNMRMQFSFEEYEKAQNPAYFEGKPASLDEGAMAGARSHRLERGLPYGGSCGGGIDGGGSSVTTSGEFSNDITELEDSFSKQVKSLAESIDEALNCHPSGPMSEEPGS

SEQ ID NO: 71377 - protein, 68 aa, Homo sapiens
MVSKSIATTLIDDTSSEVLDELYRVTREYTQNKKEAEKIIKNLIKTVIKLAILYRNNQFNQDELALME

SEQ ID NO: 71378 - protein, 489 aa, Homo sapiens
MATITCTRFTEEYQLFEELGKGAFSVVRRCVKVLAGQEYAAKIINTKKLSARDHQKLEREARICRLLKHPNIVRLHDSISEEGHHYLIFDLVTGGELFEDIVAREYYSEADASHCIQQILEAVLHCHQMGVVHRDLKPENLLLASKLKGAAVKLADFGLAIEVEGEQQAWFGFAGTPGYLSPEVLRKDPYGKPVDLWACGVILYILLVGYPPFWDEDQHRLYQQIKAGAYDFPSPEWDTVTPEAKDLINKMLTINPSKRITAAEALKHPWISHRSTVASCMHRQETVDCLKKFNARRKLKGAILTTMLATRNFSGGKSGGNKKSDGVKKRKSSSSVQLMESSESTNTTIEDEDTKVRKQEIIKVTEQLIEAISNGDFESYTKMCDPGMTAFEPEALGNLVEGLDFHRFYFENLWSRNSKPVHTTILNPHIHLMGDESACIAYIRITQYLDAGGIPRTAQSEETRVWHRRDGKWQIVHFHRSGAPSVLPQ

SEQ ID NO: 71379 - protein, 482 aa, Homo sapiens
MAAALRVAAVGARLSVLASGLRAAVRSLCSQATSVNERIENKRRTALLGGGQRRIDAQHKRGKLTARERISLLLDPGSFVESDMFVEHRCADFGMAADKNKFPGDSVVTGRGRINGRLVYVFSQRNVTASGVIPQISLIMGPCAGGAVYSPALTDFTFMVKDTSYLFITGPDVVKSVTNEDVTQEELGGAKTHTTMSGVAHRAFENDVDALCNLRDFFNYLPLSSQDPAPVRECHDPSDRLVPELDTIVPLESTKAYNMVDIIHSVVDEREFFEIMPNYAKNIIVGFARMNGRTVGIVGNQPKVASGCLDINSSVKGARFVRFCDAFNIPLITFVDVPGFLPGTAQEYGGIIRHGAKLLYAFAEATVPKVTVITRKAYGGAYDVMSSKHLCGDTNYAWPTAEIAVMGAKGAVEIIFKGHENVEAAQAEYIEKFANPFPAAVRGFVDDIIQPSSTRARICCDLDVLASKKVQRPWRKHANIPL

SEQ ID NO: 71380 - protein, 114 aa, Homo sapiens
MLCFLRGMAFVPFLLVTWSSAAFIISYVVAVLSGHVNPFLPYISDTGTTPPESGIFGFMINFSAFLGAATMYTRYKIVQKQNQTCYFSTPVFNLVSLVLGLVGCFGMGIVANFQ

SEQ ID NO: 71381 - protein, 47 aa, Homo sapiens
MHILEETSAEPSLQAKQLKLKRARLADDLNEKIAQRPGPMELVEKNI

SEQ ID NO: 71382 - protein, 207 aa, Homo sapiens
  MOD_RES (1)..(1): Any amino acid
XSKTDTGIVTVEQSPSSSKLKVMQTDESNKETANLQERSISNDDGEEKIVTSVRRRGRKPKRSLTVSDDAESSEPERKRQKSVSDPVEDKKEQESDEEEEEEEEDEPSGATTRSTTRSEAQRKQHSKPSARATSKLGSPDTVSPRNRQKLAKEKLPTSEKVSNSPPLGRSKTQLSPSIKRKREVSPPGARTRGQQRVEEAPVKKAKR

SEQ ID NO: 71383 - protein, 455 aa, Homo sapiens
MSVSVLSPSRRLGGVSGILQVTSLLILLLLLIKAAQLYLHRQWLLKALQQFPCPPSHWLFGHIQEFQHDQELQRIQERVKTFPSACPYWIWGGKVRVQLYDPDYMKVILGRSDPKSHGSYKFLAPRIGYGLLLLNGQTWFQHRRMLTPAFHNDILKPYVGLMADSVRVMLDKWEELLGQDSPLEVFQHVSLMTLDTIMKSAFSHQGSIQVDRNSQSYIQAISDLNSLVFCCMRNAFHENDTIYSLTSAGRWTHRACQLAHQHTDQVIQLRKAQLQKEGELEKIKRKRHLDFLDILLLAKMENGSILSDKDLRAEVDTFMFEGHDTTASGISWILYALATHPKHQERCREEIHGLLGDGASITWNHLDQMPYTTMCIKEALRLYPPVPGIGRELSTPVTFPDGRSLPKGIMVLLSIYGLHHNPKVWPNLEVFDPSRFAPGSAQHSHAFLPFSGGSR

SEQ ID NO: 71384 - protein, 119 aa, Homo sapiens
MPGVGVPAAGSRHCPGAEGRGRPRTRAEPPPRLRRRPGPARSGRRGGDDPQDENKIGVDGIQQFCDDLSLDPASISVLVIAWKFRAATQCEFSRKEFLDGMTELGCDSMEKLKALLPRL

SEQ ID NO: 71385 - protein, 47 aa, Homo sapiens
  MOD_RES (1)..(1): Any amino acid
XRTKAAGCAERRPLQPRTEAAAAPAGRGTVKTVVCKAETPACMESAF

SEQ ID NO: 71386 - protein, 100 aa, Homo sapiens
MKATIILLLLAQVSWAGPFQQRGLFDFMLEDEASGIGPEVPDDRDFEPSLGPVCPFRCQCHLRVVQCSDLEKFGLEIPRALHLEDKSPERLKLSGWAKGE

SEQ ID NO: 71387 - protein, 104 aa, Homo sapiens
MKSCDDEDDYSLRGLLPSEGIVHLHSETKPKTKNIDPVNKVQNKLHSANKGRKTNSSVKLKYSDVQTADDVAIPEDFSDFSLAKTISKIEGQLEEEGLPEYIDD

SEQ ID NO: 71388 - protein, 99 aa, Homo sapiens
MAAAAAEQQQFYLLLGNLLSPDNVVRKQAEETYENIPGQSKITFLLQAIRNTTAAEEARQMAAVLLRRLLSSAFDEVYPALPSDVQTAIKSELLMIIQM

SEQ ID NO: 71389 - protein, 1948 aa, Homo sapiens
MMATRRTGLSEGDGDKLKACEVSKNKDGKEQSETVSLSEDETFSWPGPKTVTLKRTSQGFGFTLRHFIVYPPESAIQFSYKDEENGNRGGKQRNRLEPMDTIFVKQVKEGGPAFEAGLCTGDRIIKVNGESVIGKTYSQVIALIQNSDTTLELSVMPKDEDILQVAYSQDAYLKGNEAYSGNARNIPEPPPICYPWLPSAPSAMAQPVEISPPDSSLSKQQTSTPVLTQPGRAYRMEIQVPPSPTDVAKSNTAVCVCNESVRTVIVPSEKVVDLLSNRNNHTGPSHRTEEVRYGVSEQTSLKTVSRTTSPPLSIPTTHLIHQPAGSRSLEPSGILLKSGNYSGHSDGISSSRSQAVEAPSVSVNHYSPNSHQHIDWKNYKTYKEYIDNRRLHIGCRTIQERLDSLRAASQSTTDYNQVVPNRTTLQGRRRSTSHDRVPQSVQIRQRSVSQERLEDSVLMKYCPRSASQGALTSPSVSFSNHRTRSWDYIEGQDETLENVNSGTPIPDSNGEKKQTYKWSGFTEQDDRRGICERPRQQEIHKSFRGSNFTVAPSVVNSDNRRMSGRGVGSVSQFKKIPPDLKTLQSNRNFQTTCGMSLPRGISQDRSPLVKVRSNSLKAPSTHVTKPSFSQKSFVSIKDQRPVNHLHQNSLLNQQTWVRTDSAPDQQVETGKSPSLSGASAKPAPQSSENAGTSDLELPVSQRNQDLSLQEAETEQSDTLDNKEAVILREKPPSGRQTPQPLRHQSYILAVNDQETGSDTTCWLPNDARREVHIKRMEERKASSTSPPGDSLASIPFIDEPTSPSIDHDIAHIPASAVISASTSQVPSIATVPPCLTTSAPLIRRQLSHDHESVGPPSLDAQPNSKTERSKSYDEGLDDYREDAKLSFKHVSSLKGIKIADSQKSSEDSGSRKDSSSEVFSDAAKEGWLHFRPLVTDKGKRVGGSIRPWKQMYVVLRGHSLYLYKDKREQTTPSEEEQPISVNACLIDISYSETKRKNVFRLTTSDCECLFQAEDRDDMLAWIKTIQESSNLNEEDTGVTNRDLISRRIKEYNNLMSKAEQLPKTPRQSLSIRQTLLGAKSEPKTQSPHSPKEESERKLLSKDDTSPPKDKGTWRKGIPSIMRKTFEKKPTATGTFGVRLDDCPPAHTNRYIPLIVDICCKLVEERGLEYTGIYRVPGNNAAISSMQEELNKGMADIDIQDDKWRDLNVISSLLKSFFRKLPEPLFTNDKYADFIEANRKEDPLDRLKTLKRLIHDLPEHHYETLKFLSAHLKTVAENSEKNKMEPRNLAIVFGPTLVRTSEDNMTHMVTHMPDQYKIVETLIQHHDWFFTEEGAEEPLTTVQEESTVDSQPVPNIDHLLTNIGRTGVSPGDVSDSATSDSTKSKGSWGSGKDQYSRELLVSSIFAAASRKRKKPKEKAQPSSSEDELDNVFFKKENVEQCHNDTKEESKKESETLGRKQKIIIAKENSTRKDPSTTKDEKISLGKESTPSEEPSPPHNSKHNKSPTLSCRFAILKESPRSLLAQKSSHLEETGSDSGTLLSTSSQASLARFSMKKSTSPETKHSEFLANVSTITSDYSTTSSATYLTSLDSSRLSPEVQSVAESKGDEADDERSELISEGRPVETDSESEFPVFPTALTSERLFRGKLQEVTKSSRRNSEGSELSCTEGSLTSSLDSRRQLFSSHKLIECDTLSRKKSARFKSDSGSLGDAKNEKEAPSLTKVFDVMKKGKSTGSLLTPTRGESEKQEPTWKTKIADRLKLRPRAPADDMFGVGNHKVNAETAKRKSIRRRHTLGGHRDATEISVLNFWKVHEQSGERESELSAVNRLKPKCSAQDLSISDWLARERLRTSTSDLSRGEIGDPQTENPSTREIATTDTPLSLHCNTGSSSSTLASTNRPLLSIPPQSPDQINGESFQNVSKNASSAANAQPHKLSETPGSKAEFHPCL

SEQ ID NO: 71390 - protein, 90 aa, Homo sapiens
MAEPDYIEDDNPELIRPQKLINPVKTSRNHQDLHRELLMNQKRGLAPQNKPELQKVMEKRKRDQVIKQKEEEAQKKKSDLEIELLKRQQK

SEQ ID NO: 71391 - protein, 308 aa, Homo sapiens
MVAERTHKAAATGARGPGELGAPGTVALVAARAERGARLPSPGSCGLLTLALCSLALSLLAHFRTAELQARVLRLEAERGEQQMETAILGRVNQLLDEKWKLHSRRRREAPKTSPGCNCPPGPPGQPGTRGFPGFPGPIGLDGKPGHPGPKGDMGLTGPPGQPGPQGQKGEKGQCGEYPHRLLPLLNSVRLAPPPVIKRRTFQGEQSQASIQGPPGPPGPPGPSGPLGHPGLPGPMGPPGLPGPPGPKGDPGIQGYHGRKGERGMPGMPGKHGAKGAPGIAVAGMKGEPGIPGTKGDPGAEGKPGPPG

SEQ ID NO: 71392 - protein, 115 aa, Homo sapiens
MAPAKKGGEKKKGRSAINEVVTREYTINIHKRIHGVGFKKRAPRALKEIRKFAMKEMGTPDVRIDTRLNKAVWAKGIRNVPYRIRVRLSRKRNEDEDSPNKLYTLVTYVPVTTFK

SEQ ID NO: 71393 - protein, 108 aa, Homo sapiens
MAAVDSFYLLYREIARSCNCYMEALALVGAWYTARKSITVICDFYSLIRLHFIPRLGSRADLIKQYGRWAVVSGATDGIGKAYAEELASRGLNIILISRNEEKLQVVA

SEQ ID NO: 71394 - protein, 333 aa, Homo sapiens
MPTAESEAKVKTKVRFEELLKTHSDLMREKKKLKKKLVRSEENISPDTIRSNLHYMKETTSDDPDTIRSNLPHIKETTSDDVSAANTNNLKKSTRVTKNKLRNTQLATENPNGDASVEEDKQGKPNKKVIKTVPQLTTQDLKPETPENKVDSTHQKTHTKPQPGVDHQKSEKANEGREETDLEEDEELMQAYQCHVTEEMAKEIKRKIRKKLKEQLTYFPSDTLFHDDKLSSEKRKKKKEVPVFSKAETSTLTISGDTVEGEQKKESSVRSVSSDSHQDDEISSMEQSTEDSMQDDTKPKPKKTKKKTKAASGSQWKCKHQLKTSLAAILPTY

SEQ ID NO: 71395 - protein, 635 aa, Homo sapiens
MTSQSSVISNSCVTMERLSHMMERKAWCSQESALSEEEEDTTRPLETVTFKDVAVDLTQEEWEQMKPAQRNLYRDVMLENYSNLVTVGCQVTKPDVIFKLEQEEEPWVMEEEMFGRHCPEPRRGENCCASEVMAEGLKFKDVVIYFSQKEWECLHSAQKDLYRDVMLENYGNLVLLGLSDTKPNVISLLEQKKEPWMVKRKETKEWCPDWEFGRETKNLSPKENIYEIRSPQQEKARVIREIRCQVERQQGHQEGHFRPAVIPFTSMQCTAHREYQWLHTGEKSCECRKCKNAFRYQSCPIQHEIIHNKEKEPECGECRKIFNSGSDLIKHQTLHESKKHSENNKCAFNHDSGITQPQSINTGEKPHKCKECGKAFRSSSQISQHQRMHLGEKPYKCRECGKAFPSTAQLNLHQRIHTDEKYYESKACGKAFTRPSHLFRHQRIHTGEKPHKCKECGKAFRYDTQLSLHQIIHTGERRYECRECGKVYSCASQLSLHQRIHTGEKPHECKECGKAFISDSHLIRHQSVHTGEKPCKCKECGKSFRRGSELTRHQRAHTGEKPYECKECEKAFTCSTELVRHQKVHTGERPHKCKECGKAFIRRSELTHHERSHTGEKPYECKECGKPFGGGSELS

SEQ ID NO: 71396 - protein, 127 aa, Homo sapiens
MAAAVPDEAVARDVQRLLVQFQDEGGQLLGSPFDVPVDITPDRLQLVCNALLAQEDPLPLAFFVHDAEIVSSLGKTLESQAVETEKVLDIIYQPQAIFRVRAVTRCTSSLEGHSEAVISVAFSPTGK

SEQ ID NO: 71397 - protein, 252 aa, Homo sapiens
MINDMTNVEDEHLQHQFHRIYIHRYENVSILFADVKGFTNLSTTLSAQELVRMLNELFARFDRLAHEHHCLRIKILGDCYYCVSGLPEPRQDHAHCCVEMGLSMIKTIRYVRSRTKHDVDMRIGIHSGSVLCGVLGLRKWQFDVWSWDVDIANKLESGGIPGRIHISKATLDCLNGDYNVEEGHGKERNEFLRKHNIETYLIKQPEDSLLSLPEDIVKESVSSSDRRNSGATFTEGSWSPELPFDNIVGKQN

SEQ ID NO: 71398 - protein, 1111 aa, Homo sapiens
MAPKHKSSDAGNLDRPKRSRKVLPLSEKVKVLDLIRKDKKSYAEVAKIYGKNESSIREIVKKEKEIRASFAVSPPTAKVTATVRDKCLVKMEQALHLWVEEMNRKRVPIDSNMLRQKALSLYQDFCKGCSETDTKPFTASKGWLHRFRHRFSHHYKKKKKGIMAQVAVSTLPVEEESSSETRMVVTFLVSALESMCKELAKSKAEVACIAVYETDVFVVGTERGCAFVNARTDFQKDFAKYCVAEGLCEVKPPCPVNGMQVHSGETEILRKAVEDYFCFCYGKALGTTVMVPVPYEKMLRDQSAVVVQGLPEGVAFQHPENYDLATLKWILENKAGISFIINRPFLGPESQLGGPGMVTDAERSIVSPSESCGPINVKTEPMEDSGISLKAEAVSVKKESEDPNYYQYNMQGSHPSSTSNEVIEMELPMEDSTPLVPSEEPNEDPEAEVKIEGNTNSSSVTNSAAGVEDLNIVQVTVPDNEKERLSSIEKIKQLREQVNDLFSRKFGEAIGVDFPVKVPYRKITFNPGCVVIDGMPPGVVFKAPGYLEISSMRRILEAAEFIKFTVIRPLPGLELSNVGKRKIDQEGRVFQEKWERAYFFVEVQNIPTCLICKQSMSVSKEYNLRRHYQTNHSKHYDQYMERMRDEKLHELKKGLRKYLLGSSDTECPEQKQVFANPSPTQKSPVQPVEDLAGNLWEKLREKIRSFVAYSIAIDEITDINNTTQLAIFIRGVDENFDVSEELLDTVPMTGTKSGNEIFSRVEKSLKNFCIDWSKLVSVASTGTPAMVDANNGLVTKLKSRVATFCKGAELKSICCIIHPESLCAQKLKMDHVMDVVVKSVNWICSRGLNHSEFTTLLYELDSQYGSLLYYTEIKWLSRGLVLKRFFESLEEIDSFMSSRGKPLPQLSSIDWIRDLAFLVDMTMHLNALNISLQGHSQIVTQMYDLIRAFLAKLCLWETHLTRNNLAHFPTLKLASRNESDGLNYIPKIAELQTEFQKRLSDFKLYESELTLFSSPFSTKIDSVHEELQMEVIDLQCNTVLKTKYDKVGIPEFYKYLWGSYPKYKHHCAKILSMFGSTYICEQLFSIMKLSKTKYCSQLKDSQWDSVLHIAT

SEQ ID NO: 71399 - protein, 152 aa, Homo sapiens
MAEKALEAVGCGLGPGAVAMAVTLEDGAEPPVLTTHLKKVENHITEAQRFSHLPKRSAVDIEFVELSYSVREGPCWRKRGYKTLLKCLSGKFCRRELIGIMGPSGAGKSTFMNILAGYRESGMKGQILVNGRPRELRTFRKMSCYIMQDDML

SEQ ID NO: 71400 - protein, 263 aa, Homo sapiens
MAAASPLRDCQAWKDARLPLSTTSNEACKLFDATLTQYVKWTNDKSLGGIEGCLSKLKAADPTFVMGHAMATGLVLIGTGSSVKLDKELDLAVKTMVEISRTQPLTRREQLHVSAVETFANGNFPKACELWEQILQDHPTDMLALKFSHDAYFYLGYQEQMRDSVARIYPFWTPDIPLSSYVKGIYSFGLMETNFYDQAEKLAKEAPTLCLQHQHPTDNYWAGKAGCDGARSGNTWALCLQPQAGEGRRSQGRSRQAAGTGTA

SEQ ID NO: 71401 - protein, 122 aa, Homo sapiens
MALVSGISLDPEAAIGVTKRPPPKWVDGVDEIQYDVGRIKQKMKELASLHDKHLNRPTLDDSSEEEHAIEITTQEITQLFHRCQRAVQALPSRARACSEQEGRLLGNVVASLAQALQELSTS

SEQ ID NO: 71402 - protein, 635 aa, Homo sapiens
MGVDFDVKTFCHNLRATKPPYECPVETCRKVYKSYSGIEYHLYHYDHDNPPPPQQTPLRKHKKKGRQSRPANKQSPSPSEVSQSPGREVMSYAQAQRMVEVDLHGRVHRISIFDNLDVVSEDEEAPEEAPENGSNKENTETPAATPKSGKHKNKEKRKDSNHHHHHNVSASTTPKLPEVVYRELEQDTPDAPPRPTSYYRYIEKSAEELDEEVEYDMDEEDYIWLDIMNERRKTEGVSPIPQEIFEYLMDRLEKESYFESHNKGDPNALVDEDAVCCICNDGECQNSNVILFCDMCNLAVHQECYGVPYIPEGQWLCRRCLQSPSRAVDCALCPNKGGAFKQTDDGRWAHVVCALWIPEVCFANTVFLEPIDSIEHIPPARWKLTCYICKQRGSGACIQCHKANCYTAFHVTCAQQAGLYMKMEPVRETGANGTSFSVRKTAYCDIHTPPGSARRLPALSHSEGEEDEDEEEDEGKGWSSEKVKKAKAKSRIKMKKARKILAEKRAAAPVVSVPCIPPHRLSKITNRLTIQRKSQFMQRLHSYWTLKRQSRNGVPLLRRLQTHLQSQRNCDQVGRDSEDKNWALKEQLKSWQRLRHDLERARLLVELIRKREKLKRETAFFYVRSRFSRLPWRCS

SEQ ID NO: 71403 - protein, 121 aa, Homo sapiens
MAVTAVTATAASDRMESDSDSDKSSDNSGLKRKTPALKMSVSKRARKASSDLDQASVSPSEEENSESSSESEKTSDQDFTPEKKAAVRAPRRGPLGGRKKKKAPSASDSDSKADSDGAKPE

SEQ ID NO: 71404 - protein, 54 aa, Homo sapiens
MAQAHRTPQPRAAPSQPRVFKLVLLGSGSVGKSSLALRCVLHKGGGCGCHLSEA

SEQ ID NO: 71405 - protein, 151 aa, Homo sapiens
MAEIHNGGELCDFMENGEIFSEHSCLNAHMGTENTGDTYDCDEYGENFPMLHNSAPAGETLSVLNQCRKAFSLPPNVHQRTWIGDKSFEYSDCEEAFVDQSHLQANRITHNGETLYEQKQCGRAFTYSTSHAVSVKMHTVEKPYECKECGK

SEQ ID NO: 71406 - protein, 230 aa, Homo sapiens
MGEFNEKKTTCGTVCLKYLLFTYNCCFWLAGLAVMAVGIWTLALKSDYISLLASGTYLATAYILVVAGTVVMVTGVLGCCATFKERRNLLRLYFILLLIIFLLEIIAGILAYAYYQQLNTELKENLKDTMTKRYHQPGHEAVTSAVDQLQQEFHCCGSNNSQDWRDSEWIRSQEAGGRVVPDSCCKTVVALCGQRDHASNIYKVEGGCITKLETFIQEHLRVIGAVGIGI

SEQ ID NO: 71407 - protein, 103 aa, Homo sapiens
  MOD_RES (1)..(1): Any amino acid
XLWITLSLLQTGLAEPERCNFTLAESKASSHSVSIQWRILGSPCNFSLIYSSDTLGAALCPTFRIDNTTYGCNLQDLQAGTIYNFRIISLDEERTVVLQTGKG

SEQ ID NO: 71408 - protein, 46 aa, Homo sapiens
MELFQAKDHYILQQGERALWCSRRDGGLQLRPATLQDTCGILFFSY

SEQ ID NO: 71409 - protein, 1286 aa, Homo sapiens
MAEAGLRGWLLWALLLRLAQSEPYTTIHQPGYCAFYDECGKNPELSGSLMTLSNVSCLSNTPARKITGDHLILLQKICPRLYTGPNTQACCSAKQLVSLEASLSITKALLTRCPACSDNFVNLHCHNTCSPNQSLFINVTRVAQLGAGQLPAVVAYEAFYQHSFAEQSYDSCSRVRVPAAATLAVGTMCGVYGSALCNAQRWLNFQGDTGNGLAPLDITFHLLEPGQAVGSGIQPLNEGVARCNESQGDDVATCSCQDCAASCPAIARPQALDSTFYLGQMPGSLVLIIILCSVFAVVTILLVGFRVAPARDKSKMVDPKKGTSLSDKLSFSTHTLLGQFFQGWGTWVASWPLTILVLSVIPVVALAAGLVFTELTTDPVELWSAPNSQARSEKAFHDQHFGPFFRTNQVILTAPNRSSYRYDSLLLGPKNFSGILDLDLLLELLELQERLRHLQVWSPEAQRNISLQDICYAPLNPDNTSLYDCCINSLLQYFQNNRTLLLLTANQTLMGQTSQVDWKDHFLYCANAPLTFKDGTALALSCMADYGAPVFPFLAIGGYKGKDYSEAEALIMTFSLNNYPAGDPRLAQAKLWEEAFLEEMRAFQRRMAGMFQVTFMAERSLEDEINRTTAEDLPIFATSYIVIFLYISLALGSYSSWSRVMVDSKATLGLGGVAVVLGAVMAAMGFFSYLGIRSSLVILQVVPFLVLSVGADNIFIFVLEYQRLPRRPGEPREVHIGRALGRVAPSMLLCSLSEAICFFLGALTPMPAVRTFALTSGLAVILDFLLQMSAFVALLSLDSKRQEASRLDVCCCVKPQELPPPGQGEGLLLGFFQKAYAPFLLHWITRGVVVGAPVYFVTTLGYNFSSEAGMNAICSSAGCNNFSFTQKIQYATEFPEQSYLAIPASSWVDDFIDWLTPSSCCRLYISGPNKDKFCPSTVNSLNCLKNCMSITMGSVRPSVEQFHKYLPWFLNDRPNIKCPKGGLAAYSTSVNLTSDGQVLASRFMAYHKPLKNSQDYTEALRAARELAANITADLRKVPGTDPAFEVFPYTITNVFYEQYLTILPEGLFMLSLCLVPTFAVSCLLLGLDLRSGLLNLLSIVMILVDTVGFMALWGISYNAVSLINLVSAVGMSVEFVSHITRSFAISTKPTWLERAKEATISMGSAVFAGVAMTNLPGILVLGLAKAQLIQIFFFRLNLLITLLGLLHGLVFLPVILSYVGPDVNPALALEQKRAEEAVAAVMVASCPNHPSRVSTADNIYVNHSFEGSIKGAGAISNFLPNNGRQF

SEQ ID NO: 71410 - protein, 556 aa, Homo sapiens
MSKGILQVHPPICDCPGCRISSPVNRGRLADKRTVALPAARNLKKERTPSFSASDGDSDGSGPTCGRRPGLKQEDGPHIRIMKRSQDGNLPTLISSVHRSRHLVMPEHQSRCEFQRGSLEIGLRPAGDLLGKRLGRSPRISSDCFSEKRARSESPQAEALLLPRELGPSMAPEDHYRRLVSALSEASTFEDPQRLYHLGLPSHGYGFLPPAQAEMFAWQQELLRKQNLARLELPADLLRQKELESARPQLLAPETALRPNDGAEELQRRGALLVLNHGAAPLLALPPQGPPGSGPPTPSRDSARRAPRKGGPGPASARPSESKEMTGARLWAQDGSEDEPPKDSDGEDPETAAVGCRGPTPGQAPAGGAGAEGKGLFPGSTLPLGFPYAVSPYFHTGAVGGLSMDGEEAPAPEDVTKWTVDDVCSFVGGLSGCGEYTRVFREQGIDGETLPLLTEEHLLTNMGLKLGPALKIRAQVARRLGRVFYVASFPVALPLQPPTLRAPERELGTGEQPLSPTTATSPYGGGHALAGQTSPKQENGTLALLPGAPDPSQPLC

SEQ ID NO: 71411 - protein, 708 aa, Homo sapiens
MSKRLRSSEVCADCSGPDPSWASVNRGTFLCDECCSVHRSLGRHISQVRHLKHTPWPPTLLQMVETLYNNGANSIWEHSLLDPASIMSGRRKANPQDKVHPNKAEFIRAKYQMLAFVHRLPCRDDDSVTAKDLSKQLHSSVRTGNLETCLRLLSLGAQANFFHPEKGNTPLHVASKAGQILQAELLAVYGADPGTQDSSGKTPVDYARQGGHHELAERLVEIQYELTDRLAFYLCGRKPDHKNGQHFIIPQMADSLDLSELAKAAKKKLQSLSNHLFEELAMDVYDEVDRRETDAVWLATQNHSALVTETTVVPFLPVNPEYSSTRNQGRQKLARFNAHEFATLVIDILSDAKRRQQGSSLSGSKDNVELILKTINNQHSVESQDNDQPDYDSVASDEDTDLETTASKTNRQKLQTLQSENSNLRKQATTNVYQVQTGSEYTDTSNHSSLKRRPSARGSRPMSMYETGSGQKPYLPMGEASRPEESRMRLQPFPAHIGRSALVTSSSSLPSFPSTLSWSRDESARRASRLEKQNSTPESDYDNTPNDMEPDGMGSSRKGRQRSMVWPGDGLVPDTAEPHVAPSPTLPSTEDVIRKTEQITKNIQELLRAAQENKHDSYIPCSERIHVAVTEMAALFPKKPKSDMVRTSLRLLTSSAYRLQSECKKTLPGDPGSPTDVQLVTQQVIQCAYDIAKAAKQLVTITTKENNN

SEQ ID NO: 71412 - protein, 27 aa, Homo sapiens
MLLESVLIFFNLLAVLSYLKFFNCQKH

SEQ ID NO: 71413 - protein, 146 aa, Homo sapiens
MSQEGDYGRWTISSSDESEEEKPKPDKPSTSSLLCARQGAANEPRYTCSEAQKAAHKRKISPVKFSNTDSVLPPKRQKSGSQEDLGWCLSSSDDELQPEMPQKQAEKVVIKKEKDISAPNDGTAQRTENHGAPACHRLKEEEDEYE

SEQ ID NO: 71414 - protein, 371 aa, Homo sapiens
MSKSKVDNQFYSVEVGDSTFTVLKRYQNLKPIGSGAQGIVCAAYDAVLDRNVAIKKLSRPFQNQTHAKRAYRELVLMKCVNHKNIISLLNVFTPQKTLEEFQDVYLVMELMDANLCQVIQMELDHERMSYLLYQMLCGIKHLHSAGIIHRDLKPSNIVVKSDCTLKILDFGLARTAGTSFMMTPYVVTRYYRAPEVILGMGYKENVDIWSVGCIMGEMVRHKILFPGRDYIDQWNKVIEQLGTPCPEFMKKLQPTVRNYVENRPKYAGLTFPKLFPDSLFPADSEHNKLKASQARDLLSKMLVIDPAKRISVDDALQHPYINVWYDPAEVEAPPPQIYDKQLDEREHTIEEWKAVSYRTYLQGSNEFRRKD

SEQ ID NO: 71415 - protein, 330 aa, Homo sapiens
MSSMVVTANGNDSKKFKGEDKMDGAPSRVLHIRKLPGEVTETEVIALGLPFGKVTNILMLKGKNQAFLELATEEAAITMVNYYSAVTPHLRNQPIYIQYSNHKELKTDNTLNQRAQAVLQAVTAVQTANTPLSGTTVSESAVTPAQSPVLRIIIDNMYYPVTLDVLHQIFSKFGAVLKIITFTKNNQFQALLQYGDPVNAQQAKLALDGQNIYNACCTLRIDFSKLVNLNVKYNNDKSRDYTRPDLPSGDGQPALDPAIAAAFAKETSLLGLPVAAVPGALSPLAIPNAAAAAAAAAAGRVGMPGVSAGGNTVLLVSNLNEEVFMEMCSV

SEQ ID NO: 71416 - protein, 11 aa, Homo sapiens
MLPLEKAFASP

SEQ ID NO: 71417 - protein, 1230 aa, Homo sapiens
MPSSLMLEVPALADFNRAWTELTDWLSLLDQVIKSQRVMVGDLEDINEMIIKQKATMQDLEQRRPQLEELITAAQNLKNKTSNQEARTIITDRIERIQNQWDEVQEHLQNRRQQLNEMLKDSTQWLEAKEEAEQVLGQARAKLESWKEGPYTVDAIQKKITETKQLAKDLRQWQTNVDVANDLALKLLRDYSADDTRKVHMITENINASWRSIHKRVSEREAALEETHRLLQQFPLDLEKFLAWLTEAETTANVLQDATRKERLLEDSKGVKELMKQWQDLQGEIEAHTDVYHNLDENSQKILRSLEGSDDAVLLQRRLDNMNFKWSELRKKSLNIRSHLEASSDQWKRLHLSLQELLVWLQLKDDELSRQAPIGGDFPAVQKQNDVHRAFKRELKTKEPVIMSTLETVRIFLTEQPLEGLEKLYQEPRELPPEERAQNVTRLLRKQAEEVNTEWEKLNLHSADWQRKIDETLERLRELQEATDELDLKLRQAEVIKGSWQPVGDLLIDSLQDHLEKVKALRGEIAPLKENVSHVNDLARQLTTLGIQLSPYNLSTLEDLNTRWKLLQVAVEDRVRQLHEAHRDFGPASQHFLSTSVQGPWERAISPNKVPYYINHETQTTCWDHPKMTELYQSLADLNNVRFSAYRTAMKLRRLQKALCLDLLSLSAACDALDQHNLKQNDQPMDILQIINCLTTIYDRLEQEHNNLVNVPLCVDMCLNWLLNVYDTGRTGRIRVLSFKTGIISLCKAHLEDKYRYLFKQVASSTGFCDQRRLGLLLHDSIQIPRQLGEVASFGGSNIEPSVRSCFQFANNKPEIEAALFLDWMRLEPQSMVWLPVLHRVAAAETAKHQAKCNICKECPIIGFRYRSLKHFNYDICQSCFFSGRVAKGHKMHYPMVEYCTPTTSGEDVRDFAKVLKNKFRTKRYFAKHPRMGYLPVQTVLEGDNMETPASSPQLSHDDTHSRIEHYASRLAEMENSNGSYLNDSISPNESIDDEHLLIQHYCQSLNQDSPLSQPRSPAQILISLESEERGELERILADLEEENRNLQAEYDRLKQQHEHKGLSPLPSPPEMMPTSPQSPRDAELIAEAKLLRQHKGRLEARMQILEDHNKQLESQLHRLRQLLEQPQAEAKVNGTTVSSPSTSLQRSDSSQPMLLRVVGSQTSDSMGEEDLLSPPQDTSTGLEEVMEQLNNSFPSSRGHNVGSLFHMADDLGRAMESLVSVMTDEEGAE

SEQ ID NO: 71418 - protein, 22 aa, Homo sapiens
MPDVKESVPPKYPGDSEGRERN

SEQ ID NO: 71419 - protein, 98 aa, Homo sapiens
MERLTLPLGGAAAVDEYLEYRRIVGEDDGGKLFTPEEYEEYKRKVLPLRLQNRLFVSWRSPTGMDCKLVGPETLCFCTHSRDGGFHRVSQDGLDLLTL

SEQ ID NO: 71420 - protein, 57 aa, Homo sapiens
MSHPSWLPPKSTGEPLGHVPARMETTHSFGNPSISVSTQQPPKKFAPVVAPKPKYNP

SEQ ID NO: 71421 - protein, 119 aa, Homo sapiens
  MOD_RES (1)..(1): Any amino acid
XGGDKDLASPHLGLGSPRVSRASSPEGRHLPSPQLGTKAPVARPRMSAQEQLERMRRNQECGRPFPRPTSPRLLTLGRTLSPARRQPDVEQRSKEHHPLLADFRRSPGAGSQPLPSPGY

SEQ ID NO: 71422 - protein, 100 aa, Homo sapiens
  MOD_RES (1)..(1): Any amino acid
XEGTLGFFIASDAKEVKRAFFYCKACHDDITDPKRIKKCGCKRLKVAARSRYSKDPFEFKKETPNSRLVTEPGEGRLGPIPIFNNYPAALNILLYHAELS

SEQ ID NO: 71423 - protein, 173 aa, Homo sapiens
MFKRMAEFGPDSGGRVKGVTIVKPIVYGNVARYFGKKREEDGHTHQWTVYVKPYRNEVTLYHLLKLFQSDTNAMLGKKTVVSEFYDEMIFQDPTAMMQQLLTTSRQLTLGAYKHETEFAELEVKTREKLEAAKKKTSFEIAELKERLKASRETINCLKNEIRKLEEDDQAKDI

SEQ ID NO: 71424 - protein, 512 aa, Homo sapiens
QAVAAVEALEREPGRPWQWLKHCEDPVVIDDGDSPLDQEQEQLPVEPHSDLAKNQDAQPITLAQCLGLPSRPPSQLSGDPVLQDAFLLQEENVRDTQQVTTLQLPPRIFQFNNHRSNGYILEMLGSGGKKAQIISVLSQIYVSRVSPFKDMILCFSEEDWSLLDPAQTGFYGEFIIGEDYGVSMPPNDLAAQPDLSQGEENEPRVPELQDLQGKEVPQVSYLDSPSLQPFQVEERRKREELQVPEFQACPQTVVPQNTYPAGGNPRSLENSLDEEVTIEIVLSSSGDEDSQHGPYCTEELGSPTEKQRSLPASHRSSTEAGGEVQTSKKSYVCPNCGKIFRWRVNFIRHLRSRREQEKPHECSVCGELFSDSEDLDGHLESHEAQKPYRCGACGKSFRLNSHLLSHRRIHLQPDRLQPVEKREQAASEDADKGPKEPLENGKAKLSFQCCECGKAFQRHDHLARHRSHFHLKDKARPFQCRYCVKSFTQNYDLLRHERLHMKRRSKQALNSY

SEQ ID NO: 71425 - protein, 233 aa, Homo sapiens
SEEEEAAGTEGDAQEWPGAGSSADQDDEEGVVKFQPSLWPWDSVRNNLRSALTEMCVLYDVLSIVRDKKFMTLDPVSQDALPPKQNPQTLQLISKKKSLAGAAQILLKGAERLTKSVTENQENKLQRDFNSELLRLRQHWKLRKVGDKILGDLSYRSAGSLFPHHGTFEVIKNTDLDLDKKIPEDYCPLDVQIPSDLEGSAYIKVSIQKQAPDIGDLGTVNLFKRPLPKSKPG

SEQ ID NO: 71426 - protein, 175 aa, Homo sapiens
LLLDKHMGMKRYEVAGRRVLFYFDEIPSRCLTCVRFRALRECVVGRTSALPVSVYDYYEPAFEATRFYNVSTHSPLARELCAGPACNEVERAPARGPGWFPGESGPAVAPEEGAAIARCGCDHDCGAQGNPVCGSDGVVYASACRLREAACRQAAPLEPAPPSCCALAGREAEWS

SEQ ID NO: 71427 - protein, 1521 aa, Homo sapiens
VTDIMLILLVENISGLSNDDFQVEIIRDFDVAVVTFQKHIDTIRFVDDCTKHHSIKQLQLSPRLLEVTNTIRVENLPPGADDYSLKLFFENPYNGGGRVANVEYFPEESSALIEFFDRKVLDTIMATKLDFNKMPLSVFPYYASLGTALYGKEKPLIKLPAPFEESLDLPLWKFLQKKNHLIEEINDEMRRCHCELTWSQLSGKVTIRPAATLVNEGRPRIKTWQADTSTTLSSIRSKYKVNPIKVDPTMWDTIKNDVKDDRILIEFDTLKEMVILAGKSEDVQSIEVQVRELIESTTQKIKREEQSLKEKMIISPGRYFLLCHSSLLDHLLTECPEIEICYDRVTQHLCLKGPSADVYKAKCEIQEKVYTMAQKNIQVSPEIFQFLQQVNWKEFSKCLFIAQKILALYELEGTTVLLTSCSSEALLEAEKQMLSALNYKRIEVENKEVLHGKKWKGLTHNLLKKQNSSPNTVIINELTSETTAEVIITGCVKEVNETYKLLFNFVEQNMKIERLVEVKPSLVIDYLKTEKKLFWPKIKKVNVQVSFNPENKQKGILLTGSKTEVLKAVDIVKQVWDSVCVKSVHTDKPGAKQFFQDKARFYQSEIKRLFGCYIELQENEVMKEGGSPAGQKCFSRTVLAPGVVLIVQQGDLARLPVDVVVNASNEDLKHYGGLAAALSKAAGPELQADCDQIVKREGRLLPGNATISKAGKLPYHHVIHAVGPRWSGYEAPRCVYLLRRAVQLSLCLAEKYKYRSIAIPAISSGVFGFPLGRCVETIVSAIKENFQFKKDGHCLKEIYLVDVSEKTVEAFAEAVKTVFKATLPDTAAPPGLPPAAAGPGKTSWEKGSLVSPGGLQMLLVKEGVQNAKTDVVVNSVPLDLVLSRGPLSKSLLEKAGPELQEELDTVGQGVAVSMGTVLKTSSWNLDCRYVLHVVAPEWRNGSTSSLKIMEDIIRECMEITESLSLKSIAFPAIGTGNLGFPKNIFAELIISEVFKFSSKNQLKTLQEVHFLLHPSDHENIQAFSDEFARRANGNLVSDKIPKAKDTQGFYGTVSSPDSGVYEMKIGSIIFQVASGDITKEEADVIVNSTSNSFNLKAGVSKAILECAGQNVERECSQQAQQRKNDYIITGGGFLRCKNIIHVIGGNDVKSSVSSVLQECEKKNYSSICLPAIGTGNAKQHPDKVAEAIIDAIEDFVQKGSAQSVKKVKVVIFLPQVLDVFYANMKKREGTQLSSQQSVMSKLASFLGFSKQSPQKKNHLVLEKKTESATFRVCGENVTCVEYAISWLQDLIEKEQCPYTSEDECIKDFDEKEYQELNELQKKLNINISLDHKRPLIKVLGISRDVMQARDEIEAMIKRVRLAKEQESRADCISEFIEWQYNDNNTSHCFNKMTNLKLEDARREKKKTVDVKINHRHYTVNLNTYTATDTKGHSLSVQRLTKSKVDIPAHWSDMKQQNFCVVELLPSDPEYNTVASKFNQTCSHFRIEKVSLLLECSFWMVEISSVMVLYKIHFHSLPITFF

SEQ ID NO: 71428 - protein, 66 aa, Homo sapiens
MHSRGREIVVLLNPWSINEAVSSYCTYFIKQDSKSFGHSTSLELSPDFHLCSDPPLHSILTGTQAL

SEQ ID NO: 71429 - protein, 77 aa, Homo sapiens
MAKLIALTLLGMGLALFRNHQSSYQTRLNALREVQPVELPNCNLVKGIETGSEDLEILPNGLAFISSSWKNTSDGPE

SEQ ID NO: 71430 - protein, 274 aa, Homo sapiens
METAAAVVKLERLEAALTRALRRLQPGSVAPGNGEEVISFATVTDSTSAYSSLLTFHLSTPRSHHLYHARLWLHVLPTLPGTLCLRIFRWGPRRRRQGSRTLLAEHHITNLGWHTLTLPSSGLRGEKSGVLKLQLDCRPLEGNSTVTGQPRRLLDTAGHQQPFLELKIRANEPGAGRARRRTPTCEPATPLCCRRDHYVDFQELGWRDWILQPEGYQLNYCSGQCPPHLAGSPGIAASFHSAVFSLLKANNPWPASTSCCVPTARRPLSLLYLD

SEQ ID NO: 71431 - protein, 71 aa, Homo sapiens
  MOD_RES (1)..(1): Any amino acid
XVLGCAISCEKKQDHIQRIMTLEESVQHVVMEAIQELMTKDTPDSLSPETYGNFDSQPCRSRGARLKIPFC

SEQ ID NO: 71432 - protein, 103 aa, Homo sapiens
MLLLPPRPPHPRSSSPEAMDPPPPKAPPFPKAEGPSSTPSSAAGPRPPRLGRHLLIDANGVPYTYTVQLEEEPRGPPQREAPPGEPGPRKGYSCPECARVFAS

SEQ ID NO: 71433 - protein, 87 aa, Homo sapiens
  MOD_RES (1)..(1): Any amino acid
XFPAQLGSCWSSSGLWFSDCLSDAPPSVSVAGEGSFQESFPVCRPRTSGRGHPRSPCSLLAAPFGYKWKNSVKYSNVGEMKIIKSLM

SEQ ID NO: 71434 - protein, 538 aa, Homo sapiens
QADDPDDGPVPGTPGLPGSTGNPKSEEPEVPDQEGLQRITGLSPGRSALIVAVLCYINLLNYMDRFTVAGVLPDIEQFFNIGDSSSGLIQTVFISSYMVLAPVFGYLGDRYNRKYLMCGGIAFWSLVTLGSSFIPGEHFWLLLLTRGLVGVGEASYSTIAPTLIADLFVADQRSRMLSIFYFAIPVGSGLGYIAGSKVKDMAGDWHWALRPSVSQVTPGLGVVAVLLLFLVVREPPRGAVERHSDLPPLNPTSWWADLRALARNPSFVLSSLGFTAVAFVTGSLALWAPAFLLRSRVVLGETPPCLPGDSCSSSDSLIFGLITCLTGVLGVGLGVEISRRLRHSNPRADPLVCATGLLGSAPFLFLSLACARGSIVATYIFIFIGETLLSMNWAIVADILLYVVIPTRRSTAEAFQIVLSHLLGDAGSPYLIGLACCTKQGPQTTGLWCPSGAAPPACPWPVCSSERLPLTYLHICHSWPWAHPTKGLGLTPWPGPASRGTLGRVPAPRHYLGSSGEEVGVQEGDPSPQGQPQGLGAI

SEQ ID NO: 71435 - protein, 94 aa, Homo sapiens
MLAGDPLLSEDPEPDKTPTATVTNEASCWSGPSPEGPVPLTGEELDLRLIRTKGGVDAALEYAKTWSRYAKELLAWTEKRASYELEFAKSTMKI

SEQ ID NO: 71436 - protein, 507 aa, Homo sapiens
MSTRTPLPTVNERDTENHTSHGDGRQEVTSRTSRSGARCRNSIASCADEQPHIGNYRLLKTIGKGNFAKVKLARHILTGREVAIKIIDKTQLNPTSLQKLFREVRIMKILNHPNIGEVFDYLVAHGRMKEKEARSKFRQIVSAVQYCHQKRIVHRDLKAENLLLDADMNIKIADFGFSNEFTVGGKLDTFCGSPPYAAPELFQGKKYDGPEVDVWSLGVILYTLVSGSLPFDGQNLKELRERVLRGKYRIPFYMSTDCENLLKRFLVLNPIKRGTLEQIMKDRWINAGHEEDELKPFVEPELDISDQKRIDIMVGMGYSQEEIQESLSKMKYDEITATYLLLGRKSSELDASDSSSSSNLSLAKVRPSSDLNNSTGQSPHHKVQRSVSSSQKQRRYSDHAGPAIPSVVAYPKRSQTSTADSDLKEDGISSRKSSGSAVGGKGIAPASPMLGNASNPNKADIPERKKSSTVPSSNTASGGMTRRNTYVCSERTTADRHSVIQNGKENS

SEQ ID NO: 71437 - protein, 188 aa, Homo sapiens [sequence omitted]

SEQ ID NO: 71438 - protein, 32 aa, Homo sapiens
MAYGVPRKNTVKTILRGSCYNVLECCAPPGLE

SEQ ID NO: 71439 - protein, 71 aa, Homo sapiens
MASQSQGIQQLLQAEKRAAEKVSEARKRKNRRLKQAKEEAQAEIEQYRLQREKEFKAKEAAVGHHLFLLLL

SEQ ID NO: 71440 - protein, 51 aa, Homo sapiens
MENAGHPSADTPTATNYFLQYISSSLENSTNSADASSNKFVFGQNMSERVL

SEQ ID NO: 71441 - protein, 172 aa, Homo sapiens
MAHLISPLPSPTGTISAANSCPSSPRGAGSSGYKVGRVMPSDLNLMADNSQPENEKEASGGDSPKDDSKPPYSYAQLIVQAITMAPDKQLTLNGIYTHITKNYPYYRTADKGWQNSIRHNLSLNRYFIKVPRSQEEPGKGSFWRIDPASESKLIEQAFRKRRPRGVPCFRTP

SEQ ID NO: 71442 - protein, 152 aa, Homo sapiens
MFAPPTALPPPPPLTSGSLQVAGHPAGSTYSEQDILRQELNTRFLASQSADRGASLGPPPYLRTEFHQHQHQHQHTHQHTHQHTFTPFPHAIPPTAIMPTPAPPMFDKYPTKVDPFYRHSLFHSYPPAVSGIPPMIPPTGPFGSLQGAFQPK

SEQ ID NO: 71443 - protein, 69 aa, Homo sapiens
MNRIRIHVLPTNRGRITPVPRSQEPLSCAFTHRPCSHPRLEGQEFCIKHILEDKNAPFKQCSYISTKNG

SEQ ID NO: 71444 - protein, 132 aa, Homo sapiens
  MOD_RES (1)..(1): Any amino acid
XRKEHDPAEMLRVGRAELGGWKPSWEAIVKEVAAATGHTVVLVDQTEDILAKSKKGIEESLRKVAKKKFAENLKAGDEFVEKTLSTIATSTDAASVVHSTDLVVEAIVENLKVKNELFKRLDKFAAESLKHQ

SEQ ID NO: 71445 - protein, 124 aa, Homo sapiens
MAATASPQPLATEDADSENSSFYYYDYLDEVAFMLCRKDAVVSFGKVFLPVFYSLIFVLGLSGNLLLLMVLLRYVPRRRMVEIYLLNLAISNLLFLVTLPFWGISVAWHWVFGSFLCKMVSTLY

SEQ ID NO: 71446 - protein, 250 aa, Homo sapiens
MKYLRHRRPNATLILAIGAFTLLLFSLLVSPPTCKVQEQPPAIPEALAWPTPPTRPAPAPCHANTSMVTHPDFATQPQHVQNFLLYRHCRHFPLLQDVPPSKCAQPVFLLLVIKSSPSNYVRRELLRRTWGRERKVRGLQLRLLFLVGTASNPHEARKVNRLLELEAQTHGDILQWDFHDSFFNLTLKQVLFLQWQETRCANASFVLNGDDDVFAHTDNMVFYLQDHDPGRHLFVGQLIQNVGPIRAFWS

SEQ ID NO: 71447 - protein, 125 aa, Homo sapiens
MLLLLLSIIVLHVAVLVLLFVSTIVSQWIVGNGHATDLWQNCSTSSSGNVHHCFSSSPNEWLQSVQATMILSIIFSILSLFLFFCQLFTLTKGGRFYITGIFQILAGKLWMVKSMWKRGASKSAE

SEQ ID NO: 71448 - protein, 309 aa, Homo sapiens
  MOD_RES (1)..(1): Any amino acid
XPYSDGVLYGSPTAENVGKPTIIEITAYNRRTFETARHNLIINIMSAEDFPLPYQAEFFIKNMNVEEMLASEVLGDFLGAVKNVWQPERLNAINITSALDRGGRVPLPINDLKEGVYVMVGADVPFSSCLREVENPQNQLRCSQEMEPVITCDKKFRTQFYIDWCKISLVDKTKQVSTYQEVIRGEGILPDGGEYKPPSDSLKSRDYYTDFLITLAVPSAVALVLFLILAYIMCCRREGVIQLVHHSAIQKSTKELRDMSKNREIAWPLSTLPVFHPVTGEIIPPLHTDNYDSTNMPLMQTQQIPSRTQ

SEQ ID NO: 71449 - protein, 224 aa, Homo sapiens
MSRLRALLGLGLLVAGSRVPRIKSQTIACRSGPTWWGPQRLNSGGRWDSEVMASTVVKYLSQEEAQAVDQELFNEYQFSVDQLMELAGLSCATAIAKAYPPTSMSRSPPTVLVICGPGNNGGDGLVCARHLKLFGYEPTIYYPKRPNKPLFTALVTQCQKMDIPFLGEMPAEPMTIDELYELVVDAIFGFSFKGDVREPFHSILSVLKGLTVPIASIDIPSAGW

SEQ ID NO: 71450 - protein, 191 aa, Homo sapiens
AAAAPAEQAPRAKGRPRRSPESHRRSSSPERRSPGSPVCRADKAKSQQVRTSSTIRRTSSLDTITGPYLTGQWPRDPHVHYPSCMKDKATQIAKLRQQLQRSKQSSRHSKEKDRQSPLHGNHITISHTQATGSRSVPMPLSNISVPKSSVSRVPCNVEGISPELEKVFIKENNGKEEVSKPLDIPDGRRAP

SEQ ID NO: 71451 - protein, 157 aa, Homo sapiens
  MOD_RES (1)..(1): Any amino acid
XKKLKALEAMKNKQKSVTAKDSAKTTFTSITTNTINTSSDKTGGKKGAMKPCGLFLPFCTRDGTAGTPAISTTTTVEIRKSSVMTTEITSKVEKSPTTATGNSSCPSTETEEEKAKRLLYCSLCKVAVNSASQLEAHNSGEMQRFLFCFNSSAIIFL

SEQ ID NO: 71452 - protein, 106 aa, Homo sapiens
MGSQPPLGSPLSREEGEAPPPAPASEGRRRSRRVRLRGSCRHRPSFLGCRELAASAPARPAPASSERCSIFRLRKTTRAQWRLPHFFSSSCWSSRRKAGSVAFWMP

SEQ ID NO: 71453 - protein, 259 aa, Homo sapiens
MEEPEEPADSGQSLVPVYIYSPEYVSMCDSLAKIPKRASMVHSLIEAYALHKQMRDEASGFCYLNDAVLGILRLRRKFERILYVDLDLHHGDGVEDAFSFTSKVMTVSLHKFSPGFFPGTGDVSDVGLGKGRYYSVNVPIQDGIQDEKYYQICESVLKEVYQAFNPKAVVLQLGADTIAGDPMCSFNMTPVGIGKCLKYILQWQLATLILGGGGYNLANTARCWTYLTGVILGKTLSSEIPDHEVSKALTSPLFFKGKS

SEQ ID NO: 71454 - protein, 148 aa, Homo sapiens
MESTSQDRRATHVITIKPNETVLTAFPYRPHSSLLDFLKGEPRVLGATQILLALIIVGFGTIFALNYIGFSQRLPLVVLTGYPFWGALIGQGVTGMNVISSLVAITGITFTILSYRHQDKYCQMPSFEEICVFSRTLFIGILLILLII

SEQ ID NO: 71455 - protein, 122 aa, Homo sapiens
MARLILERFLQEHEETPPSKSIINSMLRDPSQIPDGVLANQVYQCIVNDCCYGPLVDCIKHAIGHEHEVLLRDLLLEKNLSFLDEDQLRAKGYDKTPDFILQVPVAVEGHIIHWIESKASFG

SEQ ID NO: 71456 - protein, 148 aa, Homo sapiens
MNRGVPFRHLLLVLQLGPSKLNDRADSRRSLWDQGNFPLIIKNLKIEDSDTYICEVEDQKEEVQLLVFGLTANSDTHLLQGQSLTLTLESPPGSSPSVQCRSPRGKNIQGGKTLSVSQLELQDSGTWTCTVLQNQKKVEFKIDIVVLG

SEQ ID NO: 71457 - protein, 47 aa, Homo sapiens
MQCILTRVDFDLYYGGEAFSVEQPQSFTCPYCGKMGYTETSLQEHVT

SEQ ID NO: 71458 - protein, 71 aa, Homo sapiens
MILRPYQPCGTVKEFDTNFTYVQQSEFYLEPNIKYVFQVRCQETGKRYWQPWSSLFFHKTPETGLKEGSYC

SEQ ID NO: 71459 - protein, 29 aa, Homo sapiens
  MOD_RES (1)..(1): Any amino acid
XEKCDPYREGYADCATYLAAVPQGEASKE

SEQ ID NO: 71460 - protein, 619 aa, Homo sapiens
MPLAFCGSENHSAAYRVDQGVLNNGCFVDALNVVPHVFLLFITFPILFIGWGSQSSKVHIHHSTWLHFPGHNLRWILTFMLLFVLVCEIAEGILSDGVTESHHLHLYMPAGMAFMAAVTSVVYYHNIETSNFPKLLIALLVYWTLAFITKTIKFVKFLDHAIGFSQLRFCLTGLLVILYGMLLLVEVNVIRVRRYIFFKTPREVKPPEDLQDLGVRFLQPFVNLLSKGTYWWMNAFIKTAHKKPIDLRAIGKLPIAMRALTNYQRLCEAFDAQRKDIQGTQGARAIWQALSHAFGRRLVLSSTFRILADLLGFAGPLCIFGIVDHLGKENDVFQPKTQFLGVYFVSSQEFLANAYVLAVLLFLALLLQRTFLQASYYVAIETGINLRGAIQTKIYNKIMHLSTSNLSMGEMTAGQICNLVAIDTNQLMWFFFLCPNLWAMPVQIIVGVILLYYILGVSALIGAAVIILLAPVQYFVATKLSQAQRSTLEYSNERLKQTNEMLRGIKLLKLYAWENIFRTRVETTRRKEMTSLRAFAIYTSISIFMNTAIPIAAVLITFVGHVSFFKEADFSPSVAFASLSLFHILVTPLFLLSSVVRSTVKALVRGEGCLCASRAACKS

SEQ ID NO: 71461 - protein, 163 aa, Homo sapiens
IRKRHCFGTEVHNLDAKVDSGKTVKLNSPLEKINSFSPQKPPGHCSRCCCSTKQGNSQESSNTIKKDHTGKSKIPKIYFGTRTHKQIAQITRELRRTAYSGVPMTILSSRDHTCVHPEVVGNFNRNEKCMELLDGKNDIPTYLLTFLPSYLYLNKKYYHMAQS

SEQ ID NO: 71462 - protein, 80 aa, Homo sapiens
MMGLGNGRRSMKSPPLVLAALVACIIVLGFNYWIASSRSVDLQTRIMELEGRVRRAAAERGAVELKKNEFQGELEKQREQ

SEQ ID NO: 71463 - protein, 209 aa, Homo sapiens; identical to SEQ ID NO: 43167

SEQ ID NO: 71464 - protein, 46 aa, Homo sapiens
MECADVPLLTPSSKEMMSQALKATFSGFTKEQQRLGIPKDPRQWTE

SEQ ID NO: 71465 - protein, 748 aa, Homo sapiens
IAVAFTSKEVCFYDLLSKEEFACQYKLQGLKGTPICMDYWYDPLDANESILSFGDITGKVQAIAFTAALISLFERPASACEDGEATMTINWAELLSGCHKCCHILEHKLHQGDWVRQVTYNASLDAIISSTTSNTNSVVMAWREKSKKRLNMTSFNIAQGIHAFDYHSRLNLIATAGINNKVCLWNPYVVSKPVGVLWGHSASVIAVQFFVERKQLFSFSKDKVLRLWDIQHQLSIQRIACSFPKSQDFRCLFHFDEAHGRLFISFNNQLALLAMKSEASKRVKSHEKAVTCVLYNSILKQVISSDTGSTVSFWMIDTGQKIKQFTGCHGNAEISTMALDANETRLLTGSTDGTVKIWDFNGYCHHTLNVGQDGAVDISQILILKKKILVTGWERYDYASWKTIGRAITVFRPQNFNQFFIQPEEWKGGIQHHDDILCAAFLPPQTLVTGSYDGEIVLWNNSTENAHHVLHPDYQRLLKSKLDTKPQKLLSAGRSQPSHPMADHSTTGVRNFEIDTEGKNAVMRLCFLKARKNTAVTGGANLVSCGGSGYVRFWDIYKKQLLAEFLAHSGVGSIIMSTDKMNRYLTTGDLDGWLKIWNIEEESCLDPTEHSLLNKKNKDDSTYNVRPSEDINLDIKYKERSTCMKETQKPYYGEVIKKSFSTFRSLNIGALEELPEVNKPAFLLDPEKYFRKEPEEERPQILEAPSLFKTLKAVFDEKNLFPKEILHHERKAKQLCQEKSCEVKKNKK

SEQ ID NO: 71466 - protein, 158 aa, Homo sapiens
MVRKAVDALLTHCKSRKNNYGLLLNENESLFLMVVLWKIPSKELRVRLTLPHSIRSDSEDICLFTKDEPNSTPEKTEQFYRKLLNKHGIKTVSQIISLQTLKKEYKSYEAKLRLLSSFDFFLTDARIRRLLPSLIGRHFYQRKKVPVSVNLLSKNLSR

SEQ ID NO: 71467 - protein, 862 aa, Homo sapiens
MSEFRIHHDVNELLSLLRVHGGDGAEVYIDLLQKNRTPYVTTTVSAHSAKVKIAEFSRTPEDFLKKYDELKSKNTRNLDPLVYLLSKLTEDKETLQYLQQNAKERAELAAAAVGSSTTSINVPAAASKISMQELEELRKQLGSVATGSTLQQSLELKRKMLRDKQNKKNSGQHLPIFPAWVYERPALIGDFLIGAGISTDTALPIGTLPLASQESAVVEDLLYVLVGVDGRYVSAQPLAGRQSRTFLVDPNLDLSIRELVHRILPVAASYSAVTRFIEEKSSFEYGQVNHALAAAMRTLVKEHLILVSQLEQLHRQGLLSLQKLWFYIQPAMRTMDILASLATSVDKGECLGGSTLSLLHDRSFSYTGDSQAQELCLYLTKAASAPYFEVLEKWIYRGIIHDPYSEFMVEEHELRKERIQEDYNDKYWDQRYTIVQQQIPSFLQKMADKILSTGKYLNVVRECGHDVTCPVAKEIIYTLKERAYVEQIEKAFNYASKVLLDFLMEEKELVAHLRSIKRYFLMDQGDFFVHFMDLAEEELRKPVEDITPPRLEALLELALRMSTANTDPFKDDLKIDLMPHDLITQLLRVLAIETKQEKAMAHADPTELALSGLEAFSFDYIVKWPLSLIINRKALTRYQMLFRHMFYCKHVERQLCSVWISNKTAKQHSLHSAQWFAGAFTLRQRMLNFVQNIQYYMMFEVMEPTWHILEKNLKSASNIDDVLGHHTGFLDTCLKDCMLTNPELLKVFSKLMSVCVMFTNCMQHLAEHADTVQLVSGFEATINKFDKNFSAHLLDLLARLSIYSTSDCEHGMASVISRLDFNGFYTERLERLSAERSQKATPQVPVLRGPPAPAPRVAVTAQ

SEQ ID NO: 71468 - protein, 58 aa, Homo sapiens
MLSVRVAAAVVRALPRRAGLVSRNALGSSFIAARNFHASNTHLQKTGKLLFLSLRRTY

SEQ ID NO: 71469 - protein, 33 aa, Homo sapiens
MGSCCSCPDKDTVPDNHRNKFKVINVDDDGNEL

SEQ ID NO: 71470 - protein, 211 aa, Homo sapiens
  MOD_RES (1)..(1): Any amino acid
XAYTGLELTFFSGVYGTCIGATNKFGAEEKSLIGLSGIFIGIGEILGGSLFGLLSKNNRFGRNPVVLLGILVHFIAFYLIFLNMPGDAPIAPVKGTDSSAYIKSSKEVAILCSFLLGLGDSCFNTQLLSILGFLYSEDSAPAFAIFKFVQFLWVGNLRMAELSPERLSRLQSMSLQAAVKVCSRLHWGRACFPAHSYSCCRSQFLTDCQAK

SEQ ID NO: 71471 - protein, 151 aa, Homo sapiens
MARERGQLVFLEGLKSAVDVVFQAQKEPHPLQFLREANAGNLKPLFEFVREALKPVDSGEARWTYPVLLVDDLSVLLSLGMGAVAVLDFIHYCRATVCWELKGNMVVLVHDSGDAEDEENDILLNGLSHQSHLILRAEGLATGFCRDVHGQ

SEQ ID NO: 71472 - protein, 74 aa, Homo sapiens
  MOD_RES (1)..(1): Any amino acid
XCQLDANECEAKPCVNAKSCKNLIASYYCDCLPGWMGQNCDININDCLGQCQNDASCRAITVRETSMNVPATPV

SEQ ID NO: 71473 - protein, 37 aa, Homo sapiens
MASGAGGSWGRSPPQSAVPTESCAPTPTPQCHRDCGC

SEQ ID NO: 71474 - protein, 129 aa, Homo sapiens
MKRGRLPSSSEDSDDNGSLSTTWSQNSRSQHRRSSCSRHEDRKPSEVFRTDLITAMKLHDSYQLNPDEYYVLADPWRQEWEKGVQVPVSPGTIPQPVARVVSEEKSLMFIRPKKYIVSSGSEPPELGYV

SEQ ID NO: 71475 - protein, 110 aa, Homo sapiens
MFALGLPFLVLLVASVESHLGVLGPKNVSQKDAEFERTYVDEVNSELVNIYTFNHTVTRNRTEGVRVSVNVLNKQKGAPLLFVVRQKEAVVSFQVPLILRGMFQRKYLYQ

SEQ ID NO: 71476 - protein, 95 aa, Homo sapiens
MPKVKSGAIGRRRGRQEQRRELKSAGGLMFNTGIGQHILKNPLIINSIIDKAALRPTDVVLEVGPGTGNMTVKLLEKAKKVIRQLWLPKVLGLQA

SEQ ID NO: 71477 - protein, 622 aa, Homo sapiens
MKWVESIFLIFLLNFTESRTLHRNEYGIASILDSYQCTAEISLADLATIFFAQFVQEATYKEVSKMVKDALTAIEKPTGDEQSSGCLENQLPAFLEELCHEKEILEKYGHSDCCSQSEEGRHNCFLAHKKPTPASIPLFQVPEPVTSCEAYEEDRETFMNKFIYEIARRHPFLYAPTILLWAARYDKIIPSCCKAENAVECFQTKAATVTKELRESSLLNQHACAVMKNFGTRTFQAITVTKLSQKFTKVNFTEIQKLVLDVAHVHEHCCRGDVLDCLQDGEKIMSYICSQQDTLSNKITECCKLTTLERGQCIIHAENDEKPEGLSPNLNRFLGDRDFNQFSSGEKNIFLASFVHEYSRRHPQLAVSVILRVAKGYQELLEKCFQTENPLECQDKGEEELQKYIQESQALAKRSCGLFQKLGEYYLQNAFLVAYTKKAPQLTSSELMAITRKMAATAATCCQLSEDKLLACGEGAADIIIGHLCIRHEMTPVNPGVGQCCTSSYANRRPCFSSLVVDETYVPPAFSDDKFIFHKDLCQAQGVALQTMKQEFLINLVKQKPQITEEQLEAVIADFSGLLEKCCQGQEQEVCFAEEGKRRQNESFIRCELFSLILTDLTLFVN

SEQ ID NO: 71478 - protein, 200 aa, Homo sapiens
MKRLAARCFAGLLILSPLTVISDSRPADSGKAIEDGNLEEMEEEVRLKKRKRRRNVDKDPAKEDVEKAKKRRGRPPAEKLSPNPPKLTKQMNAIIDTVINYKDSSGRQLSEVFIQLPSRKELPEYYELIRKPVDFKKIKERIRNHKYRSLGDLEKDVMLLCHNAQTFNLEGSQIYEDSIVLQSVFKSARQKIAKEEESED

SEQ ID NO: 71479 - protein, 352 aa, Homo sapiens
MVKSKWGLALAAVVTVLSSLLMSVGLCTLFGLTPTLNGGEIFPYLVVVIGLENVLVLTKSVVSTPVDLEVKLRIAQGLSSESWSIMKNMATELGIILIGYFTLVPAIQEFCLFAVVGLVSDFFLQMLFFTTVLSIDIRRMELADLNKRLPPEACLPSAKPVGQPTRYERQLAVRPSTPHTITLQPSSFRNLRLPKRLRVVYFLAPTGAHTCWALGSRTQGPRWGAGPWRRHAVQGGGAGPGHRHRLGAAAALPLPRAMPAQLRAAGWWARAAEARGAALRRLRLCATRDGDRAACAARPPHGHRVPGQRRHAAGELLPGRPRLRVGRADRGLPNAHSAPRQAAPGQWRGQRA

SEQ ID NO: 71480 - protein, 28 aa, Homo sapiens
MLYQAGVFASRSSLRCCRIRFTWALALL

SEQ ID NO: 71481 - protein, 182 aa, Homo sapiens
MGDLQKRNRAITARRQHLKSVMLQIAATELEKEESRREAEKQNYLAEHCPPLHIPGSMSEVQELCKQLHAKIDAAEEEKYDMEVRVQKTSKELEDMNQKLFDLRGKFKRPPLRRVRMSADAMLKALLGSKHKVCMDLRANLKQVKKEDTEKERDLRDVGDWRKNIEEKSGMEGRKKMFESES

SEQ ID NO: 71482 - protein, 55 aa, Homo sapiens
MRRDVRILLLGEAQVGKTSLILSLVGEEFPEEKPSRRTRSCGRRSTRFELSGSHW

SEQ ID NO: 71483 - protein, 121 aa, Homo sapiens
  MOD_RES (1)..(1): Any amino acid
XDVGTAISCSRVFSSRWGRGFGLVEHVLGQDSILNQSNSIFGCIFYTLQLLLGCLRTRWASVLMLLSSLVSLAGSVYLAWILFFVLYDFCIVCITTYAINVSLMWLSFRKVQEPQGKAKRH

SEQ ID NO: 71484 - protein, 1180 aa, Homo sapiens
MLLPSLSPRVQPAFTQCARPQPPPHAPSPVGGRRGVFASSRHATTGTRGKMAAAVLSGPSAGSAAGVPGGTGGLSAVSSGPRLRLLLLESVSGLLQPRTGSAVAPVHPPNRSAPHLPGLMCLLRLHGSVGGAQNLSALGALVSLSNARLSSIKTRFEGLCLLSLLVGESPTELFQQHCVSWLRSIQQVLQTQDPPATMELAVAVLRDLLRYAAQLPALFRDISMNHLPGLLTSLLGLRPECEQSALEGMKACMTYFPRACGSLKGKLASFFLSRVDALSPQLQQLACECYSRLPSLGAGFSQGLKHTESWEQELHSLLASLHTLLGALYEGAETAPVQNEGPGVEMLLSSEDGDAHVLLQLRQRFSGLARCLGLMLSSEFGAPVSVPVQEILDFICRTLSVSSKNISLHGDGPLRLLLLPSIHLEALDLLSALILACGSRLLRFGILIGRLLPQVLNSWSIGRDSLSPGQERPYSTVRTKVYAILELWVQVCGASAGMLQGGASGEALLTHLLSDISPPADALKLRSPRGSPDGSLQTGKPSAPKKLKLDVGEAMAPPSHRKGDSNANSDVCAAALRGLSRTILMCGPLIKEETHRRLHDLVLPLVMGVQQGEVLGSSPYTSSRCRRELYCLLLALLLAPSPRCPPPLACALQAFSLGQREDSLEVSSFCSEALVTCAALTHPRVPPLQPMGPTCPTPAPVPPPEAPSPFRAPPFHPPGPMPSVGSMPSAGPMPSAGPMPSAGPVPSARPGPPTTANHLGLSVPGLVSVPPRLLPGPENHRAGSNEDPILAPSGTPPPTIPPDETFGGRVPRPAFVHYDKEEASDVEISLESDSDDSVVIVPEGLPPLPPPPPSGATPPPIAPTGPPTASPPVPAKEEPEELPAAPGPLPPPPPPPPPVPGPVTLPPPQLVPEGTPGGGGPPALEEDLTVININSSDEEEEEEEEEEEEEEEEEEEEEDFEEEEEDEEEYFEEEEEEEEEFEEEFEEEEGELEEEEEEEDEEEEEELEEVEDLEFGTAGGEVEEGAPPPPTLPPALPPPESPPKVQPEPEPEPGLLLEVEEPGTEEERGADTAPTLAPEALPSQGEVEREGESPAAGPPPQELVEEEPSAPPTLLEEETEDGSDKVQPPPETPAEEEMETETEAEALQEKEQDDTAAMLADFIDCPPDDEKPPPPTEPDS

SEQ ID NO: 71485 - protein, 212 aa, Homo sapiens
MQAATMRLNQNTLLLGKKVVLVPYTSEHVPSRYHEWMKSEELQRLTASEPLTLEQEYAMQCSWQEDADKCTFIVLDAEKWQAQPGATEESCMVGDVNLFLTDLEDLTLGEIEVMIAEPSCRGKGLGTEAVLAMLSYGVTTLGLTKFEAKIGQGNEPSIRMFQKLHFEQVATSSVFQEVTLRLTVSESEHQWLLEQTSHVEEKPYRDGSAEPC

SEQ ID NO: 71486 - protein, 99 aa, Homo sapiens
MDESALLDLLECPVCLERLDASAKVLPCQHTFCKRCLLGIVGSRNELRCPECRTLVGSGVEELPSNILLVRLLDGIKQRPWKPGPGGGSGTNCTNALRS

SEQ ID NO: 71487 - protein, 231 aa, Homo sapiens
MPKAKGKTRRQKFGYSVNRKRLNRNARRKAAPRIECSHIRHAWDHAKSVRQNLAEMGLAVDPNRAVPLRKRKVKAMEVDIEERPKELVRKPYVLNDLEAEASLPEKKGNTLSRDLIDYVRYMVENHGEDYKSGKTSSILCRRGRWRWSDWFTSQLPQAEASPGPVKLEPGCKARRCCVAPEELARSHGIRRLHTHVHTPRSGEGTVLRGSNLYSSGGSRKSQNLLFSGWVM

SEQ ID NO: 71488 - protein, 1254 aa, Homo sapiens
MAHRLRFHFGSGRSNTAPESDILDQEREDDFFMAFHTLPRRSSPHPFAQNGGEDGGGGLQGGVGALKRSSSMFIPQLLTSIDARPTCSSSVQISLQRKATDGATDGCGPPEGADDGPPCATPDPRDQASATATTRASPQSGSREPSPRDTPGSSPPRAARDPGLQVNGTCGRRVRCSGPVDCAEEAAPGLRIQHRASSADVRQVRLLPLGPDGQGGPAAAEPRRWSLQHVPDASGSSGKRCFVFQLQQPQQGASGPGSDLNFGFTGTKGDRLVRYPRIRLERSTSYPTQPRSERGSPTEDRGALEASPRAGRMAPEIRRTNSAERTPQGQGCTFKIRQDQNAGQQHFRILVTRGPEEAPQNPEEKSAKSPVSTGADTTTRDDFLGQVDVPLSHLPTEDPTMERPYTFKDFLLRPRSHKSRVKGFLRLKMAYMPKNGGQDEENSDQRDDMEHGWEVVDSNDSASQHQEELPPPPLPPGWEEKVDNLGRTYYVNHNNRTTQWHRPSLMDVSSESDNNIRQINQEAAHRRFRSRRHISEDLEPEPSEGGDVPEPWETISEEVNIAGDSLGLALPPPPASPGSRTSPQELSEELSRRLQITPDSNGEQFSSLIQREPSSRLRSCSVTDAVAEQGHLPPPSAPAGRARSSTVTGGEEPTPSVAYVHTTPGLPSGWEERKDAKGRTYYVNHNNRTTTWTRPIMQLAEDGASGSATNSNNHLIEPQIRRPRSLSSPTVTLSAPLEGAKDSPVRRAVKDTLSNPQSPQPSPYNSPKPQHKVTQSFLPPGWEMRIAPNGRPFFIDHNTKTTTWEDPRLKFPVHMRSKTSLNPNDLGPLPPGWEERIHLDGRTFYIDHNSKITQWEDPRLQNPAITGPAVPYSREFKQKYDYFRKKLKKPADIPNRFEMKLHRNNIFEESYRRIMSVKRPDVLKARLWIEFESEKGLDYGGVAREWFFLLSKEMFNPYYGLFEYSATDNYTLQINPNSGLCNEDHLSYFTFIGRVAGLAVFHGKLLDGFFIRPFYKMMLGKQITLNDMESVDSEYYNSLKWILENDPTELDLMFCIDEENFGQTYQVDLKPNGSEIMVTNENKREYIDLVIQWRFVNRVQKQMNAFLEGFTELLPIDLIKIFDENELELLMCGLGDVDVNDWRQHSIYKNGYCPNHPVIQWFWKAVLLMDAEKRIRLLQFVTGTSRVPMNGFAELYGSNGPQLFTIEQWGSPEKLPRAHTCFNRLDLPPYETFEDLREKLLMAVENAQGFEGVD

SEQ ID NO: 71489 - protein, 648 aa, Homo sapiens
MTPALTALLCLGLSLGPRTRVQAGPFPKPTLWAEPGSVISWGSPVTIWCQGSQEAQEYRLHKEGSPEPLDRNNPLEPKNKARFSIPSMTEHHAGRYRCHYYSSAGWSEPSDPLEMVMTGAYSKPTLSALPSPVVASGGNMTLRCGSQKGYHHFVLMKEGEHQLPRTLDSQQLHSRGFQALFPVGPVTPSHRWRFTCYYYYTNTPWVWSHPSDPLEILPSGVSRKPSLLTLQGPVLAPGQSLTLQCGSDVGYNRFVLYKEGERDFLQRPGQQPQAGLSQANFTLGPVSPSNGGQYRCYGAHNLSSEWSAPSDPLNILMAGQIYDTVSLSAQPGPTVASGENVTLLCQSWWQFDTFLLTKEGAAHPPLRLRSMYGAHKYQAEFPMSPVTSAHAGTYRCYGSYSSNPHLLSHPSEPLELVVSGHSGGSSLPPTGPPSTPGGPEDQPLNPPGSGPQNRLGRYLEVLIGVSVAFVLLLFLLLFLLLRRQRHSKHRTSDQRKTDFQRPAGAAETEPKDRGLLRRSSPAADVQEENLYAAVKDTQSEDRVELDSQSPHDEDPQAVTYAPVKHSSPRREMASPPSSLSGEFLDTKDRQVEEDRQMDTEAAASEASQDVTYAQLHSLTLRRKATEPPPSQEGEPPAEPSIYATLAIH

SEQ ID NO: 71490 - protein, 41 aa, Homo sapiens
  MOD_RES (1)..(1): Any amino acid
XFDETRTAVRSITKRDTQKNYVKMSLAPGVVLELQMLADTS

SEQ ID NO: 71491 - protein, 149 aa, Homo sapiens
MEDSTILSDWTNSNKQKMKYDFSCELYRMSTYSTFPAGVPVSERSLARAGFYYTGVNDKVKCFCCGLMLDNWKLGDSPIQKHKQLYPSCSFIQNLVSASLGSTSKNTSPMRNSFAHSLSPTLEHSSLFSGSYSSLSPNPLNSRAVEDIS

SEQ ID NO: 71492 - protein, 167 aa, Homo sapiens
MRMCFSVLLIMEACILLWHMPDLLVFNVCVNFGMLLIIRCLTLKIGGSKHTMNDHLHVGSHAHGQIQVQQLFEDNSNKRTVLTTQPNGLTTVGKTGLPVVPERQLDSIHRRQGSSTSLKSMEGMGKVKATPMTPEQAMKQYMQKLTAFEHHEIFSYPEIYFLGLNAK

SEQ ID NO: 71493 - protein, 180 aa, Homo sapiens
  MOD_RES (1)..(1): Any amino acid
XATQASLESAPRIMRLVAECSRSRARAGELWLPHGTVATPVFMPVGTQATMKGITTEQLDALGCRICLGNTYHLGLRPGPELIQKANGLHGFMNWPHNLLTVTEEGVRFRSPYDGNETLLSPEKSVQIQNALGSDIIMQLDDVVSSTVTGPRVEEAMYRSIRWLDRCIAAHQRPDKQNLF

SEQ ID NO: 71494 - protein, 34 aa, Homo sapiens
  MOD_RES (1)..(1): Any amino acid
XTQRKYIQGLKRLMTICQKHFPTDPSKCVEYNAL

SEQ ID NO: 71495 - protein, 148 aa, Homo sapiens
MLSLKKKKKELSDLARDPPAQCSAGPVGDDMFHWQATIMGPNDSPYQGGVFFLTIHFPTDYPFKPPKVAFTTRIYHPNINSNGSICLDILRSQWSPALTISKVLLSICSLLCDPNPDDPLVPEIARIYKTDRDKYNRISREWTQKYAM

SEQ ID NO: 71496 - protein, 163 aa, Homo sapiens
MARKLVMFRDVAIDFSQEEWECLDSAQRDLYRDVMLENYSNLVSLDLPSRCASKDLSPEKNTYETELSQWEMSDRLENCDLEESNSRDYLEAKGKMEKQQENQKEYFRQGMIIYDKMSIFNQHTYLSQHSRCHSTEKPYKCKECGKAFRRASHLTQHQSIHTG

SEQ ID NO: 71497 - protein, 191 aa, Homo sapiens
MNGKRNGEGGKRWKWKGTGVPVRSGDATFPKAMDNVTVRQGESATLRCTIDNRVTRVAWLNRSTILYAGNDKWCLDPRVVLLSNTQTQYSIEIQNVDVYDEGPYTCSVQTDNHPKTSRVHLIVQVSPKIVEISSDISINEGNNISLTCIATGRPEPTVTWRHISPKAVGFVSEDEYLEIQGITREQSGDYE

SEQ ID NO: 71498 - protein, 411 aa, Homo sapiens
MPSRKFADGEVVRGRWPGSSLYYEVEILSHDSTSQLYTVKYKDGTELELKENDIKPLTSFRQRKGGSTSSSPSRRRGSRSRSRSRSPGRPPKSARRSASASHQADIKEARREVEVKLTPLILKPFGNSISRYNGEPEHIERNDAPHKNTQEKFSLSQESSYIATQYSLRPRREEVKLKEIDSKEEKYVAKELAVRTFEVTPIRAKDLEFGGVPGVFLIMFGLPVFLFLLLLMCKQKDPSLLNFPPPLPALYELWETRVFGVYLLWFLIQVLFYLLPIGKVVEGTPLIDGRRLKYRLNGFYAFILTSAVIGTSLFQGVEFHYVYSHFLQFALAATVFCVVLSVYLYMRSLKAPRNDLSPASSGNAVYDFFIGRELNPRIGTFDLKYFCELRPGLIGWEPRQDSTIHLVVIPS

SEQ ID NO: 71499 - protein, 69 aa, Homo sapiens
MWAFSELPMPLLINLIVSLLGFVATVTLIPAFRGHFIAARLCGQDLNKTSRQQMCPPCHLLHDLPGLCG

SEQ ID NO: 71500 - protein, 39 aa, Homo sapiens
MRLAGPESSVTAVTENPSVLGPCGLTSRTQSMEVSPASA

SEQ ID NO: 71501 - protein, 301 aa, Homo sapiens
  MOD_RES (1)..(1): Any amino acid
XIWKSGAKLRVDITLLGFENMSWIRGRRSFIFKGEDNWAELMEVNHDDKVVTTERFDLSQEMERLTLDLMKPKSREVERRLTSPVINTSLDTKNIAFERTKSGFWGWRTDKAEVVNGYEAKVYTVNNVNVITKIRTEHLTEEEKKRYKDRNPLESLLGTVEHQFGAQGDLTTECATANNPTAITPDEYFNEEFDLKDRDIGRPKELTIRTQKFKAMLWMCEEFPLSLVEQVIPIIDLMARTSAHFARLRDFIKLEFPPGFPVKIEIPLFHVLNARITFGNVNGCSTAEESVSQNVEGTQAD

SEQ ID NO: 71502 - protein, 49 aa, Homo sapiens
MYDSFDNTYQATIGIDFLSKTMYLEDRTVRLQLWDTAGQERFRSLIPSY

SEQ ID NO: 71503 - protein, 73 aa, Homo sapiens
MSYYQRPFSPSAYSLPASLNSSIVMQHGTSLDSTDTYPQHAQSLDGTTSSSIPLYRSSEEEKRVTVIKAPHYP

SEQ ID NO: 71504 - protein, 199 aa, Homo sapiens
  MOD_RES (1)..(1): Any amino acid
XGNSLPKCTEIKPEVNTLTAENKLWDDAKNGFARCTAAEIQRFAFSATGLLSHVEEGLDSDATDSSSDDDLDEYTLRKNVAVNCSTEWKWLVDRARVGSRWTWLQAQISDLECKIQQLTDIHRQIRASKGIVVLEECQLPKDILKKQMQFADQAASLNILGNPQVPQECQDPVPEQDFEMSPSSPTLLLRNIEKQVKSK

SEQ ID NO: 71505 - protein, 286 aa, Homo sapiens
MAAAAYVDHFAAECLVSMSSRAVVHGPREGPESRPEGAAVAATPTLPRVEERRDGKDSASLFVVARILADLNQQAPAPAPAERREGAAARKARTPCRLPPPPSPPPPAPKARRAPPSPAWSEPEPEAGLEPEREPGPAGSGEPGLRQRVRRGRSRADLESPQRKHKCHYAGCEKVYGKSSHLKAHLRTHTGERPFACSWQDCNKKFARSDELARHYRTHTGEKKFSCPICEKRFMRSDHLTKHARRHANFHPGMLQRRGGGSRTGSLSDYSRSDASSPTISPASSP

SEQ ID NO: 71506 - protein, 89 aa, Homo sapiens
MVTAPHSSTRHTSVVMLTPNPDGPPSQAAAPMATPTPRAEGHPPTHTISTIAATVTAPHSESSLSTGPAPAAMATTSSKPEGRPRGQAA

SEQ ID NO: 71507 - protein, 24 aa, Homo sapiens
MTKFIWKPLRHDAAEITVMHYWFG

SEQ ID NO: 71508 - protein, 164 aa, Homo sapiens
MTEDSQRNFRSVYYEKVGFRGVEEKKSLEILLKDDRLGILPPHHESHAKVMMYRKEQYLDVLHALKVVRFVSDATPQAEVYLRMYQLESGKLPRSPSFPLVSGHFCLTLSSTLDRPILPAFDYIMFCLKNFWWLPVVIRIKVTHLYLAFMAMHILTQPSYFLFF

SEQ ID NO: 71509 - protein, 48 aa, Homo sapiens
MPKIVLNGVTVDFPFQPYKCQQEYMTKVLECLQQSLRVTDLGVPWGPL

SEQ ID NO: 71510 - protein, 572 aa, Homo sapiens
MLAFAARTVVKPLGFLKPFSLMKASSRFKAHQDALPRLPVPPLQQSLDHYLKALQPIVSEEEWAHTKQLVDEFQASGGVGERLQKGLERRARKTENWLSEWWLKTAYLQYRQPVVIYSSPGVMLPKQDFVDLQGQLRFAAKLIEGVLDFKVMIDNETLPVEYLGGKPLCMNQYYQILSSCRVPGPKQDTVSNFSKTKKPPTHITVVHNYQFFELDVYHSDGTPLTADQIFVQLEKIWNSSLQTNKEPVGILTSNHRNSWAKAYNTLIKDKVNRDSVRSIQKSIFTVCLDATMPRVSEDVYRSHVAGQMLHGGGSRLNSGNRWFDKTLQFIVAEDGSCGLVYEHAAAEGPPIVTLLDYVIEYTKKPELVRSPLVPLPMPKKLRFNITPEIKSDIEKAKQNLSIMIQDLDITVMVFHHFGKDFPKSEKLSPDAFIQMALQLAYYRIYGQACATYESASLRMFHLGRTDTIRSASMDSLTFVKAMDDSSVTEHQKVELLRKAVQAHRGYTDRAIRGEAFDRHLLGLKLQAIEDLVSMPDIFMDTSYAIAMHFHLSTSQVGHCPRCPGGWRQRTHW

SEQ ID NO: 71511 - protein, 84 aa, Homo sapiens
  MOD_RES (1)..(1): Any amino acid
XGQKEVLLRRCQQLQEHLGLAETRAEGLHQLEADHSRMKREVSAHFHEVLRLKDEMLSLSLHYSNALQEKELAASRCRSLQEEL

SEQ ID NO: 71512 - protein, 86 aa, Homo sapiens
MRLTRCQAALAAAITLNLLVLFYVSWLQHQPRNSRARGPRRASAAGPRVTVLVREFEAFDNAVPELVDSFLQQDPAQPVVVAADTL

SEQ ID NO: 71513 - protein, 124 aa, Homo sapiens
MYDSFDNTYQATIGIDFLSKTMYLEDRTVRLQLWDTAGQERFRSLIPSYIRDSTVAVVVYDITNLNSFQQTSKWIDDVRTERGSDVIIMLVGNKTDLADKRQITIEEGEQRAKELSVMFIETSA

SEQ ID NO: 71514 - protein, 60 aa, Homo sapiens
MSVEYDKFIESGRKWFCHVDDDNYVNARSLLHLLSSFSPSQDVYLGRPSLDHPIEATERV

SEQ ID NO: 71515 - protein, 67 aa, Homo sapiens
MRQAGRYLPATASLPSGCCHHFLRHPCCTPGTGHGGDHGTWQRTQLPRAIKRRAGPRTPTGSRSGSL

SEQ ID NO: 71516 - protein, 1279 aa, Homo sapiens
MMNRTTPDQELAPASEPVWERPWSVEEIRRSSQSWSLAADAGLLQFLQEFSQQTISRTHEIKKQVDGLIRETKATDCRLHNVFNDFLMLSNTQFIENRVYDEEVEEPVLKAEAEKTEQEKTREQKEVDLIPKVQEAVNYGLQVLDSAFEQLDIKAGNSDSEEDDANGRVELILEPKDLYIDRPLPYLIGSKLFMEQEDVGLGELSSEEGSVGSDRGSIVDTEEEKEEEESDEDFAHHSDNEQNRHTTQMSDEEEDDDGCDLFADSEKEEEDIEDIEENTRPKRSRPTSFADELAARIKGDAVGRVDEEPTTLPSGEAKPRKTLKEKKERRTPSDDEEDNLFAPPKLTDEDFSPFGSGGGLFSGGKGLFDDEDEESDLFTEAPQDRQAGASVKEESSSSKPGKKIPAGAVSVFLGDTDVFGAASVPSMKEPQKPEQPTPRKSPYGPPPTGLFDDDDGDDDDDFFSAPHSKPSKTGKVQSTADIFGDEEGDLFKEKAVASPEATVSQTDENKARAEKKVTLSSSKNLKPSSETKTQKGLFSDEEDSEDLFSSQSASKLKGASLLPGKLPTLVSLFDDEDEEDNLFGGTAAKKQTLCLQAQREEKAKASELSKKKASALLFSSDEEDQWNIPASQTHLASDSRSKGEPRDSGTLQSQEAKAVKKTSLFEEDEEDDLFAIAKDSQKKTQRVSLLFEDDVDSGGSLFGSPPTSVPPATKKKETVSEAPPLLFSDEEEKEAQLGVKSVDKKVESAKESLKFGRTDVAESEKEGLLTRSAQETVKHSDLFSSSSPWDKGTKPRTKTVLSLFDEEEDKMEDQNIIQAPQKEVGKGRDPDAHPKSTGVFQDEELLFSHKLQKDNDPDVDLFAGTKKTKLLEPSVGSLFGDDEDDDLFSSAKSQPLANLAINPAALLPTAASQISEVKPVLPELAFPSSEHRRSHGLESVPVLPGSGEAGVSFDLPAQADTLHSANKSRVKMRGKRRPQTRAARRLAAQESSETEDMSVPRGPIAQWADGAISPNGHRPQLRAASGEDSTEEALAAAAAPWEGGPVPGVDRSPFAKSLGHSRGEADLFDSGDIFSTGTGSQSVERTKPKAKIAENPANPPVGGKAKSPMFPALGEASSDDDLFQSAKPKPAKKTNPFPLLEDEDDLFTDQKVKKNETKSNSQQDVILTTQDIFEDDIFATEAIKPSQKTREKEKTLESNLFDDNIDIFADLTVKPKEKSKKKVEAKSIFDDDMDDIFSSGIQAKTTKPKSRSAQAAPEPRFEHKVSNIFDDPLNAFGGQ

SEQ ID NO: 71517 - protein, 135 aa, Homo sapiens
MAPKRAKRRTVEGGSSSVFSMFDQTQIQEFKEAFTVIDQNRDGIIDKEDLRDTFAAMGRLNVKNEELDAMMKEASGPINFTVFLTMFGEKLKGADPEDVITGAFKVLDPEGKGTIKKKFLEELLTTQCDRFSQEE

SEQ ID NO: 71518 - protein, 41 aa, Homo sapiens
SARVAKFRCCLIPDSDSITCIPLKPAFSGMAPDVAYSTPTS

SEQ ID NO: 71519 - protein, 32 aa, Homo sapiens
MAEISRIQYEMEYTEGISQRMRVPEKLKVAPP

SEQ ID NO: 71520 - protein, 871 aa, Homo sapiens
MAAGGRRRRPLRYQSLAALVEDSQWPFLFLVSDFSYGTDEYDGEGNEEQKGPPEGSETMPYIDESPTMSPQLSARSQGGGDGVSPTPPEGLAPGVEAGKGLEMRKLVLSGFLASEEIYINQLEALLLPMKPLKATATTSQPVLTIQQIETIFYKIQDIYEIHKEFYDNLCPKVQQWDSQVTMGHLFQKLASQLGVYKAFVDNYKVALETAEKCSQSNNQFQKISEELKVKGPKDSKDSHTSVTMEALLYKPIDRVTRSTLVLHDLLKHTPVDHPDYPLLQDALRISQNFLSSINEDIDPRRTAVTTPKGETRQLVKDGFLVEVSESSRKLRHVFLFTDVLLCAKLKKTSAGKHQQYDCKWYIPLADLVFPSPEESEASPQVHPFPDHELEDMKMKISALKSEIQKEKANKGQSRAIERLKKKMFENEFLLLLNSPTIPFRIHNRNGKSYLFLLSSDYERSEWREAIQKLQKKDLQAFVLSSVELQVLTGSCFKLRTVHNIPVTSNKDDDESPGLYGFLHVIVHSAKGFKQSANLYCTLEVDSFGYFVSKAKTRVFRDTAEPKWDEEFEIELEGSQSLRILCYEKCYDKTKVNKDNNEIVDKIMGKGQIQLDPQTVETKNWHTDVIEMNGIKVEFSMKFTSRDMSLKRTPSKKQTGVFGVKISVVTKRERSKVPYIVRQCVEEVEKRGIEEVGIYRISGVATDIQALKAVFDANNKDILLMLSDMDINAIAGTLKLYFRELPEPLLTDRLYPAFMEGIALSDPAAKENCMMHLLRSLPDPNLITFLFLLEHLKRVAEKEPINKMSLHNLATVFGPTLLRPSEVESKAHLTSAADIWSHDVMAQVQVLLYYLQHPPISFAELKRNTLYFSTDV

SEQ ID NO: 71521 - protein, 104 aa, Homo sapiens
MAGNCSWEAHPGNRNKVSATGGGPWSCPDGCGWEGQTQPSISSPIPPFLAPLSSSGPTVGSGLLWAMWPGTSSLDPPTLLSSSVRQAPGLDLKVPRCADTVVAL

SEQ ID NO: 71522 - protein, 515 aa, Homo sapiens
MFRTAAAISVHLVGPLQGRKAGAPLTWFLHQTVAEKNVGSPAPRPTSHLGLANPQERKVPQGPQSPCEVPAAEGILRTGGAKLPIQGHPAKLAMAKQLQARRLDGIDYNPWVEFVKLASEHDVVNLGQGFPDFPPPDFAVEAFQHAVSGDFMLNQYTKTFGYPPLTKILASFFGELLGQEIDPLRNVLVTVGGYGALFTAFQALVDEGDEVIIIEPFFDCYEPMTMMAGGRPVFVSLKPGPIQNGELGSSSNWQLDPMELAGKFTSRTKALVLNTPNNPLGKVFSREELELVASLCQQHDVVCITDEVYQWMVYDGHQHISIASLPGMWERTLTIGSAGKTFSATGWKVGWVLGPDHIMKHLRTVHQNSVFHCPTQSQAAVAESFEREQLLFRQPSSYFVQFPQAMQRCRDHMIRSLQSVGLKPIIPQGSYFLITDISDFKRKMPDLPGAVDEPYDRRFVKWMIKNKGLVAIPVSIFYSVPHQKHFDHYIRFCFVKDEATLQAMDEKLRKWKVEL

SEQ ID NO: 71523 - protein, 1623 aa, Homo sapiens
  MOD_RES (1)..(1): Any amino acid
XAPPVDVLRALRFPSLPDGVRRAKGICPADVAYRVARPAQLSAPTRQLFPGGFPKDFSLLTVVRTRPGLQAPLLTLYSAQGVRQLGLELGRPVRFLYEDQTGRPQPPSQPVFRGLSLADGKWHRVAVAVKGQSVTLIVDCKKRVTRPLPRSARPVLDTHGVIIFGARILDEEVFEGDVQELAIVPGVQAAYESCEQKELECEGGQRERPQNQQPHRAQRSPQQQPSRLHRPQNQEPQSQDPTPGEEEEILESSLLPPLEEAAHGPRGLKGEKGEPAVLEPGMLVEGPPGPEGPAGLIGPPGIQGNPGPVGDPGERGPPGRAGLPGSDGAPGPPGTSLMLPFRFGSGGGDKGPVVAAQEAQAQAILQQARLALRGPPGPMGYTGRPGPLGQPGSPGLKGESGDLGPQGPRGPQGLTGPPGKAGRRGRAGADGARGMPGDPGVKGDRGFDGLPGLPGEKGHRGDTGAQGLPGPPGEDGERGDDGEIGPRGLPGESGPRGLLGPKGPPGIPGPPGVRGMDGPQGPKGSLGPQGEPGPPGQQGTPGTQGLPGPQGAIGPHGEKGPQGKPGLPGMPGSDGPPGHPGKEGPPGTKGNQGPSGPQGPLGYPGPRGVKGVDGIRGLKGHKGEKGEDGFPGFKGDIGVKGDRGEVGVPGSRGEDGPEGPKGRTGPTGDPGPPGLMGEKGKLGVPGLPGYPGRQGPKGSLGFPGFPGASGEKGARGLSGKSGPRGERGPTGPRGQRGPRGATGKSGAKGTSGGDGPHGPPGERGLPGPQGPNGFPGPKGPPGPPGKDGLPGHPGQRGEVGFQGKTGPPGPPGVVGPQGAAGETGPMGERGHPGPPGPPGEQGLPGTAGKEGTKGDPGPPGAPGKDGPAGLRGFPGERGLPGTAGGPGLKGNEGPSGPPGPAGSPGERGAAGSGGPIGPPGRPGPQGPPGAAGEKGVPGEKGPIGPTGRDGVQGPVGLPGPAGPPGVAGEDGDKGEVGDPGQKGTKGNKGEHGPPGPPGPIGPVGQPGAAGADGEPGARGPQGHFGAKGDEGTRGFNGPPGPIGLQGLPGPSGEKGETGDVGPMGPPGPPGPRGPAGPNGADGPQGPPGGVGNLGPPGEKGEPGESGSPGIQGEPGVKGPRGERGEKGESGQPGEPGPPGPKGPTGDDGPKGNPGPVGFPGDPGPPGEGGPRGQDGAKGDRGEDGEPGQPGSPGPTGENGPPGPLGKRGPAGSPGSEGRQGGKGAKGDPGAIGAPGKTGPVGPAGPAGKPGPDGLRGLPGSVGQQGRPGATGQAGPPGPVGPPGLPGLRGDAGAKGEKGHPGLIGLIGPPGEQGEKGDRGLPGPQGSPGQKGEMGIPGASGPIGPGGPPGLPGPAGPKGAKGATGPGGPKGEKGVQGPPGHPGPPGEVIQPLPIQMPKKTRRSVDGSRLMQEDEAIPTGGAPGSPGGLEEIFGSLDSLREEIEQMRRPTGTQDSPARTCQDLKLCHPELPDGEYWVDPNQGCARDAFRVFCNFTAGGETCVTPRDDVTQFSYVDSEGSPVGVVQLTFLRLLSVSAHQDVSYPCSGAARDGPLRLRGANEDELSPETSPYVKEFRDGCQTQQGRTVLEVRTPVLEQLPVLDASFSDLGAPPRRGGVLLGPVCFMG

SEQ ID NO: 71524 - protein, 111 aa, Homo sapiens
SVFSSKALVKMQLLKDVVGNDTYRINNKYDETYPPLPVEEIIKRSEFVIGQEVAYNLLVNNCEHFVTLLRYGEGVSEQANRAISTVEFVTAAVGVFSFLGLFPKGQRAKYY

SEQ ID NO: 71525 - protein, 947 aa, Homo sapiens
MFQTKLRNETWEDLPKMSCTTEIQAAFILSSFVTFFSGLIILLIFRLIWRSVKKWQIIKGTGIILELFTSGTIARSHVRSLHFQGQFRDHIEMLLSAQTFVGQVLVILVFVLSIGSLIIYFINSADPVGSCSSYEDKTIPIDLVFNAFFSFYFGLRFMAADDKIKFWLEMNSIVDIFTIPPTFISYYLKSNWLGLRFLRALRLLELPQILQILRAIKTSNSVKFSKLLSIILSTWFTAAGFIHLVENSGDPWLKGRNSQNISYFESIYLVMATTSTVGFGDVVAKTSLGRTFIMFFTLGSLILFANYIPEMVELFANKRKYTSSYEALKGKKFIVVCGNITVDSVTAFLRNFLRDKSGEINTEIVFLGETPPSLELETIFKCYLAYTTFISGSAMKWEDLRRVAVESAEACLIIANPLCSDSHAEDISNIMRVLSIKNYDSTTRIIIQILQSHNKVYLPKIPSWNWDTGDNIICFAELKLGFIAQGCLVPGLCTFLTSLFVEQNKKVMPKQTWKKHFLNSMKNKILTQRLSDDFAGMSFPEVARLCFLKMHLLLIAIEYKSLFTDGFCGLILNPPPQVRIRKNTLGFFIAETPKDVRRALFYCSVCHDDVFIPELITNCGCKSRSRQHITVPSVKRMKKCLKGISSRISGQDSPPRVSASTSSISNFTTRTLQHDVEQDSDQLDSSGMFHWCKPTSLDKVTLKRTGKSKYKFRNHIVACVFGDAHSAPMGLRNFVMPLRASNYTRKELKDIVFIGSLDYLQREWRFLWNFPQIYILPGCALYSGDLHAANIEQCSMCAVLSPPPQPSSNQTLVDTEAIMATLTIGSLQIDSSSDPSPSVSEETPGYTNGHNEKSNCRKVPILTELKNPSNIHFIEQLGGLEGSLQETNLHLSTAFSTGTVFSGSFLDSLLATLMWKLAIKGSQFQGRSSGLCWPSTIIMSWNCFRCW

SEQ ID NO: 71526 - protein, 308 aa, Homo sapiens
  MOD_RES (1)..(1): Any amino acid
XLDLGPPVDPDEDSDNSAIYVQGLNDSVTLDDLADFFKQCGVVKMNKRTGQPMIHIYLDKETGKPKGDATVSYEDPPTAKAAVEWFDGKDFQGSKLKVSLARKKPPMNSMRGGLPPREGRGMPPPLRGGPGGPGGPGGPMGRMGGRGGDRGGFPPRGPRGSRGNPSGGGNVQHRAGDWQCPNPSIGDFCCDVIVCRGCGNQNFAWRTECNQCGDRGRGGPGGMRGGRGGLMDRGGPGGMFRGGRGGDRGGFRGGRGMDRGGFGGGRRGGPGGPPGPLMEQMGGRRGGRGGPGKMDKGEHRQERRDRPY

SEQ ID NO: 71527 - protein, 72 aa, Homo sapiens
MDSEGGSLLLDEDSEVFKMLQENREGRAAPRQSSSFRLLQEALEAEERGTRLCASRRAGTATPAATPVPTVG

SEQ ID NO: 71528 - protein, 67 aa, Homo sapiens
MNTSLLGSIGMLNSAPQLRCIKTYQVPPVQPASPGSHNALKLARLIWTSNRNVILMAHDGKEHRFMV

SEQ ID NO: 71529 - protein, 643 aa, Homo sapiens
MTPALTALLCLGLSLGPRTRMQAGPFPKPTLWAEPGSVISWGSPVTIWCQGSLEAQEYQLDKEGSPEPWDRNNPLEPKNKARFSIPSMTQHHAGRYRCHYYSSAGWSEPSDPLELVMTGFYNKPTLSALPSPVVASGGNMTLRCGSQKGYHHFVLMKEGEHQLPRTLDSQQLHSGGFQALFPVGPVTPSHRWRFTCYYYYTNTPWVWSHPSDPLEILPSGVSRKPSLLTLQGPVLAPGQSLTLQCGSDVGYDRFVLYKEGERDFLQRPGQQPQAGLSQANFTLGPVSRSYGGQYRCYGAHNLSSEWSAPSDPLDILITGQIYDTVSLSAQPGPTVASGENMTLLCQSRGYFDTFLLTKEGAAHPPLRLRSMYGAHKYQAEFPMSPVTSAHAGTYRCYGSRSSNPHLLSFPSEPLELMVSGPEDQPLNPPGSGPQNAPGLGSGAGTRAAGLGRYLEVLIGVSVAFVLLLFLLLFLLLLRQRHSKHRTSDQRKTDFQRPAGAAETEPKDRGLLRRSSPAADVQEENLYAAVKDTQSEDRVELDSQSPHDEDPQAVTYAPVKHSSPRREMASPPSSLSGEFLDTKDRQVEEDRQMDTEAAASEASQDVTYAQLHSLTLRRKATEPPPSQEGEPPAEPSIYATLAIH

SEQ ID NO: 71530 - protein, 130 aa, Homo sapiens
QKTSVPPFNLRELLPKQLGQYFRYNGSLTTPPCYQSVLWTVFYRRSQISMEQLEKLQGTLFSTEEEPSKLLVQNYRALQPLNQRMVFASFIQGSSYTTGRRGWKTERVWSSPQHKPRLRHKFLLRYHGCG

SEQ ID NO: 71531 - protein, 501 aa, Homo sapiens
MAKPDMIRKLEQGEELWTQRIFPSYSYLEEDGKTEDVLVKFKEYQDRHSRPLIFINHKKLIKERSNIYGKTFTLGKNRISKTILCEYKPDGKVLKNISELVIRNISPIKEKFGDSTGWEKSLLNTKHEKIHPAVNLHKQTERVLSGKQELIQHQKVQAPEQPFDHNECEKSFLMKGMLFTHTRAHRGERTFEYNKDGIAFIEKSSLSVHPSNLMEKKPSAYNKYGKFLCRKPVFIMPQRPQTEEKPFHCPYCGNNFRRKSYLIEHQRIHTGEKPYVCNQCGKAFRQKTALTLHEKTHIEGKPFICIDCGKSFRQKATLTRHHKTHTGEKAYECPQCGSAFRKKSYLIDHQRTHTGEKPYQCNECGKAFIQKTTLTVHQRTHTGEKPYICNECGKSFCQKTTLTLHQRIHTGEKPYICNECGKSFRQKAILTVHHRIHTGEKSNGCPQCGKAFSRKSNLIRHQKTHTGEKPYECKQCGKFFSCKSNLIVHQKTHKVETTGIQ

SEQ ID NO: 71532 - protein, 1756 aa, Homo sapiens
MRRSKAYGERYLASVQGSAPSPGKKLRGFYFAKLYYEAKEYDLAKKYVCTYLSVQERDPRAHRFLGLLYELEENTEKAVECYRRSLELNPPQKDLVLKIAELLCKNDVTDGRAKYWVERAAKLFPGSPAIYKLKEHLLDCEGEDGWNKLFDWIQSELYVRPDDVHMNIRLVELYRSNKRLKDAVARCHEAERNIALRSSLEWNSCVVQTLKEYLESLQCLESDKSDWRATNTDLLLAYANLMLLTLSTRDVQESRELLESFDSALQSAKSSLGGNDELSATFLEMKGHFYMHAGSLLLKMGQHGNNVQWQALSELAALCYVIAFQVPRPKIKLIKGEAGQNLLEMMACDRLSQSGHMLLNLSRGKQDFLKEVVETFANKSGQSVLYNALFSSQSSKDTSFLGSDDIGNIDVQEPELEDLARYDVGAIQAHNGSLQHLTWLGLQWNSLPALPGIRKWLKQLFHHLPQETSRLETNAPESICILDLEVFLLGVVYTSHLQLKEKCNSHHSSYQPLCLPLPVCKRLCTERQKSWWDAVCTLIHRKAVPGNSAELRLVVQHEINTLRAQEKHGLQPALLVHWAKCLQKMGRGLNSSYDQQEYIGRSVHYWKKVLPLLKIIKKNSIPEPIDPLFKHFHSVDIQASEIVEYEEDAHITFAILDAVHGNIEDAVTAFESIKSVVSYWNLALIFHRKAEDIENDAVFPEEQEECKNYLRKTRDYLIKIIDDSDSNLSVVKKLPVPLESVKEMLKSVMQELEDYSEGGPLYKNGSLRNADSEIKHSTPSPTKYSLSPSKSYKYSPKTPPRWAEDQNSLRKMICQEVKAITKLNSSKSASRHRWPTENYGPDSVPDGYQGSQTFHGAPLTVATTGPSVYYSQSPAYNSQYLLRPAANVTPTKGSSNTEFKSTKEGFSIAVSADGFKFGISEPGNQEKKSEKPLENDTGFQAQDISGQKNGRGVIFGQTSSTFTFADVAKSTSGEGFQFGKKDPNFKGFSGAGEKLFSSQCGKMANKANTSGDFEKDDDACKTEDSDDIHFEPVVQMPEKVELVTGEEGEKVLYSQGVKLFRFDAEISQWKERGLGNLKILKNEVNGKPRMLMRRDQVLKVCANHWITTTMNLKPLSGSDRAWMWLASDFSDGDAKLERLAAQFKTPELAEEFKQKFEECQRLLLDIPLQTPHKLVDTGRAAKLIQRAEEMKSGLKDFKTFLTNDQTKVTEEENKGSGTGAAGASDTTIKPNPENTGPTLEWDNYDLREDALDDNVSSSSVHDSPLASSPVRKNIFRFDESTTGFNFSFKSALSLSKSPAKLNQSGTSVGTDEESDVTQEEERDGQYFEPVVPLPDLVEVSSGEENEQVVFSHRAELYRYDKDVGQWKERGIGDIKILQNYDNKQVRIVMRRDQVLKLCANHRITPDMSLQNMKGTERVWVWTACDFADGERKVEHLAVRFKLQDVADSFKKIFDEAKTAQEKDSLITPHVSRSSTPRESPCGKIAVAVLEETTRERTDVIQGDDVADAASEVEVSSTSETTTKAVVSPPKFVFGSESVKRIFSSEKSNPFAFGNSSATGSLFGFSFNAPLKSNDSETSSVAQSGSESKVEPKKCELSKNSDIEQSSDSKVKNLSASFPMEESSINYTFKTPEKEPPLWHAEFTKEELVQKLSSTTKSADQLNGLLRETEATSAVLMEQIKLLKSEIRRLERNQEESAANVEHLKNVLLQFIFLKPGSERESLLPVINTMLQLSPEEKGKLAAVAQGLQETSIPKKK

SEQ ID NO: 71533 - protein, 505 aa, Homo sapiens
MAQSVLVPPGPDSFRFFTRESLAAIEQRIAEEKAKRPKQERKDEDDENGPKPNSDLEAGKSLPFIYGDIPPEMVSVPLEDLDPYYINKKTFIVLNKGKAISRFSATPALYILTPFNPIRKLAIKILVHSLFNMLIMCTILTNCVFMTMSNPPDWTKNVEYTFTGIYTFESLIKILARGFCLEDFTFLRDPWNWLDFTVITFAYVTEFVDLGNVSALRTFRVLRALKTISVIPGLKTIVGALIQSVKKLSDVMILTVFCLSVFALIGLQLFMGNLRNKCLQWPPDNSSFEINITSFFNNSLDGNGTTFNRTVSIFNWDEYIEDKSHFYFLEGQNDALLCGNSSDAGQCPEGYICVKAGRNPNYGYTSFDTFSWAFLSLFRLMTQDFWENLYQLTLRAAGKTYMIFFVLVIFLGSFYLINLILAVVAMAYEEQNQATLEEAEQKEAEFQQMLEQLKKQQEEAQAAAAAASAESRDFSGAGGIGVFSESSSVASKLSSKSEKELKNRR

SEQ ID NO: 71534 - protein, 167 aa, Homo sapiens
  MOD_RES (1)..(1): Any amino acid
XQSQTWCPKTLSPSRSQRSRLPQAPKALATGPNSPELFEESWPSSSGTPSLPSTTEGQMWASPAPTLIDSGDSVVAKYINRFRQAQPTSREERQPAGPTPADFWWLQSDSPDPSSQSAAAGANKPEGRPHTAVPTAVNVTSASHAVAPLQEIKQVTSPFTPSLGCLN

SEQ ID NO: 71535 - protein, 170 aa, Homo sapiens
MAPPVRYCIPGERLCNLEEGSPGSGTYTRHGYIFSSLAGCLMKSSENGAVSSINSRFAKVHILYVGSMPLKNSFRGTIRKEDVRATEKDKVEIYKSFRPGDIVLAKVISLGDAQSNYLLTTAENELGVVVAHSESGIQMVPISWCEMQCPKTHTKEFRKVARVQPEFLQT

SEQ ID NO: 71536 - protein, 22 aa, Homo sapiens
MKQIFFLDDSGPPFGHMVLALG

SEQ ID NO: 71537 - protein, 204 aa, Homo sapiens
MRPTFMSFRWLLLYYALCFSLSKASAHTVELNNMFGQIQSPGYPDSYPSDSEVTWNITVPDGFRIKLYFMHFNLESSYLCEYDYVKVETEDQVLATFCGRETTDTEQTPGQEVVLSPGSFMSITFRSDFSNEERFTGFDAHYMAVDVDECKEREDEELSCDHYCHNYIGGYYCSCRFGYILHTDNRTCRVECSDNLFTQRTGVI

SEQ ID NO: 71538 - protein, 150 aa, Homo sapiens
MQTLQNVSMVQSEISEILNKSIIEVENPQFSSEKNLVFGTRIEKDLPTENQEENLSMEKSHHFEDSKTLHSVEEKLSGDSVNSLPQSVNVPSQIHSEDTLTLRTSTDNLSSNIIIHPSENSDILKNYNNFYRFLPTAPPNVMSQADTVIL

SEQ ID NO: 71539 - protein, 74 aa, Homo sapiens
MYRVPEFYARRKRLGGQTPYLMDQLGLRLGMWYWKDETRTLEFRRFAAEDSVQWLLKHHPHAPIPKLAENQQSA

SEQ ID NO: 71540 - protein, 810 aa, Homo sapiens
MRNLKLFRTLEFRDIQGPGNPQCFSLRTEQGTVLIGSEHGLIEVDPVSREVKNEVSLVAEGFLPEDGSGRIVGVQDLLDQESVCVATASGDVILCSLSTQQLECVGSVASGISVMSWSPDQELVLLATGQQTLIMMTKDFEPILEQQIHQDDFGESKFITVGWGRKETQFHGSEGRQAAFQMQMHESALPWDDHRPQVTWRGDGQFFAVSVVCPETGARKVRVWNREFALQSTSEPVAGLGPALAWKPSGSLIASTQDKPNQQDIVFFEKNGLLHGHFTLPFLKDEVKVNDLLWNADSSVLAVWLEDLQREESSIPKTCVQLWTVGNYHWYLKQSLSFSTCGKSKIVSLMWDPVTPYRLHVLCQGWHYLAYDWHWTTDRSVGDNSSDLSNVAVIDGNRVLVTVFRQTVVPPPMCTYQLLFPHPVNQVTFLAHPQKSNDLAVLDASNQISVYKCGDCPSADPTVKLGAVGGSGFKVCLRTPHLEKRYKIQFENNEDQDVNPLKLGLLTWIEEDVFLAVSHSEFSPRSVIHHLTAASSEMDEEHGQLNVSSSAAVDGVIISLCCNSKTKSVVLQLADGQIFKYLWESPSLAIKPWKNSGGFPVRFPYPCTQTELAMIGEEECVLGLTDRCRFFINDIEVASNITSFAVYDEFLLLTTHSHTCQCFCLRDASFKTLQAGLSSNHVSHGEVLRKVERGSRIVTVVPQDTKLVLQMPRGNLEVVHHRALVLAQIRKWLDKLMFKEAFECMRKLRINLNLIYDHNPKVFLGNVETFIKQIDSVNHINLFFTELKRRCHEDHVPCTSYQQCLPVQGS

SEQ ID NO: 71541 - protein, 198 aa, Homo sapiens
MATGDLKRSLRNLEQVLRLLNYPEEVDCVGLIKGDPAASLPIISYSFTSYSPYVTELIMESNVELIAKNDLRFIDAVYKLLRDQFNYKPILTKKQFIQCGFAEWKIQIVCDILNCVMKKHKELSSLQKIPSQQRKKISSGKSEPPLGNEKISAEAVGVDISGRFMTSGKKKAVVIRHLYNEDNVDISEDTLSPITDVN

SEQ ID NO: 71542 - protein, 681 aa, Homo sapiens
MERGKMAEAESLETAAEHERILREIESTDTACIGPTLRSVYDGEEHGRFMEKLETRIRNHDREIEKMCNFHYQGFVDSITELLKVRGEAQKLKNQVTDTNRKLQHEGKELVIAMEELKQCRLQQRNISATVDKLMLCLPVLEMYSKLRDQMKTKRHYPALKTLEHLEHTYLPQVSHYRFCKVMVDNIPKLREEIKDVSMSDLKDFLESIRKHSDKIGETAMKQAQQQRNLDNIVLQQPRIGSKRKSKKDAYIIFDTEIESTSPKSEQDSGILDVEDEEDDEEVPGAQDLVDFSPVYRCLHIYSVLGARETFENYYRKQRRKQARLVLQPPSNMHETLDGYRKYFNQIVGFFVVEDHILHTTQGLVNRAYIDELWEMALSKTIAALRTHSSYCSDPNLVLDLKNLIVLFADTLQVYGFPVNQLFDMLLEIRDQYSETLLKKWAGIFRNILDSDNYSPIPVTSEEMYKKVVGQFPFQDIELEKQPFPKKFPFSEFVPKVYNQIKEFIYACLKFSEDLHLSSTEVDDMIRKSTNLLLTRTLSNSLQNVIKRKNIGLTELVQIIINTTHLEKSCKYLEEFITNITNVLPETVHTTKLYGTTTFKDARHAAEEEIYTNLNQKIDQFLQLADYDWMTGDLGNKASDYLVDLIAFLRSTFAVFTHLPVSGSCLLCPLYIKRFPYNLVW

SEQ ID NO: 71543 - protein, 300 aa, Homo sapiens
RAEEDEDKEDDFRAPLYKTVEIKGIQVRMKWCATCRFYRPPRCSHCSVCDNCVEVTGKFRGGVNPFTNGCCNNVSRVLCSSPAPRYLGRPKKEKTIVIRPPFLRPEVSDGQITVKIMDNGIQGELRRTKSKGSLEITESQSADAEPPPPPKPDLSRYTGLRTHLGLATNEDSSLLAKDSPPTPTMYKYRPGYSSSSTSAAMPHSSSAKLSRGDSLKEPTSIAESSRHPSYRSEPSLEPESFRSPTFGKSFHFDPLSSGSRSSSLKSAQGTGFELGQLQSIRSEGTTSTSYKSLANQTRNG

SEQ ID NO: 71544 - protein, 641 aa, Homo sapiens
MGHPPLEFSDCYLDSPDFRERLKCYEQELERTNKFIKDVIKDGNALISAMRNYSSAVQKFSQTLQSFQFDFIGDTLTDDEINIAESFKEFAELLNEVENERMMMVHNASDLLIKPLENFRKEQIGFTKERKKKFEKDGERFYSLLDRHLHLSSKKKESQLQEADLQVDKERHNFFESSLDYVYQIQEVQESKKFNIVEPVLAFLHSLFISNSLTVELTQDFLPYKQQLQLSLQNTRNHFSSTREEMEELKKRMKEAPQTCKLPGQPTIEGYLYTQEKWALGISWVKYYCQYEKETKTLTMTPMEQKPGAKQGPLDLTLKYCVRRKTESIDKRFCFDIETNERPGTITLQALSEANRRLWMEAMDGKEPIYHSPITKQQEMELNEVGFKFVRKCINIIETKGIKTEGLYRTVGSNIQVQKLLNAFFDPKCPGDVDFHNSDWDIKTITSSLKFYLRNLSEPVMTYRLHKELVSAAKSDNLDYRLGAIHSLVYKLPEKNREMLELLIRHLVNVCEHSKENLMTPSNMGVIFGPTLMRAQEDTVAAMMNIKFQNIVVEILIEHFGKIYLGPPEESAAPPVPPPRVTARRHKPITISKRLLRERTVFYTSSLDESEGFKSLGLRGPFPGSERVFLLQTFVCGVILC

SEQ ID NO: 71545 - protein, 165 aa, Homo sapiens
MDFKIEHTWDGFPVKHEPVFIRLNPGDRGVMMDISAPFFRDPPAPLGEPGKPFNELWDYEVVEAFFLNDITEQYLEVELCPHGQHLVLLLSGRRNVWKQELPLSFRMSRGETKWEGKAYLPWSYFPPNVTKFNSFAIHGSKDKRSYEALYPVPQHELQQGQKPDL

SEQ ID NO: 71546 - protein, 93 aa, Homo sapiens
  MOD_RES (1)..(1): Any amino acid
XGVSLLLPRLECSGTISAHYNFPLPGSSDSPASASSVVGITGLLQLARGPLQTLFTWESQIEAVEWQKLLPAPSSGSFITEGHQPDANRSSPV

SEQ ID NO: 71547 - protein, 263 aa, Homo sapiens
MADDNGEPSDDLVPAILDTAHQYSIQVAFHIQPYKGRDDITVHDNIKYIIDTYGSHGAFYRYKNSMGKSLPLFYIYDSYLTSPEAWAHLLTPNGPHSIRNTPYDGVFIALLVEEGHTHDILAAGFDGMYTYFASNGFSFGSSHQNWKAVKNFCDANNLMFIPSVGPGYIDTSIRPWNNHNTRNRVNGKYYETALQAALTVRPEIVSITSFNEWHEGTQIEKAIPKKTPTRLYLDYLPHQPSLYLELTRRWAEHFIKEKEQWLM

SEQ ID NO: 71548 - protein, 145 aa, Homo sapiens
MCPGNWLWASMTFMARFSRSSSRSPVRTRGTLEEMPTVQHPFLNVFELERLLYTGKTACNHADEVWPGLYLGDQDMANNRRELRRLGITHVLNASHSRWRGTPEAYEGLGIRYLGVEAHDSPAFDMSIHFQTAADFIHRALSQPG

SEQ ID NO: 71549 - protein, 159 aa, Homo sapiens
MRRSSRKRRLRRRRRKKERERQAKLAEEKMRKEEEEAKKRAEDDAKKKKVLSNMGAHFGGYLVKAEQKRGKRQTGREMKVRILSERKKPLDIDYMGEEQLREKAQELSDWIHQLESEKFDLMAKLKQQKYEINVLYNRISHAQKFRKGAGKGRVGGRWK

SEQ ID NO: 71550 - protein, 119 aa, Homo sapiens
  MOD_RES (1)..(1): Any amino acid
XSIENARRKREHDKLMKEVGEIKARKREQIKALRSEFCNLLEMNEKLPKHMQFKRTDFDVDSQIRAEMHRKTAFKIQQVEKELAWEKEKHELGLMKLKNRWECYHTRRINNRKREEISA

SEQ ID NO: 71551 - protein, 53 aa, Homo sapiens
MENLTKHSIECSSFRDPPQALPETQLCVSSSYSLWSSDCKAISMPRQGLSWRA

SEQ ID NO: 71552 - protein, 242 aa, Homo sapiens
MLPPQKKPWESMAKGLVLGALFTSFLLLVYSYAVPPLHAGLASTTPEAAASCSPPALEPEAVIRANGSAGECQPRRNIVFLKTHKTASSTLLNILFRFGQKHRLKFAFPNGRNDFDYPTFFARSLVQDYRPGACFNIICNHMRFHYDEVRGLVPTNAIFITVLRDPARLFESSFHYFGPVVPLTWKLSAGDKLTEFLQDPDRYYDPNGFNAHYLRNLLFFDLGYDNSLDPSSPQVQEHILEV

SEQ ID NO: 71553 - protein, 191 aa, Homo sapiens
MTNDSEGKMGFKHPKIMGNFRGHALPGTFFFIIGLWWCTKSILKYICKKQKRTCYLGSKTLFYRLEILEGITIVGMALTGMAGEQFIPGGPHLMLYDYKQGHWNQLLGWHHFTMYFFFGLLGVADILCFTISSLPVSLTKLMLSNALFVEAFIFYNHTHGREMLDIFVHQLLVLVVFLTGLVAFLEFLVRN

SEQ ID NO: 71554 - protein, 211 aa, Homo sapiens
MTATLAAAADIATMVSGSSGLAAARLLSRSFLLPQNGIRHCSYTASRQHLYVDKNTKIICQGFTGKQGTFHSQQALEYGTKLVGGTTPGKGGQTHLGLPVFNTVKEAKEQTGATASVIYVPPPFAAAAINEAIEAEIPLVVCITEGIPQQDMVRVKHKLLRQEKTRLIGPNCPGVINPGECKIGIMPGHIHKKGRIVFAISTCLDLRSKKS

SEQ ID NO: 71555 - protein, 1514 aa, Homo sapiens
MSTPTDPGAMPHPGPSPGPGPSPGPILGPSPGPGPSPGSVHSMMGPSPGPPSVSHPMPTMGSTDFPQEGMHQMHKPIDGIHDKGIVEDIHCGSMKGTGMRPPHPGMGPPQSPMDQHSQGYMSPHPSPLGAPEHVSSPMSGGGPTPPQMPPSQPGALIPGDPQAMSQPNRGPSPFSPVQLHQLRAQILAYKMLARGQPLPETLQLAVQGKRTLPGLQQQQQQQQQQQQQQQQQQQQQQQPQQQPPQPQTQQQQQPALVNYNRPSGPGPELSGPSTPQKLPVPAPGGRPSPAPPAAAQPPAAAVPGPSVPQPAPGQPSPVLQLQQKQSRISPIQKPQGLDPVEILQEREYRLQARIAHRIQELENLPGSLPPDLRTKATVELKALRLLNFQRQLRQEVVACMRRDTTLETALNSKAYKRSKRQTLREARMTEKLEKQQKIEQERKRRQKHQEYLNSILQHAKDFKEYHRSVAGKIQKLSKAVATWHANTEREQKKETERIEKERMRRLMAEDEEGYRKLIDQKKDRRLAYLLQQTDEYVANLTNLVWEHKQAQAAKEKKKRRRRKKKAEENAEGGESALGPDGEPIDESSQMSDLPVKVTHTETGKVLFGPEAPKASQLDAWLEMNPGYEVAPRSDSEESDSDYEEEDEEEESSRQETEEKILLDPNSEEVSEKDAKQIIETAKQDVDDEYSMQYSARGSQSYYTVAHAISERVEKQSALLINGTLKHYQLQGLEWMVSLYNNNLNGILADEMGLGKTIQTIALITYLMEHKRLNGPYLIIVPLSTLSNWTYEFDKWAPSVVKISYKGTPAMRRSLVPQLRSGKFNVLLTTYEYIIKDKHILAKIRWKYMIVDEGHRMKNHHCKLTQVDLNEEETILIIRRLHKVLRPFLLRRLKKEVESQLPEKVEYVIKCDMSALQKILYRHMQAKGILLTDGSEKDKKGKGGAKTLMNTIMQLRKICNHPYMFQHIEESFAEHLGYSNGVINGAELYRASGKFELLDRILPKLRATNHRVLLFCQMTSLMTIMEDYFAFRNFLYLRLDGTTKSEDRAALLKKFNEPGSQYFIFLLSTRAGGLGLNLQAADTVVIFDSDWNPHQDLQAQDRAHRIGQQNEVRVLRLCTVNSVEEKILAAAKYKLNVDQKVIQAGMFDQKSSSHERRAFLQAILEHEEENEEEDEVPDDETLNQMIARREEEFDLFMRMDMDRRREDARNPKRKPRLMEEDELPSWIIKDDAEVERLTCEEEEEKIFGRGSRQRRDVDYSDALTEKQWLRAIEDGNLEEMEEEVRLKKRKRRRNVDKDPAKEDVEKAKKRRGRPPAEKLSPNPPKLTKQMNAIIDTVINYKDSSGRQLSEVFIQLPSRKELPEYYELIRKPVDFKKIKERIRNHKYRSLGDLEKDVMLLCHNAQTFNLEGSQIYEDSIVLQSVFKSARQKIAKEEESEDESNEEEEEEDEEESESEAKSVKVKIKLNKKDDKGRDKGKGKKRPNRGKAKPVVSDFDSDEEQDEREQSEGSGTDDE

SEQ ID NO: 71556 - protein, 76 aa, Homo sapiens
MCKDSQKPSVPSHGPKTPSCKGVKAPHSSRPRAWKQDLEQSLAAAYVPVVVDSKGQNPDKLRVQSPLGLQGFSGDS

SEQ ID NO: 71557 - protein, 221 aa, Homo sapiens
FFPSYPVMEKSLEFWRARDLARKMEALKPLFVEPRSKGSFSETISAYYARVAAPGSTGATFLAVCRGKFLSGQEWYRQQASRAVNQAIGRVIRHRQDYGAVFLCDHRFAFADARAQLPSWVRPHVRVYDNFGHVIRDVAQFFRVAERTMPAPAPRATAPSVRGEDAVSEAKSPGPFFSTRKAKSLDLHVPSLKQRSSGSPAAGDPESSLCVEYEQEPVPAR

SEQ ID NO: 71558 - protein, 93 aa, Homo sapiens
MSRFKFIGMFFSTVGCHPTRCGEFEKNNPDLYLKELLNLAENNKGKVVAIGECGLDFDRLQFCPKDTQLKYFEKQFELSEQTKLPMFLHCRNS

SEQ ID NO: 71559 - protein, 63 aa, Homo sapiens
GPSLSAPHVLGLAALAVHLGESRSALPEVDVGPPAPGAGLPVPALFDSLLTCRTRDSLFFCLK

SEQ ID NO: 71560 - protein, 114 aa, Homo sapiens
MASVPVYCLCRLPYDVTRFMIECDMCQDWFHGSCVGVEEEKAADIDLYHCPNCEVLHGPSIMKKRRGSSKGHDTHKGKPVKTGSPTFVRELRSRTFDSSDEVILKPTGNQLTVE

SEQ ID NO: 71561 - protein, 115 aa, Homo sapiens
MCVCQDPTSCPAPIGEFEKVCSNDNKTFDSSCHFFATKCTLEGTKKGHKLHLDYIGPCKYIPPCLDSELTEFPLRMRDWLKNVLVTLYERDEDNNLLTEKQKLRVKKIHENEKRL

SEQ ID NO: 71562 - protein, 192 aa, Homo sapiens
MSYYLSSENHLDPGPIYMRENGQLHMVNLALDGVRSSLQKPRPFRLFPKGFSVELCMNREDDTARKEKTDHFIFTYTREGNLRYSAKSLFSLVLGFISDNVDHIDSLIGFPEQIAEKLFSAAEARQKFTEPGAGLRALQKFTEAYGSLVLCSLCLRNRYLVISEKLEEIKSFRELTCLDLSCCKLGDEHELL

SEQ ID NO: 71563 - protein, 48 aa, Homo sapiens
  MOD_RES (1)..(1): Any amino acid
XTFLGAAVFRHPAFISPAFGRLHLPCHSSDPLPTTPPYVQAPIYTAVQ

SEQ ID NO: 71564 - protein, 194 aa, Homo sapiens
RKGRQSNWNPQHLLILQAQFASSLFQTSEGKYLLSDLGPQERMQISKFTGLSMTTISHWLANVKYQLRKTGGTKFLKNMDKGHPIFYCSDCASQFRTPSTYISHLESHLGFQMKDMTRLSVDQQSKVEQEISRVSSAQRSPETIAAEEDTDSKFKCKLCCRTFVSKHAVKLHLSKTHSKSPEHHSQFVTDVDEE

SEQ ID NO: 71565 - protein, 859 aa, Homo sapiens
MVPWVRTMGQKLKQRLRLDVGREICRQYPLFCFLLLCLSAASLLLNRYIHILMIFWSFVAGVVTFYCSLGPDSLLPNIFFTIKYKPKQLGLQELFPQGHSCAVCGKVKCKRHRPSLLLENYQPWLDLKISSKVDASLSEVLELVLENFVYPWYRDVTDDESFVDELRITLRFFASVLIRRIHKVDIPSIITKKLLKAAMKHIEVIVKARQKVKNTEFLQQAALEEYGPELHVALRSRRDELHYLRKLTELLFPYILPPKATDCRSLTLLIREILSGSVFLPSLDFLADPDTVNHLLIIFIDDSPPEKATEPASPLVPFLQKFAEPRNKKPSVLKLELKQIREQQDLLFRFMNFLKQEGAVHVLQFCLTVEEFNDRILRPELSNDEMLSLHEELQKIYKTYCLDESIDKIRFDPFIVEEIQRIAEGPYIDVVKLQTMRCLFEAYEHVLSLLENVFTPMFCHSDEYFRQLLRGAESPTRNSKLNRGSLSLDDFRNTQKRGESFGISRIGSKIKGVFKSTTMEGAMLPNYGVAEGEDDFIEEGIVVMEDDSPVEAVSTPNTPRNLAAWKISIPYVDFFEDPSSERKEKKERIPVFCIDVERNDRRAVGHEPEHWSVYRRYLEFYVLESKLTEFHGAFPDAQLPSKRIIGPKNYEFLKSKREEFQEYLQKLLQHPELSNSQLLADFLSPNGGETQFLDKILPDVNLGKIIKSVPGKLMKEKGQHLEPFIMNFINSCESPKPKPSRPELTILSPTSENNKKLFNDLFKNNANRAENTERKQNQNYFMEVMTVEGVYDYLMYVDLLVKCIGEETKYESIRLLFDGLQQPVLNKQLTYVLLDIVIQELFPELNKVQKEVTSVTSWM

SEQ ID NO: 71566 - protein, 103 aa, Homo sapiens
MVRISKPKTFQAYLDDCHRRYSCAHCRAHLANHDDLISKSFQGSQGRAYLFNSVVNVGCGPAEERVLLTGLHAVADIHCENCKTTLGWKYEQAFESSQKYKEG

SEQ ID NO: 71567 - protein, 317 aa, Homo sapiens
  MOD_RES (1)..(1): Any amino acid
XLGILKAVNDSMHLIAITGYDGNLGDLGKLLMQGSFSVWTDHKRGHTKVKELARFKPMQRHLFLHEKAVLFCKKREENGEGYEKAPSYSYKQSLNMAAVGITENVKGDAKKFEIWYNAREEVYIVQAPTPEIKAAWVNEIRKVLTSQLQACREASQHRALEQSQSLPLPAPTSTSPSRGNSRNIKKLEERKTDPLSLEGYVSSAPLTKPPEKGKDDTVTSSASESSALSRKRFTLQGFANLKASPTSPDKKAKRHEVKSDPTPFGVRGWSKTSHSLEAPEDDGGWSSAEEQINSSDAEEDGGLGPKKLVPGKYTVVA

SEQ ID NO: 71568 - protein, 350 aa, Homo sapiens
  MOD_RES (1)..(1): Any amino acid
XTVEKVEKFGLYGLAEKTLFHRVQVLEVNQKEDAWALDDILVEFIDEGRTGLVTRDQLLHLPEHFHTLPPQAVEFIVCRVKPADNEIEWNPKVTRYIHHKIVGKLHDAKVILALGNTVWIDPMVHITNLSSLKTSVIDYNVRAEILSMGMGIDNPEHIEQLKKLREDAKIPACEESLSQTPPRVTGTSPAQDQDHPSEEQGGQGTPPAEDAACLQSPQPEDTGAEGGAESKTSSENQKPETLSGNTEGAFISRTAQPPLKSFHPQIKWFQKEDVVILKIRIRNVKDYKCQYLRDRVVFSAWVGDKFYLADLELRGNIRKDDCQCVIRNDEPVITLAKERREAWCHLLRQR

SEQ ID NO: 71569 - protein, 112 aa, Homo sapiens
MDSELMHSIVGSYHKPPERVFVPSFTQNEPSQNCHPANLEVTSPKILHSPNSQALILALKTLQEKIHRLELERTQAEDNLNILSREAAQYKKALENETNERNLAHQELIKQK

SEQ ID NO: 71570 - protein, 84 aa, Homo sapiens
MAAEEEEVDSADTGERSGWLTGWLPTWCPTSISHLKEAEEKMLKYLSMLLTYWVLDEVVDPGLTVMQKKWRISLWNPLKSGDVP

SEQ ID NO: 71571 - protein, 144 aa, Homo sapiens
MDPLETPIKDGILYQQHVKFGKKCWRKVWALLYAGGPSGVARLESWEVRDGGLGAAGDRSAGPGRRGERRVIRLADCVSVLPADGESCPRDTGAFLLTTTERSHLLAAQHRQAWMGPICQLAFPGTGEASSGSTDAQSPKRGLV

SEQ ID NO: 71572 - protein, 100 aa, Homo sapiens
MARDLIGPALPPGFKARGTAEDEERDPSPGKRRRLRCPPGPSTHSLAGPCSLKKVGGLGGRRSGEWARPDPRELFSSQTVAGGRRLGDPPRNELWRGLAS

SEQ ID NO: 71573 - protein, 233 aa, Homo sapiens
MLREEATKKSKEKEPGMALPQGRLTFRDVAIEFSLEEWKCLNPAQRALYRAVMLENYRNLEFVDISSKCMMKEFSSTAQGNTEVIHTGTLQRHESHHIRDFCFQEIEKDIHNFEFQWQEEERNGHEAPMTEIKELTGSTDRHDQRHAGNKPIKDQLGSSFHSHLPELHIFQPEWKIGNQVEKSIINASLILTSQRISCSPKTRISNNYGNNSLHSSLPIQKLGSTHERKIFPM

SEQ ID NO: 71574 - protein, 225 aa, Homo sapiens
  MOD_RES (1)..(1): Any amino acid
XAAMAFCFLETLWWEFTASYDTTCIGLASRPYAFLEFDSIIQKVKWHFNYVSSSQMECSLEKIQEELKLQPPAVLTLEDTDVANGVMNGHTPMHLEPAPNFRMEPVTALGILSLILNIMCAALNLIRGVHLAEHSLQVAHEEIGNILAFLVPFVACIFQCYLYLFYSPARTMKVVLMLLFICLGNMYLHGLRNLWQILFHIGVAFLSSYQILTRQLQEKQSDCGV

SEQ ID NO: 71575 - protein, 526 aa, Homo sapiens
MSITSDEVNFLVYRYLQESGFSHSAFTFGIESHISQSNINGTLVPPAALISILQKGLQYVEAEISINEDGTVFDGRPIESLSLIDAVMPDVVQTRQQAFREKLAQQQASAAAAAAAATAAATAATTTSAGVSHQNPSKNREATVNGEENRAHSVNNHAKPMEIDGEVEIPSSKATVLRGHESEVFICAWNPVSDLLASGSGDSTARIWNLNENSNGGSTQLVLRHCIREGGHDVPSNKDVTSLDWNTNGTLLATGSYDGFARIWTEDGNLASTLGQHKGPIFALKWNRKGNYILSAGVDKTTIIWDAHTGEAKQQFPFHSAPALDVDWQNNTTFASCSTDMCIHVCRLGCDRPVKTFQGHTNEVNAIKWDPSGMLLASCSDDMTLKIWSMKQEVCIHDLQAHNKEIYTIKWSPTGPATSNPNSNIMLASASFDSTVRLWDIERGVCTHTLTKHQEPVYSVAFSPDGKYLASGSFDKCVHIWNTQSGNLVHSYRGTGGIFEVCWNARGDKVGASASDGSVAYNALQL

SEQ ID NO: 71576 - protein, 264 aa, Homo sapiens
  MOD_RES (1)..(1): Any amino acid
XTLDNRVADQLWVPDTYFLNDKKSFVHGVTVKNRMIRLHPDGTVLYGLRITTTAACMMDLRRYPLDEQNCTLEIESYGYTTDDIEFYWRGGDKAVTGVERIELPQFSIVEHRLVSRNVVFATGAYPRLSLSFRLKRNIGYFILQTYMPSILITILSWVSFWINYDASAARVALGITTVLTMTTINTHLRETLPKIPYVKAIDMYLMGCFVFVFLALLEYAFVNYIFFGRGPQRQKKLAEKTAKAKNDRSKSESNRENDFTFLIS

SEQ ID NO: 71577 - protein, 346 aa, Homo sapiens
MSLHFLYYCSEPTLDVKIAFCQGFDKQVDVSYIAKHYNMSKSKVDNQFYSVEVGDSTFTVLKRYQNLKPIGSGAQGIVCAAYDAVLDRNVAIKKLSRPFQNQTHAKRAYRELVLMKCVNHKNIISLLNVFTPQKTLEEFQDVYLVMELMDANLCQVIQMELDHERMSYLLYQMLCGIKHLHSAGIIHRDLKPSNIVVKSDCTLKILDFGLARTAGTSFMMTPYVVTRYYRAPEVILGMGYKENVDIWSVGCIMGEMVRHKILFPGRDYIDQWNKVIEQLGTPCPEFMKKLQPTVRNYVENRPKYAGLTFPKLFPDSLFPADSEHNKLKASQARDLLSKMLVIDPAK

SEQ ID NO: 71578 - protein, 310 aa, Homo sapiens
MEEENATLLTEFVLTGFLYQPQWKIPLFLAFLVIYLITIMGNLGLIAVIWKDPHLHIPMYLLLGNLAFVDAWISSTVTPKMLNNFLAKSKMISLSECKIQFFSIAIGVTTECFLLATMAYDRYVAICKPLLYPAIMTNGLCIRLLILSYIAGILHALIHEGFLFRLTFCNSNIVHHIYCDTIPLSKISCTDSSINFLMVFIFSGSIQVFSIVTILISYTFVLFTVLEKKSDKGVRKAFSTCGAHLFSVCLYYGPLLLMYVGPASPQADGQNMVEPLFYTVIIPLLNPIIYSLRNKQVIVSFIKMLKRNGI

SEQ ID NO: 71579 - protein, 138 aa, Homo sapiens
MDGSRRAAVDCSVPVSVSTSIKYADQQRREKLKKELAQCEKEFKLTKTAMRANYKNNSKSLFNTLQKPSGEPQIEDDMLKEEMNGFSSFARSLVPSSERLHLSLHKSSKVITNGPEKNSSSSPSSVDYAASGPRKLSS

SEQ ID NO: 71580 - protein, 579 aa, Homo sapiens
MIQSDKGADPPDKKDMKLSTATNPQNGLSQILRLVLQELSLFYGRDVNGVCLLYDLLHSPWLQALLKIYDCLQEFKEKKLVPATPHAQVLSYEALLSAHDTIAQKDFEPLLPPLPDNIPESEEAMRIVCLVKNQQPLGATIKRHEMTGDILVARIIHGGLAERSGLLYAGDKLVEVNGVSVEGLDPEQVIHILAMSRGTIMFKVVPVSDPPVNSQQMVYVRAMTEYWPQEDPDIPCMDAGLPFQKGDILQIVDQNDALWWQARKISDPATCAGLVPSNHLLKRKQREFWWSQPYQPHTCLKSTLYKEEFVGYGQKFFIAGFRRSMRLCRRKSHLSPLHASVCCTGSCYSAVGAPYEEVVRYQRRPSDKYRLIVLMGPSGVGVNELRRQLIEFNPSHFQSAVPHTTRTKKSYEMNGREYHYVSKETFENLIYSHRMLEYGEYKGHLYGTSVDAVQTVLVEGKICVMDLEPQDIQGVRTHELKPYVIFIKPSNMRCMKQSRKNAKVITDYYVDMKFKDEDLQEMENLAQRMETQFGQFFDHVIVNDSLHDACAQLLSAIQKAQEEPQWVPATWISSDTESQ

SEQ ID NO: 71581 - protein, 108 aa, Homo sapiens
MRANVINEIMSTERHYIKHLKDICEGYLKQCRKRRDMFSDEQLKVIFGNIEDIYRFQMGFVRDLEKQYNNDDPHLSEIGPCFLEHQDGFWIYSEYCNNHLDACMELSK

SEQ ID NO: 71582 - protein, 126 aa, Homo sapiens
MIGEEVPSDQYYWAPLAQHERGSLASLDSLRKGGPPPPNWRQPELPEVIAMLGFRLDAVKSNAAAYLQHLCYRNDKVKTDVRKLKGIPVLVGLLDHPKKEVHLGACGALKNISFGRDQDNKIAIKN

SEQ ID NO: 71583 - protein, 449 aa, Homo sapiens
MELSMGPIQANHTGTGLLLTLQPEQKFQKVKGFGGAMTDAAALNILALSPPAQNLLLKSYFSEEGIGYNIIRVPMASCDFSIRTYTYADTPDDFQLHNFSLPEEDTKLKIPLIHRALQLAQRPVSLLASPWTSPTWLKTNGAVNGKGSLKGQPGDIYHQTWARYFVKFLDAYAEHKLQFWAVTAENEPSAGLLSGYPFQCLGFTPEHQRDFIARDLGPTLANSTHHNVRLLMLDDQRLLLPHWAKVVLTDPEAAKYVHGIAVHWYLDFLAPAKATLGETHRLFPNTMLFASEACVGSKFWEQSVRLGSWDRGMQYSHSIITNLLYHVVGWTDWNLALNPEGGPNWVRNFVDSPIIVDITKDTFYKQPMFYHLGHFSKFIPEGSQRVGLVASQKNDLDAVALMHPDGSAVVVVLNRSSKDVPLTIKDPAVGFLETISPGYSIHTYLWCRQ

SEQ ID NO: 71584 - protein, 117 aa, Homo sapiens
  MOD_RES (1)..(1): Any amino acid
XLSQSSSHAHCFSNSSYHALACGGPATSQASTLDRNSPTKLSNKSLDRDTAGWTPYSYVNVLDSHFQISALEARYPPEDFYIELRHLSRPAEPHSPDKPWIQERTDRTRAERCLWNG

SEQ ID NO: 71585 - protein, 683 aa, Homo sapiens
MPENPATDKLQVLQVLDRLKMKLQEKGDTSQNEKLSMFYETLKSPLFNQILTLQQSIKQLKGQLNHIPSDCSANFDFSRKGLLVFTDGSITNGNVHRPSNNSTVSGLFPWTPKLGNEDFNSVIQQMAQGRQIEYIDIERPSTGGLGFSVVALRSQNLGKVDIFVKDVQPGSVADRDQRLKENDQILAINHTPLDQNISHQQAIALLQQTTGSLRLIVAREPVHTKSSTSSSLNDTTLPETVCWGHVEEVELINDGSGLGFGIVGGKTSGVVVRTIVPGGLADRDGRLQTGDHILKIGGTNVQGMTSEQVAQVLRNCGNSVRMLVARDPAGDISVTPPAPAALPVALPTVASKGPGSDSSLFETYNVELVRKDGQSLGIRIVGYVGTSHTGEASGIYVKSIIPGSAAYHNGHIQVNDKIVAVDGVNIQGFANHDVVEVLRNAGQVVHLTLVRRKTSSSTSPLEPPSDRGTVVEPLKPPALFLTGAVETETNVDGEDEEIKERIDTLKNDNIQALEKLEKVPDSPENELKSRWENLLGPDYEVMVATLDTQIADDAELQKYSKLLPIHTLRLGVEVDSFDGHHYISSIVSGGPVDTLGLLQPEDELLEVNGMQLYGKSRREAVSFLKEVPPPFTLVCCRRLFDDEASVDEPRRTETSLPETENSLKYKRLTTIWMSILKKMMMGN

SEQ ID NO: 71586 - protein, 356 aa, Homo sapiens
MATTAAPAGGARNGAGPEWGGFEENIQEPLSSQGGGSAVIDMENMDDTSGSSFEDMGELHQRLREEEVDADAADAAAAEEEDGEFLGMKGFKGQLSRQVADQMWQAGKRQASRAFSLYANIDILRPYFDVEPAQVRSRLLESMIPIKMVNFPQKIAGELYGPLMLVFTLVAILLHGMKTSDTIIREGTLMGTAIGTCFGYWLGVSSFIYFLAYLCNAQITMLQMLALLGYGLFGHCIVLFITYNIHLHALFYLFWLLVGGLSTLRMVAVLVSRTVGPTQRLLLCGTLAALHMLFLLYLHFAYHKVVEGILDTLEGPNIPPIQRVPRDIPAMLPAARLPTTVLNATAKAVAVTLQSH

SEQ ID NO: 71587 - protein, 59 aa, Homo sapiens
MSENAVRQNGQLVRNDSLWHRSDSAPRNKISRFQAPISAPEYTVTPSPQQARVCPPHML

SEQ ID NO: 71588 - protein, 416 aa, Homo sapiens
MASLSLAPVNIFKAGADEERAETARLTSFIGAIAIGDLVKSTLGPKGMDKILLSSGRDASLMVTNDGATILKNIGVDNPAAKVLVDMSRVQDDEVGDGTTSVTVLAAELLREAESLIAKKIHPQTIIAGWREATKAAREALLSSAVDHGSDEVKFRQDLMNIAGTTLSSKLLTHHKDHFTKLAVEAVLRLKGSGNLEAIHIIKKLGGSLADSYLDEGFLLDKKIGVNQPKRIENAKILIANTGMDTDKIKIFGSRVRVDSTAKVAEIEHAEKEKMKEKVERILKHGINCFINRQLIYNYPEQLFGAAGVMAIEHADFAGVERLALVTGGEIASTFDHPELVKLGSCKLIEEVMIGEDKLIHFSGVALGEACTIVLRGATQQILDEAERSLHDALCVLAQTVKDSRTVYGGVANHHS

SEQ ID NO: 71589 - protein, 232 aa, Homo sapiens
MMQCLIRKLAALSQYEEVLAKISSTSTDRLTVLKTKPQSIQRDIITVCNDPYTLAQQLTHIELERLNYIGPEEFVQAFVQKDPLDNDKSCYSERKKTRNLEAYVEWFNRLSYLVATEICMPVKKKHRARMIEYFIDVARECFNIGNFNSLMAIISGMNMSPVSRLKKTWAKVKTAKFDILEHQMDPSSNFYNYRTALRGAAQRSLTAHSSREKIVIPFFSLLIKDIYFLNEG

SEQ ID NO: 71590 - protein, 178 aa, Homo sapiens
MDHTEGSPAEEPPAHAPSPGKFGERPPPKRLTREAMRNYLKERGDQTVLILHAKVAQKSYGNEKRFFCPPPCVYLMGSGWKKKKEQMERDGCSEQESQPCAFIGIGNSDQEMQQLNLEGKNYCTAKTLYISDSDKRKHFMLSVKMFYGNSDDIGVFLSKRIKVISKPSKKKQSLKNAD

SEQ ID NO: 71591 - protein, 201 aa, Homo sapiens
MSFRDLRNFTEMMRALGYPRHISMENFRTPNFGLVSEVLLWLVKRYEPQTDIPPDVDTEQDRVFFIKAIAQFMIADLKAARQLASEITSKGASLYDLLGMEVELREMRTEAIARPLEINETEKVMRIAIKEILTQVQKTKDLLNNVASDEANLEAKIEKRKLELERNRKRLETLQSVRPCFMDEYEKTEEELQKQYDTYLE

SEQ ID NO: 71592 - protein, 231 aa, Homo sapiens
MYQVSGQRPSGCDAPYGAPSAAPGPAQTLSLLPGLEVVTGSTHPAEAAPEEGSLEEAATPMPQGNGPGIPQGLDSTDLDVPTEAVTCQPQGNPLGCTPLLPNDSGHPSELGGTRRAGNGALGGPKAHRKLQTHPSLASQGSKKSKSSSKSTTSQIPLQAQEDCCVHCILSCLFCEFLTLCNIVLDCATCGSCSSEDSCLCCCCCGSGECADCDLPCDLDCGILDACCESAD

SEQ ID NO: 71593 - protein, 69 aa, Homo sapiens
  MOD_RES (1)..(1): Any amino acid
XFSSASGASARINSSSVKQEATFCSQRDGDASLNKALSSSADDASLVNASISSSVVKSYFSSEIYYIYH

SEQ ID NO: 71594 - protein, 61 aa, Homo sapiens
MAAQIPESDQIKQFKEFLGTYNKLTETCFLDCVKDFTTREVKPEEQNEALAAKAGLLGQPR

SEQ ID NO: 71595 - protein, 198 aa, Homo sapiens
  MOD_RES (1)..(1): Any amino acid
XGEKVYWTCRDQARMGCRSRAITQGRRVTVMRGHCHPPDLGGLEALRQREKRPNTAQRGSPERQCCEVPASSSPPLLTPQSPGVTPLPARLSGATPLSPIRLLSSFVPRGPRVIPLTNQARRTLHASLGGCWGRTSDAADTASLKAWQGGPEFLKTPLGGSFLVYESFLYRREKAAGEKVYWTCRDQARMGCRSRAIT

SEQ ID NO: 71596 - protein, 210 aa, Homo sapiens
MEQAIHSRVKPIQLKGEHHSNIFCLAFNSGNTKVFSGGNDEQVILHDVESETLDVFAHEDAVYGLSVSPVNDNIFASSSDDGRVLIWDIRESPHGEPFCLANYPSAFHSVMFNPVEPRLLATANSKEGVGLWDIRKPQSSLLRYGGNLSLQSAMSVRFNSNGTQLLALRRRLPPVLYDIHSRLPVFQFDNQGYFNSCTMKSCCFAGDRDQ

SEQ ID NO: 71597 - protein, 30 aa, Homo sapiens
MASALWTVLPSRMSLRSLKWSLLLLSLLSF

SEQ ID NO: 71598 - protein, 83 aa, Homo sapiens
METLTSRHEKRALHSQASAISQDREEKIMSQEPLSFKDVAVVFTEEELELLDSTQRQLYQDVMQENFRNLLSVGERNPLGNWN

SEQ ID NO: 71599 - protein, 3960 aa, Homo sapiens
MSDANKAAIAAEKEALNLKLPPIVHLPENIGVDTPTQSKLLKYRRSKEQQQKINQLVIDGAKRNLDRTLGKRTPLLPPPDYPQTMTSEMKKKGFNYIYMKQCVESSPLVPIQQEWLDHMLRLIPESLKEGKEREELLESLINEVSSDFENSMKRYLVQSVLVKPPVKSLEDEGGPLPESPVGLDYSNPWHSSYVQARNQIFSNLHIIHPTMKMLLDLGYTTFADTVLLDFTGIRAKGPIDCESLKTDLSIQTRNAEEKIMNTWYPKVINLFTKKEALEGVKPEKLDAFYSCVSTLMSNQLKDLLRRTVEGFVKLFDPKDQQRLPIFKIELTFDDDKMEFYPTFQDLEDNVLSLVERIAEALQNVQTIPSWLSGTSTPVNLDTELPEHVLHWAVDTLKAAVHRNLEGARKHYETYVEKYNWLLDGTAVENIETFQTEDHTFDEYTEFIEKFLSLASEIMLLPQWIHYTMVRLDCEDLKTGLTNKAKAFANILLNDIASKYRKENECICSEFEAIKEHALKVPETTEEMMDLISYVEKARTVGIEELILRIQESKRQMSYFLDVFLFPQEDLALNATVLMWPRKINPIFDENDELIENAKHKKENELMAKREKLILEIEKESRRMEEFTEFAELERMQQYVTDVRQLQKRIQESEEAVQFINKEEELFKWELTKYPELDKLKVNIEPYQKFFNFVLKWQRSEKRWMDGGFLDLNGESMEADVEEFSREIFKTLKFFQTKLKKELQEKRKAARKRSLEEEKIEEEPKDNATITMCSTVMEQIKAFKEYIPTVSILCNPGMRARHWKQISEIVGYDLTPDSGTTLRKVLKLNLTPYLEQFEVISAGASKEFSLEKAMNTMIGTWEDIAFHISLYRDTGVCILSSVDEIQAILDDQIIKTQTMRGSPFIKPFEHEIKAWEDRLIRIQETIDEWLKVQAQWLYLEPIFCSEDIMQQMPEEGRQFQTVDRHWRDIMKFCAKDPKVLAATSLTGLLEKLQNCNELLEKIMKGLNAYLEKKRLFFPRFFFLSNDEMLEILSETKDPLRVQPHLKKCFEGIAKLEFLPNLDIKAMYSSEGERVELIALISTSAARGAVEKWLIQVEDLMLRSVHDVIAAARLAYPESARRDWVREWPGQVVLCISQMFWTSETQEVISGGTEGLKKYYKELQNQLNEIVELVRGKLSKQTRTTLGALVTIDVHARDVVMDMIKMGVSHDTDFLWLAQLRYYWENENARVRIINCNVKYAYEYLGNSPRLVITPLTDRCYRTLIGAFYLNLGGAPEGPAGTGKTETTKDLAKALAVQCVVFNCSDGLDYLAMGKFFKGLASSGAWACFDEFNRIELEVLSVVAQQILCIQRAIQQKLVVFVFEGTELKLNPNCFVAITMNPGYAGRSELPDNLKVLFRTVAMMVPNYALIAEISLYSYGFLNARPLSVKIVMTYRLCSEQLSSQFHYDYGMRAVKAVLVAAGNLKLKYPNENEDILLLRSIKDVNEPKFLSHDIPLFNGITSDLFPGIKLPEADYHEFLECAHEACNVHNLQPVKFFLEKIIQTYEMMIVRHGFMLVGEPFAAKTKVLHVLADTLTLMNEHGYGEEEKVIYRTVNPKSITMGQLFGQFDPVSHEWTDGIVANTFREFALSETPDRKWVVFDGPIDTLWIESMNTVLDDNKKLCLMSGEIIQMSPQMSLIFETMDLSQASPATVSRCGMIYLEPSQLGWEPLVSSWLNSLKGPLCEPEYQALLRGLFAWLIPPSLNQRKKKCKELIPTSNSNVVVSLTRLFEVLLCNVVENDPTSKHIRVWIMACFIFSLIWSIGGSCDTDGRRVFDTFIRLIILGKDDENPVPDSVGKWECPFDEKGLVYDYMYELKNKGRWVHWNELIKNTNLGDKQIKIQDIIVPTMDTIRYTFLMDLSITYAKPLLFVGPTGTGKSVYVKDKLMNHLEKDQYFPFYINLSARTSANQVQNIIMARLDKRRKGVFGPPMGKKCIIFIDDMNMPALEKYGAQPPIELLRQFFDCGHWYDLKDTSKITLVDIELIAAMGPPGGGRNPVTPRCIRHFNICSINSFSDETMVRIFSSIVAFYLRTHEFPPEYFVIGNQIVNGTMEIYKQSVENLLPTPTKSHYTFNLRDFSRVIRGCLLIERDAVANKHTMIRLFVHEVLRVFYDRLINDDDRRWLFQLTKTVIKDHFKESFHSIFSHLRKQNAPVTEEDLRNLMFGDYMNPDLEGDDRVYIEIPNIHHFSDVVDQCLDEYNQTHKTRMNLVIFRYVLEHLSRICRVLKQSGGNALLVGLGGSGRQSLTRLATSMAKMHIFQPEISKSYGMNEWREDMKGLLRNVGMKGQKTVFLITDTQIKEEAFLEDIDSVLNTGEVPNIFAADEKQEVMEGVRPVAQAGNKHDELSPLALFAFFVNRCKDNLHVVVAFSPIGDAFRNRLRQFPSLINCCTIDWFQSWPEDALERVAVKFLETLELTEVEQQEIVPICKHFHTSIMDLSERFLHELGRHNYVTATSYLELIGSFRQLLTQKRQAVMEAKQRYMNGLDKLAFAESQVGEMQMELVELQPKLEEAKIENANMMQVIEIESVQVEAKRQFVKLDEEIASGKAEEAQALKNECESDLAEAIPALEAALSALDTLKPADITIVKSMKNPPSGVKLVMAAVCVMKDIKPEKISDPSGTGGKILDYWGPSKKLLGDMNFLRDLKEYDKDNIPVTVMQKIRSEYLMNPEFDPPKVAKASSAAEGLCKWIMAMEVYDRVAKVVAPKKARLSEAQKSLAETMELLNQKRAELAEVEHHLENLQMTFLEKTEEKAALEDQVELCAKKLERASQLIGGLGGEKSRWAQAADDLQITYENLTGDVLVSAGVIAYLGAFTSGFRQTCTKDWSMLCKKKKIPCSEEFLLSKTLGDPVKIRAWNIAGLPTDTFSIDNGVIVNNCRRWPLMIDPQGQANKWIKNSEKENQLSVIKLSDSDYMRTLENCIQFGTPLLLENVGEELDPSLEPLLLRQTFKQGGIDCIRLGEVIIEYSFDFKFYITTKLRNPHYMPELATKVSLLNFMITPEGLEDQLLGIVVAKERPELEEERNALILQSAANKKQLKDIEKKILETLSSSEGNILEDESAIKVLDSAKMMSNEITKKQQIAEKTELKIAESREGYRPIAKHSSVLFFSIADLANIDPMYQYSLTWFVNLYINSIHDSNKSKILEKRLRYLNDHFTYNLYCNICRSLFEKDKLLFSFLLCANLLLARKEIEYQELMFLLTGGVSLKSAEKNPDPTWLQDKSWEEICRASEFPAFRGLRQHFCEHIYEWREIYDSKEPHNAKFPAPMDKNLNELQKIIILRCLRPDKITPAITNYVTDKLGKKFVEPPPFDLTKSYLDSNCTIPLIFVLSPGADPMASLLKFANDKSMSGNKFQAISLGQGQGPIAAKMIKAAIEEGTWVCLQNCHLAVSWMPMLEKICEDFTSETCNSSFRLWLTSYPSSKFPVTILQNGVKMTNEPPTGLRLNLLQSYLTDPVSDPEFFKGCRGKELAWEKLLFGVCFFHALVQERKKFGPLGWNIPYGFNESDLRISIRQLQLFINEYDTIPFEAISYLTGECNYGGRVTDDWDRRLLLTMLADFYNLYIVENPHYKFSPSGNYFAPPKGTYEDYIEFIKKLPFTQHPEIFGLHENVDISKDLQQTKTLFESLLLTQGGSKQTGASGSTDQILLEITKDILNKLPSDFDIEMALRKYPVRYEESMNTVLVQEMERFNNLIITIRNTLRDLEKAIKGVVVMDSALEALSGSLLVGKVPEIWAKRSYPSLKPLGSYITDFLARLNFLQDWYNSGKPCVFWLSGFFFTQAFLTGAMQNYARKYTTPIDLLGYEFEVIPSDTSDTSPEDGVYIHGLYLDGARWDRESGLLAEQYPKLLFDLMPIIWIKPTQKSRIIKSDAYVCPLYKTSERKGTLSTTGHSTNFVIAMLLKTDQPTRHWIKRGVALLCQLDD

SEQ ID NO: 71600 - protein, 45 aa, Homo sapiens
  MOD_RES (1)..(1): Any amino acid
XCDWETGHEPFNDPALRGEKDPKSGFDIKVPRRAVGPSSTQVLVP

SEQ ID NO: 71601 - protein, 427 aa, Homo sapiens
MSSFGAGKTKEVIFSVEDGSVKMFLRGRPVPMMIPDELAPTYSLDTRSELPSCRLKLEWVYGYRGRDCRANLYLLPTGEIVYFVASVAVLYSVEEQRQRHYLGHNDDIKCLAIHPDMVTIATGQVAGTTKEGKPLPPHVRIWDSVSLSTLHVLGLGVFDRAVCCVGFSKSNGGNLLCAVDESNDHMLSVWDWAKETKVVDVKCSNEAVLVATFHPTDPTVLITCGKSHIYFWTLEGGSLSKRQGLFEKHEKPKYVLCVTFLEGGDVVTGDSGGNLYVWGKGGNRITQAVLGAHDGGVFGLCALRDGTLVSGGGRDRRVVLWGSDYSKLQEVEVPEDFGPVRTVAEGHGDTLYVGTTRNSILQGSVHTGFSLLVQGHVEELWGLATHPSRAQFVTCGQDKLVHLWSSDSHQPLWSRIIEMAAAGHGDP

SEQ ID NO: 71602 - protein, 3172 aa, Homo sapiens
MEMKETAKQDTLWQMSSTSKPVLNTREVNPLKKFTIPKIRRTAEKVYLSPCYTNSREYSFIHDTLNQCRLDVNCDLQSLWQFGDTKLVHNEELEKNFTAKRSEMRESGRHCRELEEQFCFLALPQSDVAQIYQNGISTRASTLKILGNPLLGIYMFRHVDIALNYSHSQSITVESILIFKVLFGKVKKIQPSVDKNKVSLDPSPNFDCHMSRNAPSLKDTIELQAYSSAVYFYEYSVLSKPVDKPRQCLPYAVVTVKFLGSKVDNGRLMTSLRFLSTGFPKRAERTCSLNNCTVAKRFGKGKDATVTFVHFKKPVDPFVQENCLCNALNSEINPFISNISNSYGNVQNGNISIPETYSGQTEHSLAEIRDTSQVLAHDSDISLMPSDAKDSVNGDLLLNWTSLKNILSGLNASFPLHNNTGSSTVTTSKSIKDPRLMRREESMGEQSSTAGLNEVLQFEKSSDNVNSEIKSTPSNSASSSEVVPGDCAVLTNGLDTPCFKTSVNDSQSWAHNMGSEDYDCIPPNKVTMAGQCKDQGNFSFPISVSNVVSEVENQNHSEEKAQRAQQESGNAYTKEYSSHIFQDSQSSDLKTIYQTGCQTSTVFPLKKKVSIDEYLQNTGKMKNFADLEDSSKHEEKQTSWKEIDNDFTNETKISPIDNYIVLHQEYKESESHNSFGKSCDKILITQELEITKSSTSTIKDKDELDHLALEWQITPSFESLSQKHPQHSVEYEGNIHTSLAIAQKLMELKLGKINQNYASIITEAFPKPKDIPQAKEMFIDTVISSYNIETAHDSSNCSITREHICVHRKNENEPVSLENIQRDYKETAYVEDRGQDHNLFCNSQLSNDIWLNVNFKKQTDRENQNEAKENSASCVENNIENIYGDKKQDSHTNENFSNIDEKEDKNYHNIEILSSEEFSTKFNLICREDNAVSAATALLESEEDTISAVKQKDTENTGRSVEHLASTTFPKTASSSVCVASNAAIQIASATMPALSLNNDDHQIYQFKETCSSESPDFGLLVKHRVSDCEIDTDKNKSQESFHQSINENLVLQSIELESEIEIELEDCDDAFIFQQDTHSHENMLCEEFVTSYKALKSRISWEGLLALDNGEMEVLESTTGRENSDQHYSKESNYFYSSTQNNETELTSPILLPDLQIKITNIFRPGFSPTADSLALKDSFCTHVTEATKPEINKEDGEILGFDIYSQPFGENADYPCEDKVDNIRQESGPVSNSEISLSFDLSRNTDVNHTSENQNSESLFTEPSNVTTIDDGSRCFFTKSKTDYNDTKNKKEVESRISKRKLHISSRDQNIPHKDLRRHKIYGRKRRLTSQDSSECFSSLSQGRIKTFSQSEKHIKSVLNILSDEASLCKSKCLSRKLDKAVVHLKKAHRRVHTSLQLITKVGEERKGPLPKSYAIICNNFWESCDLQGYSSVSQRKYYSTKHFSSKRKYDKRRKKRAPKADISKSLTHVSKHKSYKTSGEKKCLSRKSMASSVSKSHPTTSHMGEFCNQEHPESQLPVSSTSQSTSQSVYYNSSVSNPSLSEEHQPFSGKTAYLFSPDHSDEKLIEKENQIDTAFLSSTSKYEKLEKHSANHNVKDATKENSCDANEVINESNSVSLSCIKENINSSTGNDCDATCIGHTKAKTDVLISVLDSNVKHFLNDLYQQGNLILSDCKRNLEVKWTDPIERPKQNIITGNFLMGPLNLTLIASKKYSIPQLSAAAVTDSEGESSKSYLDKQRILTVDSFAASSTVPHCEQSCREKELLKTEQCSSGNCLHTDGNETNVTENYELDVASGTEEDKSYGENIVELSSSDSSLLLKDNVKGSSSETCIVKKDTEDRITWKVKQAEKAKDSVYKRSMTEGSTVNTEYKNQKNQISEESCLNEKIITTNLIDSHLSTKNTTTESVPLKNTVSNPLNKREKKGEIKVSKDSQSDLTLHSEIAYISKPGILGVNHTPILPAHSETCKVPTLLKKPASYVSDFKEKHCSANHTALIANLSQILQRADEASSLQILQEETKVCLNILPLFVEAFERKQECSVEQILISRELLVDQNLWNNCKHTLKPCAVDTLVELQMMMETIQFIENKKRHLEGEPTLRSLLWYDETLYAELLGKPRGFQQQSNFYPGFQGRLKYNAFCELQTYHDQLVELLEETKREKNSYYVFLKYKRQVNECEAIMEHCSDCFDFSLSVPFTCGVNFGDSLEDLEILRKSTLKLINVCGDSPKVHSYPGKQDHLWIIIEMISSKVNFIKNNEAVRVKISLYGLEHIFFDAAKNLVWKERTQSFSKKYSQKKDEERLLRVNKCAFSKLQKIYDTLSKDLNNEPISPIGLEEDTIIASRKSDHPINEATISIENSKFNSNLLAHPDICCISEILDQAEFADLKKLQDLTLRCTDHLEILKKYFQMLQDNNMDNIFITEENVLDVVINHSHEAIILKPEAIEMYIEIVMVSETIHFLKNSIAKKLDKQRFRGMLWFDLSLLPELVQCQEKMASFSFLKDNSTDVCLWKVIETAVSELKKDLDIICKYNEAVNCSYAIHLLSRELQELSEIKKLLKKSKYFISTYIDFVPYIASINYGSTVTELEYNYNQFSTLLKNVMSAPRKDLGKMAHIRKVMKTIEHMKMICTKNAELTISFFLCQMLYNRRKILQLKRKEKMNIHIVKPGENNNKFSISTMLPPVSECINKNISNSSKKRPSTVDKCEDSQEQQQDTTVSSCKKLKVDMKDVTKINREKATFKHPRTTGSHPKSENKIVPSSCDSLKRNHLTPKKVEMQRSLPGSLLPLENPKDTCASKSESKIDLTVSSDHFSGQQENLNSMKKRNVNFSAAETKSDKKDCAAFAICDQKSVHGTFSPDHGTLLQKFLKNSPDPTQKSCLSDINPETDVSLVPDASVLSKPIFCFVKDVHPDLEMNDTVFELQDNDIVNSSIKNSSCMTSPEPICIQNKIPTLQINKLQPTETESEDKYMKDTLNPNTVHTFGASGHITLNVNQGAEYSLSEQQNDKNSKVLMQNAATYWNELPQSACNPTYNSSEHLFGTSYPYSAWCVYQYSNSNGNAITQTYQGITSYEVQPSPSGLLTTVASTAQGTHSNLLYSQYFTYFAGEPQANGFVPVNGYFQSQIPASNFRQPIFSQYASHQPLPQATYPYLPNRFVPPEVPWVYAPWHQESFHPGH

SEQ ID NO: 71603 - protein, 598 aa, Homo sapiens
MDALPRSGLNLKEEPLLPAGLGSVRSWMQGAGILDASTAAQSGVGLARAHFEKQPPSNLRKSNFFHFVLAMYDRQGQPVEVERTAFIDFVEKDREPGAEKTNNGIHYRLRLVYNNGLRTEQDLYVRLIDSMSKQAIIYEGQDKNPEMCRVLLTHEIMCSRCCDRKSCGNRNETPSDPVIIDRFFLKFFLKCNQNCLKNAGNPRDMRRFQVVVSTTVSVDGHVLAVSDNMFVHNNSKHGRRARRLDPSEAATPCIKAISPGEGWTTGGATVIVIGDNFFDGLQVVFGNVLVWSELITPHAIRVQTPPRHIPGVVEVTLSYKSKQFCKGCPGRFVYTALNEPTIDYGFQRLQKVIPRHPGDPERLPKEVLLKRAADLAEALYGVPGSNQELLLKRAADVAEALYSTPRAPGPLAPLAPSHPHPAVVGINAFSSPLAIAVGDATPGPEPGYARSCSSASPRGFAPSPGSQQSGYGGGLGAGLGGYGAPGVAGLGVPGSPSFLNGSTATSPFAIMPSSPPLAAASSMSLPAAAPTTSVFSFSPVNMISAVKQRSAFAPVLRPPSSPPQACPRAHGEGLPDQSFEDSDKFHSPARGLQGLAYS

SEQ ID NO: 71604 - protein, 376 aa, Homo sapiens
LNRAQSAQSINSTEMPAREDCLKRVSSEPVLSVQEKGVLLKRKLSLLEQDVIVNEDGRNKLKKQGAYGDIPEELIDVSDFECSLCMRLFFEPVTTPCGHSFCKNCLERCLDHAPYCPLCKESLKEYLADRRYCVTQLLEELIVKYLPDELSERKKIYDEETAELSHLTKNVPIFVCTMAYPTVPCPLHVFEPRYRLMIRRSIQTGTKQFGMCVSDTQNSFADYGCMLQIRNVHFLPDGRSVVDTVGGKRFRVLKRGMKDGYCTADIEYLEDVKVENEDEIKNLRELHDLVYSQACSWFQNLRDRFRSQILQHFGSMPEREENLQAAPNGPAWCWWLLAVLPVDPRYQLSVLSMKSLKERLTKIQHILTYFSRDQSK

SEQ ID NO: 71605 - protein, 121 aa, Homo sapiens
MYGASGGRAKPERKSGAKEEAGPGGAGGGGSRVELLVFGYACKLFRDDERALAQEQGQHLIPWMGDHKILIDRYDGRGHLHDLSEYDAEYSTWNRDYQLSEEEARIEALCDEERGRIQAIE

SEQ ID NO: 71606 - protein, 58 aa, Homo sapiens
MRRPLSKCGMEPGGGDASLTLHGLQNRSHGKIKLRKRKSTLYFNTQEKSARRRGDLDS

SEQ ID NO: 71607 - protein, 38 aa, Homo sapiens
  MOD_RES (1)..(1): Any amino acid
XSKKLKSVFRVPDLSGMLQVLKELTDVQYYWVENFCHA

SEQ ID NO: 71608 - protein, 536 aa, Homo sapiens
MGAWAFPAALFLLCLTSESLQGGLPLLPPGLGKVYGPHSGLGAGYDGGVKPQKPGFVVRHGLGTQPDTEGGMKPQNLGFRTFAGAAAQPGYGNGLGAAAFPVAGAQSGPAAQNGFGPGFGGGGKPQKPGPTTQNGYRPGYVGAVKPQKPGFQYRIGLGAQPGFRGDMKAQEPGLGNGNGLSAQPVLTAQNRFGFGAGLGGNVKPLKPGYGKRLRAGAFPGAGTQPEYGHGNGPGVQPGLGAGMKPQMPGLGAPNGYGPGRGRAGVPGGPERRPWVPHLLPFSSPGYLGVMKAQKPGPLAQNGYRAGAGEGMKPQKPGLRGTLKPQKSGHGHENGPWPGPCNARVAPMLLPRLPTPGVPSDKEGGWGLKSQPPSAVQNGKLPAPMPAIQWGLKPQKAGHQPPNGYGPGAEPGFNGGLEPQKIGLGYGNGVLGARVFPEAHPQPGFHGANGFRNRDGVEALVYPKAAALAPEGNGQAGVLWNSRWPTLQAWGAGLKPGYQAGDEYAEARSQPGGPDVKRGSNGQLGNGYGGRCPLGKC

SEQ ID NO: 71609 - protein, 514 aa, Homo sapiens
MAANMYRVGDYVYFENSSSNPYLIRRIEELNKTASGNVEAKVVCFYRRRDISNTLIMLADKHAKEIEEESETTVEADLTDKQKHQLKHRELFLSRQYESLPATHIRGKCSVALLNETESVLSYLDKEDTFFYSLVYDPSLKTLLADKGEIRVGPRYQADIPEMLLEGESDEREQSKLEVKVWDPNSPLTDRQIDQFLVVARAVGTFARALDCSSSVRQPSLHMSAAAASRDITLFHAMDTLYRHSYDLSSAISVLVPLGGPVLCRDEMEEWSASEASLFEEALEKYGKDFNDIRQDFLPWKSLTSIIEYYYMWKTTDRYVQQKRLKAAEAESKLKQVYIPTYKPNPNQISTSNGKPGAVNGAVGTTFQPQNPLLGRACESCYATQSHQWYSWGPPNMQCRLCAICWLYWKKYGGLKMPTQSEEEKLSPSPTTEDPRVRSHVSRQAMQGMPVRNTGSPKSAVKTRQAFFLHTTYFTKFARQVCKNTLRLRQAARRPFVAINYAAIRAECKMLLNS

SEQ ID NO: 71610 - protein, 115 aa, Homo sapiens
MATRLLCCVVLCLLGEELIDARVTQTPRDKVTEMGQEVTMRCQPILGHNTVFWYRQTMMQGLELLAYFRNRAPLDDSGMPKDRFSAEMPDATLATLKIQPSEPRDSAVYFCASGL

SEQ ID NO: 71611 - protein, 200 aa, Homo sapiens
  MOD_RES (1)..(1): Any amino acid
XLDVEMLDQPLPTGQNGTTEEVTSEEEEEEEEMAEDIEDLDHYEMKEEEPISGKKSEDEGIEKENLAILEKIRKTQRQDHLNGAVSGSVQASDRLMKELRDIYRSQSYKTGIYSVELINDSLYDWHVKLQKVDPDSPLHSDLQILKEKEGIEYILLNFSFKDNFPFDPPFVRVVLPVLSGGLVHPSKGRWLNVLTVVCLD

SEQ ID NO: 71612 - protein, 200 aa, Homo sapiens
MVSKSDQLLIVVSILEGRHFPKRPKHMLVVEAKFDGEQLATDPVDHTDQPEFATELAWEIDRKALHQHRLQRTPIKLQCFALDPVTSAKETIGYIVLDLRTAQETKQAPKWYQLLSNKYTKFKSEIQISIALETDTKPPVDSFKAKGAPPRDGKEISSNRCHVLPIASYQAQQDVPSSSCAYSVSALDSAISLRSPASFR

SEQ ID NO: 71613 - protein, 179 aa, Homo sapiens [sequence omitted]

SEQ ID NO: 71614 - protein, 45 aa, Homo sapiens
MSLVAEAFVSQIAAAEPWPENATLYQQLKGEQILLSDNAASLAVQ

SEQ ID NO: 71615 - protein, 144 aa, Homo sapiens
MLLAWVQAFLVSNMLLAEAYGSGGCFWDNGHLYREDQTSPAPGLRCLNWLDAQSGLASAPVSGAGNHSYCRNPDEDPRGPWCYVSGEAGVPEKRPCEDLRCPGQVQLWNSLRAVPDESCFPPHLQRPPPRPCQPSRQKSRKRLK

SEQ ID NO: 71616 - protein, 244 aa, Homo sapiens
MAPSSESSVPSHSMSSRRDTDSDTQDANDSSCKSSERSLPDCTPHPNSISIDAGPRQAPKIAQIKRNLSYGDNSDPALEASSLPPPDPWLETSSSSPAEPAQPGACRRDGYWFLKLLQAETERLEGWCCQMDKETKENNLSEEVLGKVLSAVGSAQLLMSQKFQQFRGLCEQNLNPDANPRPTAQDLAGFWDLLQLSIEDISMKFDELYHLKANSWQLVETPEKRKVSMEQCGGEVQGQIPGRQ

SEQ ID NO: 71617 - protein, 106 aa, Homo sapiens
MHKEEHEVAVLGPPPSTILPRSTVINIHSETSVPDHVVWSLFNTLFLNWCCLGFIAFAYASTAKCLNIWALILGILMTIGFILLLVFGSVTVYHIMLQIIQEKRGY

SEQ ID NO: 71618 - protein, 87 aa, Homo sapiens
  MOD_RES (1)..(1): Any amino acid
XQIAYSATSMDLSDKTLFKYFMRVVPSDAQQARAMVDIVKRYNWTYVSAVHTEGRGTKKEEMRKRDQTLMLSFMRFKLFSCLSLQRS

SEQ ID NO: 71619 - protein, 182 aa, Homo sapiens
MLPAVGSVDEEEDPAEEDCPELVPIETTQSEEEEKSGLGAKIPVTIITGYLGAGKTTLLNYILTEQHSKRVAVILNESGEGSALEKSLAVSQGGELYEEWLELRNGCLCCSVKDNGLRAIENLMQKKGKFDDILLETTGLADPGAVASMFWVDAELGSDIYLDGIITIVDSKYGLKAKNWTT

SEQ ID NO: 71620 - protein, 42 aa, Homo sapiens
MAGAEWKSLEECLEKHLPLPDLQEVKRVLYGKELRSLPFIDA

SEQ ID NO: 71621 - protein, 48 aa, Homo sapiens
MSGNGNAAATAGTRFLILHSLRLERKACLPRSLNMPWRRMKWTWLFTP

SEQ ID NO: 71622 - protein, 1507 aa, Homo sapiens
MNGGKECDGGDKEGGLPAIQVPVGWQRRVDQNGVLYVSPSGSLLSCLEQVKTYLLTDGTCKCGLECPLILPKVFNFDPGAAVKQRTAEDVKADEDVTKLCIHKRKIIAVATLHKSMEAPHPSLVLTSPGGGTNATPVVPSRAATPRSVRNKSHEGITNSVMPECKNPFKLMIGSSNAMGRLYVQELPGSQQQELHPVYPRQRLGSSEHGQKSPFRGSHGGLPSPASSGSQIYGDGSISPRTDPLGSPDVFTRSNPGFHGAPNSSPIHLNRTPLSPPSVMLHGSPVQSSCAMAGRTNIPLSPTLTTKSPVMKKPMCNFSTNMEIPRAMFHHKPPQGPPPPPPPSCALQKKPLTSEKDPLGILDPIPSKPVNQNPVIINPTSFHSNVHSQVPMMNVSMPPAVVPLPSNLPLPTVKPGHMNHGSHVQRVQHSASTSLSPSPVTSPVHMMGTGIGRIEASPQRSRSSSTSSDHGNFMMPPVGPQATSSGIKVPPRSPRSTIGSPRPSMPSSPSTKSDGHHQYKDIPNPLIAGISNVLNTPSSAAFPTASAGSSSVKSQPGLLGMPLNQILNQHNAASFPASSLLSAAAKAQLANQNKLAGNNSSSSSNSGAVAGSGNTEGHSTLNTMFPPTANMLLPTGEGQSGRAALRDKLMSQQKDALRKRKQPPTTVLSLLRQSQMDSSAVPKPGPDLLRKQGQGSFPISSMSQLLQSMSCQSSHLSSNSTPGCGASNTALPCSANQLHFTDPSMNSSVLQNIPLRGEAVHCHNANTNFVHSNSPVPNHHLAGLINQIQASGNCGMLSQSGMALGNSLHPNPPQSRISTSSTPVIPNSIVSSYNQTSSEAGGSGPSSSIAIAGTNHPAITKTTSVLQDGVIVTTAAGNPLQSQLPIGSDFPFVGQEHALHFPSNSTSNNHLPHPLNPSLLSSLPISLPVNQQHLLNQNLLNILQPSAGEGDMSSINNTLSNHQLTHLQSLLNNNQMFPPNQQQQQLLQGYQNLQAFQGQSTIPCPANNNPMACLFQNFQVRMQEDAALLNKRISTQPGLTALPENPNTTLPPFQDTPCELQPRIDPSLGQQVKDGLVVGGPGDASVDAIYKAVVDAASKGMQVVITTAVNSTTQISPIPALSAMSAFTASIGDPLNLSSAVSAVIHGRNMGGVDHDGRLRNSRGARLPKNLDHGKNVNEGDGFEYFKSASCHTSKKQWDGEQSPRGERNRWKYEEFLDHPGHIHSSPCHERPNNVSTLPFLPGEQHPILLPPRNCPGDKILEENFRYNNYKRTMMSFKERLENTVERCAHINGNRPRQSRGFGELLSTAKQDLVLEEQSPSSSNSLENSLVKDYIHYNGDFNAKSVNGCVPSPSDAKSISSEDDLRNPDSPSSNELIHYRPRTFNVGDLVWGQIKGLTSWPGKLVREDDVHNSCQQSPEEGKVWVMWFGLHTFTQVEPEKLKTLTEGLEAYSRVRKRNRKSGKLNNHLEAAIHEAMSELDKMSGTVHQIPQGDRQMRPPKPKRRKISR

SEQ ID NO: 71623 - protein, 107 aa, Homo sapiens
MELNSLLILLEAAEYLERRDREAEHGYASVLPFDGDFAREKTKAAGLVRKAPNNSGILGGPGALAGLWGPAWTRKVAWSWERGPPASLSSRQMLWHTLWCWELCARV

SEQ ID NO: 71624 - protein, 81 aa, Homo sapiens
MSGNGNAAATAVSAEPVTSTLWASGRAVQRLAPGCHPQSSIGRKQPKDESDSRGYPQEPACSHTDGQCGGNIESLVPWPAV

SEQ ID NO: 71625 - protein, 729 aa, Homo sapiens
METPSQRRATRSGAQASSTPLSPTRITRLQEKEDLQELNDRLAVYIDRVRSLETENAGLRLRITESEEVVSREVSGIKAAYEAELGDARKTLDSVAKERARLQLELSKVREEFKELKARNTKKEGDLIAAQARLKDLEALLNSKEAALSTALSEKRTLEGELHDLRGQVAKLEAALGEAKKQLQDEMLRRVDAENRLQTMKEELDFQKNIYSEELRETKRRHETRLVEIDNGKQREFESRLADALQELRAQHEDQVEQYKKELEKTYSAKLDNARQSAERNSNLVGAAHEELQQSRIRIDSLSAQLSQLQKQLAAKEAKLRDLEDSLARERDTSRRLLAEKEREMAEMRARMQQQLDEYQELLDIKLALDMEIHAYRKLLEGEEERLRLSPSPTSQRSRGRASSHSSQTQGGGSVTKKRKLESTESRSSFSQHARTSGRVAVEEVDEEGKFVRLRNKSNEDQSMGNWQIKRQNGDDPLLTYRFPPKFTLKAGQVVTIWAAGAGATHSPPTDLVWKAQNTWGCGNSLRTALINSTGEEVAMRKLVRSVTVVEDDEDEDGDDLLHHHHGSHCSSSGDPAEYNLRSRTVLCGTCGQPADKASASGSGAQVGGPISSGSSASSVTVTRSYRSVGGSGGGSFGDNLVTRSYLLGNSSPRTQVSCLCFVSKSCRRVPGHRGVGRGGLAGGRACLLFRSPGEWEPPPHSLSPRQPTSASCPSCLSPRLEGRGRAGV

SEQ ID NO: 71626 - protein, 376 aa, Homo sapiens
MLPAVGSVDEEEDPAEEDCPELVPIETTQSEEEEKSGLGAKIPVTIITGYLGAGKTTLLNYILTEQHSKRVAVILNESGEGSALEKSLAVSQGGELYEEWLELRNGCLCCSVKDNGLRAIENLMQKKGKFDDILLETTGLADPGAVASMFWVDAELGSDIYLDGIITIVDSKYGLKHLTEEKPDGLINEATRQVALADIILINKTDLVPEEDVKKLRTTIRSINGLGQILETQRSSLQKKLQHVPGTQPHLDQSIVTITFEVPGNAKEEHLNMFIQNLLWEKNVRNKDNHCMEVIRLKGLVSIKDKSQQVIVQGVHELYDLEETPVSWKDDTERTNRLVLIGRNLDKDILKQLFIATVTETEKQWTTHFKEDQVCT

SEQ ID NO: 71627 - protein, 139 aa, Homo sapiens
MAGPGWTLLLLLLLLLLLGSMAGYGPQKKLNLSHKGIGEPCRRHEECQSNCCTINSLAPHTLCTPKTIFLQCLPWRKVSPMGTDARTTQSARAAAASATTARRSCARPKASSCSVCPGASPTATSAAAIRSVTASAASS

SEQ ID NO: 71628 - protein, 39 aa, Homo sapiens
LQNEVSMLKNEVAQLKQLLLTHKDCPITAMQKESQGYLN

SEQ ID NO: 71629 - protein, 218 aa, Homo sapiens
MAKTVAYFYDPDVGNFHYGAGHPMKPHRLALTHSLVLHYGLYKKMIICDIAINWAGGLHHAKKFEASGFCYVNDIVIGILELLKYHPRVLYIDIDIHHGDGVQEAFYLTDRVMTVSFHKYGNYFFPGTGDMYEVGAESGRYYCLNVPLRDGIDDQSYKHLFQPVINQVVDFYQPTCIVLQCGADSLGCDRLGCFNLSIRGHGECVEYVKSFNIPLLVL

SEQ ID NO: 71630 - protein, 118 aa, Homo sapiens
MKWKTVSTIFLVVVLYLIIGATVFKALEQPHEISQRTTIVIQKQTFISQHSCVNSTELDELIQQIVAAINAGIIPLGNTSNQISHWDLGSSFFFAGTVITTIGFGNISPRTEGGKIFC

SEQ ID NO: 71631 - protein, 556 aa, Homo sapiens
MAAADAEAVPARGEPQQDCCVKTELLGEETPMAADEGSAEKQAGEAHMAADGETNGSCENSDASSHANAAKHTQDSARVNPQDGTNTLTRIAENGVSERDSEAAKQNHVTADDFVQTSVIGSNGYILNKPALQAQPLRTTSTLASSLPGHAAKTLPGGAGKGRTPSAFPQTPAAPPATLGEGSADTEDRKLPAPGADVKVHRARKTMPKSVVGLHAASKDPREVREARDHKEPKEEINKNISDFGRQQLLPPFPSLHQSLPQNQCYMATTKSQTACLPFVLAAAVSRKKKRRMGTYSLVPKKKTKVLKQRTVIEMFKSITHSTVGSKGEKDLGASSLHVNGESLEMDSDEDDSEELEEDDGHGAEQAAAFPTEDSRTSKESMSEADRAQKMDGESEEEQESVDTGEEEEGGDESDLSSESSIKKKFLKRKGKTDSPWIKPARKRRRRSRKKPSGALGSESYKSSAGSAEQTAPGDSTGYMEVSLDSLDLRVKGILSSQAEGLANGPDVLETDGLQEVPLCSCRMETPKSREITTLANNQCMATESVDHEVSTFVFI

SEQ ID NO: 71632 - protein, 3984 aa, Homo sapiens
MAHAAASIKKVREADLDEKEKNLERDRKKQRKIPRERMERKRKSDSNASFLRAARAGNLDKVVEYLKGGIDINTCNQNGLNALHLAAKEGHVGLVQELLGRGSSVDSATKKGNTALHIASLAGQAEVVKVLVKEGANINAQSQNGFTPLYMAAQENHIDVVKYLLENGANQSTATEDGFTPLAVALQQGHNQAVAILLENDTKGKVRLPALHIAARKDDTKSAALLLQNDHNADVQSKMMVNRTTESGFTPLHIAAHYGNVNVATLLLNRGAAVDFTARNGITPLHVASKRGNTNMVKLLLDRGGQIDAKTRDGLTPLHCAARSGHDQVVELLLERGAPLLARTKNGLSPLHMAAQGDHVECVKHLLQHKAPVDDVTLDYLTALHVAAHCGHYRVTKLLLDKRANPNARALNGFTPLHIACKKNRIKVMELLVKYGASIQAITESGLTPIHVAAFMGHLNIVLLLLQNGASPDVTNIRGETALHMAARAGQVEVVRCLLRNGALVDARAREEQTPLHIASRLGKTEIVQLLLQHMAHPDAATTNGYTPLHISAREGQVDVASVLLEAGAAHSLATKKGFTPLHVAAKYGSLDVAKLLLQRRAAADSAGKNGLTPLHVAAHYDNQKVALLLLEKGASPHATAKNGYTPLHIAAKKNQMQIASTLLNYGAETNIVTKQGVTPLHLASQEGHTDMVTLLLDKGANIHMSTKSGLTSLHLAAQEDKVNVADILTKHGADQDAHTKLGYTPLIVACHYGNVKMVNFLLKQGANVNAKTKNGYTPLHQAAQQGHTHIINVLLQHGAKPNATTANGNTALAIAKRLGYISVVDTLKVVTEEVTTTTTTITEKHKLNVPETMTEVLDVSDEEGDDTMTGDGGEYLRPEDLKELGDDSLPSSQFLDGMNYLRYSLEGGRSDSLRSFSSDRSHTLSHASYLRDSAVMDDSVVIPSHQVSTLAKEAERNSYRLSWGTENLDNVALSSSPIHSGRASPCLERDNSSFLVSFMVDARGGAMRGCRHNGLRIIIPPRKCTAPTRVTCRLVKRHRLATMPPMVEGEGLASRLIEVGPSGAQFLGKLHLPTAPPPLNEGESLVSRILQLGPPGTKFLGPVIVEIPHFAALRGKERELVVLRSENGDSWKEHFCDYTEDELNEILNGMDEVLDSPEDLEKKRICRIITRDFPQYFAVVSRIKQDSNLIGPEGGVLSSTVVPQVQAVFPEGALTKRIRVGLQAQPMHSELVKKILGNKATFSPIVTLEPRRRKFHKPITMTIPVPKASSDVMLNGFGGDAPTLRLLCSITGGTTPAQWEDITGTTPLTFVNECVSFTTNVSARFWLIDCRQIQESVTFASQVYREIICVPYMAKFVVFAKSHDPIEARLRCFCMTDDKVDKTLEQQENFAEVARSRDVEVLEGKPIYVDCFGNLVPLTKSGQHHIFSFFAFKENRLPLFVKVRDTTQEPCGRLSFMKEPKSTRGLVHQAICNLNITLPIYTKESESDQEQEEEIDMTSEKNDETESTETSVLKSHLVNEVPVLASPDLLSEVSEMKQDLIKMTAILTTDVSDKAGSIKVKELVKAAEEEPGEPFEIVERVKEDLEKVNEILRSGTCTRDESSVQSSRSERGLVEEEWVIVSDEEIEEARQKAPLEITEYPCVEVRIDKEIKGKVEKDSTGLVNYLTDDLNTCVPLPKEQLQTVQDKAGKKCEALAVGRSSEKEGKDIPPDETQSTQKQHKPSLGIKKPVRRKLKEKQKQKEEGLQASAEKAELKKGSSEESLGEDPGLAPEPLPTVKATSPLIEETPIGSIKDKVKALQKRVEDEQKGRSKLPIRVKGKEDVPKKTTHRPHPAASPSLKSERHAPGSPSPKTERHSTLSSSAKTERHPPVSPSSKTEKHSPVSPSAKTERHSPASSSSKTEKHSPVSPSTKTERHSPVSSTKTERHPPVSPSGKTDKRPPVSPSGRTEKHPPVSPGRTEKRLPVSPSGRTDKHQPVSTAGKTEKHLPVSPSGKTEKQPPVSPTSKTERIEETMSVRELMKAFQSGQDPSKHKTGLFEHKSAKQKQPQEKGKVRVEKEKGPILTQREAQKTENQTIKRGQRLPVTGTAESKRGVRVSSIGVKKEDAAGGKEKVLSHKIPEPVQSVPEEESHRESEVPKEKMADEQGDMDLQISPDRKTSTDFSEVIKQELEDNDKYQQFRLSEETEKAQLHLDQVLTSPFNTTFPLDYMKDEFLPALSLQSGALDGSSESLKNEGVAGSPCGSLMEGTPQISSEESYKHEGLAETPETSPESLSFSPKKSEEQTGETKESTKTETTTEIRSEKEHPTTKDITGGSEERGATVTEDSETSTESFQKEATLGSPKDTSPKRQDDCTGSCSVALAKETPTGLTEEAACDEGQRTFGSSAHKTQTDSEVQESTATSDETKALPLPEASVKTDTGTESKPQGVIRSPQGLELALPSRDSEVLSAVADDSLAVSHKDSLEASPVLEDNSSHKTPDSLEPSPLKESPCRDSLESSPVEPKMKAGIFPSHFPLPAAVAKTELLTEVASVRSRLLRDPDGSAEDDSLEQTSLMESSGKSPLSPDTPSSEEVSYEVTPKTTDVSTPKPAVIHECAEEDDSENGEKKRFTPEEEMFKMVTKIKMFDELEQEAKQKRDYKKEPKQEESSSSSDPDADCSVDVDEPKHTGSGEDESGVPVLVTSESRKVSSSSESEPELAQLKKGADSGLLPEPVIRVQPPSPLPSSMDSNSSPEEVQFQPVVSKQYTFKMNEDTQEEPGKSEEEKDSESHLAEDRHAVSTEAEDRSYDKLNRDTDQPKICDGHGCEAMSPSSSAAPVSSGLQSPTGDDVDEQPVIYKESLALQGTHEKDTEGEELDVSRAESPQADCPSESFSSSSSLPHCLVSEGKELDEDISATSSIQKTEVTKTDETFENLPKDCPSQDSSITTQTDRFSMDVPVSDLAENDEIYDPQITSPYENVPSQSFFSSEESKTQTDANHTTSFHSSEVYSVTITSPVEDVVVASSSSGTVLSKESNFEGQDIKMESQQESTLWEMQSDSVSSSFEPTMSATTTVVGEQISKVIITKTDVDSDSWSEIREDDEAFEARVKEEEQKIFGLMVDRQSQGTTPDTTPARTPTEEGTPTSEQNPFLFQEGKLFEMTRSGAIDMTKRSYADESFHFFQIGQESREETLSEDVKEGATGADPLPLETSAESLALSESKETVDDEADLLPDDVSEEVEEIPASDAQLNSQMGISASTETPTKEAVSVGTKDLPTVQTGDIPPLSGVKQISCPDSSEPAVQVQLDFSTLTRSVYSDRGDDSPDSSPEEQKSVIEIPTAPMENVPFTESKSKIPVRTMPTSTPAPPSAEYESSVSEDFLSSVDEENKADEAKPKSKLPVKVPLQRVEQQLSDLDTSVQKTVAPQGQDMASIAPDNRSKSESDASSLDSKTKCPVKTRSYTETETESRERAEELELESEEGATRPKILTSRLPVKSRSTTSSCRGGTSPTKESKEHFFDLYRNSIEFFEEISDEASKLVDRLTQSEREQEIVSDDESSSALEVSVIENLPPVETEHSVPEDIFDTRPIWDESIETLIERIPDENGHDHAEDPQDEQERIEERLAYIADHLGFSWTELARELDFTEEQIHQIRIENPNSLQDQSHALLKYWLERDGKHATDTNLVECLTKINRMDIVHLMETNTEPLQERISHSYAEIEQTITLDHSEGFSVLQEELCTAQHKQKEEQAVSKESETCDHPPIVSEEDISVGYSTFQDGVPKTEGDSSATALFPQTHKEQVQQDFSGKMQDLPEESSLEYQQEYFVTTPGTETSETQKAMIVPSSPSKTPEEVSTPAEEEKLYLQTPTSSERGGSPIIQEPEEPSEHREESSPRKTSLVIVESADNQPETCERLDEDAAFEKGDDMPEIPPETVTEEEYIDEHGHTVVKKVTRKIIRRYVSSEGTEKEEIMVQGMPQEPVNIEEGDGYSKVIKRVVLKSDTEQSEDNNE

SEQ ID NO: 71633 - protein, 47 aa, Homo sapiens
MVLKKFLKEIQSILPGISAKLTWTSEEGSYSQDMTGVTPFQMIFEAG

SEQ ID NO: 71634 - protein, 540 aa, Homo sapiens
MLKFQEAAKCVSGSTAISTYPKTLIARRYVLQQKLGSGSFGTVYLVSDKKAKRGEELKVLKEISVGELNPNETVQANLEAQLLSKLDHPAIVKFHASFVEQDNFCIITEYCEGRDLDDKIQEYKQAGKIFPENQIIEWFIQLLLGVDYMHERRILHRDLKSKNVFLKNNLLKIGDFGVSRLLMGSCDLATTLTGTPHYMSPEALKHQGYDTKSDIWQKRIHLQTLRALSEVQKMTPRERMRLRKLQAADEKARKLKKIVEEKYEENSKRMQELRSRNFQQLSVDVLHEKTHLKGMEEKEEQPEGRLSCSPQDEDEERWQGREEESDEPTLENLPESQPIPSMDLHELESIVEDATSDLGYHEIPEDPLVAEEYYADAFDSYCEESDEEEEEIALERPEKEIRNEGSQPAYRTNQQDSDIEALARCLENVLGCTSLDTKTITTMAEDMSPGPPIFNSVMARTKMKRMRESAMQKLGTEVFEEVYNYLKRARHQNASEAEIRECLEKVVPQASDCFEVDQLLYFEEQLLITMGKEPTLQNHL

SEQ ID NO: 71635 - protein, 1773 aa, Homo sapiens
MSDPRQSQEEKHKLGRASSKFKDPPRIMQSDDYFARKFKAINGNMGPTTSLNASNSNETGGGGPANGTPAVPKMGVRARVSEWPPKKDCSKELTCKALWESRSQTSYESITSVLQNGQSDQSEGQQDEQLDLDFVEAKYTIGDIFVHSPQRGLHPIRQRSNSDVTISDIDAEDVLDQNAVNPNTGAALHREYGSTSSIDRQGLSGENFFAMLRGYRVENYDHKAMVPFGFPEFFRCDPAISPSLHAAAQISRGEFVRISGLDYVDSALLMGRDRDKPFKRRLKSESVETSLFRKLRTVKSEHETFKFTSELEESRLERGIRPWNCQRCFAHYDVQSILFNINEAMATRANVGKRKNITTGASAASQTQMPTGQTGNCESPLGSKEDLNSKENLDADEGDGKSNDLVLSCPYFRNETGGEGDRRIALSRANSSSFSSGESCSFESSLSSHCTNAGVSVLEVPRENQPIHREKVKRYIIEHIDLGAYYYRKFFYGKEHQNYFGIDENLGPVAVSIRREKVEDAKEKEGSQFNYRVAFRTSELTTLRGAILEDAIPSTARHGTARGLPLKEVLEYVIPELSIQCLRQASNSPKVSEQLLKLDEQGLSFQHKIGILYCKAGQSTEEEMYNNETAGPAFEEFLDLLGQRVRLKGFSKYRAQLDNKTDSTGTHSLYTTYKDYELMFHVSTLLPYMPNNRQQLLRKRHIGNDIVTIVFQEPGALPFTPKSIRSHFQHVFVIVKVHNPCTENVCYSVGVSRSKDVPPFGPPIPKGVTFPKSAVFRDFLLAKVINAENAAHKSEKFRAMATRTRQEYLKDLAENFVTTATVDTSVKFSFITLGAKKKEKVKPRKDAHLFSIGAIMWHVIARDFGQSADIECLLGISNEFIMLIEKDSKNVVFNCSCRDVIGWTSGLVSIKVFYERGECVLLSSVDNCAEDIREIVQRLVIVTRGCETVEMTLRRNGLGQLGFHVNFEGIVADVEPFGFAWKAGLRQGSRLVEICKVAVATLTHEQMIDLLRTSVTVKVVIIQPHDDGSPRRGCSELCRIPMVEYKLDSEGTPCEYKTPFRRNTTWHRVPTPALQPLSRASPIPGTPDRLPCQQLLQQAQAAIPRSTSFDRKLPDGTRSSPSNQSSSSDPGPGGSGPWRPQVGYDGCQSPLLLEHQGSGPLECDGAREREDTMEASRHPETKWHGPPSKVLGSYKERALQKDGSCKDSPNKLSHIGDKSCSSHSSSNTLSSNTSSNSDDKHFGSGDLMDPELLGLTYIKGASTDSGIDTAPCMPATILGPVHLAGSRSLIHSRAEQWADAADVSGPDDEPAKLYSVHGYASTISAGSAAEGSMGDLSEISSHSRASVCFSIVAVVSYDNAANTPVTTTRLRTRTLLCLEALCILPNYNPFSSPLSGSHHSGSPSAHCSKSSGSLDSSKVYIVSHSSGQQVPGSMSKPYHRQGAVNKYVIGWKKSEGSPPPEEPEVTECPGMYSEMDVMSTATQHQTVVGDAVAETQHVLSKEDFLKLMLPDSPLVEEGRRKFSFYGNLSPRRSLYRTLSDESICSNRRGSSFGSSRSSVLDQALPNDILFSTTPPYHSTLPPRAHPAPSMGSLRNEFWFSDGSLSDKSKCADPGLMPLPDTATGLDWTHLVDAARAFEGLDSDEELGLLCHHTSYLDQRVASFCTLTDMQHGQDLEGAQELPLCVDPGSGKEFMDTTGERSPSPLTGKVNQLELILRQLQTDLRKEKQDKAVLQAEVQHLRQDNMRLQEESQTATAQLRKFTEWFFTTIDKKS

SEQ ID NO: 71636 - protein, 121 aa, Homo sapiens
MCIVLRPSRVHNSEENTMRALTLKDILNGTFSYKTFFPNWISGQEYLHQSADNNIVLYNIETGQSYTILSNRTMKSVNASNYGLSPDRQFVYLESDYSKLWRYSYTATYYIYDLSNGKWQL

SEQ ID NO: 71637 - protein, 119 aa, Homo sapiens
MVKLSIVLTPQFLSHDQGQLTKELQQHVKSVTCPCEYLRKVINTLADHHHRGTDFGGSPWLHVIIAFPTSYKVVITLWIVYLWVSLLKTIFWSRNGHDGSTDVQQRAWRSNRRRQEGLR

SEQ ID NO: 71638 - protein, 33 aa, Homo sapiens
MLDHEYTTKEVFRKNFFNDWRKEMAVEEREVIK

SEQ ID NO: 71639 - protein, 169 aa, Homo sapiens
MPVPDQPSSASEKTSSLSPGLNTSNGDGSETETTSAILASVKEQELQFERLTRELEAERQIVASQLERCKLGSETGSMSSMSSAEEQFQWQSQDGQKDIEDELTTGLELVDSCIRSLQESGILDPQDYSTGERPSLLSQSALQLNSKPEGSFQYPASYHSNQTLALGET

SEQ ID NO: 71640 - protein, 159 aa, Homo sapiens
  MOD_RES (1)..(1): Any amino acid
XVQELGLSAPLTVLPTITCGHTIEILREKGFDQAPVVDEAGVILGMVTLGNMLSSLLAGKVQPSDQVGKVIYKQFKQIRLTDTLGRLSHILEMDHFALVVHEQIQSQDQAWAGVVGGPAEKKKDANSNVRVPKSSLPGACPRLSPPSVAAFKHVRAACS

SEQ ID NO: 71641 - protein, 143 aa, Homo sapiens
MGKKSRAVPGRRPILQLSPPGPRGSTPGRDPEPEPDTEPDSTAAVPSQPAPSAATTTTTAVTAAAASDDSPSEDEQEAVQEVPRVVQNPPKPVMTTRPTAVKATGDRCHNSSSACSSCRSFCSTSNSTSTRAKGSSNIYPFFF

SEQ ID NO: 71642 - protein, 18 aa, Homo sapiens
  MOD_RES (1)..(1): Any amino acid
XLTAQLFFGKGTQLIVEP

SEQ ID NO: 71643 - protein, 1957 aa, Homo sapiens
MGENEDEKQAQAGQVFENFVQASTCKGTLQAFNILTRHLDLDPLDHRNFYSKLKSKVTTWKAKALWYKLDKRGSHKEYKRGKSCTNTKCLIVGGGPCGLRTAIELAYLGAKVVVVEKRDSFSRNNVLHLWPFTIHDLRGLGAKKFYGKFCAGSIDHISIRQLQLILFKVALMLGVEIHVNVEFVKVLEPPEDQENQKIGWRAEFLPTDHSLSEFEFDVIIGADGRRNTLEGFRRKEFRGKLAIAITANFINRNSTAEAKVEEISGVAFIFNQKFFQDLKEETGIDLENIVYYKDCTHYFVMTAKKQSLLDKGVIINDYIDTEMLLCAENVNQDNLLSYAREAADFATNYQLPSLDFAMNHYGQPDVAMFDFTCMYASENAALVRERQAHQLLVALVGDSLLEPFWPMGTGCARGFLAAFDTAWMVKSWNQGTPPLELLAERESLYRLLPQTTPENINKNFEQYTLDPGTRYPNLNSHCVRPHQVKHLYITKELEHYPLERLGSVRRSVNLSRKESDIRPSKLLTWCQQQTEGYQHVNVTDLTTSWRSGLALCAIIHRFRPELINFDSLNEDDAVENNQLAFDVAEREFGIPPVTTGKEMASAQEPDKLSMVMYLSKFYELFRGTPLRPVDSWRKNYGENADLSLAKSSISNNYLNLTFPRKRTPRVDGQTGENDMNKRRRKGFTNLDEPSNFSSRSLGSNQECGSSKEGGNQNKVKSMANQLLAKFEESTRNPSLMKQERRVSGIGKPVLCSSSGPPVHSCCPKPEEATPSPSPPLKRQFPSVVVTGHVLRELKQVSAGSECLSRPWRARAKSDLQLGGTENFATLPSTRPRAQALSGVLWRLQQVEEKILQKRAQNLANREFHTKNIKEKAAHLASMFGHGDFPQNKLLSKGLSHTHPPSPPSRLPSPDPAASSSPSTVDSASPARKEKKSPSGFHFHPSHLRTVHPQLTVGKVSSGIGAAAEVLVNLYMNDHRPKAQATSPDLESMRKSFPLNLGGSDTCYFCKKRVYVMERLSAEGHFFHRECFRCSICATTLRLAAYTFDCDEGKFYCKPHFIHCKTNSKQRKRRAELKQQREEEATWQEQEAPRRDTPTESSCAVAAIGTLEGSPPDEPTSPKRPKSISEPQHSDAEGDAASPLPSEWTSVRISPGEEAAGQDVLAVRVLVTSEDSSSDTESDYGGSEGSHTEPCEEKPWRPGSPHLPHTSLGEALSRAVSPQCPEEPRAVHAALQRANSFQSPTPSKYQNWRREFWWSLTPVNKRTMSPPKDPSPSLPLPSSSSHSSSPPSSSSTSVSGNAPDGSSPPQMTASEPLSQVSRGHPSPPTPNFRRRAVAQGAPREIPLYLPHHPKPEWAEYCLVSPGEDGLSDPAEMTSDECQPAEAPLGDIGSNHRDPHPIWGKDRSWTGQELSPLAGEDREKGSTGARKEEEGGPVLVKEKLGLKKLVLTQEQKTMLLDWNDSIPESVHLKAGERISQKSAENGRGGRVLKPVRPLLLPRAAGEPLPTQRGAQEKMGTPAEQAQGERNVPPPKSPLRLIANAIRRSLEPLLSNSEGGKKAWAKQESKTLPAQACTRSFSLRKTNSNKDGDQHSPGRNQSSAFSPPDPALRTHSLPNRPSKVFPALRSPPCSKIEDVPTLLEKVSLQENFPDASKPPKKRISLFSSLRLKDKSFESFLQESRQRKDIRDLFGSPKRKVLPEDSAQALEKLLQPFKSTSLRQAAPPPPPPPPPPPPPPTAGGADSKNFPLRAQVTEASSSASSTSSSSADEEFDPQLSLQLKEKKTLRRRKKLEKAMKQLVKQEELKRLYKAQAIQRQLEEVEERQRASEIQGVRLEKALRGEADSGTQDEAQLLQEWFKLVLEKNKLMRYESELLIMAQELELEDHQSRLEQKLREKMLKEESQKDEKDLNEEQEVFTELMQVIEQRDKLVDSLEEQRIREKAEDQHFESFVFSRGCQLSRT

SEQ ID NO: 71644 - protein, 135 aa, Homo sapiens
MSPVLHFYVRPSGHEGAAPGHTRRKLQGKLPELQGVETELCYNVNWTAEALPSAEETKKLMWLFGCPLLLDDVARESWLLPGSNDLLLEVGPRLNFSTPTSTNIVSVCRATGLGPVDRVETTRRYRLSFAHPPSA

SEQ ID NO: 71645 - protein, 665 aa, Homo sapiens
MVSYWDTGVLLCALLSCLLLTGSSSGSKLKDPELSLKGTQHIMQAGQTLHLQCRGEAAHKWSLPEMVSKESERLSITKSACGRNGKQFCSTLTLNTAQANHTGFYSCKYLAVPTSKKKETESAIYIFISDTGRPFVEMYSEIPEIIHMTEGRELVIPCRVTSPNITVTLKKFPLDTLIPDGKRIIWDSRKGFIISNATYKEIGLLTCEATVNGHLYKTNYLTHRQTNTIIDVQISTPRPVKLLRGHTLVLNCTATTPLNTRVQMTWSYPDEKNKRASVRRRIDQSNSHANIFYSVLTIDKMQNKDKGLYTCRVRSGPSFKSVNTSVHIYDKAFITVKHRKQQVLETVAGKRSYRLSMKVKAFPSPEVVWLKDGLPATEKSARYLTRGYSLIIKDVTEEDAGNYTILLSIKQSNVFKNLTATLIVNVKPQIYEKAVSSFPDPALYPLGSRQILTCTAYGIPQPTIKWFWHPCNHNHSEARCDFCSNNEESFILDADSNMGNRIESITQRMAIIEGKNKMASTLVVADSRISGIYICIASNKVGTVGRNISFYITDVPNGFHVNLEKMPTEGEDLKLSCTVNKFLYRDVTWILLRTVNNRTMHYSISKQKMAITKEHSITLNLTIMNVSLQDSGTYACRARNVYTGEEILQKKEITIRGSEEMLLPK

SEQ ID NO: 71646 - protein, 44 aa, Homo sapiens
ETRVCETDGCSSEAKLQCPTCIKLGIQGSYFCSQQRGRNQRLLF

SEQ ID NO: 71647 - protein, 46 aa, Homo sapiens
MAPKKPEPKKDDAKAAPKAAPAPAPPPEPERPKEVEFDASKIKIEF

SEQ ID NO: 71648 - protein, 79 aa, Homo sapiens
EQSDYLELLVKESSGGPDSPDTEPGSSAGTVPGTEASGFDAPRMRRNGLPSCELQWGEIVRMSNRNALIPIHAYTDKNI

SEQ ID NO: 71649 - protein, 1454 aa, Homo sapiens
MASPRKVTEKRHNPVESICRKIRAIHKREAISNPIQQIIKYQSSSFDSPQTNTKKYFEEVLRKMTAACVPTPGSHWSSSEEVDAFISSPQIISPRTPSTSHLSSPETATYSVILTSSENVSKPKSQSNKNYTSLMSQIRKAEFFSNKDLNNYCSENNFSTLTLDFDSTFVQSLKCFDPQDSVVKKLSLNEDGWKQEADDGKEDVIYSINRACKEEALTSIFNACDIKRKELICSSFSKGSVGVAKIINFLRQTTSQNSEDSGLEQLWNMLDPEKRDPHVDLETFQAMMKDWMAYCGNTWEGVNHRLSSIIDDSVCEQDGIKSDGTMKMSTDITDSTLGSFEALGGETSKGVLEVSDLIAYVADLHFNKRKLEEENNKFKLALETLEETNSQLSEDCTELRLQVKSAHQAIMRTNLLKEELEELKLSMNASEEQKSMIVAQSKQLETENRALILKIRILQEENFKNIMDIDRLEKKIEDLSKTETEHQMQLHTYENTLLNKDTSLQKKGLYIEELKSTIIEYGSIIENLRGEKSKLAHELQHLQQALITNGIQLNVNGECNSIISEGEKSLHYELTLAQSAENTETERQHNVINLSSLDAMMDQEMLLLLREPAQKAVEFTATLQKLHEEISKIATLIENSRRWVTNPEITVKEKWEEQLTEFNNIMEEKLDLCILMLNILGNHKESLDKEFAKLIEILKRFRQEYFYFRKEFLASQKQLEAIKQLQEDAVNQEGILRKRLQETSQRLEDVEEQGKDRDREAHTASEKATSLLHKLEEAISEQRNLQTINTELSNTCQALQQKTRKLKTTIESLQKEFIEGEHHGLLFQSFLDEEFPHYDSLSCADAIQQPLQEKLQCCHKLYGGQEARIHQTPLTLKHTCWYTPLLDALSLDSFTAVPTLESTPFSGVANQIHTLCERPTYGEVKDGALDVKRQHKCPGPTSGPSPGTNLSGCIRMNDDPSMEENGVERVCPESLLQSREYSSLPLPRHTSSTDGTITSSDPGLEILNMASCDLDRNSLCKKEEDTRSASPTIEAQGTSPAHDNIAFQDSTSKDKTILNLEAKEEPETIEEHKKEHASGDSVVSPLPVTTVKSVNLRQSENTSANEKEVEAEFLRLSLGFKCDWFTLEKRVKLEERSRDLAEENLKKEITNCLKLLESLTPLCEDDNQAQEIIKKLEKSIKFLSQCAARVASRAEMLGAINQESRVSKAVEVMIQHVENLKRMYAKEHAELEELKQVLLQNERSFNPLEDDDDCQIKKRSASLNSKPSSLRRVTIASLPRNIGNAGMVAGMENNDRFSRRSSSWRILGSKQSEHRPSLPRFISTYSWADAEEEKCELKTKDDSEPSGEETVERTRKPSLSEKKNNPSKWDVSSVYDTIASWATNLKSSIRKANKALWLSIAFIVLFAALMSFLTGQLFQKSVDAAPTQQEDSWTSLEHILWPFTRLRHNGPPPV

SEQ ID NO: 71650 - protein, 165 aa, Homo sapiens
MSHRTSSTFRAERSFHSSSSSSSSSTSSSASRALPAQDPPMEKALSMFSDDFGSFMRPHSEPLAFPARPGGAGNIKTLGDAYEFAVDVRDFSPEDIIVTTSNNHIELAADGTVMNTFAHKCQLPEDVDPTSVTSALREDGSLTIRARRHPHTEHVQQTFRTEIKI

SEQ ID NO: 71651 - protein, 221 aa, Homo sapiens
MQVPERIVVAGNNEDVSFSRPADLDLIQSTPFKPLALKTPPRVLTLSERPLDFLDLERPPTTPQNEEIRAVGRLKRERSMSENAVRQNGQLVRNDSLVTPSPQQARVCPPHMLPEDGANLSSARGILSLIQSSTRRAYQQILDVLDENRRYGISNIDTTIEGTSDDLTVVDAASLRRQIIKLNRRLQLLEEENKERAKREMVMYSITVAFWLLNSWLWFRR

SEQ ID NO: 71652 - protein, 78 aa, Homo sapiens
MDSFGQPRPEDNQSVVRRMQKKYWKTKQVFIKATGKKEDEHLVASDAELDAKLEVFHSVQETCTELLKIIEKYQLRLN

SEQ ID NO: 71653 - protein, 156 aa, Homo sapiens
GPVGPQRVAEAGGGQLGSTAQGKCDKDNTEKDITQATNSHFTHGEMQDQSIWGNPSDGELIRTQPQRLPQLQTSAQVPSGEEIGKIKNGHTGLSNGNGIHHGAKHGSADNRKLSAPVSQKMHRKIQSSLSVNSDISKKSKVNAVFSQKTGSSPEVC

SEQ ID NO: 71654 - protein, 81 aa, Homo sapiens
MKLKEVDRTAMQAWSPAQNHPIYLATGTSAQQLDATFSTNASLEIFELDLSDPSLDMKSCATFSSSHRYHKLIWGPYKMDS

SEQ ID NO: 71655 - protein, 110 aa, Homo sapiens
MRFRFCGDLDCPDWVLAEISTLAKMSSVKLRLLCSQVLKELLGQGIDYEKILKLTADAKFVRPSTVSMANPCPVNCSSWGCPKSTRPACAAVMRRSKAPCRSTCGSAAYA

SEQ ID NO: 71656 - protein, 80 aa, Homo sapiens
MDGIPMSMKNEMPISQLLMIIAPSLGFVLFALFVAFLLRGKLMETYCSQKHTRLDYIGDSKNVLNDVQHGREDEDGLFTL

SEQ ID NO: 71657 - protein, 109 aa, Homo sapiens
MSLLGPKVLLFLAAFIITSDWIPLGVNSQRGDDVTQATPETFTEDPNLVNDPATDETVLAVLADIAPSTDDLDELCRQMAGLPPRRLRRSNYFRLPPCENVDLQRPNGL

SEQ ID NO: 71658 - protein, 32 aa, Homo sapiens
PLQKMFQCPYFFFDVVYIHNGTEEKEEEMSWK

SEQ ID NO: 71659 - protein, 748 aa, Homo sapiens
MVLQARNKHREAAPKPPQPPRASQSPLRGASDVGAGEPGPERAPLSPGRKGAAGRKGPRAEPGAPPAGGGLGGRLAARLRWALGLRRAGRGRTWTTLLLAVFAAVLHWSHITHLFENDRHFSHLSTLEREMAFRTEMGLYYSYFKTIVEAPSFLNGVWMIMNDKLTEYPLVINTLKRFNLYPEVILASWYRIYTKIMDLIGIQTKICWTVTRGEGLSPIESCEGLGDPACFYVAVIFILNGLMMALFFIYGTYLSGSRLGGLVTVLCFFFNHGECTRVMWTPPLRESFSYPFLVLQMLLVTHILRATKLYRGSLIALCISNVFFMLPWQFAQFVLLTQIASLFAVYVVGYIDICKLRKIIYIHMISLALCFVLMFGNSMLLTSYYASSLVIIWGILAMKPHFLKINVSELSLWVIQGCFWLFGTVILKYLTSKIFGIADDAHIGNLLTSKFFSYKDFDTLLYTCAAEFDFMEKETPLRYTKTLLLPVVLVVFVAIVRKIISDMWGVLAKQQTHVRKHQFDHGELVYHALQLLAYTALGILIMRLKLFLTPHMCVMASLICSRQLFGWLFCKVHPGAIVFAILAAMSIQGSANLQTQWNIVGEFSNLPQEELIEWIKYSTKPDAVFAGAMPTMASVKLSALRPIVNHPHYEDAGLRARTKIVYSMYSRKAAEEVKRELIKLKVNYYILEESWCVRRSKPGCSMPEIWDVEDPANAGKTPLCNLLVKDSKPHFTTVFQNSVYKVLEVVKE

SEQ ID NO: 71660 - protein, 104 aa, Homo sapiens
LIPETGKKKVAEIQGHAGGRRSGQSHELLRDFEATLLQMFGLRRRPQPSKSAVIPDYMRDLYRLQSGEEEEEQIHSTGLEYPERPASRANTVRSFHHEASLRTR

SEQ ID NO: 71661 - protein, 1514 aa, Homo sapiens
MEPRSMEYFCAQVQQKDVGGRLQVGQELLLYLGAPGAISDLEEDLGRLGKTVDALTGWVGSSNYRVSLMGLEILSAFVDRLSTRFKSYVAMVIVALIDRMGDAKDKVRDEAQTLILKLMDQVAPPMYIWEQLASGFKHKNFRSREGVCLCLIETLNIFGAQPLVISKLIPHLCILFGDSNSQVRDAAILAIVEIYRHVGEKVRMDLYKRGIPPARLEMIFAKFDEVQSSGGMILSVCKDKSFDDEESVDGNRPSSAASAFKVPAPKTSGNPANSARKPGSAGGPKVGAGASKEGGAGAVDEDDFIKAFTDVPSIQIYSSRELEETLNKIREILSDDKHDWDQRANALKKIRSLLVAGAAQYDCFFQHLRLLDGALKLSAKDLRSQVVREACITVAHLSTVLGNKFDHGAEAIVPTLFNLVPNSAKVMATSGCAAIRFIIRHTHVPRLIPLITSNCTSKSVPVRRRSFEFLDLLLQEWQTHSLERHAAVLVETIKKGIHDADAEARVEARKTYMGLRNHFPGEAETLYNSLEPSYQKSLQTYLKSSGSVASLPQSDRSSSSSQESLNRPFSSKWSTANPSTVAGRVSAGSSKASSLPGSLQRSRSDIDVNAAAGAKAHHAAGQSVRSGRLGAGALNAGSYASLEDTSDKLDGTASEDGRVRAKLSAPLAGMGNAKADSRGRSRTKMVSQSQPGSRSGSPGRVLTTTALSTVSSGVQRVLVNSASAQKRSKIPRSQGCSREASPSRLSVARSSRIPRPSVSQGCSREASRESSRDTSPVRSFQPLGPGYGISQSSRLSSSVSAMRVLNTGSDVEEAVADALLLGDIRTKKKPARRRYESYGMHSDDDANSDASSACSERSYSSRNGSIPTYMRQTEDVAEVLNRCASSNWSERKEGLLGLQNLLKNQRTLSRVELKRLCEIFTRMFADPHGKVFSMFLETLVDFIQVHKDDLQDWLFVLLTQLLKKMGADLLGSVQAKVQKALDVTRESFPNDLQFNILMRFTVDQTQTPSLKVKVAILKYIETLAKQMDPGDFINSSETRLAVSRVITWTTEPKSSDVRKAAQSVLISLFELNTPEFTMLLGALPKTFQDGATKLLHNHLRNTGNGTQSSMGSPLTRPTPRSPANWSSPLTSPTNTSQNTLSPSAFDYDTENMNSEDIYSSLRGVTEAIQNFSFRSQEDMNEPLKRDSKKDDGDSMCGGPGMSDPRAGGDATDSSQTALDNKASLLHSMPTHSSPRSRDYNPYNYSDSISPFNKSALKEAMFDDDADQFPDDLSLDHSDLVAELLKELSNHNERVEERKIALYELMKLTQEESFSVWDEHFKTILLLLLETLGDKEPTIRALALKVLREILRHQPARFKNYAELTVMKTLEAHKDPHKEVVRSAEEAASVLATSISPEQCIKVLCPIIQTADYPINLAAIKMQTKVIERVSKETLNLLLPEIMPGLIQGYDNSESSVRKACVFCLVAVHAVIGDELKPHLSQLTGSKMKLLNLYIKRAQTGSGGADPTTDVSGQS

SEQ ID NO: 71662 - protein, 337 aa, Homo sapiens
  MOD_RES (1)..(1): Any amino acid
XLILDPCCQLPAYLSTCPGQSSSLAVTKTNSDILPPQKKTKPSQKVQGRGSHGCRQQRQARQKESTLRRQERKNAALVTRMKAQRPEECLKHIIVVLDPVLLQMEGGGQLLGALQTMECRCVIEAQAVPCSVTWRRRAGPSEGSLDSTMKGKETLQGFVTDITAKTAGKALSLVIVDQEKCFSAQNPPRRGKQGANKQTKKQQQRQPEASIGSMVSRVDAEEALVDLQLHTEAQAQIVQSWKELADFTCAFTKAVAEAPFKKLRDETTFSFCLESDWAGGVKVDLAGRGLALVWRRQIQQLNRVSLEMASAVVNAYPSPQLLVQAYQQCFSDKERQN

SEQ ID NO: 71663 - protein, 61 aa, Homo sapiens
MRLERSEMASILRSPQALQLTLALIKPDAVAHPLILEAVHQQILSNKFLIVRMRELLWRKE

SEQ ID NO: 71664 - protein, 87 aa, Homo sapiens
MVPSFLSLSFSSLGLWASGLILVLGFLKLIHLLLRRQTLAKAMDKFPGPPTHWLFGHALEGEACWFLRGPSGCSTASCSHLAFIMMC

SEQ ID NO: 71665 - protein, 152 aa, Homo sapiens
MSVKCVDARKNHHKTKWFVPWGPNHCDKIRDIEEAIPREIEANDIVFSVHIPLPHMEMSPWFQFMLFILQLDIAFKLNNQIRENAEVSMDVSLAYRDDAFAEWTEMAHERVPRKLKCTFTSPKTPEHEGRYYECDVLPFMEIGSVAHKFYLL

SEQ ID NO: 71666 - protein, 54 aa, Homo sapiens
SSGKSSVLESLVGRDLLPRGTGIVTRRPLILQLVHVSQEDKRKTTGEENALHGF

SEQ ID NO: 71667 - protein, 155 aa, Homo sapiens
MSSEEDKSVEQPQPPPPPPEEPGAPAPSPAAADKRPRGRPRKDGASPFQRARKKPRSRGKTAVEDEDSMDGLETTETETIVETAEIKEQSAEEDAEAEVDNSKQLIPTLQRSVSEESANSLVSVGVEAKISEQLCAFCYCGEKSSLGQGDLKQFR

SEQ ID NO: 71668 - protein, 144 aa, Homo sapiens
MASDDFDIVIEAMLEAPYKKEEDEQQRKEVKKDYPSNTTSSTSNSGNETSGSSTIGETSKKKRSRSHNKSRDRKRSRSRDRDRYRRRNSRSRSPGRQCRHRSRSWDRRHGSESRSRDHRREDRVHYRSPPLATGEPVDNLSPEE

SEQ ID NO: 71669 - protein, 163 aa, Homo sapiens
MHDKGITTAAVCVYPARVCDAVKALKAAGCNIPVASVAAGFPAGQTHLKTRLEEIRLAVEDGATEIDVVINRSLVLTGQWEALYDEIRQFRKACGEAHLKTILATGELGTLTNVYKASMIAMMAGSDFIKTSTGKETVNATFPVAIVMLRAIRDFFWKTGNKV

SEQ ID NO: 71670 - protein, 463 aa, Homo sapiens
MKKRKELNALIGLAGDSRRKKPKKGPSSHRLLRTEPPDSDSESSSEEEEEFGVVGNRSRFAKGDYLRCCKICYPLCGFVILAACVVACVGLVWMQVALKEDLDALKEKFRTMESNQKSSFQEIPKLNEELLSKQKQLEKIESGEMGLNKVWINITEMNKQISLLTSAVNHLKANVKSAADLISLPTTVEGLQKSVASIGNTLNSVHLAVEALQKTVDEHKKTMELLQSDMNQHFLKETPGSNQIIPSPSATSELDNKTHSENLKQDILYLHNSLEEVNSALVGYQRQNDLKLEGMNETVSNLTQRVNLIESDVVAMSKVEKKANLSFSMMGDRSATLKRQSLDQVTNRTDTVKIQSIKKEDSSNSQVSKLREKLQLISALTNKPESNRPPETADEEQVESFTSKPSALPKFSQFLGDPVEKAAQLRPISLPGVSSTEEWLYHVTFPSAMCEGSIHFLHILPNA

SEQ ID NO: 71671 - protein, 76 aa, Homo sapiens
  MOD_RES (1)..(1): Any amino acid
XYSSLMAYKLPVEDVHPLSRAFFKLEAMKQTFNLEEYSLSQATLEQKQCEASLDADIGTTLLVQPVVSESQLKKSA

SEQ ID NO: 71672 - protein, 192 aa, Homo sapiens
KKADVEEEIKIPVVCALTQEESSAQLSNEEKTPFKIKITDRSSYPEVTTNILEHLDSTRGSVHSLDAGLLLPSGDPFSKSDNDMFKDGLRRAQSTDSLGTSGSLQSKALGYNYKAKSAGNLDESDFGPLVGADSVSENFDTASLGSLQMPSGFMLTKDQERAIKAMTPEQEETASLLSSVTQGMESAYVSPS

SEQ ID NO: 71673 - protein, 175 aa, Homo sapiens
MNGPEDLPKSYDYDLIIIGGGSGGLAAAKEAAQYGKKVMVLDFVTPTPLGTRWGLGGTCVNVGCIPKKLMHQAALLGQALQDSRNYGWKVEETVKHDWDRMIEAVQNHIGSLNWGYRVALREKKVVYENAYGQFIGPHRIKATNNKGKEKIYSAERFLIATGERPRYLGIPGDKE

SEQ ID NO: 71674 - protein, 454 aa, Homo sapiens
MDVSELCIPDPLGYHNQLLNRMSSDDRHLGSSCGSFIKTEPSSPSSGIDALSHHSPSGSSDASGGFGLALGTHANGLDSPPMFAGAGLGGTPCRKSYEDCASGIMEDSAIKCEYMLNAIPKRLCLVCGDIASGYHYGVASCEACKAFFKRTIQGNIEYSCPATNECEITKRRRKSCQACRFMKCLKVGMLKEGVRLDRVRGGRQKYKRRLDSESSPYLSLQISPPAKKPLTKIVSYLLVAEPDKLYAMPPPGMPEGDIKALTTLCDLADRELVVIIGWAKHIPGFSSLSLGDQMSLLQSAWMEILILGIVYRSLPYDDKLVYAEDYIMDEEHSRLAGLLELYRAILQLVRRYKKLKVEKEEFVTLKALALANSDSMYIEDLEAVQKLQDLLHEALQDYELSQRHEEPWRTGKLLLTLPLLRQTAAKAVQHFYSVKLQGKVPMHKLFLEMLEAKV

SEQ ID NO: 71675 - protein, 203 aa, Homo sapiens
TLYNVKAEIFPPSGMEYCRTGSLCSLEVLITRLSDLLEVDKDEALTESDEHFSTKLMYEVVDNSSNWAVCGKSCGVISMPVAARATHRVHMEVMPLFAGYLPLPDVRLFKYLPHHSAHSSQLDADSWIENDSLSVDKHGDDQPDSSSLKSRGSVHSACSSEHKGLPMPRLQALPAGQVFNSSSGTQVLVIPSQDDHVLEVSVT

SEQ ID NO: 71676 - protein, 129 aa, Homo sapiens
  MOD_RES (1)..(1): Any amino acid
XNIQNTFPTRALAKSGWGDDITWVQTYEEGLFYAQKSKKPLMVIHHLEDCQYSQALKKVFAQNEEIQEMAQNKFIMLNLMHETTDKNLSPDGQYVPRIMFVDPSLTVRADIAGRYSNRLYTYEPRDLPL

SEQ ID NO: 71677 - protein, 207 aa, Homo sapiens
MEDIQTNAELKSTQEQSVPAESAAVLNDYSLTKSHEMENVDSGEGPANEDEDIGDDSMKVKDEYSERDENVLKSEPMGNAEEPEIPYSYSREYNEYENIKLERHVVSFDSSRPTSGKMNCDVCGLSCISFNVLMVHKRSHTVEKPYKCEFCGRSYKQRSSLEEHKERCRTFLQSTDPGDTGTGWGWVELSHLGIRLQDLNVPWCRLH

SEQ ID NO: 71678 - protein, 131 aa, Homo sapiens
MQRGLDSETKKQLEEEEKKIISEEHWSFIIEEQSFLLCEDLLYGRMSFRGFNPEVEKLMLQMNAKHKAEEVEDETVELDVSDEEMARRYETLVGTIGKKFARKRDHANYEEDENGDITPIKAKKMFLKPQD

SEQ ID NO: 71679 - protein, 394 aa, Homo sapiens
  MOD_RES (1)..(1): Any amino acid
XRMFVLTVAAENQVPLAKGIQHPPQSTATVSVTVIDVNENPYFAPNPKIIRQEEGLHAGTMLTTFTAQDPDRYMQQNIRYTKLSDPANWLKIDPVNGQITTIAVLDRESPNVKNNIYNATFLASDNGIPPMSGTGTLQIYLLDINDNAPQVLPQEAETCETPDPNSINITALDYDIDPNAGPFAFDLPLSPVTIKRNWTITRLNGDFAQLNLKIKFLEAGIYEVPIIITDSGNPPKSNISILRVKVCQCDSNGDCTDVDRIVGAGLGTGAIIAILLCIIILLILVLMFVVWMKRRDKERQAKQLLIDPEDDVRDNILKYDEEGGGEEDQDYDLSQLQQPDTVEPDAIKPVGIRRMDERPIHAEPQYPVRSAAPHPGDIGDFINEKTWPIESLHL

SEQ ID NO: 71680 - protein, 31 aa, Homo sapiens
MEGSRPRAPSGHLAPSPPAFDGELDLQRYSN

SEQ ID NO: 71681 - protein, 96 aa, Homo sapiens
  MOD_RES (1)..(1): Any amino acid
XGYAIASSSDDRMNEPPTSLGLVPHQIRGFLSRFDNVLPVSLAFDKCTACSSKVLDQYEREGFNFLAKVFNSSHSFLEDLTGLTLLHQETQAAEHL

SEQ ID NO: 71682 - protein, 310 aa, Homo sapiens
MIVFRLGRIRTPQGPGMVLLLPFIDSFQRVDLRTRAFNVPPCKLASKDGAVLSVGADVQFRIWDPVLSVMTVKDLNTATRMTAQNAMTKALLKRPLREIQMEKLKISDQLLLEINDVTRAWGLEVDRVELAVEAVLQPPQDSPAGPNLDSTLQQLALHFLGGSMNSMAGGAPSPGPDTVEMVSEVEPPAPQVGARSSPKQPLAEGLLTALQPFLSEALVSQVGACYQFNVVLPSGTQSAYFLDLTTGRGRVGHGVPDGIPDVVVEMAEADLRALLCRELRPLGAYMSGRLKVKGDLAMAMKLEAVLRALK

SEQ ID NO: 71683 - protein, 125 aa, Homo sapiens
MAGSADSYTSRPSDSDVSLEEDREAIRQEREQQAAIQLERAKKYNNDWWIGRLVKEGCEIGFIPSPLRLENIRIQQEQKRGRFHGGKSSGNSSSSLGEMVSGTFRATPTSTAKQKQKVTEHIPPY

SEQ ID NO: 71684 - protein, 610 aa, Homo sapiens
  MOD_RES (1)..(1): Any amino acid
XAAEGVPSRGPPGEVIHLNVGGKRFSTSRQTLTWIPDSFFSSLLSGRISTLKDETGAIFIDRDPTVFAPILNFLRTKELDPRGVHGSSLLHEAQFYGLTPLVRRLQLREELDRSSCGNVLFNGYLPPPVFPVKRRNRHSLVGPQQLGGRPAPVRRSNTMPPNLGNAGLLGRMLDEKTPPSPSGQPEEPGMVRLVCGHHNWIAVAYTQFLVCYRLKEASGWQLVFSSPRLDWPIERLALTARVHGGALGEHDKMVAAATGSEILLWALQAEGGGSEIGVFHLGVPVEALFFVGNQLIATSHTGRIGVWNAVTKHWQVQEVQPITSYDAAGSFLLLGCNNGSIYYVDVQKFPLRMKDNDLLVSELYRDPAEDGVTALSVYLTPKTSDSGNWIEIAYGTSSGGVRVIVQHPETVGSGPQLFQTFTVHRSPVTKIMLSEKHLISVCADNNHVRTWSVTRFRGMISTQPGSTPLASFKILALESADGHGGCSAGNDIAGGLTEQELMEQLEHCELAPPAPSAPSWGCLPSPSPRISLTSLHSASSNTSLSGHRGSPSPPQAEARRRGGGSFVERCQELVRSGPDLRRPPTPAPWPSSGLGTPLTPPKMKLNETSF

SEQ ID NO: 71685 - protein, 50 aa, Homo sapiens
  MOD_RES (1)..(1): Any amino acid
XADEEKLPPGWEKRMSRSSGENTKAQGRYITFEPRFRFESRPSVLLQPHH

SEQ ID NO: 71686 - protein, 129 aa, Homo sapiens
  MOD_RES (1)..(1): Any amino acid
XQMKQNETTAMKKQQELMDENFDLSKRLSENEIICNALQRQKERLEGENDVSKKVLPPARSPSRNALSAKQMIFVITPWSNSRCSPFVSIVQFVTRSSQLQRSRSLKTTCSATLSEYPNLLDVYRDFIE

SEQ ID NO: 71687 - protein, 111 aa, Homo sapiens
  MOD_RES (1)..(1): Any amino acid
XLFVIFSAVFMVTRLGIYPFWILNTTLFESWEIIGPYASWWLLNGLLLTLQLLHVIWSYLIARIALKALIRGKVTCPGRIRPCTLHSFLTSFLFSMPGGSWTVSSLACIEG

SEQ ID NO: 71688 - protein, 226 aa, Homo sapiens
MAALGHLAGEAAAAPGPGTPCASRGARLPGPVSSARNPSTVCLCPEQPTCSNADSRAHPLGDEGGTASKKQKNKKKTRNRASVANGGEKASEKLAPEEVPLSAEAQAQQLAQELAWCVEQLELGLKRQKPTPKQKEQAIGAIRTLRSKRTPLPRKRQLMHSLFGDYRAQMEAEWREALRALRAAAYSAQVQPVDGATRKKSQRVCRPRSIWRAKATLDMPDEEFSP

SEQ ID NO: 71689 - protein, 752 aa, Homo sapiens
SWTHCPWPQHLPALGRLSQDDQCTPPHRRGPQSGCPAELRPHPPAVPCCPLLWAPGQGSFPRRAGCQRGQPVGQCQLLPAARLLVPAGQPAAPGPALSPNPEAGLAAGPPPGLAGEREGVCLANLASRCGLQDDFTLHPPNLLLFYNLSQVREADCRAFIRRAAQGDVELLSHLPDQRVALWRAAVACLVGAGWGWARCIGGSLPLGADLLALQGVARLRLSASDQQLLGALVCDMDASSIGAADPHMLENLRRCPRLTAAQRIALNSLLAGGKTSLGPPGSWTLEGLQALGPLATYISPHLWAQVQEAVGLGFFRSVVASCQVGRLGQREARCFVTSFLESKTKPVSSRPRLSTGNITAATLRDDLFLVHYDCAELESCLDGCILRTNLDTLLQHLLPTECQHVVKAKLAQIYPQGLPEDQLRLITSLVYLYSRTEIGQWSITSQDTVMALLASDVALENQTEAVLQKFLEHNGTVSGALLLAIGGTRLCWMSPHQIQTIHPQELRLAGALDLSSCPQSRKDVLYTKAHETFGSSGTLAAYYRLMRPYLGGSPGGAQPPSPVPPGGAPVEELRHLAHANISMDIDTFTSLNPLELQSLDVGNVTALLGHNVGDLQKARSHPTVRAWLRSLNSSTLGQLGLDASPTSPTGPAHGTRGPPSTTHQVLHLVHTSGLPTNDAQASTSGSLWAPLGYLPLAMALPCSLLCLLHWGTCILVSVDSVASGWLGSQGSGAGKTEVLDSAGRPLGLTGQL

SEQ ID NO: 71690 - protein, 141 aa, Homo sapiens
QDKSGQLKVELQLERAVPTGYIDVGNCGCAFLQIDVGHSSWPLDRPFITLLPATTLMSLTDSKQGKNRSGVRMFKDVDFLAPASGELWDRLRLTCSRPFTRHQSFGLAFLRVCSSLDSLDDSVVGPSALLSSVLNKVGEMF

SEQ ID NO: 71691 - protein, 22 aa, Homo sapiens
DSKDDERVPALNLLICLVSRYS

SEQ ID NO: 71692 - protein, 457 aa, Homo sapiens
MKRTPTAEEREREAKKLRLLEELEDTWLPYLTPKDDEFYQQWQLKYPKLILREASSVSEELHKEVQEAFLTLHKHGCLFRDLVRIQGKDLLTPVSRILIGNPGCTYKYLNTRLFTVPWPVKGSNIKHTEAEIAAACETFLKLNDYLQIETIQALEELAAKEKANEDAVPLCMSADFPRVGMGSSYNGQDEVDIKSRAAYNVTLLNFMDPQKMPYLKEEPYFGMGKMAVSWHHDENLVDRSAVAVYSYSCEGPEEESEDDSHLEGRDPDIWHVGFKISWDIETPGLAIPLHQGDCYFMLDDLNATHQHCVLAGSQPRFSSTHRVAECSTGTLDYILQRCQLALQNVCDDVDNDDVSLKSFEPAVLKQGEEIHNEVEFEWLRQFWFQGNRYRKCTDWWCQPMAQLEALWKKMEGVTNAVLHEVKREGLPVEQRNEILTAILASLTARQNLRREWHARVE

SEQ ID NO: 71693 - protein, 138 aa, Homo sapiens
MADELSEKQVYDAHTKEIDLVNRDPKHLNDDVVKIDFEDVIAEPEGTHSFDGIWKASFTTFTVTKYWFYRLLSALFGIPMALIWGIYFAILSFLHIWAVVPCIKSFLIEIQCISRVYSIYVHTVCDPLFEAVGKIFSN

SEQ ID NO: 71694 - protein, 78 aa, Homo sapiens
MRQAPPAPPSPESCTTARGPAAPAPHPAAARSSPQPTRRTSASFTKPGRVWSETCEARCRVASGAWWRSMWRRSLTPA

SEQ ID NO: 71695 - protein, 128 aa, Homo sapiens
MEWDNGTGQALGLPPTTCVYRENFKQLLLPPVYSAVLAAGLPLNICVITQICTSRRALTRTAVYTLNLALADLLYACSLPLLIYNYAQGDHWPFGDFACRLVRFLFYANLHGSILFLTCISFQRYLGI

SEQ ID NO: 71696 - protein, 46 aa, Homo sapiens
MDPVACEDVAVNFTQEEWALLDISQRKLYREVMLETFRNLTSIGVS

SEQ ID NO: 71697 - protein, 208 aa, Homo sapiens
MNSRQAWRLFLSQGRGDRWVSRPRGHFSPALRREFFTTTTKEGYDRRPVDITPLEQRKLTFDTHALVQDLETHGFDKTQAETIVSALTALSNVSLDTIYKEMVTQAQQEITVQQLMAHLDAIRKDMVILEKSEFANLRAENEKMKIELDQVKQQLMTFFLTSCCFISYSLQIKKSNLWKQLQNLQKRILKPKVLFQRPVIKLTLKLLP

SEQ ID NO: 71698 - protein, 145 aa, Homo sapiens
MPFNGSDVLNLLFLYPLTSNEAKEILTKESNVQEVRCPVTVCGDVHGQFHDLMELFRIGGKSPDTNYLFMGDYVDRGYYSVETVTLLVALKVRYRERITILRGNHESRQITQVYGFYDECLRKYGNANVWKYFTDLFDYLPLTAL

SEQ ID NO: 71699 - protein, 51 aa, Homo sapiens
MATDSWALAVDEQEAAVKSRRGFSMLVRLVSNSRPQVIRPPRPPKVLGLQP

SEQ ID NO: 71700 - protein, 132 aa, Homo sapiens
GPPDKYSNLRPVHFYIPENESPLEQKLRKLRQETQEWNQQFWANQNLTFSKEKEEFIHSRLKTKGLGLRTESDGVSLCHPGWSAVARSRLTANSASWFKRFSCLSLLSSWDYRSESNIECRRNGGLLQGIFK

SEQ ID NO: 71701 - protein, 77 aa, Homo sapiens
  MOD_RES (1)..(1): Any amino acid
XEILFLFQALLTVVSQVLCFLAIEWYLPLLVSALVLGWLNLLYYTRGFQHTGIYSVMIQKGGGGELGFMGADAAYAV

SEQ ID NO: 71702 - protein, 147 aa, Homo sapiens
PAPTSDLWPQVTRLGEVANEVTMGVAASSPALELPDLLLLAGPAKENGHLQLFGCGPHSRPETESSASGCGCSTACASSLLLLCPSRRSKSPKAWKPDLTPRPLNSGDSESSSILQGHRMTRDQSTLPQGRADEILKLIKVSPLRTN

SEQ ID NO: 71703 - protein, 151 aa, Homo sapiens
MRPTEASERCHLRGSYTLRAGESALELWGGPEPGTQLYDWPYRFLRRFGRDKVTFSFEAGRRCVSGEGNFEFETRQGNEIFLALEEAISAQKNAAPATPQPQPATIPASLPRPDSPYSRPHDSLPPPSPTTPVPAPRPRGQEGEYAVPFDA

SEQ ID NO: 71704 - protein, 186 aa, Homo sapiens
GSSVPRTFFSVQKEACATPGPADYQEFWHSQGVGISDELPNLTNKYAAFLSRAKRTMKVPDMVIPAPGSYDVHKSYEMSQVKHKYMPPRSLVAKRKHASFLSATPRCLEKVTDGPGPAAYNPVLRKSCPIPLFVKASKRFEESKEITPGPATYEMNNTEESPRGLRTYYMEHGGDKTISSGMTRIA

SEQ ID NO: 71705 - protein, 147 aa, Homo sapiens
MKNEIAAVVFFFTRLVRKHDKLKKEAVERFAEKLTLILQEKYKNHWYPEKPSKGQAYRCIRVNKFQRVDPDVLKACENSCILYSDLGLPKELTLWVDPCEVCCRRDGVSPCWPDCSQTPDLVIRPPWPPKALDYRREPLRPASSFLI

SEQ ID NO: 71706 - protein, 14 aa, Homo sapiens
MATACKRSGEPQSD

SEQ ID NO: 71707 - protein, 73 aa, Homo sapiens
  MOD_RES (1)..(1): Any amino acid
XLKEEGTEAMGGTGSSPGVGATEAPETTIAAGVRVVATVTGARAGPTETVMTVTPMEAAALGGQKCCAPNRTL

SEQ ID NO: 71708 - protein, 76 aa, Homo sapiens
MVQKKPAELQGFHRSFKGQNPFELAFSLDQPDHGDSDFGLQCSARPGEGPEGEEGTGQLLSLPWQWPAPAGGWGHA

SEQ ID NO: 71709 - protein, 156 aa, Homo sapiens
  MOD_RES (1)..(1): Any amino acid
XRCDSGGSATRQGSPGAVLPRSAVWSTGPTSPATPRPSSASGGFVDSSEGSAGSGPLWCSAESCLPSTRRRPSLSQERLAGAGTPLPWASSSPTSTPALGGRRGLLRCRSQPCVLSGKRSRRKRRREEDARWTRPSLDFLKMTQVASRTVSPSMLP

SEQ ID NO: 71710 - protein, 334 aa, Homo sapiens
MPQVGGRPLSHLERSQWGMRRTAWSSLPPCPTASHWVSLAKPAASWVPVSFSGPGTAYQREKMFFPVCTFPSHWSRGSGAVSKDRTPSPTRHQAHILVPLKIQLRRVPDSFSQQMPETSYLTRVGPDIQCWPESWGMDSLQKQDLRRPKIHGAVQASPYQPPTLASLQRLLWVRQAATLNHIDEVWPSLFLGDAYAARDKSKLIQLGITHVVNAAAGKFQVDTGAKFYRGMSLEYYGIEADDNPFFDLSVYFLPVARYIRAALSVPQGRVLVHCAMGVSRSATLVLAFLMICENMTLVEAIQTVQAHRNICPNSGFLRQLQVLDNRLGRETGRF

SEQ ID NO: 71711 - protein, 617 aa, Homo sapiens
MRLPEASGPSFVSSHYILESPGGVSLEGSELMFPDLVQLICAYCHTRDILLLPLQLPRAIHHAATHKELEAISHLGIEFWSSSLNIKAQRGPAGGPVLPQLKARSPQELDQGTGAALCFFNPLFPGDLGPTKREKFKRSFKVRVSTETSSPLSPPAVPPPPVPVLPGAVPSQTERLPPCQLLRRESSVGYRVPAGSGPSLPPMPSLQEVDCGSPSSSEEEGVPGSRGSPATSPHLGRRRPLLRSMSAAFCSLLAPERQVGRAAAALMQDRHTAAGQLVQDLLTQVRAGPEPQELQGIRQALSRARAMLSAELGPEKLLSPKRLVELEQVRQKLLQLLRTYSPSAQVKRLLQACKLLYMALRTQEGEGAGADEFLPLLSLVLAHCDLPELLLEAEYMSELLEPSLLTGEGGYYLTSLSASLALLSGLGQAHTLPLSPVQELRRSLSLWEQRRLPATHCFQHLLRVAYQDPSSGCTSKTLAVPPEASIATLNQLCATKFRVTQPNTFGLFLYKEQGYHRLPPGALAHRLPTTGYLVYRRAEWPETQGAVTEEEGSGQSEARSRGEEQGCQGDGDAGVKASPRDIREQSETTAEGGQGQAQEGPAQPGEPEAEGSRAAEE

SEQ ID NO: 71712 - protein, 49 aa, Homo sapiens
MSKSKVDNQFYSVEVGDSTFTVLKRYQNLKPIGSGAQGIVWEMQPQIYF

SEQ ID NO: 71713 - protein, 688 aa, Homo sapiens
MQSPWKILTVAPLFLLLSLQSSASPANDDQSRPSLSNGHTCVGCVLVVSVIEQLAQVHNSTVQASMERLCSYLPEKLFLKTTCYLVIDKFGSDIIKLLSADMNADVVCHTLEFCKQNTGQPLCHLYPLPKETWKFTLQKARQIVKKSPILKYSRSGSDICSLPVLAKICQKIKLAMEQSVPFKDVDSDKYSVFPTLRGYHWRGRDCNDSDESVYPGRRPNNWDVHQDSNCNGIWGVDPKDGVPYEKKFCEGSQPRGIILLGDSAGAHFHISPEWITASQMSLNSFINLPTALTNELDWPQLSGATGFLDSTVGIKEKSIYLRLWKRNHCNHRDYQNISRNGASSRNLKKFIESLSRNKVLDYPAIVIYAMIGNDVCSGKSDPVPAMTTPEKLYSNVMQTLKHLNSHLPNGSHVILYGLPDGTFLWDNLHNRYHPLGQLNKDMTYAQLYSFLNCLQVSPCHGWMSSNKTLRTLTSERAEQLSNTLKKIAASEKFTNFNLFYMDFAFHEIIQEWQKRGGQPWQLIEPVDGFHPNERKSILLKGILMTSQTLDNQEWTQLTSWIKGNLTCDSRTREWLCCCWRIISGKRCSSSGPKSWERRIRSTPRLNRCLETKAGTEPLRSMHPWGAQGGRGLGKLIPQTLWGLPRHRPKGLFFSSIFAKCLSLNEEHIWTTVQCCVLPGSVTLPLFLK

SEQ ID NO: 71714 - protein, 1112 aa, Homo sapiens
MPGSVGPVGPRGPQGLQGQQGGAGPTGPPGEPGDPGPMGPIGSRGPEGPPGKPGEDGEPGRNGNPGEVGFAGSPGARGFPGAPGLPGLKGHRGHKGLEGPKGEVGAPGSKGEAGPTGPMGDPGTVGPPGPVGERGAPGNRGFPGSDGLPGPKGAQGERGPVGSSGPKGSQGDPGRPGEPGLPGARGLTGNPGVQGPEGKLGPLGAPGEDGRPGPPGSIGIRGQPGSMGLPGPKGSSGDPGKPGEAGNAGVPGQRGAPGKDGEVGPSGPVGPPGLAGERGEQGPPGPTGFQGLPGPPGPPGEGGKPGDQGVPGDPGAVGPLGPRGERGNPGERGEPGITGLPGEKGMAGGHGPDGPKGSPGPSGTPGDTGPPGLQGMPGERGIAGTPGPKGDRGGIGEKGAEGTAGNDGARGLPGPLGPPGPAGPTGEKGEPGPRGLVGPPGSRGNPGSRGENGPTGAVGFAGPQGPDGQPGVKGEPGEPGQKGDAGSPGPQGLAGSPGPHGPNGVPGLKGGRGTQGPPGATGFPGSAGRVGPPGPAGAPGPAGPLGEPGKEGPPGLRGDPGSHGRVGDRGPAGPPGGPGDKGDPGEDGQPGPDGPPGPAGTTGQRGIVGMPGQRGERGMPGLPGPAGTPGKVGPTGATGDKGPPGPVGPPGSNGPVGEPGPEGPAGNDGTPGRDGAVGERGDRGDPGPAGLPGSQGAPGTPGPVGAPGDAGQRGDPGSRGPIGPPGRAGKRGLPGPQGPRGDKGDHGDRGDRGQKGHRGFTGLQGLPGPPGPNGEQGSAGIPGPFGPRGPPGPVGPSGKEGNPGPLGPIGPPGVRGSVGEAGPEGPPGEPGPPGPPGPPGHLTAALGDIMGHYDESMPDPLPEFTEDQAAPDDKNKTDPGVHATLKSLSSQIETMRSPDGSKKHPARTCDDLKLCHSAKQSGEYWIDPNQGSVEDAIKVYCNMETGETCISANPSSVPRKTWWASKSPDNKPVWYGLDMNRGSQFAYGDHQSPNTAITQMTFLRLLSKEASQNITYICKNSVGYMDDQAKNLKKAVVLKGANDLDIKAEGNIRFRYIVLQDTCSKRNGNVGKTVFEYRTQNVARLPIIDLAPVDVGGTDQEFGVEIGPVCFV

SEQ ID NO: 71715 - protein, 213 aa, Homo sapiens
  MOD_RES (1)..(1): Any amino acid
XFRENNFASMKSQMELRIKDLESELSKIKTSQEDFNKTELEKYKQLYLEELKVRKSLSSKLTKTNERLAEVNTKLLVEKQQSRSLFTTLTTRPVMEPPCVGNLNNSLDLNRKLIPRENLVISTSNPRASNNSMENYLSKMQQELEKNITRELKEAAAELESGSIASPLGSTDESNLNQDLVWKASREYGPSDETPHDYVLMTDQCLTSRTDLQ

SEQ ID NO: 71716 - protein, 223 aa, Homo sapiens
  MOD_RES (1)..(1): Any amino acid
XLKSEANDAVNSSTKEEKGEEKPDTKSTVTGERQSGDGQESTEPVENKVGKKGPKHLDDDEDRKNPAYIPRKGLFFEHDLRGQTQEEEVRPKGRQRKLWKDEGRWEHDKFREDEQAPKSRQELIALYGYDIRSAHNPDDIKPRRIRKPRYGSPPQRDPNWNGERLNKSHRHQGLGGTLPPRTFINRNAAGPLRRNPIPGQEELEPKLEMQSSLQRRCPLLLKD

SEQ ID NO: 71717 - protein, 274 aa, Homo sapiens
  MOD_RES (1)..(1): Any amino acid
XDDGPVPGTPGLPGSTGNPKSEEPEVPDQEGLQRITGLSPGRSALIVAVLCYINLLNYMDRFTVAGVLPDIEQFFNIGDSSSGLIQTVFISSYMVLAPVFGYLGDRYNRKYLMCGGIAFWSLVTLGSSFIPGEHFWLLLLTRGLVGVGEASYSTIAPTLIADLFVADQRSRMLSIFYFAIPVGSGLGYIAGSKVKDMAGDWHWALRISDRLRRNWPPSFLSEFRALQFSLMLCAFVGALGGAAFLGTAIFIEADRRRAQLHVQGQLGAVPGPAS

SEQ ID NO: 71718 - protein, 215 aa, Homo sapiens
MTSGANSSGSYLPSEIRSSKIDDNYLKELNEDLKLRKQELLEMLKPLEDKNNLLFQKLMSNLEEKQRSLQIMRQIMAGKGCEESSVMELLKEAEEMKQNLERKNKMLRKEMEMLWNKTFEAEELSDQQKAPQTKNKADLQDGKEKQQRKMEWVKYQEQNNILQNDFHGKVIELRIEALKNYQKANDLKLSLYLQQNFEPMQAFLNLPGSQGIRIV

SEQ ID NO: 71719 - protein, 46 aa, Homo sapiens
MGLELYLDLLSQPCRAVYIFAKKNDIPFELRIVDLIKGPAGPCPCG

SEQ ID NO: 71720 - protein, 177 aa, Homo sapiens
MHNFEEELTCPICYSIFEDPRVLPCSHTFCRNCLENILQASGNFYIWRPLRIPLKCPNCRSITEIAPTGIESLPVNFALRAIIEKYQQEDHPDIVTCPEHYRQPLNVYCLLDKKLVCGHCLTIGQHHGHPIDDLQSAYLKEKDTPQKLLEQLTDTHWTDLTHLIEKLKEQKSHSEKM

SEQ ID NO: 71721 - protein, 115 aa, Homo sapiens
EDVNLRVISEYQKLFPDIPIGYSGHETGIAISVAAVALGAKVLERHITLDKTWKGSDHSASLEPGELAELVRSVRLVERALGSPTKQLLPCEMACNEKVCPAGLYSVLLPCVEKG

SEQ ID NO: 71722 - protein, 93 aa, Homo sapiens
MKRPAESKNNTVVGKHCIPLKPSNELTNSTVVIDTHKPKDSNQTPHLLLTEDDPQSQHMTLSQAFHLKNNSKKKQMTTEKQKQDANMPKKPVL

SEQ ID NO: 71723 - protein, 105 aa, Homo sapiens
  MOD_RES (1)..(1): Any amino acid
XFSTCVTNGPFIMSSNSASAANGNDSKKFKGDSRSAGVPSRVIHIRKLPIDVTEGEVISLGLPFGKVTNLLMLKGKNQGLTKDYGNSPLHRFKKPGSKNFQNIFP

SEQ ID NO: 71724 - protein, 1559 aa, Homo sapiens
MIEYGLSVDYMDENEEYFQRQASHRQSRRRFRKINQKGERQTIIDTVDPYPMGKPPLPRGYHTLPADFTKLHLTDSLHPQVTHVSSSHSGCSITSDSGSSSLSDIYQATESEAGDMDLSGLPETAVDSEDDDDEEDIERASDPLMSRDIVRDCLEKDPIDRTDDDIEQLLEFMHQLPAFANMTMSVRRELCAVMVFAVVERAGTIVLNDGEELDSWSVILNGSVEVTYPDGKAEILCMGNSFGVSPTMDKEYMKGVMRTKVDDCQFVCIAQQDYCRILNQVEKNMQKVEEEGEIVMVKEHRELDRTGTRKGHIVIKGTSERLTMHLVEEHSVVDPTFIEDFLLTYRTFLSSPMEVGKKLLEWFNDPSLRDKVTRVVLLWVNNHFNDFEGDPAMTRFLEEFENNLEREKMGGHLRLLNIACAAKAKRRLMTLTKPSREAPLPFILLGGSEKGFGIFVDSVDSGSKATEAGLKRGDQILEVNGQNFENIQLSKAMEILRNNTHLSITVKTNLFVFKELLTRLSEEKRNGAPHLPKIGDIKKASRYSIPDLAVDVEQVIGLEKVNKKSKANTVGGRNKLKKILDKTRISILPQKPYNDIGIGQSQDDSIVGLRQTKHIPTALPVSGTLSSSNPDLLQSHHRILDFSATPDLPDQVLRVFKADQQSRYIMISKDTTAKEVVIQAIREFAVTATPDQYSLCEVSVTPEGVIKQRRLPDQLSKLADRIQLSGRYYLKNNMETETLCSDEDAQELLRESQISLLQLSTVEVATQLSMRNFELFRNIEPTEYIDDLFKLRSKTSCANLKRFEEVINQETFWVASEILRETNQLKRMKIIKHFIKIALHCRECKNFNSMFAIISGLNLAPVARLRTTWEKLPNKYEKLFQDLQDLFDPSRNMAKYRNVLNSQNLQPPIIPLFPVIKKDLTFLHEGNDSKVDGLVNFEKLRMIAKEIRHVGRMASVNMDPALMFRTRSLSQGSTNATVLDVAQTGGHKKRVRRSSFLNAKKLYEDAQMARKVKQYLSNLELEMDEESLQTLSLQCEPATNTLPKNPGDKKPVKSETSPVAPRAGSQQKAQSLPQPQQQPPPAHKINQGLQVPAVSLYPSRKKVPVKDLPPFGINSPQALKKILSLSEEGSLERHKKQAEDTISNASSQLSSPPTSPQSSPRKGGSGNQLRSFGSGQLDLTSSSSSLGSYTLAPSGTVDNFSDSGHSEISSRSSIVSNSSFDSVPVSLHDERRQRHSVSIVETNLGMGRMERRTMIEPDQYSLGSYAPMSEGRGLYATATVISSPSTEELSQDQGDRASLDAADSGRGSWTSCSSGSHDNIQTIQHQRSWETLPFGHTHFDYSGDPAGLWASSSHMDQIMFSDHSTKYNRQNQSRESLEQAQSRASWASSTGYWGEDSEGDTGTIKRRGGKDVSIEAESSSLTSVTTEETKPVPMPAHIAVASSTTKGLIARKEGRYREPPPTPPGYIGIPITDFPEGHSHPARKPPDYNVALQRSRMVARSSDTAGPSSVQQPHGHPTSSRPVNKPQWHKPNESDPRLAPYQSQGFSTEEDEDEQVSAV

SEQ ID NO: 71725 - protein, 205 aa, Homo sapiens
  MOD_RES (1)..(1): Any amino acid
XSGQFIHQAVGIIEAVLEKFGTYEHFEAATGGQLLTKCQIWSIVRKYMQKEGCAGEVVVQLSEDLLSQAVMMVENSRPTLAINLTGARQYWLEGMLRHEIGTHYLRGVNNARQPWHNAEGRLRYGLRPANPTEEGLASLHSVLFRKQPFLWRAALLYYTIHRAARMSFRQLFQDLERYVQDADVRWEYCVRAKRGQTDTSLPGVL

SEQ ID NO: 71726 - protein, 92 aa, Homo sapiens
MEGLLSVALQGAELEGNWKHEGQVEDLQENQESCPEPEAVACKGDPAGDSMQERDEFSRIPRTISSPAATQASVPDDSSSRRCSAPGESPKE

SEQ ID NO: 71727 - protein, 141 aa, Homo sapiens
MKVTLSALDTSESSFTPLVVIELAQDVKEETKEWLKNRIIAKKKDGGAQLLFRPLLNKYEQETLENQNLYLVGASKIRMLLGAEAVGLVKECNDNTMRAFTYRTRQNFKGFDDNNDDFLTMAECQFIIKHELENLRAKDEK

SEQ ID NO: 71728 - protein, 39 aa, Homo sapiens
MAAAATLRLSAQQLLLGTILNWAERPSQTRGRQMAPVTP

SEQ ID NO: 71729 - protein, 43 aa, Homo sapiens
MLACLPGPGDLSFQLLSHTQMNTGLQKWDTTQKMRTAHYPTPA

SEQ ID NO: 71730 - protein, 63 aa, Homo sapiens
PGPRDWVQILQDQIKLARRRLKRGSAEIADSDERLDGIALPPTGNIFDTRRENTEDTEPGFIA

SEQ ID NO: 71731 - protein, 84 aa, Homo sapiens
MGVDIRHNKDRKVRRKEPKSQDIYLRLLVKVSGQKNQLHIQPGCVEEVVYESHQPAASVPFPDDPEDEASWPGKQDGRGCGDHN

SEQ ID NO: 71732 - protein, 70 aa, Homo sapiens
TKATLLIWRRTWCRLTGQSDDEPKRIKKSKMIAKAFSKRHELLQNPGQELSFSMHTVSHDGPVVALPGQE

SEQ ID NO: 71733 - protein, 973 aa, Homo sapiens
  MOD_RES (1)..(1): Any amino acid
XGLSIMVSGKLDAVMKARKDIVARLQTQASATVAIPKEHHRFVIGKNGEKLQDLELKTATKIQIPRPDDPSNQIKITGTKEGIEKARHEVLLISAEQDKRAVERLEVEKAFHPFIAGPYNRLVGEIMQETGTRINIPPPSVNRTEIVFTGEKEQLAQAVARIKKIYEEKANSFTVSSVAAPSWLHRFIIGKKGQNLAKITQQMPKVHIEFTEGEDKITLEGPTEDVNVAQEQIEGMVKDLINRMDYVEINIDHKFHRHLIGKSGANINRIKDQYKVSVRIPPDSEKSNLIRIEGDPQGVQQAKRELLELASRMENERTKDLIIEQRFHRTIIGQKGERIREIRDKFPEVIINFPDPAQKSDIVQLRGPKNEVEKCTKYMQKMVADLVENSYSISVPIFKQFHKNIIGKGGANIKKIREESNTKIDLPAENSNSETIIITGKRANCEAARSRILSIQKDLANIAEVEVSIPAKLHNSLIGTKGRLIRSIMEECGGVHIHFPVEGSGSDTVVIRGPSSDVEKAKKQLLHLAEEKQTKSFTVDIRAKPEYHKFLIGKGGGKIRKVRDSTGARVIFPAAEDKDQDLITIIGKEDAVREAQKELEALIQNLDNVVEDSMLVDPKHHRHFVIRRGQVLREIAEEYGGVMVSFPRSGTQSDKVTLKGAKDCVEAAKKRIQEIIEDLEAQVTLECAIPQKFHRSVMGPKGSRIQQITRDFSVQIKFPDREENAVHSTEPVVQENGDEAGEGREAKDCDPGSPRRCDIIIISGRKEKCEAAKEALEALVPVTIEVEVPFDLHRYVIGQKGSGIRKMMDEFEVNIHVPAPELQSDIIAITGLAANLDRAKAGLLERVKELQAEQEDRALRSFKLSVTVDPKYHPKIIGRKGAVITQIRLEHDVNILNLEEEYLADVVDSEALQVYMKPPAHEEAKAPSRGFVVRDAPWTASSSEKAPDMSSSEEFPSFGAQVAPKTLPWGPKR

SEQ ID NO: 71734 - protein, 374 aa, Homo sapiens
MQRAGSKTAGPPCQWSRMASEGTNIPSPVVRQIDKQFLICSICLERYKNPKVLPCLHTFCERCLQNYIPAHSLTLSCPVCRQTSILPEKGVAALQNNFFITNLMDVLQRTPGSNAEESSILETVTAVAAGKPLSCPNHDGNIFSNDGQFKSRFGIRGRSPGQLQRPTGVAVHPSGDIIIADYDNKWVSIFSSDGKFKTKIGSGKLMGPKGVSVDRNGHIIVVDNKACCVFIFQPNGKIVTRFGSRGNGDRQFAGPHFAAVNSNNEIIITDFHNHSVKVFNQEGEFMLKFGSNGEGNGQFNAPTGVAVDSNGNIIVADWGNSRIQVFDGSGSFLSYINTSADPLYGPQGLALTSDGHVVVADSGNHCFKVYRYLQ

SEQ ID NO: 71735 - protein, 26 aa, Homo sapiens
MKLKEVDRTAMQAWSPAQNHPIYLAT

SEQ ID NO: 71736 - protein, 1336 aa, Homo sapiens
MKSCGVSLATAAAAAAAFGDEEKKMAAGKASGESEEASPSLTAEEREALGGLDSRLFGFVRFHEDGARTKALLGKAVRCYESLILKAEGKVESDFFCQLGHFNLLLEDYPKALSAYQRYYSLQSDYWKNAAFLYGLGLVYFHYNAFQWAIKAFQEVLYVDPSFCRAKEIHLRLGLMFKVNTDYESSLKHFQLALVDCNPCTLSNAEIQFHIAHLYETQRKYHSAKEAYEQLLQTENLSAQVKATVLQQLGWMHHTVDLLGDKATKESYAIQYLQKSLEADPNSGQSWYFLGRCYSSIGKVQDAFISYRQSIDKSEASADTWCSIGVLYQQQNQPMDALQAYICAVQLDHGHAAAWMDLGTLYESCNQPQDAIKCYLNATRSKSCSNTSALAARIKYLQACKPHHPNTEPVLGLSQTPISQQSLPLHMIPSSQVDDLSSPAKRKRTSSPTKNTSDNWSGGHAVSHPPVQQQAHSWCLTPQKLQHLEQLRANRNNLNPAQKLMLEQLESQFVLMQQHQMRPTGVAQVRSTGIPNGPTADSSLPTNSVSGQQPQLALTRVPSVSQPGVRPACPGQPLANGPFSAGHVPCSTSRTLGSTDTILIGNNHITGSGSNGNVPYLQRNALTLPHNRTNLTSSAEEPWKNQLSNSTQGLHKGQSSHSAGPNGERPLSSTGPSQHLQAAGSGIQNQNGHPTLPSNSVTQGAALNHLSSHTATSGGQQGITLTKESKPSGNILTVPETSRHTGETPNSTASVEGLPNHVHQMTADAVCSPSHGDSKSPGLLSSDNPQLSALLMGKANNNVGTGTCDKVNNIHPAVHTKTDNSVASSPSSAISTATPSPKSTEQTTTNSVTSLNSPHSGLHTINGEGMEESQSPMKTDLLLVNHKPSPQIIPSMSVSIYPSSAEVLKACRNLGKNGLSNSSILLDKCPPPRPPSSPYPPLPKDKLNPPTPSIYLENKRDAFFPPLHQFCTNPNNPVTVIRGLAGALKLDLGLFSTKTLVEANNEHMVEVRTQLLQPADENWDPTGTKKIWHCESNRSHTTIAKYAQYQASSFQESLREENEKRSHHKDHSDSESTSSDNSGRRRKGPFKTIKFGTNIDLSDDKKWKLQLHELTKLPAFVRVVSAGNLLSHVGHTILGMNTVQLYMKVPGSRTPGHQENNNFCSVNINIGPGDCEWFVVPEGYWGVLNDFCEKNNLNFLMGSWWPNLEDLYEANVPVYRFIQRPGDLVWINAGTVHWVQAIGWCNNIAWNVGPLTACQYKLAVERYEWNKLQSVKSIVPMVHLSWNMARNIKVSDPKLFEMIKIFSLSPNFRAEKCLRDHLVQPLRSNGEPEPLRFTGE

SEQ ID NO: 71737 - protein, 160 aa, Homo sapiens
MSTWKARLTKRLKSPSRSMHPFPCSALLACFGNTRESASFNQSGVADTHSTVRVQPVAKAGRQPRHPSAEGAPEKRQDSSTHAERNGSANRNSSHRTAAQPAETPEDVPGSLDDGADCEAVVFHASIPRPSIIDTPKEEEFREEPKCLELEQKMTSGECS

SEQ ID NO: 71738 - protein, 39 aa, Homo sapiens
MAGLQELRFPEEKPLLRGQDATELESSDAFLLAADTDWK

SEQ ID NO: 71739 - protein, 99 aa, Homo sapiens
MEDSMDMDMSPLRPQNYLFGCELKADKDYHFKVDNDENEHQLSLRTVSLGAGAKDELHIVEAEAMNYEGSPIKVTLATLKMSVQPTVRALTYFGCCVKV

SEQ ID NO: 71740 - protein, 83 aa, Homo sapiens
MEPKPQKSPGKQFTFSYENEVCKQDYFIKSPPSQLFSSVTSWKKRFFILSKAGEKSFSLSYYKDHHHRGSIEIDQNSSVEVGI

SEQ ID NO: 71741 - protein, 315 aa, Homo sapiens
MGMWASLDALWEMPAEKRIFGAVLLFSWTVYLWETFLAQRQRRIYKTTTHVPPELGQIMDSETFEKSRLYQLDKSTFSFWSGLYSETEGTLILLFGGIPYLWRLSGRFCGYAGFGPEYEITQSLVFLLLATLFSALTGLPWSLYNTFVIEEKHGFNQQTLGFFMKDAIKKFVVTQCILLPVSSLLLYIIKIGGDYFFIYAWLFTLVVSLVLVTIYADYIAPLFDKFTPLPEGKLKEEIEVMAKSIDFPLTKVYVVEVCFKCQTTVEWSTLSSSATSCVVVRGSAPMIALHWSLSTSDGLPLRSSSSRLSSPLQTS

SEQ ID NO: 71742 - protein, 59 aa, Homo sapiens
MTVGKSSKMLQHIDYRMRCILQDGRIFIGTFKAFDKHMNLILCDCDEFRKIKPKNAKQP

SEQ ID NO: 71743 - protein, 109 aa, Homo sapiens
  MOD_RES (1)..(1): Any amino acid
XVVGMVMGLRIRCDEGESLRGQTTSAFLFLGGLLLLTALIGSPAALPGNPGDLSGTPQHTNDSRRPGRDPLGAPNPSPRGPPGHPPQGPPSSPCSAPPSPQASAFCWQT

SEQ ID NO: 71744 - protein, 186 aa, Homo sapiens
MEEPEEPADSGQSLVPVYIYSPEYVSMCDSLAKIPKRASMVHSLIEAYALHKQMSVLKEVYQAFNPKAVVLQLGADTIAGDPMCSFNMTPVGIGKCLKYILQWQLATLILGGGGYNLANTARCWTYLTGVILGKTLSSEIPDHEFFTAYGPDYVLEITPSCRPDRNEPHRIQQILNYIKGNLKHVV

SEQ ID NO: 71745 - protein, 93 aa, Homo sapiens
MENGYTYEDYKNTAEWLLSHTKHRPQVAIICGSGLGGLTDKLTQAQIFDYGEIPNFPRSTVPGHAGRLVFGFLNGRACVMMQGRFHMYEGYPL

SEQ ID NO: 71746 - protein, 26 aa, Homo sapiens
  MOD_RES (1)..(1): Any amino acid
XADRKRVETALEACSLPSSRALRIWW

SEQ ID NO: 71747 - protein, 56 aa, Homo sapiens
MGILSVDLLITLQILPPSANWWKSSPQWLTSCWSTLMRLIHQMAGRYRGTPLCLLR

SEQ ID NO: 71748 - protein, 60 aa, Homo sapiens
MEPNSLRTKVPAFLSDLGKATLRGIRKCPRCGTYNGTRGLSCKNKTCGTIFRYGARKQPS

SEQ ID NO: 71749 - protein, 161 aa, Homo sapiens
MWKVSALLFVLGSASLWVLAEGASTGQPEDDTETTGLEGGVAMPGAEDDVVTPGTSEDRYKSGLTTLVATSVNSVTGIRIEDLPTSESTVHAQEQSPSATASNVATSHSTEKVDGDTQTTVEKDGLSTVTLVGIIVGVLLAIGFIGAIIVVVMRKMSGRYS

SEQ ID NO: 71750 - protein, 452 aa, Homo sapiens
MFDIEYFRKDPRPFFKFAKEIYPGQFQPSLCHKFIALSDKEGKLLRNYTQNIDTLEQVAGIQRIIQCHGSFATASCLICKYKVDCEAVRGDIFNQVVPRCPRCPADEPLAIMKPEIVFFGENLPEQFHRAMKYDKDEVDLLIVIGSSLKVRPVALIPSSIPHEVPQILINREPLPHLHFDVELLGDCDVIINELCHRLGGEYAKLCCNPVKLSEITEKPPRTQKELAYLSELPPTPLHVSEDSSSPERTSPPDSSVIVTLLDQAAKSNDDLDVSESKGCMEEKPQEVQTSRNVESIAEQMENPDLKNVGSSTGEKNERTSVAGTVRKCWPNRVAKEQISRRLDGNQYLFLPPNRYIFHGAEVYSDSEDDVLSSSSCGSNSDSGTCQSPSLEEPMEDESEIEEFYNGLEDEPDVPERAGGAGFGTDGDDQEAINEAISVKQEVTDMNYPSNKS

SEQ ID NO: 71751 - protein, 652 aa, Homo sapiens
MGFQPPAALLLRLFLLQGILRLLWGDLAFIPPFIRMSGPAVSASLVGDTEGVTVSLAVLQDEAGILPIPTCGVLNNETEDWSVTVIPGAKVLEVTVRWKRGLDWCSSNETDSFSESPCILQTLLVSASHNSSCSAHLLIQVEIYANSSLTHNASENVTVIPNQVYQPLGPCPCNLTAGACDVRCCCDQECSSNLTTLFRRSCFTGVFGGDVNPPFDQLCSAGTTTRGVPDWFPFLCVQSPLANTPFLGYFYHGAVSPKQDSSFEVYVDTDAKDFADFGYKQGDPIMTVKKAYFTIPQVSLAGQCMQNAPVAFLHNFDVKCVTNLELYQERDGIINAKIKNVALGGIVTPKVIYEEATDLDKFITNTGIMTQRFVVKFLSYNSGNEEELSGNPGYQLGKPVRALNINRMNNVTTLHLWQSAGRGLCTSATFKPILFGENVLSGCLLEVGINENCTQLRENAVERLDSLIQATHVAMRGNSDYADLSDGWLEIIRVDAPDPGADPLASSVNGMCLDIPAHLSIRILISDAGAVEGITQQEILGVETRFSSVNWQYQCGLTCEHKADLLPISASVQFIKIPAQLPHPLTRFQINYTEYDCNRNEVCWPQLLYPWTQYYQGELHSQCVAKGLLLLLFLTLALFLSNPWTRICKAYS

SEQ ID NO: 71752 - protein, 70 aa, Homo sapiens
  MOD_RES (1)..(1): Any amino acid
XLGLLIHFVFFASIFDIYFTSPLVHGMTPQFTPLPPPARRLVLFVADGLRADALYELDENGNSRAPFIRC

SEQ ID NO: 71753 - protein, 105 aa, Homo sapiens
MASRKTKKKEGGALRAQRASSNVFSNFEQTQIQEFKEAFTLMDQNRDGFIDKEDLKDTYASLGRYPGRTPQSPWRRRTQRSSSSRRRGPSSNGARARASEAHQRP

SEQ ID NO: 71754 - protein, 918 aa, Homo sapiens
MKRRSKDTCIVISGESGAGKTEASKYIMQYIAAITNPSQRAEVERVKNMLLKSNCVLEAFGNAKTNRNDNSSRFGKYMDINFDFKGDPIGGHINNYLLEKSRVIVQQPGERSFHSFYQLLQGGSEQMLRSLHLQKSLSSYNYIHVGAQLKSSINDAAEFRVVADAMKVIGFKPEEIQTVYKILAAILHLGNLKFVVDGDTPLIENGKVVSIIAELLSTKTDMVEKALLYRTVATGRDIIDKQHTEQEASYGRDAFAKAIYERLFCWIVTRINDIIEVKNYDTTIHGKNTVIGVLDIYGFEIFDNNSFEQFCINYCNEKLQQLFIQLVLKQEQEEYQREGIPWKHIDYFNNQIIVDLVEQQHKGIIAILDDACMNVGKVTDEMFLEALNSKLGKHAHFSSRKLCASDKILEFDRDFRIRHYAGDVVYSVIGFIDKNKDTLFQDFKRLMYNSSNPVLKNMWPEGKLSITEVTKRPLTAATLFKNSMIALVDNLASKEPYYVRCIKPNDKKSPQIFDDERCRHQVEYLGLLENVRVRRAGFAFRQTYEKFLHRYKMISEFTWPNHDLPSDKEAVKKLIERCGFQDDVAYGKTKIFIRTPRTLFTLEELRAQMLIRIVLFLQKVWRGTLARMRYKRTKAALTIIRYYRRYKVKSYIHEVARRFHGVKTMRDYGKHVKWPSPPKVLRRFEEALQTIFNRWRASQLIKSIPASDLPQVRAKVAAVEMLKGQRADLGLQRAWEGNYLASKPDTPQTSGTFVPVANELKRKDKYMNVLFSCHVRKVNRFSKVEDRAIFVTDRHLYKMDPTKQYKVMKTIPLYNLTGLSVSNGKDQLVVFHTKDNKDLIVCLFSKQPTHESRIGELVGVLVNHFKSEKRHLQVNVTNPVQCSLHGKKCTVSVETRLNQPQPDFTKNRSGFILSVPGN

SEQ ID NO: 71755 - protein, 96 aa, Homo sapiens
MAPEATKNFLPLLDAVSRDFVSVLHRRIKKAGSGNYSGDISDDLFRFAFESITNVIFGERQGMLEEVVNPEAQRFIDAIYQMFHTSVPMLNLPPDL

SEQ ID NO: 71756 - protein, 135 aa, Homo sapiens
MSQDGASQFQEVIRQELELSVKKELEKILTTASSHEFEHTKKDLDGFRKLFHRFLQEKGPSVDWGKIQRPPEDSIQPYEKIKARGLPDNISSVLNKLVVVKLNGGLGTSMGCKGPKSLIGVRNENTFLDLTVQQI

SEQ ID NO: 71757 - protein, 280 aa, Homo sapiens
MVGANAKRTGDLWSWEGAVLTLSAHRQALLALPLLLLLSTPPCAPQVSGIRGDALERFCLQQPLDCDDIYAQGYQSDGVYLIYPSGPSVPVPVFCDMTTEGGKWTVFQKRFNGSVSFFRGWNDYKLGFGRADGEYWLGLQNMHLLTLKQKYELRVDLEDFENNTAYAKYADFSISPNAVSAEEDGYTLFVAGFEDGGAGDSLSYHSGQKFSTFDRDQDLFVQNCAALSSGAFWFRSCHFANLNGFYLGGSHLSYANGINWAQWKGFYYSLKRTEMKIRRA

SEQ ID NO: 71758 - protein, 607 aa, Homo sapiens
MAEEGAILKVTKDLRAAVSAILQGYGDGQGPVTDTSAELHRLCGCLELLLQFDQKEQKSFLGPRKDYWDFLCTALRRQRGNMEPIHFVRSQDKLKTPLGKGRAFIRFCLARGQLAEALQLCLLNSELTREWYGPRSPLLCPERQEDILDSLYALNGVAFELDLQQPDLDGAWPMFSESRCSSSTQTQGRRPRKNKDAPKKVPLPCLHSELPLPHLLGILKIPAAYGGPENVQIEDSHTSQAICLQDAPSGQQLAGLPRSQQQRHLPFFLEKKGESSRKHRYPQSMWEPEGKELQLDQEERAPWIEIFLGNSTPSTQGQGKGAMGTQKEVIGMEAEVTGVLLVAEGQRTTEGTHKKEAEWSHVQRLLMPSPRGAVEGAVSGSRQGSGGSSILGEPWVLQGHATKEDSTVENPQVQTEVTLVARREEQAEVSLQDEIKSLRLGLRKAEEQAQRQEQLLREQEGELQALREQLSRCQEERAELQAQLEQKQQEAERRDAMYQEELGGQRDLVQAMKRRVLELIQEKDRLWQRLQHLSSMAPECCVACSKIFGRFSRRYPCSARTSLGREESEPPGEAAMWRWRLWRGRASGHPSGEGRPPETNQGHSTGR

SEQ ID NO: 71759 - protein, 390 aa, Homo sapiens
MAEAVFHAPKRKRRVYETYESPLPIPFGQDHGPLKEFKIFRAEMINNNVIVRNAEDIEQLYGKGYFGKGILSRSRPSFTISDPKLVAKWKDMKTNMPIITSKRYQHSVEWAAELMRRQGQDESTVRRILKDYTKPLEHPPVKRNEEAQVHDKLNSGMVSNMEGTAGGERPSVVNGDSGKSGGVGDPREPLGCLQEGSGCHPTTESFEKSVREDASPLPHVCCCKQDALILQRGLHHEDGSQHIGLLHPGDRGPDHEYVLVEEAECAMSEREAAPNEELVQRNRLICRRNPYRIFEYLQLSLEEAFFLVYALGCLSIYYEKEPLTIVKLWKAFTVVQPTFRTTYMAYHYFRSKGWVPKVGLKYGTDLLSLCRPGWSPMLRSWITATSACWV

SEQ ID NO: 71760 - protein, 7555 aa, Homo sapiens
MPLLDSSYLPPTIFILTHVLGVAGVLYWKRHARGRADERDRVQKKTFTKWVNKHLMKVRKHINDLYEDLRDGHNLISLLEVLSGIKLEPAGLKTLRLVSMPSWCHTNNEEQAEEDDDDVPREKGRMRFHRLQNVQIALDFLKQRQVKLVNIRNDDITDGNPKLTLGLIWTIILHFQISDIYISGESGDMSAKEKLLLWTQKVTAGYTGIKCTNFSSCWSDGKMFNALIHRYRPDLVDMERVQIQSNRENLEQAFEVAERLGVTRLLDAEDVDVPSPDEKSVITYVSSIYDAFPKVPEGGEGISATEVDSRWQEYQSRVDSLIPWIKQHTILMSDKTFPQNPVELKALYNQYIHFKETEILAKEREKGRIEELYKLLEVWIEFGRIKLPQGYHPNDVEEEWGKLIIEMLEREKSLRPAVERLELLLQIANKIQNGALNCEEKLTLAKNTLQADAAHLESGQPVQCESDVIMYIQECEGLIRQLQVDLQILRDENYYQLEELAFRVMRLQDELVTLRLECTNLYRKGHFTSLELVPPSTLTTTHLKAEPLTKATHSSSTSWFRKPMTRAELVAISSSEDEGNLRFVYELLSWVEEMQMKLERAEWGNDLPSVELQLETQQHIHTSVEELGSSVKEARLYEGKMSQNFHTSYAETLGKLETQYCKLKETSSFRMRHLQSLHKFVSRATAELIWLNEKEEEELAYDWSDNNSNISAKRNYFSELTMELEEKQDVFRSLQDTAELLSLENHPAKQTVEAYSAAVQSQLQWMKQLCLCVEQHVKENTAYFQFFSDARELESFLRNLQDSIKRKYSCDHNTSLSRLEDLLQDSMDEKEQLIQSKSSVASLVGRSKTIVQLKPRSPDHVLKNTISVKAVCDYRQIEITICKNDECVLEDNSQRTKWKVISPTGNEAMVPSVCFLIPPPNKDAIEMASRVEQSYQKVMALWHQLHVNTKSLISWNYLRKDLDLVQTWNLEKLRSSAPGECHQIMKNLQAHYEDFLQDSRDSVLFSVADRLRLEEEVEACKARFQHLMKSMENEDKEETVAKMYISELKNIRLRLEEYEQRVVKRIQSLASSRTDRDAWQDNALRIAEQEHTQEDLQQLRSDLDAVSMKCDSFLHQSPSSSSVPTLRSELNLLVEKMDHVYGLSTVYLNKLKTVDVIVRSIQDAELLVKGYEIKLSQEEVVLADLSALEAHWSTLRHWLSDVKDKNSVFSVLDEEIAKAKVVAEQMSRLTPERNLDLERYQEKGSQLQERWHRVIAQLEIRQSELESIQEVLGDYRACHGTLIKWIEETTAQQEMMKPGQAEDSRVLSEQLSQQTALFAEIERNQTKLDQCQKFSQQYSTIVKDYELQLMTYKAFVESQQKSPGKRRRMLSSSDAITQEFMDLRTRYTALVTLTTQHVKYISDALRRLEEEEKVVEEEKQEHVEKVKELLGWVSTLARNTQGKATSSETKESTDIEKAILEQQVLSEELTTKKEQVSEAIKTSQIFLAKHGHKLSEKEKKQISEQLNALNKAYHDLCDGSANQLQQLQSQLAHQTEQKECRAVAGVIDLGTVEIFPIFKAMQKGLLDQDTGLVLLESQVIMSGLIAPETGENLSLEEGIARNLINPQMYQQLRELQDALALISRLTESRGPLSVVEAIEKRIISETVGLKILEAHLATGGFSLSPSENCINLEEAFHQGLISAWLHSVLESYLRTSKNLIDPNTAEKIGLLDLMQRCIVHQESGFKLLPVKQLAGGMVSLKSGRKVSIFRAVQEGLIDRQVTVRLLEAQLFAGGIVDPRTGHRLTVEEAVRHNLIDQDMACAILIRQLQTGGIIDTVTGQRLTIDEAVSNDLVAAKIALVILESLWSFMGLLWPESGEILPITDALEQGIVSTELAHKILSNRQHIKALFLPATTEILSWKKAIESGILDRDLANNLKSICIPDVMPHMQLADSAEQNINPGAAVLPCSKSHPKATASQSENLLFQLMTHSYINVQNGQRLLLLDKELMETLTSRDEYQTSPPKVVEIGHQRQKTPEGLQESANVKISGTFSSGWTVRLPEFQFSSQNKEYPDREDCTTEKGKKTTVETEDSSVENPEQDLFVEQKERNPNIDALKVINKVKLEVQRQLIGTQREDQTAVSVRENASRGHLLTIPPAEAEGVPLVVDKDVFSVETPKKEHQPLRNTSFTCQNEQAHTLETEYIHDETGGSHIKPQSKKLQVQVKKTLGIKLELKSETDGNVHPLDKKEMLKKTFLAKDDHKESQEAQNIAGGSMMMSEKTDEEDSGREIFLSCSHPLELLEEATLNVLSAQLLDGGIFHEQTGQKLLLNEAISRGIVPSHTAVKLMEKLNMFQGFFDSQTCESLTTEEVINEGLMDEKLLHNVLMADKAISGVLDPRTQTLCSVKDAVTVGLLDKETATRILERQVVTGGIIDLKRGKKVSVTLASTLGLVDVADQPELINLEKASKGRDAEKTVRERLISLQMETTGLIDPDSKAPLTVVQSIDRGLLEREEAVRLLTKQVVDGGIIHHISGMRLSVDNAFRHGLIGEDLAEKLKRVENLNIHQIFNPETKENISLPKAIKLDLITSDLKREIQEVQAFTGNFVDLISGQRLTLAEAKKEGLLTNEAVLSPGMMHGIVDPENCRIVPYSELVKKCKIDIESGQRYLEVIPFSDIKDGVSDKVLTLSQAIQLGKVDFASTLKVLEAQANTGGIIDTATGKRLTLASALEEKLVDENMVRIIASHQVLNGGIVDIFSDQRVTLVEAIEKRLISPELANMIQIDSSEFSDHRAQIEKQEGIEVCALQNEFLGKDMLIACNQTAEMSCNKVEESERLFQVENQSAQEKVKVRVSDGEQAKKSREISLKEFGCKDQRKPRMSSDAKEFISIINPHNLKGKSLGQVSLTHPYSECDFKLKEVARNNMGNDTNEEQEKAVTKIEIISHMKQSTSCLDSEEIRENQGEVILEVQETYCETSGKLPSEQVLQQPMNARVKSKREKREVIVEESIRTCKPAFLSEEKLYQETAIRDEHDSHIKSQPREMTSSEKGKEADTEMGFSITFKIEESSSQVVPQGISVKHLDALTLFSSKQANEGKVNNLSLCLTLKPEENLSREIACGAQSEPFPCMTPRPEGLHYQESDGKAQVTGPSQISKTDKSFQGTTRQETNYQDSWVTSKTKETKHQISSSNECKEKSYQEVSFDPARGLKLEEITVSRPDSKEVRYLEFSDRKDLHHQGSKSDDKLCGTLKSEIATQELTGEKFLEMANPNVAGLEAGSIEDIVTQRGSRVLGSFLPEKLFKGVSQKENTGQQNAIISPTVLETSEEKTVSLTVCSAVKTEKTPQEKLRESPGSEQTPFMTAPEGKGNGGVNPEPFRATQNVFTRQLCLEHDEKLVSYLSLLRNIEMRTKQIQPLELNLAELQDLLCQAKVLERELKDLTTLVSQELECVNQIIISQPQEVPAQLLKALEKDAKNLQKSLSSVSDTWNSRLLHFQNAVEIEKTKVLNQHTQLEGRLQDLRAWVGNKNLILNSKGSNSEIDVDSLNLCLQQYEDLKQPMAERKAQLDALAFDIQFFISEHAQDLSPQQNRQMLRLLNELQRSFQDILEQTAAQVDALQGHLQQMEQEALVKTLQKQQNTCHQQLEDLCSWVGQAERALAGHQGRTTQQDLSALQKNQSDLKDLQDDIQNRATSFATVVKDIEGFMEENQTKLSPRELTALREKLHQAKEQYEALQEETRVAQKELEEAVTSALQQETEKSKAAKELAENKKKIDALLDWVTSVGSSGGQLLTNLPGMEQLSGASLEKGALDTTDGYMGVNQAPEKLDKQCEMMKARHQELLSQQQNFILATQSAQAFLDQHGHNLTPEEQQMLQQKLGELKEQYSTSLAQSEAELKQVQTLQDELQKFLQDHKEFESWLERSEKELENMHKGGSSPETLPSLLKRQGSFSEDVISHKGDLRFVTISGQKVLDMENSFKEGKEPSEIGNLVKDKLKDATERYTALHSKCTRLGSHLNMLLGQYHQFQNSADSLQAWMQACEANVEKLLSDTVASDPGVLQEQLATTKQLQEELAEHQVPVEKLQKVARDIMEIEGEPAPDHRHVQETTDSILSHFQSLSYSLAERSSLLQKAIAQSQSVQESLESLLQSIGEVEQNLEGKQVSSLSSGVIQEALATNMKLKQDIARQKSSLEATREMVTRFMETADSTTAAVLQGKLAEVSQRFEQLCLQQQEKESSLKKLLPQAEMFEHLSGKLQQFMENKSRMLASGNQPDQDITHFFQQIQELNLEMEDQQENLDTLEHLVTELSSCGFALDLCQHQDRVQNLRKDFTELQKTVKEREKDASSCQEQLDEFRKLVRTFQKWLKETEGSIPPTETSMSAKELEKQIEHLKSLLDDWASKGTLVEEINCKGTSLENLIMEITAPDSQGKTGSILPSVGSSVGSVNGYHTCKDLTEIQCDMSDVNLKYEKLGGVLHERQESLQAILNRMEEVHKEANSVLQWLESKEEVLKSMDAMSSPTKTETVKAQAESNKAFLAELEQNSPKIQKVKEALAGLLVTYPNSQEAENWKKIQEELNSRWERATEVTVARQRQLEESASHLACFQAAESQLRPWLMEKELMMGVLGPLSIDPNMLNAQKQQVQFMLKEFEARRQQHEQLNEAAQGILTGPGDVSLSTSQVQKELQSINQKWVELTDKLNSRSSQIDQAIVKSTQYQELLQDLSEKVRAVGQRLSVQSAISTQPEAVKQQLEETSEIRSDLEQLDHEVKEAQTLCDELSVLIGEQYLKDELKKRLETVALPLQGLEDLAADRINRLQAALASTQQFQQMFDELRTWLDDKQSQQAKNCPISAKLERLQSQLQENEEFQKSLNQHSGSYEVIVAEGESLLLSVPPGEEKRTLQNQLVELKNHWEELSKKTADRQSRLKDCMQKAQKYQWHVEDLVPWIEDCKAKMSELRVTLDPVQLESSLLRSKAMLNEVEKRRSLLEILNSAADILINSSEADEDGIRDEKAGINQNMDAVTEELQAKTGSLEEMTQRLREFQESFKNIEKKVEGAKHQLEIFDALGSQACSNKNLEKLRAQQEVLQALEPQVDYLRNFTQGLVEDAPDGSDASQLLHQAEVAQQEFLEVKQRVNSGCVMMENKLEGIGQFHCRVREMFSQLADLDDELDGMGAIGRDTDSLQSQIEDVRLFLNKIHVLKLDIEASEAECRHMLEEEGTLDLLGLKRELEALNKQCGKLTERGKARQEQLELTLGRVEDFYRKLKGLNDATTAAEEAEALQWVVGTEVEIINQQLADFKMFQKEQVDPLQMKLQQVNGLGQGLIQSAGKDCDVQGLEHDMEEINARWNTLNKKVAQRIAQLQEALLHCGKFQDALEPLLSWLADTEELIANQKPPSAEYKVVKAQIQEQKLLQRLLDDRKATVDMLQAEGGRIAQSAELADREKITGQLESLESRWTELLSKAAARQKQLEDILVLAKQFHETAEPISDFLSVTEKKLANSEPVGTQTAKIQQQIIRHKALEEDIENHATDVHQAVKIGQSLSSLTSPAEQGVLSEKIDSLQARYSEIQDRCCRKAALLDQALSNARLFGEDEVEVLNWLAEVEDKLSSVFVKDFKQDVLHRQHADHLALNEEIVNRKKNVDQAIKNGQALLKQTTGEEVLLIQEKLDGIKTRYADITVTSSKALRTLEQARQLATKFQSTYEELTGWLREVEEELATSGGQSPTGEQIPQFQQRQKELKKEVMEHRLVLDTVNEVSRALLELVPWRAREGLDKLVSDANEQYKLVSDTIGQRVDEIDAAIQRSQQYEQAADAELAWVAETKRKLMALGPIRLEQDQTTAQLQVQKAFSIDIIRHKDSMDELFSHRSEIFGTCGEEQKTVLQEKTESLIQQYEAISLLNSERYARLERAQVLVNQFWETYEELSPWIEETRALIAQLPSPAIDHEQLRQQQEEMRQLRESIAEHKPHIDKLLKIGPQLKELNPEEGEMVEEKYQKAENMYAQIKEEVRQRALALDEAVSQSTQFHDKIEPMLETLENLSSRLRMPPLIPAEVDKIRECISDNKSATVELEKLQPSFEALKRRGEELIGRSQGADKDLAAKEIQDKLDQMVFFWEDIKARAEEREIKFLDVLELAEKFWYDMAALLTTIKDTQDIVHDLESPGIDPSIIKQQVEAAETIKEETDGLHEELEFIRILGADLIFACGETEKPEVRKSIDEMNNAWENLNKTWKERLEKLEDAMQAAVQYQDTLQAMFDWLDNTVIKLCTMPPVGTDLNTVKDQLNEMKEFKVEVYQQQIEMEKLNHQGELMLKKATDETDRDIIREPLTELKHLWENLGEKIAHRQHKLEGALLALGQFQHALEELMSWLTHTEELLDAQRPISGDPKVIEVELAKHHVLKNDVLAHQATVETVNKAGNELLESSAGDDASSLRSRLEAMNQCWESVLQKTEEREQQLQSTLQQAQGFHSEIEDFLLELTRMESQLSASKPTGGLPETAREQLDTHMELYSQLKAKEETYNQLLDKGRLMLLSRDDSGSGSKTEQSVALLEQKWHVVSSKMEERKSKLEEALNLATEFQNSLQEFINWLTLAEQSLNIASPPSLILNTVLSQIEEHKVFANEVNAHRDQIIELDQTGNQLKFLSQKQDVVLIKNLLVSVQSRWEKVVQRSIERGRSLDDARKRAKQFHEAWKKLIDWLEDAESHLDSELEISNDPDKIKLQLSKHKEFQKTLGGKQPVYDTTIRTGRALKEKTLLPEDSQKLDNFLGEVRDKWDTVCGKSVERQHKLEEALLFSGQFMDALQALVDWLYKVEPQLAEDQPVHGDLDLVMNLMDAHKVFQKELGKRTGTVQVLKRSGRELIENSRDDTTWVKGQLQELSTRWDTVCKLSVSKQSRLEQALKQAEVFRDTVHMLLEWLSEAEQTLRFRGALPDDTEALQSLIDTHKEFMKKVEEKRVDVNSAVAMGEVILAVCHPDCITTIKHWITIIRARFEEVLTWAKQHQQRLETALSELVANAELLEELLAWIQWAETTLIQRDQEPIPQNIDRVKALIAEHQTFMEEMTRKQPDVDRVTKTYKRKNIEPTHAPFIEKSRSGGRKSLSQPTPPPMPILSQSEAKNPRINQLSARWQQVWLLALERQRKLNDALDRLEELKEFANFDFDVWRKKYMRWMNHKKSRVMDFFRRIDKDQDGKITRQEFIDGILASKFPTTKLEMTAVADIFDRDGDGYIDYYEFVAALHPNKDAYRPTTDADKIEDEVTRQVAQCKCAKRFQVEQIGENKYRFFLGNQFGDSQQLRLVRILRSTVMVRVGGGWMALDEFLVKNDPCRVHHPGSKIKRSDSSSSISSQSPIARGRTNIELREKFILPEGASQGMTPFRSRGRRSKPSSRAASPTRSSSSASQSNHSCTSMPSSPATPASGTKTSLQFSRCYDKPWLVNSKAGTPIRDSHSPDLQLPTPEVIPSSGSKLKRPTPTFHSSRTSLAGDTSNSSSPASTGAKTNRADPKKSASRPGSRAGSRAGSRASSRRGSDASDFDLLETQSACSDTSESSAAGGQGNSRRGLNKPSKIPTMSKKTTTASPRTPGPKR

SEQ ID NO: 71761 - protein, 128 aa, Homo sapiens
MAVARVDAALPPGEGSVVNWSGQGLQKLGPNLPCEADIHTLILDKNQIIKLENLEKCKRLIQLSVANNRLVRMMGVAKLTLLRVLNLPHNSIGCVEGLKELVHLEWLNLAGNNLKCDAFLVIGHGTDQ

SEQ ID NO: 71762 - protein, 439 aa, Homo sapiens
MELEKSGALLESGTYEDNYYGTPKPPAEPAPLLLNVTDQILPGATPSAEGKRKRNKSVSNMEKASIEPPEEEEEERPVVNGNGVVVTPESSEHEDKSAGASGEMPSQPYPAPVYSQPEELKEQMDDTKPTKPEDNEEPDPLPDNWEMAYTEKGEVYFIDHNTKTTSWLDPRLAKKAKPPEECKENELPYGWEKIDDPIYGTYYVDHINRRTQFENPVLEAKRKLQQHNMPHTELGTKPLQAPGFREKPLFTRDASQLKGTFLSTTLKKSNMGFGFTIIGGDEPDEFLQVKSVIPDGPAAQDGKMETGDVIVYINEVCVLGHTHADVVKLFQSVPIGQSVNLVLCRGYPLPFDPEDPANSMVPPLAIMERPPPVMVNGRHNYETYLEYISRTSQSVPDITDRPPHSLHSMPTDGQLDGTCPGLRLHYCRQSYRTAGETNT

SEQ ID NO: 71763 - protein, 152 aa, Homo sapiens
MDSAGQDINLNSPNKGLLSDSMTDVPVDTGVAARTPAVEGLTEAEEEELRAELTKVEEEIVTLRQVLAAKERHCGELKRRLGLSTLGELKQNLSRSWHDVQVSSANSATFKSFEDRVGTIKSKVVGDRENGSDNLPSSAGSGDKPLSDPAPF

SEQ ID NO: 71764 - protein, 165 aa, Homo sapiens
  MOD_RES (1)..(1): Any amino acid
XGTVAIGGYWAGSRDVKKYMKHKRDDGPEKQEDEAVDVTPVMTCVFVVMCCSMLVLLYYFYDLLVYVVIGIFCLASATGLYSCLAPCVRRLPFGKCRIPNNSLPYFHKRPQARMLLLALFCVAVSVVWGVFRNEDQWAWVLQDALGIAFCLYMLKTIRLPTFKAC

SEQ ID NO: 71765 - protein, 159 aa, Homo sapiens
MASDEGKLFVGGLSFDTNEQSLEQVFSKYGQISEVVVVKDRETQRSRGFGFVTFENIDDAKDAMMAMNGKSVDGRQIRVDQAGKSSDNRSRGYRGGSAGGRGFFRGGRGRGRGFSRGGGDRGYGGNRFESRSGGYGGSRDYYSSRSQSGGYSDRSSGGS

SEQ ID NO: 71766 - protein, 1014 aa, Homo sapiens
  MOD_RES (1)..(1): Any amino acid
XQLETHNHKMVTFKFDLDGDAPDEIATYMVEHDFILQAERETFIEQMKDVMDKAEDMLSEDTDADRGSDPGTSPPHLSTCGLGTGEESRQSQANAPVYQQNVLHTGKRWFIICPVAEHPAPEAPESSPPLPLSSLPPEASQDSAPYKDQLSSKEQPSFLASQQLLSQAGPSNPPGAPPAPLAPSSPPVTALPQDGAAPATSTMPEPASGTASQAGGPGTPQGLTSELETSQPLAETHEAPLAVQPLVVGLAPCTPAPEAASTRDASAPREPLPPPAPEPSPHSGTPQPALGQPAPLLPAAVGAVSLATSQLPSPPLGPTVPPQPPSALESDGEGPPPRVGFVDSTIKSLDEKLRTLLYQEHVPTSSASAGTPVEVGDRDFTLEPLRGDQPRSEVCGGDLALPPVPKEAVSGRVQLPQPLVEKSELAPTRGAVMEQGTSSSMTAESSPRSMLGYDRDGRQVASDSHVVPSVPQDVPAFVRPARVEPTDRDGGEAGESSAEPPPSDMGTVGGQASHPQTLGARALGSPRKRPEQQDVSSPAKTVGRFSVVSTQDEWTLASPHSLRYSAPPDVYLDEAPSSPDVKLAVRRAQTASSIEVGVGEPVSSDSGDEGPRARPPVQKQASLPVSGSVAGDFVKKATAFLQRPSRAGSLGPETPSRVGMKVPTISVTSFHSQSSYISSDNDSELEDADIKKELQSLREKHLKEISELQSQQKQEIEALYRRLGKPLPPNVGFFHTAPPTGRRRKTSKSKLKAGKLLNPLVRQLKVVASSTGHLADSSRGPPAKDPAQASVGLTADSTGLSGKAVQTQQPCSVRASLSSDICSGLASDGGGARGQGWTVYHPTSERVTYKSSSKPRARFLSGPVSVSIWSALKRLCLGKEHSSRSSTSSLAPGPEPGPQPALHVQAQVNNSNNKKGTFTDDLHKLVDEWTSKTVGAAQLKPTLNQLKQTQKLQDMEAQAGWAAPGEARAMTAPRAGVGMPRLPPAPGPLSTTVIPGAAPTLSVPTPDPESEKPD

SEQ ID NO: 71767 - protein, 121 aa, Homo sapiens
MSWESGAGPGLGSQGMDLVWSAWYGKCVKGKGSLPLSAHGIVVAWLSRAEWDQVTVYLFCDDHKLQRYALNRITVWRSRSGNELPLAVASTADLIRCKLLDVTGGLGTDELRLLYGMALVR

SEQ ID NO: 71768 - protein, 413 aa, Homo sapiens
MQNSHSGVNQLGGVFVNGRPLPDSTRQKIVELAHSGARPCDISRILQVSNGCVSKILGRYYETGSIRPRAIGGSKPRVATPEVVSKIAQYKRECPSIFAWEIRDRLLSEGVCTNDNIPSVSSINRVLRNLASEKQQMGADGMYDKLRMLNGQTGSWGTRPGWYPGTSVPGQPTQDGCQQQEGGGENTNSISSNGEDSDEAQMRLQLKRKLQRNRTSFTQEQIEALEKEFERTHYPDVFARERLAAKIDLPEARIQVWFSNRRAKWRREEKLRNQRRQASNTPSHIPISSSFSTSVYQPIPQPTTPVSSFTSGSMLGRTDTALTNTYSALPPMPSFTMANNLPMQPPVPSQTSSYSCMLPTSPSVNGRSYDTYTPPHMQTHMNSQPMGTSGTTSTGLISPGVSVPVQVPGSEPD

SEQ ID NO: 71769 - protein, 146 aa, Homo sapiens
  MOD_RES (1)..(1): Any amino acid
XNDIDEHTTPVEGSLSWTLGKRRRAAMDFPGAKVIVPQLKGRVQRRRVGLMCEGAPMRAHSPILNMEGTKIGTVTSGCPSPSLKKNVAMGYVPCEYSRPGTMLLVESMIPLTYSCLLEGNEKLWFCHLSHSARCWLWSKGSPLWRG

SEQ ID NO: 71770 - protein, 225 aa, Homo sapiens
MRRGAPQDQELVGPGPPGRGSRGAPPPLGPVVPVLVFPPDLVFRADQRSGPRQLLTLYNPTGTALRFRVLCTAPAKYTVFDAEGYVKPQSCIDIVIRHVAPIPSHYDVQDRFRIELSEEGAEGRVVGRKDITSILRAPAYPLELQGQPDPAPRPGPPAGTPPPTARHFQEHPRQQLATSSFLLFLLTGIVSVAFLLLPLPDELGSQLPQVLHVSLGQKLVAAYVL

SEQ ID NO: 71771 - protein, 305 aa, Homo sapiens
MSQQGYVATPPYSQPQPGIGLSPPHYGHYGDPSHTASPTGMMKPAGPLGATATRGMLPPGPPPPGPHQFGQNGAHATGHPPQRFPGPPPVNNVASSHAPYQPSAQSSYPGPISTSSVTQLGSQLSAMQINSYDHGKSGSSDVVRQKREDRRGKSHSTEIYINRNAVYPVQAWLLQARDPLALCQPHHCRLLHDLHSLPFCSLDLKFFHHHPPHSMVLVPHLCLYQCTDQMGSLGLLLQMPSTSPHLFQARPWVLDILRSRPTLVPRWQAHNCLTQEASLEVLHRWLVRHSPRRSWILTLSLAQSR

SEQ ID NO: 71772 - protein, 40 aa, Homo sapiens
MTKPEVVNILQPQTTMNPDRAKQAKLIVPNSTAGLIIGKG

SEQ ID NO: 71773 - protein, 116 aa, Homo sapiens
MTWRQAVLLSCFSAVVLLSNAKQKIFMQESDASNFLKRRGKRSPKSRDEVNVENRQKLRVDELRREYYEEQRNEFENFVEEQNDEQEERSREAVEQWRQWHYDGLHPSYLYNRHHT

SEQ ID NO: 71774 - protein, 196 aa, Homo sapiens
MAELDPFGAPAGAPGGPALGNGVAGAGEEDPAAAFLAQQESEIAGIENDEAFAILDGGAPGPQPHGEPPGGPDANSRKQEAEWKEKAIKELEEWYARQDEQLQKTKANNRVADEAFYKQPFADVIGYVTNINHPCYSLEQAAEEAFVNDIDESSPGTEWERVARLCDFNPKSSKQAKDVSRMRSVLISLKQAPLVH

SEQ ID NO: 71775 - protein, 270 aa, Homo sapiens
  MOD_RES (1)..(1): Any amino acid
XRHRGTDFGGSPWLLIITVFLRSYKFAISLCTSYLCVSFLKTIFPSQNGHDGSTDVQQRARRSNCRRQEGIKIVLEDIFTLWRQVETKVRAKIRKMKVTTKVNRHDKINGKRKTAKEHLRKLSMKEREHGEKERQVSEAEENGKLDMKEIHTYMEMFQRAQALRRRAEDYYRCKITPSARKPLCNRVSLLVFLAFGHSLPGQDMDTFFSLRLCAQALQREMAERKAAYKHHSPIPVGNCVAQKHLHPHPVGPPSNILSIRGSVFVIANGP

SEQ ID NO: 71776 - protein, 829 aa, Homo sapiens
MCPRGYPEQSNWMSSPLYSTEVEQKSQESVSFKDVTVGFTQEEWQHLDPSQRALYRDVMLENYSNLVSVGYCVHKPEVIFRLQQGEEPWKQEEEFPSQSFPEVWTADHLKERSQENQSKHLWEVVFINNEMLTKEQGDVIGIPFNVDVSSFPSRKMFCQCDSCGMSFNTVSELVISKINYLGKKSDEFNACGKLLLNIKHDETHTQEKNEVLKNRNTLSHHEETLQHEKIQTLEHNFEYSICQETLLEKAVFNTQKRENAEENNCDYNEFGRTLCDSSSLLFHQISPSRDNHYEFSDCEKFLCVKSTLSKPHGVSMKHYDCGESGNNFRRKLCLSHLQKGDKGEKHFECNECGKAFWEKSHLTRHQRVHTGQKPFQCNECEKAFWDKSNLTKHQRSHTGEKPFECNECGKAFSHKSALTLHQRTHTGEKPYQCNACGKTFCQKSDLTKHQRTHTGLKPYECYECGKSFRVTSHLKVHQRTHTGEKPFECLECGKSFSEKSNLTQHQRIHIGDKSYECNACGKTFYHKSLLTRHQIIHTGWKPYECYECGKTFCLKSDLTVHQRTHTGQKPFACPECGKFFSHKSTLSQHYRTHTGEKPYECHECGKIFYNKSYLTKHNRTHTGEKPYECNECGKAFYQKSQLTQHQRIHIGEKPYKCNECGKAFCHKSALIVHQRTHTQEKPYKCNECGKSFCVKSGLIFHERKHTGEKPYECNECGKFFRHKSSLTVHHRAHTGEKSCQCNECGKIFYRKSELAQHQRSHTGEKPYECNTCRKTFSQKSNLIVHQRRHIGENLMNEMDIRNFQPQVSLHNASEYSHCGESPDDILNVQ

SEQ ID NO: 71777 - protein, 715 aa, Homo sapiens
  MOD_RES (1)..(1): Any amino acid
XRDGRGGGPRSTAGGVALAVVVLSLALGMSGRWVLAWYRARRAVTLHSAPPVLPADSSSPAVAPDLFWGTYRPHVYFGMKTRSPKPLLTDGKEVLLPEVGAKGQLKFISGHTSELGDFRFTLLPPTSPGDTAPKYGSYNVFWTSNPGLPLLTEMVKSRLNSWFQHRPPGAPPERYLGLPGSLKWEDRGPSGQGQGQFLIQQVTLKIPISIEFVFESGSAQAGGNQALPRLAGSLLTQALESHAEGFRERFEKTFQLKEKGLSSGEQVLGQAALSGLLGGIGYFYGQGLVLPDIGVEGSEQKVDPALFPPVPLFTAVPSRSFFPRGFLWDEGFHQLVVQRWDPSLTREALGHWLGLLNADGWIGREQILGDEARARVPPEFLVQRAVHANPPTLLLPVAHMLEVGDPDDLAFLRKALPRLHAWFSWLHQSQAGPLPLSYRWRGRDPALPTLLNPKTLPSGLDDYPRASHPSVTERHLDLRCWVALGARVLTRLAEHLGEAEVAAELGPLAASLEAAESLDELHWAPELGVFADFGNHTKAVQLKPRPPQGLVRVVGRPQPQLQYVDALGYVSLFPLLLRLLDPTSSRLGPLLDILADSRHLWSPFGLRSLAASSSFYGQRNSEHDPPYWRGAVWLNVNYLALGALHHYGHLEGPHQARAAKLHGELRANVVGNVWRQYQATGFLWEQYSDRDGRGMGCRPFHGWTSLVLLAMAEDY

SEQ ID NO: 71778 - protein, 897 aa, Homo sapiens
MAAMAPALTDAAAEAHHIRFKLAPPSSTLSPGSAENNGNANILIAANGTKRKAIAAEDPSLDFRNNPTKEDLGKLQPLVASYLCSDVTSVPSKESLKLQGVFSKQTVLKSHPLLSQSYELRAELLGRQPVLEFSLENLRTMNTSGQTALPQAPVNGLAKKLTKSSTHSDHDNSTSLNGGKRALTSSALHGGEMGGSESGDLKGGMTNCTLPHRSLDVEHTTLYSNNSTANKSSVNSMEQPALQGSSRLSPGTDSSSNLGGVKLEGKKSPLSSILFSALDSDTRITALLRRQADIESRARRLQKRLQVVQAKQVERHIQHQLGGFLEKTLSKLPNLESLRPRSQLMLTRKAEAALRKAASETTTSEGLSNFLKSNSISEELERFTASGIANLRCSEQAFDSDVTDSSSGGESDIEEEELTRADPEQRHVPLRRRSEWKWAADRAAIVSRWNWLQAHVSDLEYRIRQQTDIYKQIRANKGLIVLGEVPPPEHTTDLFLPLSSEVKTDHGTDKLIESVSQPLENHGAPIIGHISESLSTKSCGALRPVNGVINTLQPVLADHIPGDSSDAEEQLHKKQRLNLVSSSSDGTCVAARTRPVLSCKKRRLVRPNSIVPLSKKVHRNSTIRPGCDVNPSCALCGSGSINTMPPEIHYEAPLLERLSQLDSCVHPVLAFPDDVPTSLHFQSMLKSQWQNKPFDKIKPPKKLSLKHRAPMPGSLPDSARKDRHKLVSSFLTTAMLKHHTDMSSSSYLAATHHPPHSPLVRQLSTSSDSPAPASSSSQVTASTSQQPVRRRRGESSFDINNIVIPMSVAATTRVEKLQYKEILTPSWREVDLQSLKGSPDEENEEIEDLSDAAFAALHAKCEEMERARWLWTTSVPPQRRGSRSYRSSDGRTTPQLG

SEQ ID NO: 71779 - protein, 106 aa, Homo sapiens
DSIDAREIFDLIRSINDPEHPLTLEELNVVEQVRVQVSDPESTVAVAFTPTIPHCSMATLIGLSIKVKLLRSLPQRFKMDVHITPGTHASEHAVNKQLADKERPGL

SEQ ID NO: 71780 - protein, 52 aa, Homo sapiens
MQSPWKILTVAPLFLLLSLQSSASPANDDQSRPSLSNGHTCVASSAEKPQLS

SEQ ID NO: 71781 - protein, 124 aa, Homo sapiens
  MOD_RES (1)..(1): Any amino acid
XQELRRGSQAANIYCINFNQDASLICVSSDHGTVHIFAAEDPKRNKQSSLASASFLPKYFSSKWSFSKFQVPSGSPCICAFGTEPNAVIAICADGSYYKFLFNPKGECIRDVYAQFLEMTDDKL

SEQ ID NO: 71782 - protein, 163 aa, Homo sapiens
  MOD_RES (1)..(1): Any amino acid
XESSWPSEISWAAHFGEGKLTARERISLLLDPGSFVESDMFVEHRCADFGMAADKNKFPGDSVVTGRGRINGRLVYVFSQDFTVFGGSLSGAHAQKICKIMDQAITVGAPVIGLNDSGGARIQEGVESLAGYADIFLRNVTASGVIPQISLIMGPCAGGAVYS

SEQ ID NO: 71783 - protein, 122 aa, Homo sapiens
MDDLKYGVYPLKEASGCPGAERNLLVYSYFEKETLTFRDVAIEFSLEEWECLNPAQQNLYMNVMLENYKNLVFLGVAVSKQDPVTCLEQEKEPWNMKRHEMVDEPPGKTDHDLRLRELELSQ

SEQ ID NO: 71784 - protein, 689 aa, Homo sapiens
MVKLAKAGKNQGDPKKMAPPPKEVEEDSEDEEMSEDEEDDSSGEEVVIPQKKGKKAAATSAKKVVVSPTKKVAVATPAKKAAVTPGKKAAATPAKKTVTPAKAVTTPGKKGATPGKALVATPGKKGAAIPAKGAKNGKNAKKEDSDEEEDDDSEEDEEDDEDEDEDEDEIEPAAMKAAAAAPASEDEDDEDDEDDEDDDDDEEDDSEEEAMETTPAKGKKAAKVVPVKAKNVAEDEDEEEDDEDEDDDDDEDDEDDDDEDDEEEEEEEEEEPVKEAPGKRKKEMAKQKAAPEAKKQKVEGTEPTTAFNLFVGNLNFNKSAPELKTGISDVFAKNDLAVVDVRIGMTRKFGYVDFESAEDLEKALELTGLKVFGNEIKLEKPKGKDSKKERDARTLLAKNLPYKVTQDELKEVFEDAAEIRLVSKDGKSKGIAYIEFKTEADAEKTFEEKQGTEIDGRSISLYYTGEKGQNQDYRGGKNSTWSGESKTLVLSNLSYSATEETLQEVFEKATFIKVPQNQNGKSKGYAFIEFASFEDAKEALNSCNKREIEGRAIRLELQGPRGSPNARSQPSKTLFVKGLSEDTTEETLKESFDGSVRARIVTDRETGSSKGFGFVDFNSEEDAKAAKEAMEDGEIDGNKVTLDWAKPKGEGGFGGRGGGRGGFGGRGGFRGGRGGGGDHKPQGKKTKFE

SEQ ID NO: 71785 - protein, 1023 aa, Homo sapiens
MPIRPDLQQLEKCIDDALRKNDFKPLKTLLQIDICEDVKIKCSKQFFHKVDNLICRELNKEDIHNVSAILVSVGRCGKNISVLGQAGLLTMIKQGLIQKMVAWFEKSKDIIQSQGNSKDEAVLNMIEDLVDLLLVIHDVSDEGKKQVVESFVPRICSLVIDSRVNICIQQEIIKKMNAMLDKMPQDARKILSNQEMLILMSSMGERILDAGDYDLQVGIVEALCRMTTEKQRQELAHQWFSMDFIAKAFKRIKDSEFETDCRIFLNLVNGMLGDKRRVFTFPCLSAFLDKYELQIPSDEKLEEFWIDFNLGSQTLSFYIAGDNDDHQWEAVTVPEEKVQIYSIEVRESKKLLTIILKNTVKISKREGKELLLYFDASLEITNVTQKIFGATKHRESIRKQGISVAKTSLHILFDASGSQILVPESQISPVGEELVSLKEKSKSPKEFAKPSKYIKNSDKGNRNNSQLEKTTPSKRKMSEASMIVSGADRYTMRSPVLFSNTSIPPRRRRIKPPLQMTSSAEKPSVSQTSENRVDNAASLKSRSSEGRHRRDNIDKHIKTAKCVENTENKNVEFPNQNFSELQDVIPDSQAAEKRDHTILPGVLDNICGNKIHSKWACWTPVTNIELCNNQRASTSSGDTLNQDIVINKKLTKQKSSSSISDHNSEGTGKVKYKKEQTDHIKIDKAEVEVCKKHNQQQNHPKYSGQKNTENAKQSDWPVESETTFKSVLLNKTIEESLIYRKKYILSKDVNTATCDKNPSASKNVQSHRKAEKELTSELNSWDSKQKKMREKSKGKEFTNVAESLISQINKRYKTKDDIKSTRKLKESLINSGFSNKPVVQLSKEKVQKKSYRKLKTTFVNVTSECPVNDVYNFNLNGADDPIIKLGIQEFQATAKEACADRSIRLVGPRNHDELKSSVKTKDKKIITNHQKKNLFSDTETEYRCDDSKTDISWLREPKSKPQLIDYSRNKNVKNHKSGKSRSSLEKGQPSSKMTPSKNITKKMDKTIPEGRIRLPRKATKTKK

SEQ ID NO: 71786 - protein, 120 aa, Homo sapiens
MRKAGVAHSKSSKDMESHVFLKAKTRDEYLSLVARLIIHFRDIHNKKSQASVSDPMNALQSLTGGPAAGAAGIGMPPRGPGQSLGGMGSLGAMGQPMSLSGQPPPGTSGMAPHSMAVVST

SEQ ID NO: 71787 - protein, 113 aa, Homo sapiens
  MOD_RES (1)..(1): Any amino acid
XDEQSVESIAEVFRCFICMEKLRDARLCPHCSKLCCFSCIRRWLTEQRAQCPHCRAPLQLRELVNCRWAEEVTQQLDTLQLCSLTKHEENEKDNMADIPLNLWQKFMSNTSLK

SEQ ID NO: 71788 - protein, 107 aa, Homo sapiens
  MOD_RES (1)..(1): Any amino acid
XQVRKSTLNPNAKEFNPRSFSQPKPSTTPTSPRPQAQPSPSMVGHQQPTPVYTQPVCFAPNMMYPVPVSPGVQPLYPIPMTPMPVNQAKTYRAALEHMNLLKELCLK

SEQ ID NO: 71789 - protein, 209 aa, Homo sapiens
MTSIKEQAAISRLLSFLQEWDNAGKVARSHILDKFIETNQGKTAPELEQEFSQGASLFLVRLTTSLRITYMTDSCLEKLLRSIGIFLSAVSSNRYLIEFLEVGGVLTLLEILGLEKIKEEAKKESVKLLQVIANSGRTYKELICESYGVRSIAEFLAKSKSEETQEEVQVLLDSLVHGNPKYQNQVYKGLIALLPCESPKAQQLSLQTL

SEQ ID NO: 71790 - protein, 129 aa, Homo sapiens
MKEPTKLLKKHSTQVYLGPSKKTSVSNAGQWLYEEKPHKMDLLHENGPRPGLHENVCKAVSDFCKWVTTFNPYKPKWVKMRYGAWYLNPKLWKKQRVDEPLVDPEVSHKAQEENFKKELQEQVCIYTEI

SEQ ID NO: 71791 - protein, 105 aa, Homo sapiens
HAARNGQVNLTVRRKVLCGGEPCPENGRSPGSVSTHHSSPRSDYATYTNSNHAAPSSNASPPEGFASHSLQTSDVVIHRKENEGFGFVIISSLNRPESGSTISKC

SEQ ID NO: 71792 - protein, 113 aa, Homo sapiens
MATLRRLREAPRHLLVCEKSNFGNHKSRHRHLVQTHYYNYRVSFLIPECGILSEELKNLVMNTGPYYFVKNLPLHELITPEFISTFIKKEFYFGPLSAHPQRFLLCTNIQYTY

SEQ ID NO: 71793 - protein, 461 aa, Homo sapiens
MKEPLLGGECDKAVASQLGLLDEIKTEPDNAQEYCHRQQSRTQENELKINAVFSESASQLTAGIQLSLASSGVNKMLPSVSTTAIQVSCAGCKKILQKGQTAYQRKGSAQLFCSIPCITEYISSASSPVPSKRTCSNCSKDILNPKDVISVQLEDTTSCKTFCSLSCLSSYEEKRKPFVTICTNSILTKCSMCQKTAIIQYEVKYQNVKHNLCSNACLSKFHSANNFIMNCCENCGTYCYTSSSLSHILQMEGQSHYFNSSKSITAYKQKPAKPLISVPCKPLKPSDEMIETTSDLGKTELFCSINCFSAYSKAKMESSSVSVVSVVHDTSTELLSPKKDTTPVISNIVSLADTDVALPIMNTDVLQDTVSSVTATADVIVDLSKSSPSEPSNAVASSSTEQPSVSPSSSVFSQHAIGSSTEVQKDNMKSMKISDELCHPKCTSKVQKVKGKSRSIKKSCC

SEQ ID NO: 71794 - protein, 389 aa, Homo sapiens
  MOD_RES (1)..(1): Any amino acid
XEKENPKDYCIARVMLPPGAQHSDEKGAKEIILDDDECPLQIFREWPSDKGILVFQLKRRPPDHIPKKTKKHLEGKTPKGKERADGSGYGSTLPPEKLPYLVELSPDGSDSRDKPKLYRLQLSVTEVGTEKLDDNSIQLFGPGIQPHHCDLTNMDGVVTVTPRSMDAETYVEGQRISETTMLQSGMKVQFGASHVFKFVDPSQDHALAKRSVDGGLMVKGPRHKPGIVQETTFDLGGDIHSGTALPTSKSTTRLDSDRVSSASSTAERGMVKPMIRVEQQPDYRRQESRTQDASGPELILPASIEFRESSEDSFLSAIINYTNSSTVHFKLSPTYVLYMACRYVLSNQYRPDISPTERTHKVIAVVNKMVSMMEGVIQVRSSRPAMLLQ

SEQ ID NO: 71795 - protein, 157 aa, Homo sapiens
MVVGESGLGKSTLINSLFLTDLYSPEYPGPSHRIKKTVQVEQSKVLIKEGGVQLLLTIVDTPGFGDAVDNSNCWQPVIDYIDSKFEDYLNAESRVNRRQMPDNRVQCCLYFIAPSGHGLKPLDIEFMKRLHEKVNIIPLIAKADTLTPEECQQFKKQ

SEQ ID NO: 71796 - protein, 124 aa, Homo sapiens
MTMGDMKTPDFDDLLAAFDIPDMVDPKAAIESGHDDHESHMKQNAHGEDDSHAPSSSDVGVSVIVKNVRNIDSSEGGEKDGHNPTGNGLHNGFLTASSLDSYSKDGAKSLKGDVPASEVTLKDS

SEQ ID NO: 71797 - protein, 72 aa, Homo sapiens
MWGTFPGCLADQLVLKRRGNQLEICAVVLRQLSPHKYYFLVGYSETLLSYFYKCPVRLHLQTVPSKVVYKYL

SEQ ID NO: 71798 - protein, 120 aa, Homo sapiens
MTDTVFSNSSNRWMYPSDRPLQSNDKEQLQAGWSVHPGGQPDRQRKQEELTDEEKEIINRVIARAEKMEEMEQERIGRLVDRLENMRKNVAGDGVNRCILCGEQLGMLGSACVVCEDCKK

SEQ ID NO: 71799 - protein, 219 aa, Homo sapiens
MRVFLLCAYILLLMVSQLRAVSFPEDDEPLNTVDYHYSRQYPVFRGRPSGNESQHRLDFQLMLKIRDTLYIAGRDQVYTVNLNEMPKTEVIPNKKLTWRSRQQDRENCAMKGKHKDECHNFIKVFVPRNDEMVFVCGTNAFNPMCRYYRLSTLEYDGEEISGLARCPFDARQTNVALFADGKLYSATVADFLASDAVIYRSMGDGSALRTIKYDSKWIK

SEQ ID NO: 71800 - protein, 44 aa, Homo sapiens
MRVGAEYQARIPEFDPGATKYTDKDNGGMLVWSPYHSIPDAKCP

SEQ ID NO: 71801 - protein, 121 aa, Homo sapiens
  MOD_RES (1)..(1): Any amino acid
XIPYRRGYLLYGPPGCGKSSFITALAGELEHSICLLSLTDSSLSDDRLNHLLSVAPQQSLVLLEDVDAAFLSRDLAVENPVKYQGLGRLTFSGLLNALDGVASTEARIVFMTTNHVDRHLP

SEQ ID NO: 71802 - protein, 139 aa, Homo sapiens
MPGRSSSNSGSTGFISFSGVESALSSLKNFQACINSGMDTASSVALDLVESQTEVSSEYSMDKAMVEFATLDRQLNHYVKAVQSTINHVKEERPEKIPDLKLLVEKKFLALQSKNSDADFQNNEKFVQFKQQLKELKKQ

SEQ ID NO: 71803 - protein, 35 aa, Homo sapiens
MNWNEKPKSATLPPLYPKSQPPFLHQSLINQITTT

SEQ ID NO: 71804 - protein, 282 aa, Homo sapiens
MGKRRCVPPLEPKLAAGCCGVKKPKLSGSGTHSHGNQSTTVPGSSSGPLQNHQHVDSSSGRENVSDLTLGPGNSPITRMNPASGALSPLPRPNGTANTTKNLVVTAEMCCYCFDVLYCHLYGFPQPRLPRFTNDPYPLFVTWKTGRDKRLRGCIGTFSAMNLHSGLREYTLTSALKDSRFPPLTREELPKLFCSVSLLTNFEDASDYLDWEVGVHGIRIEFINEKGVKRTATYLPEVAKEQDWDQIQTIDSLLRKGGFKAPITSEFRKTIKLTSHFPVKIQE

SEQ ID NO: 71805 - protein, 160 aa, Homo sapiens
  MOD_RES (1)..(1): Any amino acid
XPSPESIKRAKEMDLVGLGLHPLFSSRFEEEELQRLRLVDSIKNYRSRADIFSEVVGRKRQRSGPNRGAKRRREEARQRDQEFYIPYRPKDFDSERGLSISGEGGAFEQQAAGAVLDLMGDEAQNLTRGRQQLKWDRKKKRFVGQSGQEDKKKIKTESGR

SEQ ID NO: 71806 - protein, 176 aa, Homo sapiens
ESSGADRAGGPVATSVPIGWQRCVREGAVLYISPSGTELSSLEQTRSYLLSDGTCKCGLECPLNVPKVFNFDPLAPVTPGGAGVGPASEEDMTKLCNHRRKAVAMATLYRSMETTCSHSSPGSPPQPRHPIQPSLPGTTSGSLSSVPGAPAPPAASKAPVVPSPVLQSPSEGLGMG

SEQ ID NO: 71807 - protein, 61 aa, Homo sapiens
QNAAHFLLSTNDKTIKLWKISERDKRAEGYNLKDEDGRLRDPFRITALRVPILKPMDLMMT

SEQ ID NO: 71808 - protein, 124 aa, Homo sapiens
EIRRMMEVAAADVKQLGGSVELVDIGKQKLPDGSEIPLPPILLGRLGSDPQKKTVCIYGHLDVQPAALEDGWDSEPFTLVERDGKLYGRGSTDDKGPVAGWINALEAYQKTGQLLKGHNIGDSA

SEQ ID NO: 71809 - protein, 125 aa, Homo sapiens
MGFILMYDITNEESFNAVQDWSTQIKTYSWDNAQVLLVGNKCDMEDERVVSSERGRQLADHLGFEFFEASAKDNINVKQTFERLVDVICEKMSESLDTADPAVTGAKQGPQLSDQQVPPHQDCAC

SEQ ID NO: 71810 - protein, 73 aa, Homo sapiens
MSLVPATNYIYTPLNQLKGGTIVNVYGVVKFFKPPYLSKGTDYCSVVTIVDQTNVKLTCLLFSGNYEALPIIY

SEQ ID NO: 71811 - protein, 190 aa, Homo sapiens
MALLAEHLLKPLPADKQIETGPFLEAVSHLPPFFDCLGSPVFTPIKADISGNITKIKAVYDTNPAKFRTLQNILEVEKEIGLRFIQVFLQSICDGERDENHPNLIRVNATKAYEMALKKYHGWIVQKIFQAALYAAPYKSDFLKALSKGQNVTEEECLEKIRLFLVNYTATIDVIYEMYTQMNAELNYKV

SEQ ID NO: 71812 - protein, 67 aa, Homo sapiens
MSHKQIYYSDKYDDEEFEYRHVMLPKDIAKLVPKTHLMSESEWRNLGVQQSQGWVHYMIHEPGQCTG

SEQ ID NO: 71813 - protein, 180 aa, Homo sapiens
MELKRGKTFIKSSLQVSHEKPPDPAAVAAAREGTGPWSVLPGGQQRPHSEKGPQASPSAQEYDRCPNKGAQLDPKGGPAALCGATFKPVRKCKTHDSMSGAGRATAATGQLVGSASFPGSPGSRRMIDYRHFVPQMPFVPAVAKSIPRKRISLKRPKKCFRNLFHIRRNKTEDLASLAAE

SEQ ID NO: 71814 - protein, 75 aa, Homo sapiens
MYPICTVVVDGLPSESSSSSYPGPVSVSEMSLLHALGPVQTWLGQELEKCGIDAMIYTRYVLSLLLHDSYDYDLQ

SEQ ID NO: 71815 - protein, 436 aa, Homo sapiens
MVDGVMILPVLIMIALPSPSMEDEKPKVNPKLYMCVCEGLSCGNEDHCEGQQCFSSLSINDGFHVYQKGCFQVYEQGKMTCKTPPSPGQAVECCQGDWCNRNITAQLPTKGKSFPGTQNFHLEVGLIILSVVFAVCLLACLLGVALRKFKRRNQERLNPRDVEYGTIEGLITTNVGDSTLADLLDHSCTSGSGSGLPFLVQRTVARQITLLECVGKGRYGEVWRGSWQGENVAVKIFSSRDEKSWFRETELYNTVMLRHENILGFIASDMTSRHSSTQLWLITHYHEMGSLYDYLQLTTLDTVSCLRIVLSIASGLAHLHIEIFGTQGKPAIAHRDLKSKNILVKKNGQCCIADLGLAVMHSQSTNQLDVGNNPRVGTKRYMAPEVLDETIQVDCFDSYKRVDIWAFGLVLWEVARRMVSNGSGGLQATVLRCGSQ

SEQ ID NO: 71816 - protein, 194 aa, Homo sapiens
MAWVPAESAVEELMPRLLPVEPCDLTEGFDPSVPPRTPQEYLRIEAAQCPDVVVAQIDPKKLKRKQSVNISLSGCQPAPEGYSPTLQWQQQQVAQFSTVRQNVNKHRSHWKSQQLDSNVTMPKSEDEEGWKKFCLGEKLCADGAVGPATNESPGIDYVQIGFPPLLSIVSRMNQATVTSVLEYLSNWFGERDFT

SEQ ID NO: 71817 - protein, 201 aa, Homo sapiens
MHPGSPSAWPPRARAALRLWLGCVCFALVQADSPSAPVNVTVRHLKANSAVVSWDVLEDEVVIGFAISQQEVNTTTRSCALWDLEEDTEYIVHVQAISIQGQSPASEPVLFKTPREAEKMASKNKDEVTMKEMGRNQQLRTGEVLIIVVVLFMWAGVIALFCRQYDIIKDNEPNNNKEKTKSASETSTPEHQGGGLLRSKI

SEQ ID NO: 71818 - protein, 406 aa, Homo sapiens
  MOD_RES (1)..(1): Any amino acid
XAEMETFRDILCRQVDTLQKYFDACADAVSKDELQRDKVVEDDEDDFPTTRSDGDFLHSTNGNKEKLFPHVTPKGINGIDFKGEAITFKATTAGILATLSHCIELMVKREDSWQKRLDKETEKKRRTEEAYKNAMTELKKKSHFGGPDYEEGPNSLINEEEFFDAVEAALDRQDKIEEQSQSEKVRLHWPTSLPSGDAFSSVGTHRFVQKVYRREVEENGIVLDPLKATHAVKGVTGHEVCNYFWNVDVRNDWETTIENFHVVETLADNAIIIYQTHKRVWPASQRDVLYLSVIRKIPALTENDPETWIVCNFSVDHDSAPLNNRCVRAKINVAMICQTLVSPPEGNQEISRDNILCKITYVANVNPGGWAPASVLRAVAKREYPKFLKRFTSYVQEKTAGKPILF

SEQ ID NO: 71819 - protein, 114 aa, Homo sapiens
  MOD_RES (1)..(1): Any amino acid
XVIKQQLESVSNGWTVYRIARQASRMGNHDMAKELYQSLLTQVASEHFYFWLNSLKEFSHAEQCLTGLQEENYSSALSCIAESLKFYHKGIASLTPEDKPTTCNCHNNCHDLRK

SEQ ID NO: 71820 - protein, 282 aa, Homo sapiens
MAKQQEQDPTNLYISNLPLSMDEQELEGMLKPFGQVISTRILRDTSGTSRGVGFARMESTEKCEAIITHFNGKYIKTPPGVPAPSDPLLCKFADGGPKKRQNQGKFVQNGRAWPRNADMGVMALTYDPTTALQNGFYPAPYNITPNRMLAQSALSPYLSSPVSSYQRVTQTSPLQVPNPSWMHHHSYLMQPSGSVLTPGMDHPISLQPASMMGPLTQQLGHLSLSSTGTYMPTAAAMQGAYISQYTPVPSSSVSVEESSGQQNQVAVDAPSEHGVYSFQFNK

SEQ ID NO: 71821 - protein, 111 aa, Homo sapiens
MAARRITQETFDAVLQEKAKRYHMDASGEAVSETLQFKAQDLLRAVPRSRAEMYDDVHSDGRYSLSGSVAHSRDAGREGLRSDVFPGPSFRSSNPSISDDSYFRKECGRDL

SEQ ID NO: 71822 - protein, 21 aa, Homo sapiens
MMGVLFCCGAGFFIRRRMYPP

SEQ ID NO: 71823 - protein, 41 aa, Homo sapiens
MTLATDPTDGSILACDPGLSRTCDQNTYLSGLCYLFRQNLQ

SEQ ID NO: 71824 - protein, 29 aa, Homo sapiens
  MOD_RES (1)..(1): Any amino acid
XKHEEKQQEGGIVSKNFTKKIQHLLGAGN

SEQ ID NO: 71825 - protein, 298 aa, Homo sapiens
MVLLLILSVLLLKEDVRGSAQSSERRVVAHMPGDIIIGALFSVHHQPTVDKVHERKCGAVREQYGIQRVEAMLHTLERINSDPTLLPNITLGCEIRDSCWHSAVALEQSIEFIRDSLISSEEEEGLVRCVDGSSSSFRSKKPIVGVIGPGSSSVAIQVQNLLQLFNIPQIAYSATSMDLSDKTLFKYFMRVVPSDAQQARAMVDIVKRYNWTYVSAVHTEGRGTKKEEMRKRDQTLMLSFMRCVFLRFEEIRWNDSLVYDALENENIQVLSLCFPSSAVIQINTFLSPIALINRLNVT

SEQ ID NO: 71826 - protein, 83 aa, Homo sapiens
MQEAQQALVSQDNRSSSAESIPYREAGFGSLGQKPLHRLQLIAYLIGDFFFQTIPKWAFRPHKSPHPQQFCSEGEHNYTRESS

SEQ ID NO: 71827 - protein, 1087 aa, Homo sapiens
MSLKPQQQQQQQQQQQQQQQQQQQQQQQPPPAAANVRKPGGSGLLASPAAAPSPSSSSVSSSSATAPSSVVAATSGGGRPGLGRGRNSNKGLPQSTISFDGIYANMRMVHILTSVVGSKCEVQVKNGGIYEGVFKTYSPKCDLVLDAAHEKSTESSSGPKREEIMESILFKCSDFVVVQFKDMDSSYAKRDAFTDSAISAKVNGEHKEKDLEPWDAGELTANEELEALENDVSNGWDPNDMFRYNEENYGVVSTYDSSLSSYTVPLERDNSEEFLKREARANQLAEEIESSAQYKARVALENDDRSEEEKYTAVQRNSSEREGHSINTRENKYIPPGQRNREVISWGSGRQNSPRMGQPGSGSMPSRSTSHTSDFNPNSGSDQRVVNGGVPWPSPCPSPSSRPPSRYQSGPNSLPPRAATPTRPPSRPPSRPSRPPSHPSAHGSPAPVSTMPKRMSSEGPPRMSPKAQRHPRNHRVSAGRGSISSGLEFVSHNPPSEAATPPVARTSPSGGTWSSVVSGAKDSRLQDQRQNSPAGNKENIKPNETSPSFSKAENKGISPVVSEHRKQIDDLKKFKNDFRLQPSSTSESMDQLLNKNREGEKSRDLIKDKIEPSAKDSFIENSSSNCTSGSSKPNSPSISPSILSNTEHKRGPEVTSQGVQTSSPACKQEKDDKEEKKDAAEQVRKSTLNPNAKEFNPRSFSQPKPSTTPTSPRPQAQPSPSMVGHQQPTPVYTQPVCFAPNMMYPVPVSPGVQPLYPIPMTPMPVNQAKTYRAVPNMPQQRQDQHHQSAMMHPASAAGPPIAATPPAYSTQYVAYSPQQFPNQPLVQHVPHYQSQHPHVYSPVIQGNARMMAPPTHAQPGLVSSSATQYGAHEQTHAMYACPKLPYNKETSPSFYFAISTGSLAQQYAHPNATLHPHTPHPQPSATPTGQQQSQHGGSHPAPSPVQHHQHQAAQALHLASPQQQSAIYHAGLAPTPPSMTPASNTQSPQNSFPAAQQTVFTIHPSHVQPAYTNPPHMAHVPQAHVQSGMVPSHPTAHAPMMLMTTQPPGGPQAALAQSALQPIPVSTTAHFPYMTHPSVQAHHQQQL

SEQ ID NO: 71828 - protein, 142 aa, Homo sapiens
  MOD_RES (1)..(1): Any amino acid
XVWSAGCVLAELLLGQPIFPGDSGVDQLVEIIKNCQVIHLWLPSLFLLMLGFKQLLQPPQMPQQRQMLILETVDRPIMLLLHQLPTPPEQSRAASCTGKTTSYLSVTQQHWSRLERILKREKNPVHFSVQFFYYYCCSYLTL

SEQ ID NO: 71829 - protein, 140 aa, Homo sapiens
  MOD_RES (1)..(1): Any amino acid
XDRVGCVWQTVRDHLYHLCVQAQDFCFLVERAVVGLLRLAIRLLRREEISAQLPASPLPALTPLQVLLSLRILLLMKPSVLSRVSHQVAYGLHELLKTNAANIHSGDDWATLFTLLECIGSGVKPPAALQATARADAPDA

SEQ ID NO: 71830 - protein, 128 aa, Homo sapiens; identical to SEQ ID NO: 44672
  MOD_RES (1)..(1): Any amino acid

SEQ ID NO: 71831 - protein, 67 aa, Homo sapiens
GLRASIDAYDNFDNISLAQQLEKHQLMEFRCIAAYLYKGNNWWAQSVELCKKDHLYKEQCGSGGSDR

SEQ ID NO: 71832 - protein, 104 aa, Homo sapiens
  MOD_RES (1)..(1): Any amino acid
XEKGGLVSDAYGEDDFSRLGGDEDGYEEEEDENSRQSEDDDSETEKPEADDPKDNTEAEKRDPQELVASFSERVRNMSPDEIKIPPEPPGRCSNHLQVSMRLGY

SEQ ID NO: 71833 - protein, 51 aa, Homo sapiens
  MOD_RES (1)..(1): Any amino acid
XGCCYTCASQRNESCGGTFGIYGTCDRGLRCVIRPPLNGDSLTEYEAGVCE

SEQ ID NO: 71834 - protein, 60 aa, Homo sapiens
MLEGTFDGHGGTKPRHRIHQQEHADDSHLFAVCWDDDGQHHGRLYPPAPDEIPSCPKVGT

SEQ ID NO: 71835 - protein, 55 aa, Homo sapiens
MSARTPLPTVNERDTENQRSGQHGLTPQKSFYKGTRSMRILNPFNLVTYICGWIY

SEQ ID NO: 71836 - protein, 123 aa, Homo sapiens
MEEPAAPSEAHEAAGAQAGAEAAREGVSGPDLPVCEPSGESAAPDSALPHAARGWAPFPVAPVPAHLRRGGLRPAPASGGGAWPSPLPSRSSGIWTKQIICRFTAVKNLPGVSDETLDFGLLS

SEQ ID NO: 71837 - protein, 107 aa, Homo sapiens
MSLADLTKTNIDEHFFGVALENNRRSAACKRSPGTGDFSRNSNASNKSVDYSRSQCSCGSLSSQYDYSEDFLCDCSEKAINRNYLKQPVVKEKEKKKYNVSKISQSK

SEQ ID NO: 71838 - protein, 211 aa, Homo sapiens
MKPPSSIQTSEFDSSDEEPIEDEQTPIHISWLSLSRVNCSQFLGLCALPGCKFKDVRRNVQKDTEELKSCGIQDIFVFCTRGELSKYRVPNLLDLYQQCGIITHHHPIADGGTPDIASCCEIMEELTTCLKNYRKTLIHCYGGLGRSCLAACLLLYLSDTISPEQAIDSLRDLRGSGAIQTIKQYNYLHEFRDKLAAHLSSRDSQSRSVSR

SEQ ID NO: 71839 - protein, 45 aa, Homo sapiens; identical to SEQ ID NO: 71600
  MOD_RES (1)..(1): Any amino acid

SEQ ID NO: 71840 - protein, 229 aa, Homo sapiens; identical to SEQ ID NO: 62053

SEQ ID NO: 71841 - protein, 54 aa, Homo sapiens
MSPQLVPCGSTFVPFPRLQPSISDSRKRVQVEFYMNENTFKERLKLFFIKNQRS

SEQ ID NO: 71842 - protein, 157 aa, Homo sapiens
MTERRVPFSLLRGPSWDPFRDWYPHSRLFDQAFGLPRLPEEWSQWLGGSSWPGYVRPLPPAAIESPAVAAPAYSRALSRQLSSGVSEIRHTADRWRVSLDVNHFAPDELTVKTKDGVVEITARGAAGRAWLHLPVLHAEIHAAPRCGPHPSFLLPVP

SEQ ID NO: 71843 - protein, 47 aa, Homo sapiens
TVYSALGLRDACRSLPQSIQLFRDIAQEFSDDLHHIASLIGKVKSED

SEQ ID NO: 71844 - protein, 57 aa, Homo sapiens
  MOD_RES (1)..(1): Any amino acid
XRRTQEAQGAGGDPQAQRQLLHAELKLVLQQKGERTQEPGVQVPPSNAMEARSRSAE

SEQ ID NO: 71845 - protein, 44 aa, Homo sapiens
MLDFAIFAVTFLLALVGAVLYLYPASRQAAGIPGITPTEENGPF

SEQ ID NO: 71846 - protein, 65 aa, Homo sapiens
MANFLLPRGTSSFRRFTRESLAAIEKRMAEKQARGSTTLQESREGLPEEEAPRPQLDLQASKKLP

SEQ ID NO: 71847 - protein, 311 aa, Homo sapiens
MKIFNSPSNSSTFTGFILLGFPCPREGQILLFVLFTVVYLLTLMGNGSIICAVHWDQRLHAPMYILLANFSFLEICYVTSTVPSMLANFLSDTKIISFSGCFLQFYFFFSLGSTECFFLAVMAFDRYLAICRPLRYPTIMTRRLCTNLVVNCWVLGFIWFLIPIVNISQMSFCGSRIIDHFLCDPAPLLTLTCKKGPVIELVFSVLSPLPVFMLFLFIVGSYALVVRAVLRVPSAAGRRKAFSTCGSHLAVVSLFYGSVLVMYGSPPSKNEAGKQKTVTLFYSVVTPLLNPVIYSLRNKDMRKALKKFWGT

SEQ ID NO: 71848 - protein, 105 aa, Homo sapiens
MVPSREALLGPGTTAIRCPKKLQMTSLYPEKTQRIYKLPELIIQQGHQIQEPKLQGPWIVKGKRARAESIDPVQDHPHEHTHGRPSPQARMGGSEGRRGVGFLLV

SEQ ID NO: 71849 - protein, 98 aa, Homo sapiens
MLLTCILWRLTKKHTVSQEDRKSYSWKQRLFIINFISFFSALAVYFRHNMYCEAGVYTIFAILEYTVVLTNMAFHMTAWWDFGNKELLITSQPEEKRF

SEQ ID NO: 71850 - protein, 77 aa, Homo sapiens
HRDDVKLTCQVEHDGQPAVSKSHDLKVSAHPKEQGSNTAPGPALASAAPLLIAFLLGPKVLLVVGVSVIYVYWKQKA

SEQ ID NO: 71851 - protein, 157 aa, Homo sapiens
MKPGFSPRGGGFGGRGGFGDRGGRGGRGGFGGGRGRGGGFRGRGRGGGGGFHSGGNRGRGRGGKRGNQSGKNVMVEPHRHEGVFICRGKEDALVTKNLVPGESVYGEKRVSISEGDDKIEYRAWNPFRSKLAAAILGGVDQIHIKPGAKVLYLGAAS

SEQ ID NO: 71852 - protein, 36 aa, Homo sapiens
MGEHEQVVCEALGDQLFQSQSQDHCDDSRLPEAPAM

SEQ ID NO: 71853 - protein, 62 aa, Homo sapiens
MNDVKLAVLGGEGTGKSALTVRFLTKRFIGEYASNFESIYKKHLCLERKQLNLEIYDPCSQR

SEQ ID NO: 71854 - protein, 725 aa, Homo sapiens
MASEGTNIPSPVVRQIDKQFLICSICLERYKNPKVLPCLHTFCERCLQNYIPAHSLTLSCPVCRQTSILPEKGVAALQNNFFITNLMDVLQRTPGSNAEESSILETVTAVAAGKPLSCPNHDGNVMEFYCQSCETAMCRECTEGEHAEHPTVPLKDVVEQHKASLQVQLDAVNKRLPEIDSALQFISEIIHQLTNQKASIVDDIHSTFDELQKTLNVLQSQLDTLLQGQESIKSCSNFTAQALNHGTETEVLLVKKQMSEKLNELADQDFPLHPRENDQLDFIVETEGLKKSIHNLGTILTTNAVASETVATGEGLRQTIIGQPMSVTITTKDKDGELCKTGNAYLTAELSTPDGSVADGEILDNKNGTYEFLYTVQKEGDFTLSLRLYDQHIRGSPFKLKVIRSADVSPTTEGVKRRVKSPGSGHVKQKAVKRPASMYSTGKRKENPIEDDLIFRVGTKGRNKGEFTNLQGVAASTNGKILIADSNNQCVQIFSNDGQFKSRFGIRGRSPGQLQRPTGVAVHPSGDIIIADYDNKWVSIFSSDGKFKTKIGSGKLMGPKGVSVDRNGHIIVVDNKACCVFIFQPNGKIVTRFGSRGNGDRQFAGPHFAAVNSNNEIIITDFHNHSVKVFNQEGEFMLKFGSNGEGNGQFNAPTGVAVDSNGNIIVADWGNSRIQVFDGSGSFLSYINTSADPLYGPQGLALTSDGHVVVADSGNHCFKVYRYLQ

SEQ ID NO: 71855 - protein, 168 aa, Homo sapiens
MKNKLGIFRRRNESPGAPPAGKADKMMKSFKPTSEEALKWGESLEKLLVHKYGLAVFQAFLRTEFSEENLEFWLACEDFKKVKSQSKMASKAKKIFAEYIAIQACKEVNLDSYTREHTKDNLQSVTRGCFDLAQKRIFGLMEKDSYPRFLRSDLYLDLINQKKMSPPL

SEQ ID NO: 71856 - protein, 1091 aa, Homo sapiens
MRPSGTAGAALLALLAALCPASRALEEKKVCQGTSNKLTQLGTFEDHFLSLQRMFNNCEVVLGNLEITYVQRNYDLSFLKTIQEVAGYVLIALNTVERIPLENLQIIRGNMYYENSYALAVLSNYDANKTGLKELPMRNLQGQKCDPSCPNGSCWGAGEENCQKLTKIICAQQCSGRCRGKSPSDCCHNQCAAGCTGPRESDCLVCRKFRDEATCKDTCPPLMLYNPTTYQMDVNPEGKYSFGATCVKKCPRNYVVTDHGSCVRACGADSYEMEEDGVRKCKKCEGPCRKVCNGIGIGEFKDSLSINATNIKHFKNCTSISGDLHILPVAFRGDSFTHTPPLDPQELDILKTVKEITGFLLIQAWPENRTDLHAFENLEIIRGRTKQHGQFSLAVVSLNITSLGLRSLKEISDGDVIISGNKNLCYANTINWKKLFGTSGQKTKIISNRGENSCKATGQVCHALCSPEGCWGPEPRDCVSCRNVSRGRECVDKCNLLEGEPREFVENSECIQCHPECLPQAMNITCTGRGPDNCIQCAHYIDGPHCVKTCPAGVMGENNTLVWKYADAGHVCHLCHPNCTYGCTGPGLEGCPTNGPKIPSIATGMVGALLLLLVVALGIGLFMRRRHIVRKRTLRRLLQERELVEPLTPSGEAPNQALLRILKETEFKKIKVLGSGAFGTVYKGLWIPEGEKVKIPVAIKELREATSPKANKEILDEAYVMASVDNPHVCRLLGICLTSTVQLITQLMPFGCLLDYVREHKDNIGSQYLLNWCVQIAKGMNYLEDRRLVHRDLAARNVLVKTPQHVKITDFGLAKLLGAEEKEYHAEGGKVPIKWMALESILHRIYTHQSDVWSYGVTVWELMTFGSKPYDGIPASEISSILEKGERLPQPPICTIDVYMIMVKCWMIDADSRPKFRELIIEFSKMARDPQRYLVIQGDERMHLPSPTDSNFYRALMDEEDMDDVVDADEYLIPQQGFFSSPSTSRTPLLSSLSATSNNSTVACIDRNGLQSCPIKEDSFLQRYSSDPTGALTEDSIDDTFLPVPGEWLVWKQSCSSTSSTHSAAASLQCPSQVLPPASPEGETVADLQTQ

SEQ ID NO: 71857 - protein, 253 aa, Homo sapiens
MYTAIPQSGSPFPGSVQDPGLHVWRVEKLKPVPVAQENQGVFFSGDSYLVLHNGPEEVSHLHLWIGQQSSRDEQGACAVLAVHLNTLLGERPVQHREVQGNESDLFMSYFPRGLKYQEGGVESAFHKTSTGAPAAIKKLYQVKGKKNIRATERALNWDSFNTGDCFILDLGQNIFAWCGGKSNILERNKARDLALAIRDSERQGKAQVEIVTDGEEPAEMIQVLGPKPALKEGNPEEDLTADKANAQAAALYK

SEQ ID NO: 71858 - protein, 217 aa, Homo sapiens
MSSILPFTPPVVKRLLGWKKSAGGSGGAGGGEQNGQEEKWCEKAVKSLVKKLKKTGRLDELEKAITTQNCNTKCVTIPSTCSEIWGLSTPNTIDQWDTTGLYSFSEQTRSLDGRLQVSHRKGLPHVIYCRLWRWPDLHSHHELKAIENCEYAFNLKKDEVCVNPYHYQRVETPVLPPVLVPRHTEILTELPPLDDYTHSIPENTNFPAGIEPQSNYI

SEQ ID NO: 71859 - protein, 160 aa, Homo sapiens
MRILHVNGFNGEGGEEDPQAARSNSDGEKATKVQDIKNNLKEAIETIVAAMSNLVPPVELANPENQFRVDYILSVMNVPDFDFPPEFYEHAKALWEDEGVRACYERSNEYQLIDCAQYFLDKIDVIKQADYVPSDQDLLRCRVLTSGIFETKFQVDKVNF

SEQ ID NO: 71860 - protein, 476 aa, Homo sapiens
MVMASVMQKIIPHYSLARWLLCNGSLRWYQHPTEEELRILAGKQQKGKTKKDRKYNGHIESKPLTIPKDIDLHLETKSVTEVDTLALHYFPEYQWLVDFTVAATVVYLVTEVYYNFMKPTQEMNISLVWCLLVLSFAIKVLFSLTTHYFKVEDGGERSVCVTFGFFFFVKAMAVLIVTENYLEFGLETGFTNFSDSAMQFLEKQGLESQSPVSKLTFKFFLAIFCSFIGAFLTFPGLRLAQMHLDALNLATEKITQTLLHINFLAPLFMVLLWVKPITKDYIMNPPLGKESIPLMTEATFDTLRLWLIILLCALRLAMMRSHLQAYLNLAQKCVDQMKKEAGRISTVELQKMVARVFYYLCVIALQYVAPLVMLLHTTLLLKTLGNHSWGIYPESISTLPVDNSLLSNSVYSELPSAEGKMKVTVTQITVALSSLKNIFTPLLFRGLLSFLTWWIAACLFSTSLFGLFYHQYLTVA

SEQ ID NO: 71861 - protein, 290 aa, Homo sapiens [sequence omitted]

SEQ ID NO: 71862 - protein, 98 aa, Homo sapiens
MSLLFSRCNSIVTVKKNKRHMAEVNASPLKHFVTAKKKINGIFEQLGAYIQESATFLEDTYRNAELDPVTTEEQVLDVKGYLSKVRGISEVLARRHMK

SEQ ID NO: 71863 - protein, 185 aa, Homo sapiens
EEEDDVPEMNSSFTADSGEQEEHTLQETALPPVNSSIIAAPITDPSQKFPQYLPLSAEDNLGPLPENWEMAYTENGEVYFIDHNTKTTSWLDPRCLNKQQKPLEECEDDELPAGWEKIEDPVYGIYYVDHINRKTQYENPVLEAKRKKQLEQQQQQQQQQQQQQQQQQQQQTEEWTEDHSALVPP

SEQ ID NO: 71864 - protein, 24 aa, Homo sapiens
MLVDGPSERPALCFLLLAVAMSFF

SEQ ID NO: 71865 - protein, 161 aa, Homo sapiens
MWVTKLLPALLLQHVLLHLLLLPIAIPYAEGQRKRRNTIHEFKKSAKTTLIKIDPALKIKTKKVNTADQCANRCTRNKGLPFTCKAFVFDKARKQCLWFPFNSMSSGVKKEFGHEFDLYENKDYIRNCIIGKGRSYKGTVSITKSGIKCQPWSSMIPHEHR

SEQ ID NO: 71866 - protein, 139 aa, Homo sapiens
MSDTLTADVIGRRVEVNGEHATVRFAGVVPPVAGPWLGVEWDNPERGKHDGSHEGTVYFKCRHPTGGSFIRPNKVNFGTDFLTAIKNRYVLEDGPEEDRKEQIVTIGNKPVETIGFDSIMKQQRYQKGRFVKKPVVIMG

SEQ ID NO: 71867 - protein, 298 aa, Homo sapiens
MSQEGDYGRWTISSSDESEEEKPKPDKPSTSSLLCARQGAANEPRYTCSEAQKAAHKRKISPVKFSNTDSVLPPKRQKSGSQEDLGWCLSSSDDELQPEMPQKQAEKVVIKKEKDISAPNDGTAQRTENHGAPACHRLKEEEDEYETSGEGQDIWDMLDKGNPFQFYLTRVSGVKPKYNSGALHIKDILSPLFGTLVSSAQFNYCFDVDWLVKQYPPEFRKKPILLVHGDKREAKAHLHAQAKPYENISLCQAKLDIAFGTHHTKMMLLLYEEGLRVVIHTSNLIHADWHQKTQGTHL

SEQ ID NO: 71868 - protein, 510 aa, Homo sapiens
MEMSWARQSLAGIPAACDEFHPFIEALLPHVRAFSYTWFNLQARKRKYFKKHEKRMSKDEERAVKDELLGEKPEIKQKWASRLLAKLRKDIRPEFREDFVLTITGKKPPCCVLSNPDQKGKIRRIDCLRQADKVWRLDLVMVILFKGIPLESTDGERLYKSPQCSNPGLCVQPHHIGVTIKELDLYLAYFVHTPESGQSDSSNQQGDADIKPLPNGHLSFQDCFVTSGVWNVTELVRVSQTPVATASGPNFSLADLESPSYYNINQVTLGRRSITSPPSTSTTKRPKSIDDSEMESPVDDVFYPGTGRSPAAGSSQSSGWPNDVDAGPASLKKSGKLDFCSALSSQGSSPRMAFTHHPLPVLAGVRPGSPRATASALHFPSTSIIQQSSPYFTHPTIRYHHHHGQDSLKEFVQFVCSDGSGQATGQPNGSGQGKVPGSFLLPPPPPVARPVPLPMPDSKSTSTAPDGAALTPPSPSFATTGASSANRFVSIGPRDGNFLNIPQQSQSWFL

SEQ ID NO: 71869 - protein, 63 aa, Homo sapiens
MRTRHVMLPKDIAKLVPKTHLMSESEWRNLGVQQSQGWVHYMIHEPEPHILLFRRPLPKKPKK

SEQ ID NO: 71870 - protein, 48 aa, Homo sapiens
MSQDGASQFQEVIRQELELSVKKELEKILTTASSHEFERVTSDRTMLL

SEQ ID NO: 71871 - protein, 702 aa, Homo sapiens
METASTGVAGVSSAMDHTFSTTSKDGEGSCYTSLISDICYPPQEDSTYFTGILQKENGHVTISESPEELGTPGPSLPDVPGIESRGLFSSDSGIEMTPAESTEVNKILADPLDQMKAEAYKYIDITRPEEVKHQEQHHPELEDKDLDFKNKDTDISIKPEGVREPDKPAPVEGKIIKDHLLEESTFAPYIDDLSEEQRRAPQITTPVKITLTEIEPSVETTTQEKTPEKQDICLKPSPDTVPTVTVSEPEDDSPGSITPPSSGTEPSAAESQGKGSISEDELITAIKEAKGLSYETAENPRPVGQLADRPEVKARSGPPTIPSPLDHEASSAESGDSEIELVSEDPMAAEDALPSGYVSFGHVGGPPPSPASPSIQYSILREEREAELDSELIIESCDASSASEESPKREQDSPPMKPSALDAIREETGVRAEERAPSRRGLAEPGSFLDYPSTEPQPGPELPPGDGALEPETPMLPRKPEEDSSSNQSPAATKGPGPLGPGAPPPLLFLNKQKAIDLLYWRDIKQTGIVFGSFLLLLFSLTQFSVVSVVAYLALAALSATISFRIYKSVLQAVQKTDEGHPFKAYLELEITLSQEQIQKYTDCLQFYVNSTLKELRRLFLVQDLVDSLKFAVLMWLLTYVGALFNGLTLLLMAVVSMFTLPVVYVKHQAQIDQYLGLVRTHINAVVAKIQAKIPGAKRHAE

SEQ ID NO: 71872 - protein, 52 aa, Homo sapiens
MDMWTALLILQALLLPSLADGATPALRFVAVGDWGGVPNAPFHTAREMANAK

SEQ ID NO: 71873 - protein, 725 aa, Homo sapiens
MGLWWVTVQPPARRMGWLPLLLLLTQCLGVPGQRSPLNDFQVLRGTELQHLLHAVVPGPWQEDVADAEECAGRCGPLMDCRAFHYNVSSHGCQLLPWTQHSPHTRLRRSGRCDLFQKKDYVRTCIMNNGVGYRGTMATTVGGLPCQAWSHKFPNDHKYTPTLRNGLEENFCRNPDGDPGGPWCYTTDPAVRFQSCGIKSCREAACVWCNGEEYRGAVDRTESGRECQRWDLQHPHQHPFEPGKFLDQGLDDNYCRNPDGSERPWCYTTDPQIEREFCDLPRCGSEAQPRQEATTVSCFRGKGEGYRGTANTTTAGVPCQRWDAQIPHQHRFTPEKYACKDLRENFCRNPDGSEAPWCFTLRPGMRAAFCYQIRRCTDDVRPQDCYHGAGEQYRGTVSKTRKGVQCQRWSAETPHKPQFTFTSEPHAQLEENFCRNPDGDSHGPWCYTMDPRTPFDYCALRRCADDQPPSILDPPDQVQFEKCGKRVDRLDQRRSKLRVVGGHPGNSPWTVSLRNRQGQHFCGGSLVKEQWILTARQCFSSCHMPLTGYEVWLGTLFQNPQHGEPSLQRVPVAKMVCGPSGSQLVLLKLERSVTLNQRVALICLPPEWYVVPPGTKCEIAGWGETKGTGNDTVLNVALLNVISNQECNIKHRGRVRESEMCTEGLLAPVGACEGDYGGPLACFTHNCWVLEGIIIPNRVCARSRWPAVFTRVSVFVDWIHKVMRLG

SEQ ID NO: 71874 - protein, 145 aa, Homo sapiens
MIAEFKAAFDMFDADGGGDISVKELGTVMRMLGQTPTKEELDAIIEEVDEDGSGTIDFEEFLVMMVRQMKEDAKGKSEEELAECFRIFDRNADGYIDPEELAEIFRASGEHVTDEEIESLMKDGDKNNDGRIDFDEFLKMMEGVQ

SEQ ID NO: 71875 - protein, 47 aa, Homo sapiens
MIPMRESPPTRPCSTPTSKNREPRTEARMRPQPSSSPFKHVHPSTLC

SEQ ID NO: 71876 - protein, 473 aa, Homo sapiens
MRLGSPGLLFLLFSSLRADTQEKEVRAMVGSDVELSCACPEGSRFDLNDVYVYWQTSESKTVVTYHIPQNSSLENVDSRYRNRALMSPAGMLRGDFSLRLFNVTPQDEQKFHCLVLSQSLGFQEVLSVEVTLHVAANFSVPVVSAPHSPSQDELTFTCTSINGYPRPNVYWINKTDNSLLDQALQNDTVFLNMRGLYDVVSVLRIARTPSVNIGCCIENVLLQQNLTVGSQTGNDIGERDKITENPVSTGEKNAATWSILAVLCLLVVVAVAIGWVCRDRCLQHSYAGAWAVSPETELTGEFAVGSSRFWGAQGRLGCQLSFRVSKNFQKAKVPCLEQLLFLETQRSPRWCAWHFLQPPLGMGWHPGVHFVTLRWDFPNMHRSRETSARPPRSPVPSPDQGVQGGSRHRRPAPMGCPEWVQAPAPSPRGVSRAGPGTGAQPLWGVRSGSGHRQLLSVAATPAALVCPSVPGAT

SEQ ID NO: 71877 - protein, 58 aa, Homo sapiens
MGNTSSERAALERHGGHKTPRRDSSGGTKDGDRPKILMDSPEDADLFHSEEIKDGRRE

SEQ ID NO: 71878 - protein, 302 aa, Homo sapiens
MSPLKIHGPIRIRSMQTGITKWKEGSFEIVEKENKVSLVVHYNTGGIPRIFQLSHNIKNVVLRPSGAKQSRLMLTLQDNSFLSIDKVPSKDAEEMRLFLDAVHQNRLPAAMKPSQGSGSFGAILGSRTSQKETSRQLSYSDNQASAKRGSLETKDDIPFRKVLGNPGRGSIKTVAGSGIARTIPSLTSTSTPLRSGLLENRTEKRKRMISTGSELNEDYPKENDSSSNNKAMTDPSRKYLTSSREKQLSLKQSEENRTSGLLPLQSSSFYGSRAGSKEHSSGGTNLDRFIGYKYIRYLLSTC

SEQ ID NO: 71879 - protein, 142 aa, Homo sapiens
MAQPPPDVEGDDCLPAYRHLFCPDLLRDKVAFITGGGSGIGFRIAEIFMRIQVPARGTGERSRIALGGVRTSRPLQAARKLAGATGRRCLPLSMDVRAPPAVMAAVDQALKEFGRIDILINCAAGNFLCPAGALSFNAFKTV

SEQ ID NO: 71880 - protein, 514 aa, Homo sapiens
MSYGSIARGGGLGSRGPFGGPSRQGCQPLECARCWTEYGIRHFPCPSPESKLQNRCVGKDGEGDLGPAGTPIVPRARKRGPGVAPEGSRMPEPTSSPTIGPRKDSAAGPHGRMAGPSTTRAKKRKPNFCPQETEVLVSKVSKHHQLLFGTGLLKAEPTRRYRVWSRILQAVNALGYCRRDVVDLKHKWRDLRAVVRRKLGDLRKAAHGPSPGSGKPQALALTPVEQVVAKTFSCQALPSEGFSLEPPRATQVDPCNLQELFQEMSANVFRINSSVTSLERSLQSLGTPSDTQELRDSLHTAQQETNKTIAASASSVKQMAELLRSSCPQERLQQERPQLDRLKTQLSDAIQCYGVVQKKIAEKSRALLPMAQRGSKQQSPQAPFAELADDEKVFNGSDNMWQGQEQALLPDITEEDLEAIRLREEAILQMESNLLDVNQIIKDLASMVSEQGEAVDSIEASLEAASSHAEAARQLLAGASRHQLQRHKIKCCFLSAGVTALLVIIIIIATSVRK

SEQ ID NO: 71881 - protein, 515 aa, Homo sapiens
MEPNDSTSTAVEEPDSLEVLVKTLDSQTRTFIVGAQMNVKEFKEHIAASVSIPSEKQRLIYQGRVLQDDKKLQEYNVGGKVIHLVERAPPQTHLPSGASSGTGSASATHGGGSPPGTRGPGASVHDRNANSYVMVGTFNLPSDGSAVDVHINMEQAPIQSEPRVRLVMAQHMIRDIQTLLSRMECRGGPQPQHSQPPPQPPAVTPEPVALSSQTSEPVESEAPPREPMEAEEVEERAPAQNPELTPGPAPAGPTPAPETNAPNHPSPAEYVEVLQELQRLESRLQPFLQRYYEVLGAAATTDYNNNHEGREEDQRLINLVGESLRLLGNTFVALSDLRCNLACTPPRHLHVVRPMSHYTTPMVLQQAAIPIQINVGTTVTMTGNGTRPPPTPNAEAPPPGPGQASSVAPSSTNVESSAEGAPPPGPAPPPATSHPRVIRISHQSVEPVVMMHMNIQDSGTQPGGVPSAPTGPLGPPGHGQTLGSTLIQLPSLPPEFMHAVAHQITHQAMVAAVAS

SEQ ID NO: 71882 - protein, 72 aa, Homo sapiens
MHRRRLALGLGFCLLAGTSLSVLWVYLENWLPVSYVPYYLPCPEILLEYRGVISAHCNLHLPGSSNCHASAT

SEQ ID NO: 71883 - protein, 187 aa, Homo sapiens
MGSSHIGGLSINERRCSASLGLVMAENDVDNELLDYEDDEVETAAGGDGAEAPAKKDVKGSYVSIHSSGFRDFLLKPELLRAIVDCGFEHPSEVQHECIPQAILGMDVLCQAKSGMGKTAVFVLATLQQLEPVTGQVSVLVMCHTRELAFQISKEYERFSKYMPNVKVAVFFGGLSIKKDEEVLKKN

SEQ ID NO: 71884 - protein, 50 aa, Homo sapiens
MDSLDRSCQDWCDRKQHWLEIGPPDLVERKGSLTLRSHHKKYSKPVLVYS

SEQ ID NO: 71885 - protein, 109 aa, Homo sapiens
MGSRCVFQADLEHMASRDPPASALQSAAITDFKSNLHKVYQAIEEADFFAIDGEFSGISDGPSVSALTNGFDTPEERYQKLKKHSMDFLLFQFGLCTFKYDYTDSKYIT

SEQ ID NO: 71886 - protein, 65 aa, Homo sapiens
MGLCKCPKRKVTNLFCFEHRVNVCEHCLVANHAKVGPSGERLSRALGGQGGIGFLQIHEGPRARM

SEQ ID NO: 71887 - protein, 182 aa, Homo sapiens
MENTENSVDSKSIKNLEPKIIHGSESMDSGISLDNSYKMDYPEMGLCIIINNKNFHKSTGMTSRSGTDVDAANLRETFRNLKYEVRNKNDLTREEIVELMRDVSKEDHSKRSSFVCVLLSHGEEGIIFGTNGPVDLKKITNFFRGDRCRSLTGKPKLFIIQVIILGEIQRMAPGSSSRFVPC

SEQ ID NO: 71888 - protein, 173 aa, Homo sapiens
MTRENVAHNALRQEGLVKGKDDTWKWGTSFQGSSSSVWETSHLHFRQLRYHETSGPQEALSRLRELCRRWLRPEARTKAQILELLVLEQFLSILPGEIRTWVQLHHPGSGEEAVALVEELQKDLDGPAIQVWLLFPPLCTVSSGRGHQCHEWGSRAAPLFSMQSFTAVLMLHT

SEQ ID NO: 71889 - protein, 40 aa, Homo sapiens
MADDIDIEAMLEAPYKKTCLTISHLYSHEFTFDSSVNCQS

SEQ ID NO: 71890 - protein, 181 aa, Homo sapiens
MNALLLSAWFGHLRILQILVNSGAKIHCESKDGLTLLHCAAQKGHVPVLAFIMEDLEDVALDHVDKLGRTAFHRAAEHGQLDALDFLVGSGCDHNVKDKEGNTALHLAAGRGHMAVLQRLVDIGLDLEEQNAEGLTALHSAAGGSHPDCVQLLLRAGSTVNALTQVARPSQDCGRLLAAEP

SEQ ID NO: 71891 - protein, 161 aa, Homo sapiens
MSSSEEVSWISWFCGLRGNEFFCEVDEDYIQDKFNLTGLNEQVPHYRQALDMILDLEPDEELEDNPNQSDLIEQAAEMLYGLIHALPLSDSQIQWFYQALNLSLPLPNFHAGTEPDGLDPMVTLSLNLGLSFAELRRMYLFLNSSGLLVLPQAGLLTPHPS

SEQ ID NO: 71892 - protein, 48 aa, Homo sapiens
MSGQSLTDRITAAQHSVTGSAVSKTVCKATTHEIMGPKKKHLDWLMEL

SEQ ID NO: 71893 - protein, 32 aa, Homo sapiens
MLRSTLAQQGTPVYSVAWGPDSEKVLYTAGKQ

SEQ ID NO: 71894 - protein, 86 aa, Homo sapiens
  MOD_RES (1)..(1): Any amino acid
XADLEEVAQKCGLSYKALVALRRVLLAQFSAFPVNGADLYEELKTSTAILSTGIGRHGGRTQVGTWEDCSCLRSPQGDRGVGSGML

SEQ ID NO: 71895 - protein, 1525 aa, Homo sapiens
MRTTKVYKLVIHKKGFGGSDDELVVNPKVFPHIKLGDIVEIAHPNDEYSPLLLQVKSLKEDLQKETISVDQTVTQVFRLRPYQDVYVNVVDPKDVTLDLVELTFKDQYIGRGDMWRLKKSLVSTCAYITQKVEFAGIRAQAGELWVKNEKVMCGYISEDTRVVFRSTSAMVYIFIQMSCEMWDFDIYGDLYFEKAVNGFLADLFTKWKEKNCSHEVTVVLFSRTFYDAKSVDEFPEINRASIRQDHKGRFYEDFYKVVVQNERREEWTSLLVTIKKLFIQYPVLVRLEQAEGFPQGDNSTSAQGNYLEAINLSFNVFDKHYINRNFDRTGQMSVVITPGVGVFEVDRLLMILTKQRMIDNGIGVDLVCMGEQPLHAVPLFKLHNRSAPRDSRLGDDYNIPHWINHSFYTSKSQLFCNSFTPRIKLAGKKPASEKAKNGRDTSLGSPKESENALPIQVDYDAYDAQVFRLPGPSRAQCLTTCRSVRERESHSRKSASSCDVSSSPSLPSRTLPTEEVRSQASDDSSLGKSANILMIPHPHLHQYEVSSSLGYTSTRDVLENMMEPPQRDSSAPGRFHVGSAESMLHVRPGGYTPQRALINPFAPSRMPMKLTSNRRRWMHTFPVGMNPRTQNKDSLEDSVSTSPDPILTLSAPPVVPGFCCTVGVDWKSLTTPACLPLTTDYFPDRQGLQNDYTEGCYDLLPEADIDRRDEDGVQMTAQQVFEEFICQRLMQGYQIIVQPKTQKPNPAVPPPLSSSPLYSRGLVSRNRPEEEDQYWLSMGRTFHKVTLKDKMITVTRYLPKYPYESAQIHYTYSLCPSHSDSEFVSCWVEFSHERLEEYKWNYLDQYICSAGSEDFSLIESLKFWRTRFLLLPACVTATKRITEGEAHCDIYGDRPRADEDEWQLLDGFVRFVEGLNRIRRRHRSDRMMRKGTAMKGLQMTGPISTHSLESTAPPVGKKGTSALSALLEMEASQKCLGEQQAAVHGGKSSAQSAESSSVAMTPTYMDSPRKDGAFFMEFVRSPRTASSAFYPQVSVDQTATPMLDGTSLGICTGQSMDRGNSQTFGNSQNIGEQGYSSTNSSDSSSQQLVASSLTSSSTLTEILEAMKHPSTGVQLLSEQKGLSPYCFISAEVVHWLVNHVEGIQTQAMAIDIMQKMLEEQLITHASGEAWRTFIYGFYFYKIVTDKEPDRVAMQQPATTWHTAGVDDFASFQRKWFEVAFVAEELVHSEIPAFLLPWLPSRPASYASRHSSFSRSFGGRSQAAALLAATVPEQRTVTLDVDVNNRTDRLEWCSCYYHGNFSLNAAFEIKLHWMAVTAAVLFEMVQGWHRKATSCGFLLVPVLEGPFALPSYLYGDPLRAQLFIPLNISCLLKEGSEHLFDSFEPETYWDRMHLFQEAIAHRFGFVQDKYSASAFNFPAENKPQYIHVTGTVFLQLPYSKRKFSGQQRRRRNSTSSTNQNMFCEERVGYNWAYNTMLTKTWRSSATGDEKFADRLLKDFTDFCINRDNRLVTFWTSCLEKMHASAP

SEQ ID NO: 71896 - protein, 504 aa, Homo sapiens
MKSLSLLLAVALGLATAVSAGPAVIECWFVEDASGKGLAKRPGALLLRQGPGEPPPRPDLDPELYLSVHDPAGALQAAFRRYPRGAPAPHCEMSRFVPLPASAKWASGLTPAQNCPRALDGAWLMVSISSPVLSLSSLLRPQPEPQQEPVLITMATVVLTVLTHTPAPRVRLGQDALLDLSFAYMPPTSEAASSLAPGPPPFGLEWRRQHLGKGHLLLAATPGLNGQMPAAQEGAVAFAAWDDDEPWGPWTGNGTFWLPTVQPFQEGTYLATIHLPYLQGQVTLELAVYKPPKVSLMPATLARAAPGEAPPELLCLVSHFYPSGGLEVEWELRGGPGGRSQKAEGQRWLSALRHHSDGSVSLSGHLQPPPVTTEQHGARYACRIHHPSLPASGRSAEVTLEVAGLSGPSLEDSVGLFLSAFLLLGLFKALGWAAVYLSTCKDSKKVQCSTSLYLSLVTLSPHPISKPMEGGCWCGRQNLGLEFTLIWVKTWHYILTVGLFEHAT

SEQ ID NO: 71897 - protein, 47 aa, Homo sapiens
MKQLPAATVRLLSSSQIITSVVSVVKELIENSLDAGATSVDVKLVQL

SEQ ID NO: 71898 - protein, 132 aa, Homo sapiens
MAACRALKAVLVDLSGTLHIEDAAVPGAQEALKRLRGASVIIRFVTNTTKESKQDLLERLRKLEFDISEDEIFTSLTAARSLLERKQVRPMLLVDDRALPDFKGIQTSDPNAVVMGLAPEHFHYQILNQAFR

SEQ ID NO: 71899 - protein, 614 aa, Homo sapiens
MGGVHVAYRGGAGVAGAVWTVMAATVATAAAVAPAPAPGTDSASSVHWFRKGLRLHDNPALLAAVRGARCVRCVYILDPWFAASSSVGINRWRFLLQSLEDLDTSLRKLNSRLFVVRGQPADVFPRLFKEWGVTRLTFEYDSEPFGKERDAAIMKMAKEAGVEVVTENSHTLYDLDRIIELNGQKPPLTYKRFQAIISRMELPKKPVGLVTSQQMESCRAEIQENHDETYGVPSLEELGFPTEGLGPAVWQGGETEALARLDKHLERKAWVANYERPRMNANSLLASPTGLSPYLRFGCLSCRLFYYRLWDLYKKVKRNSTPPLSLFGQLLWREFFYTAATNNPRFDRMEGNPICIQIPWDRNPEALAKWAEGKTGFPWIDAIMTQLRQEGWIHHLARHAVACFLTRGDLWVSWESGVRVFDELLLDADFSVNAGSWMWLSCSAFFQQFFHCYCPVGFGRRTDPSGDYIRRYLPKLKAFPSRYIYEPWNAPESIQKAAKCIIGVDYPRPIVNHAETSRLNIERMKQIYQQLSRYRGLCLLASVPSCVEDLSHPVAEPSSSQAGSMSSAGPRPLPSGPASPKRKLEAAEEPPGEELSKRARVAELPTPELPSKDA

SEQ ID NO: 71900 - protein, 374 aa, Homo sapiens
MDVMLENYSNLLSVEVWKADDQMERDHRNPDEQARQFLILKNQTPIEERGDLFGKALNLNTDFVSLRQVPYKYDLYEKTLKYNSDLLNSNRSYAGKQTDECNEFGKALLYLKQEKTHSGVEYSEYNKSGKALSHKAAIFKHQKIKNLVQPFICTYCDKAFSFKSLLISHKRIHTGEKPYECNVCKKTFSHKANLIKHQRIHTGEKPFECPECGKAFTHQSNLIVHQRAHMEKKPYECSECGKTFAQKFELTTHQRIHTGERPYECNECAKTFFKKSNLIIHQKIHTGEKRYECSECGKSFIQNSQLIIHMRTHTGEKPYECTECGKTFSQRSTLRLHLRIHTGEKPYECSECGKAFSRKSRLSVHQRVHIGEKP

SEQ ID NO: 71901 - protein, 205 aa, Homo sapiens
MTPPERLFLPRVCGTTLHLLLLGLLLVLLPGAQGLPGVGLTPSAAQTARQHPKMHLAHSNLKPAAHLIGDPSKQNSLLWRANTDRAFLQDGFSLSNNSLLVPTSGIYFVYSQVVFSGKAYSPKATSSPLYLAHEVQLFSSQYPFHVPLLSSQKMVYPGLQEPWLHSMYHGAAFQLTQGDQLSTHTDGIPHLVLSPSTVFFGAFAL

SEQ ID NO: 71902 - protein, 158 aa, Homo sapiens
MEPNDSTSTAVEEPDSLEVLVKTLDSQTRTFIVGAQMNVKEFKEHIAASVSIPSEKQRLIYQGRVLQDDKKLQEYNVGGKVIHLVERAPPQTHLPSGASSGTGSASATHGGGSPPGTRGPGASVHDRNANSYVMVGTFNLPSDGSAVDVHINMEQAPI

SEQ ID NO: 71903 - protein, 170 aa, Homo sapiens
MALWRAYQRALAAHPWKVQVLTAGSLMGLGDIISQQLVERRGLQEHQRGRTLTMVSLGCGFVGPVVGGWYKVLDRFIPGTTKVDALKKMLLDQGGFAPCFLGCFLPLVGALNGLSAQDNWAKLQRDYPDALITNYYVGRCPMCCCYLELLPVLEGTSALSLPHSIVSTLQ

SEQ ID NO: 71904 - protein, 223 aa, Homo sapiens
MPSRTGTSTLTVAVCKCNEQGEFTFCEDMAAQVGVSIQAVVAILLCILTITVITLLIFLRRRLRKQARAHGKSVPEIHEQLVTYDEEGGGEMDTTSYDVSVLNSVRRGGAKPPRPALDARPSLYAQVQKPPRHAPGAHGGPGEMAAMIEVKKDEADHDGDGPPYDTLHIYGYEGSESIAESLSSLGTDSSDSDVDYDFLNDWGPRFKMLAELYGSDPREELLY

SEQ ID NO: 71905 - protein, 211 aa, Homo sapiens
MGGAVSAGEDNDELIDNLKEAQYIRTELVEQAFRAIDRADYYLEEFKENAYKDLAWKHGNIHLSAPCIYSEPCHSESGKSRLVQLPPVAVRSLQDLARIAIRGTIKKIIHQETVSKNGNGLKNTPRFKRRRVRRRRMETIVFLDKEVFASRISNPSDDNSCEDLEEERREEEEKTPPETKPDPPVNFLRQKVLSLPLPDPLKYYLLYYREK

SEQ ID NO: 71906 - protein, 37 aa, Homo sapiens
MKQALVDDTEDVSLDFGNEEELAFRKAKIRNTHSPMT

SEQ ID NO: 71907 - protein, 58 aa, Homo sapiens
MRLHRLRARLSAVACGLLLLLVRGQGEAPSEGRQGPGSDLPNAAEAEPDSAGGQAPGR

SEQ ID NO: 71908 - protein, 86 aa, Homo sapiens
MASSLNEDPEGSRITYVKGDLFACPKTDSLAHCISEDCRMGAGIAVLFKKKFGGVQELLNQQKKSGEVAVLKRDGRYIYYLDWMWS

SEQ ID NO: 71909 - protein, 79 aa, Homo sapiens
  MOD_RES (1)..(1): Any amino acid
XLGEYVGQEGKPQKLRVSCEAPGDGDPFQGLLSGVAQMKDMVMMKMMQKMKITLITELTSMDHLQNGQKHRLNNSLHDI

SEQ ID NO: 71910 - protein, 95 aa, Homo sapiens
MLWFQGAIPAAIATAKRSGAVFVVFVAGDDEQSTQMAASWEDDKVTEASSNSFVAIKIDTKSEACLQFSQICILSVKNGLYIYIYLPSFWLIYEI

SEQ ID NO: 71911 - protein, 127 aa, Homo sapiens
MAQGTLIRVTPEQPTHAVCVLGTLTQLDICSSAPEDCTSFSINASPGVVVDIAHGPPAKKKSTGSSTWPLDPGVEVTLTMKVASGSTGDQKVQISYYGPKTPPVKALLYLTGVDGVSPCHPGWSAMA

SEQ ID NO: 71912 - protein, 118 aa, Homo sapiens
EEEQNFKKMIESEYSMRLRLLNEECEQNLQRQQECISDLNLRETLLNQAIKLATELEEMFQEMLQRLGRVGRENMEKLKESEARASEQVRSLLKLIVELEKKCGEGTLALLKEQVTAA

SEQ ID NO: 71913 - protein, 101 aa, Homo sapiens
MDVHDLFRRLGAGAKFDTRRFSADAARFQIGKRKYDFDSSEVLQGLDFFGNKKSVPGVCGASQTHQKPQNGEKKEESLTERKREQSKKKRKTMTSDKLLAE

SEQ ID NO: 71914 - protein, 49 aa, Homo sapiens
MEESEPERKRARTDEVPAGGSRSEAEDEDDEDYVPYVPLRQRRQLLPGS

SEQ ID NO: 71915 - protein, 71 aa, Homo sapiens
MVSIFNLDGMEHHVRTCIPKVELVPAGKPFYCLSSEDLRNTHCCYTDYCNRIDLRVPSGHLKEPEHPSMWG

SEQ ID NO: 71916 - protein, 109 aa, Homo sapiens
MSWSPSLTTQTCGAWEMKERLGTGGFGNVIRWHNQDAALRGHCRRLVCTLEVLHYRGPAHIAGPTNVQGYSHGSSFLCREKSAWSTVCHTRDWTVSNSNLSGQSPSSAW

SEQ ID NO: 71917 - protein, 87 aa, Homo sapiens
MECPVMETGSLFTSGIKRHLKDKRISKTTKLNVSLASKIKTKILNNSSIFKISLKHNNRALAQALSREKENSRRITTEKMLLQKEVE

SEQ ID NO: 71918 - protein, 448 aa, Homo sapiens
MPAVAEALGQEGPPDLSRSAFLATVLTSLSAAFSSMPSSAYRSIYPAVLGATMESRCYGCAVKFTLFKKEYGCKNCGRAFCSGCLSFSAAVPRTGNTQQKVCKQCHEVLTRGSSANASKWSPPQNYKKRVAALEAKQKPSTSQSQGLTRQDQMIAERLARLRQENKPKLVPSQAEIEARLAALKDERQGSIPSTQEMEARLAALQGRVLPSQTPQPAHHTPDTRTQAQQTQDLLTQLAAEVAIDESWKGGGPAASLQNDLNQGGPGSTNSKRQANWSLEEEKSRLLAEAALELREENTRQERILALAKRLAMLRGQDPERVTLQDYRLPDSDDDEDEETAIQRVLQQLTEEASLDEASGFNIPAEQASRPWTQPRGAEPEAQDVDPRPEAEEEELPWCCICNEDATLRCAGCDGDLFCARCFREGHDAFELKEHQTSAYSPPRAGQEH

SEQ ID NO: 71919 - protein, 43 aa, Homo sapiens
MVSKRIAQETFDAAVRENIEEFAMGPEEAVKEAVEQFESQDAQ

SEQ ID NO: 71920 - protein, 482 aa, Homo sapiens
MAFMEKPPAGKVLLDDTVPLTAAIEASQSLQSHTIAGLSLPLPPKKLIGNMDREFIAERQKGLQNYLNVITTNHILSNCELVKKFLDPNNYSANYTEIALQQVSMFFRSEPKWEVVEPLKDIGWRIRKKYFLMKIKNQPKERLVLSWADLGPDKYLSDKDFQCLIKLLPSCLHPYIYRVTFATANESSALLIRMFNEKGTLKDLIYKAKPKDPFLKKYCNPKKIQGLELQQIKTYGRQILEVLKFLHDKGFPYGHLHASNVMLDGDTCRLLDLENSLLGLPSFYRSYFSQFRKINTLESVDVHCFGHLLYEMTYGRPPDSVPVDSFPPAPSMAVVAVLESTLSCEACKNGMPTISRLLQMPLFSDVLLTTSEKPQFKIPTKLKEALRIAKECIEKRLIEEQKQIHQHRRLTRAQSHHGSEEERKKRKILARKKSKRSALENSEEHSAKYSNSNNSAGSGASSPLTSPSSPTPPSTSVEHAPF

SEQ ID NO: 71921 - protein, 111 aa, Homo sapiens
MDHPSMRILSSCCKMSDILAEGITIVEDINKRREPIPSLEAIYLLSPTEKSVQALIKDFQGTPTFTYKAAHIFFTDTCPEPLFSELGRSRLAKVVKTLKEIHLAFLPYEAQ

SEQ ID NO: 71922 - protein, 170 aa, Homo sapiens
  MOD_RES (1)..(1): Any amino acid
XIAVYTFGTCIAFLIIIGDQQDKIIAVMAKEPEGASGPWYTDRKFTISLTAFLFILPLSIPREIGFQKYASFLSVVGTWYVTAIVIIKYIWPDKEMTPGNILTRPASWMAVFNAMPTICFGFQCHVSSVPVFNSMQQPEVKTWGGVVTAAMVIALAVYMGTAETRSHYVA

SEQ ID NO: 71923 - protein, 67 aa, Homo sapiens
ITRNAGIKQDNDLDKLLLCLKISDKQTEWIENCQRQFCKMMKAKPDIISGEVLPIFRFFLCEIPSRV

SEQ ID NO: 71924 - protein, 243 aa, Homo sapiens
MKVSTLRESSAMASPLPREMEEELVPTGSEPGDTRAKPPVKPKPRALPAKPALPAKPSLLVPVGPRPPRGPLAELPSARKMNMLAGPQPYGGSKRPLPFAPRPAVEASTGGEATQETGKEEAGKEEPPPLTPPARCAAPGGVRKAPAPFRPASERFAATTVEEILAKMEQPRKEVLASPDRLWGSRLTFNHDGSSRYGPRTYGTTTAPRDEDGSTLFRGWSQEGPVKSPAECREEHSKTPEER

SEQ ID NO: 71925 - protein, 1503 aa, Homo sapiens
MWPSQLLIFMMLLAPIIHAFSRAPIPMAVVRRELSCESYPIELRCPGTDVIMIESANYGRTDDKICDSDPAQMENIRCYLPDAYKIMSQRCNNRTQCAVVAGPDVFPDPCPGTYKYLEVQYECVPYKVEQKVFLCPGLLKGVYQSEHLFESDHQSGAWCKDPLQASDKIYYMPWTPYRTDTLTEYSSKDDFIAGRPTTTYKLPHRVDGTGFVVYDGALFFNKERTRNIVKFDLRTRIKSGEAIIANANYHDTSPYRWGGKSDIDLAVDENGLWVIYATEQNNGKIVISQLNPYTLRIEGTWDTAYDKRSASNAFMICGILYVVKSVYEDDDNEATGNKIDYIYNTDQSKDSLVDVPFPNSYQYIAAVDYNPRDNLLYVWNNYHVVKYSLDFGPLDSRSGQAHHGQVSYISPPIHLDSELERPSVKDISTTGPLGMGSTTTSTTLRTTTLSPGRSTTPSVSGRRNRSTSTPSPAVEVLDDMTTHLPSASSQIPALEESCEAVEAREIMWFKTRQGQIAKQPCPAGTIGVSTYLCLAPDGIWDPQGPDLSNCSSPWVNHITQKLKSGETAANIARELAEQTRNHLNAGDITYSVRAMDQLVGLLDVQLRNLTPGGKDSAARSLNKLQKRERSCRAYVQAMVETVNNLLQPQALNAWRDLTTSDQLRAATMLLHTVEESAFVLADNLLKTDIVRENTDNIKLEVARLSTEGNLEDLKFPENMGHGSTIQLSANTLKQNGRNGEIRVAFVLYNNLGPYLSTENASMKLGTEALSTNHSVIVNSPVITAAINKEFSNKVYLADPVVFTVKHIKQSEENFNPNCSFWSYSKRTMTGYWSTQGCRLLTTNKTHTTCSCNHLTNFAVLMAHVEVKHSDAVHDLLLDVITWVGILLSLVCLLICIFTFCFFRGLQSDRNTIHKNLCISLFVAELLFLIGINRTDQPIACAVFAALLHFFFLAAFTWMFLEGVQLYIMLVEVFESEHSRRKYFYLVGYGMPALIVAVSAAVDYRSYGTDKVCWLRLDTYFIWSFIGPATLIIMLNVIFLGIALYKMFHHTAILKPESGCLDNIKSWVIGAIALLCLLGLTWAFGLMYINESTVIMAYLFTIFNSLQGMFIFIFHCVLQKKVRKEYGKCLRTHCCSGKSTESSIGSGKTSGSRTPGRYSTGSQSRIRRMWNDTVRKQSESSFITGDINSSASLNRGAMANHLISNALLRPHGTNNPYNTLLGEPAVCNNPSVSMYNAQEGLLNNARDTSVMDTLPLNGNHGNSYSIASGEYLSNCVQIIDRGYNHNETALEKKILKELTSNYIPSYLNNHERSSEQNRNLMNKLVNNLGSGREDDAIVLDDATSFNHEESLGLELIHEESDAPLLPPRVYSTENHQPHHYTRRRIPQDHSESFFPLLTNEHTEDLQSPHRDSLYTSMPTLAGVAATESVTTSTQTEPPPAKCGDAEDVYYKSMPNLGSRNHVHQLHTYYQLGRGSSDGFIVPPNKDGTPPEGSSKGPAHLVTSL

SEQ ID NO: 71926 - protein, 1056 aa, Homo sapiens
MSSQQFPRLGAPSTGLSQAPSQIANSGSAGLINPAATVNDESGRDSEVSAREHMSSSSSLQSREEKQEPVVVRPYPQVQMLSTHHAVASATPVAVTAPPAHLTPAVPLSFSEGLMKPPPKPTMPSRPIAPAPPSTLSLPPKVPGQVTVTMESSIPQASAIPVATISGQQGHPSNLHHIMTTNVQMSIIRSNAPGPPLHIGASHLPRGAAAAAVMSSSKVTTVLRPTSQLPNAATAQPAVQHIIHQPIQSRPPVTTSNAIPPAVVATVSATRAQSPVITTTAAHATDSALSRPTLSIQHPPSAAISIQRPAQSRDVTTRITLPSHPALGTPKQQLHTMAQKTIFSTGTPVAAATVAPILATNTIPSATTAGSVSHTQAPTSTIVTMTVPSHSSHATAVTTSNIPVAKVVPQQITHTSPRIQPDYPAERSSLIPISGHRASPNPVAMETRSDNRPSVPVQFQYFLPTYPPSAYPLAAHTYTPITSSVSTIRQYPVSAQAPNSAITAQTGVGVASTVHLNPMQLMTVDASHARHIQGIQPAPISTQGIQPAPIGTPGIQPAPLGTQGIHSATPINTQGLQPAPMGTQQPQPEGKTSVVLADGATIVANPISNPFSAAPAATTVVQTHSQSASTNAPAQGSSPRPSILRKKPATDGMAVRKTLIPPQPPDVASPRVESSMRSTSGSPRPAGAKPKSEIHVSMATPVTVSMETVSNQNNDQPTIAVPPTAQQPPPTIPTMIAAASPPSQPAVALSTIPGAVPITPPITTIAAAPPPSVTVGGSLSSVLGPPVPEIKVKEEVEPMDIMRPVSAVPPLATNTVSPSLALLANNLSMPTSDLPPGASPRKKPRKQQHVISTEEGDMMETNSTDDEKSTAKSLLVKAEKRKSPPKEYIDEEGVRYVPVRPRPPITLLRHYRNPWKAAYHHFQRYSDVRVKEEKKAMLQEIANQKGVSCRAQGWKVHLCAAQLLQLTNLEHDVYERLTNLQEGIIPKKKAATDDDLHRINELIQGNMQRCKLVMDQISEARDSMLKVLDHKDRVLKLLNKNGTVKKVSKLKRKEKV

SEQ ID NO: 71927 - protein, 7 aa, Homo sapiens
MNQKLLK

SEQ ID NO: 71928 - protein, 458 aa, Homo sapiens
  MOD_RES (1)..(1): Any amino acid
XSSPDVKFVCQSSSIDFLASQGFDFNKVFRNGIPYLNQEEERQLREQYDEKRSQANGAGALSYVSPNTSKCPVTIPEDQKKFIDQVVEKIEDLLQSEENKNLDLEPCTGFQRKLIYQTLSWKYPKGIHVETLETEKKERYIVISKVDEEERKRREQQKHAKEQEELNDAVGFSRVIHAIANSGKLVIGHNMLLDVMHTVHQFYCPLPALSLNFPRCSFCLLHEVFIACYLAQEDLSEFKEMTTCVFPRLLDTKLMASTQPFKDIINNTSLAELEKRLKETPFNPPKVESAEGFPSYDTASEQLHEAGYDAYITGLCFISMANYLGSFLSPPKIHVSARSKLIEPFFNKLFLMRVMDIPYLNLEGPDLQPKRDHVLHVTFPKEWKTSDLYQLFSAFGNIQISWIDDTSAFVSLSQPEQVKIDGVSLCWTGCSQTPSDLPASASQSAGITGMRHHAWPAF

SEQ ID NO: 71929 - protein, 78 aa, Homo sapiens
  MOD_RES (1)..(1): Any amino acid
XLASRLSIPTYGLQCTRGRCSPRAPTAWPATPTGPAWPLKCAPSCRPSRAQPPPTTASSCSTARPPTYWPTPRATGQS

SEQ ID NO: 71930 - protein, 69 aa, Homo sapiens
MLVLLAGIFVVHIATVIMLFVSTIANVWLVSNTVDASVGLWKNCTNISCSDSLSYASEDELCHYDFIIT

SEQ ID NO: 71931 - protein, 84 aa, Homo sapiens
MVNRAKRKAGVDPLVPLRSLGLSLSGGDQEDAGRILIEELRDRFPYLSESYLITTDAAGSIATATPDGGVVLISGTGSNCRLIN

SEQ ID NO: 71932 - protein, 314 aa, Homo sapiens
MPRVKAAQAGRQSSAKRHLAEQFAVGEIITDMAKKEWKVGLPIGQGGFGCIYLVQKWIRTRKLKYLGVPKYWGSGLHDKNGKSYRFMIMDRFGSDLQKIYEANAKRFSRKTVLQLSLRILDILEYIHEHEYVHGDIKASNLLLNYKNPDQVYLVDYGLAYRYCPEGVHKEYKEDPKRCHDGTIEFTSIDAHNGVAPSRRGDLEILGYCMIQWLTGHLPWEDNLKDPKYVRDSKIRYRENIASLMDKCFPEKNKPGEIAKYMETVKLLDYTEKPLYENLRDILLQGLKAIGSKDDGKLDLSVVENGGLKAKTITK

SEQ ID NO: 71933 - protein, 149 aa, Homo sapiens
MGAAAAEADRTLFVGNLETKVTEELLFELFHQAGPVIKVKIPKDKDGKPKQFAFVNFKHEVSVPYAMNLLNGIKLYGRPIKIQFRSGSSHAPQDVSLSYPQHHVGNSSPTSTSPSSRYERTMDNMTSSAQIIQRSFSSPENFQRQAVVG

SEQ ID NO: 71934 - protein, 429 aa, Homo sapiens
  MOD_RES (1)..(1): Any amino acid
XAPMEVAVCTDSAAPMWSCIVWELHSGANLLTYRGGQAGPRGLALLNGEYLLAAQLGKNYISAWELQRKDQLQQKIMCPGPVTCLTASPNGLYVLAGVAESIHLWEVSTGNLLVILSRHYQDVSCLQFTGDSSHFISGGKDCLVLVWSLCSVLQADPSRIPAPRHVWSHHALPITDLHCGFGGPLARVATSSLDQTVKLWEVSSGELLLSVLFDVSIMAVTMDLAEHHMFCGGSEGSIFQVDLFTWPGQRERSFHPEQDAGKVFKGNQVTCLSVSTDGSVLLSGSHDETVRLWDVQSKQCIRTVALKGPVTNAAILLAPVSMLSSDFRPSLPLPHFNKHLLGAEHGDEPRHGGLTLRLGLHQQGSEPSYLDRTEQLQAVLCSTMEKSVLGGQDQLRVRVTELEDEVRNLRKINRDLFDFSTRFITRPAK

SEQ ID NO: 71935 - protein, 37 aa, Homo sapiens
  MOD_RES (1)..(1): Any amino acid
XKYAVPALEAHCVEFLTKHLRADNAFMLLTQIHSVQF

SEQ ID NO: 71936 - protein, 316 aa, Homo sapiens
  MOD_RES (1)..(1): Any amino acid
XEQVSNGPVESVTLENSPLVWKEGRQLLRQYLEEVGYTDTILDMRSKRVRSLLGRSLELNGAVEPSEGAPRAPPGPAGLSGGESLLVKQIEEQIKRNAAGKDGKERLGGSVLGQIPFLQNCEDEDSDEDDELDSVQHKKQRVKLPSKALVPEMEDEDEEDDSEDAINEFDFLGSGEDGEGAPDPRRCTVDGSPHELESRRVKLQGILADLRDVDGLPPKVTGPPPGTPQPRPHEAVILHLVLSPSLSLALYLFLCLSLSFSLSLALSAPPSPPPTRFLWLLLRRLHHGHYRGRGGEPGGLGRSHRHQRQRPQLRSV

SEQ ID NO: 71937 - protein, 317 aa, Homo sapiens
LTDRQTDTAPSPSYHLLPGRRRTVDAAASRGQGPEPAPGGGVEGVGARGVALKLFVQLLGCSRFGGAVVRAGEAEPSGAARSASSGREEPQPEEGEEEEEKEEERGPQWRLGARKPGSWTGEAAVCADSAPAARAPQALARASGRGGRVARRGAEESGPPHSPSRRGSASRAGPGRASETMNFLLSWVHWSLALLLYLHHAKWSQAAPMAEGGGQNHHEVVKFMDVYQRSYCHPIETLVDIFQEYPDEIEYIFKPSCVPLMRCGGCCNDEGLECVPTEESNITMQIMRIKPHQGQHIGEMSFLQHNKCECRCDKPRR

SEQ ID NO: 71938 - protein, 151 aa, Homo sapiens
  MOD_RES (1)..(1): Any amino acid
XEGASWPAPFEMPSSVSEDPSASSQGSEPLEPSYIVGHVASAPKEQNLITLFNDGEHSQGLKNDFVRNILWTFEDIHMLVGSNMPIFGGGRYPAVSLRLRDNNKPINVLTGIDYWLDNLICNVPELVMCFHVNGIVQLPHMLLFLFDGKRD

SEQ ID NO: 71939 - protein, 137 aa, Homo sapiens
MKTKLNIYNMQFLLFVFLVWDPARLVLANIQEDEAKNNITIFTRILDRLLDGYDNRLRPGLGDSITEVFTNIYVTSFGPVSDTDMEYTIDVFFRQKWKDERLKFKGPMNILRLNNLMASKIWTPDTFFHNGKKSVAH

SEQ ID NO: 71940 - protein, 245 aa, Homo sapiens
MSSMPATKFSFPFHIFLSCHLSARRIEGWNSNEAPPPRPTLAEGDVAALNRRIQLVEEELDRAQERLATALQKLEEAEKAADESERGMKVIENRAMKDEEKMEIQEMQLKEAKHIAEEADRKYEEVARKLVILEGELERAEERAEVSELKCGDLEEELKNVTNNLKSLEAASEKYSEKEDKYEEEIKLLSDKLKEAETRAEFAERTVAKLEKTIDDLEEKLAQAKEENVGLHQTLDQTLNELNCI

SEQ ID NO: 71941 - protein, 112 aa, Homo sapiens
MISFCPDCGKSIQAAFKFCPYCGNSLPVEEHVGSQTFVNPHVSSFQGSKRGLNSSFETSPKKVKWSSTVTSPRLSLFSDGDSSESEDTLSSSERSKGSGSRPPTPKSSPQKT

SEQ ID NO: 71942 - protein, 240 aa, Homo sapiens
  MOD_RES (1)..(1): Any amino acid
XTQACGYTEAETIVNVLDFKKDVGLWHGILTSVMNMMHVISIPYSLMKVNPLSWIQKVCQYKAKVACVKSRDMHWALVAHRDQRDINLSSLRMLIVADGANPWSISSCDAFLNVFQSKGLRQEVICPCASSPEALTVAIRRPTDDSNQPPGRGVLSMHGLTYGVIRVDSEEKLSVLTVQDVGLVMPGAIMCSVKPDGVPQLCRTDEIGELCVCAVATGTSYYGLSGMTKNTFEHTSNKGK

SEQ ID NO: 71943 - protein, 235 aa, Homo sapiens
MSYFGEHFWGEKNHGFEVLYHSVKQGPISTKELADFIRERATIEETYSKAMAKLSKLASNGTPMGTFAPLWEVFRVSSDKLALCHLELTRKLQDLIKDVLRYGEEQLKTHKKVLSGVSQLLPKSRENYLNRCMDQERLRRESTSQKEMDKAETKTKKAAESLRRSVEKYNSARADFEQKMLDSALRFQAMEETHLRHMKALLGSYAHSVEDTHVQIGQVHEEFKQNIENVSVEML

SEQ ID NO: 71944 - protein, 911 aa, Homo sapiens
  MOD_RES (1)..(1): Any amino acid
XDGPAREALQSLSQRLRVQEQEMELVKAALAEALRLLRLQVPPSSLQGSGTPAPPGDSSLAAPPGLPPTCTPSLVSRGTQTETEVELKSSPGPPGLSNGPPAPQGASEEPSGTQSEGGGSSSSGAGSPGPPGILRPLQPPQRADTPRRNSSSSSSPSERPRQKLSRKAISSANLLVRSGSTESRGGKDPLSSPGGPGSRRSNYNLEGISVKMFLRGRPITMYIPSGIRSLEELPSGPPPETLSLDWVYGYRGRDSRSNLFVLRSGEVVYFIACVVVLYRPGGGPGGPGGGGQRHYRGHTDCVRCLAVHPDGVRVASGQTAGVDKDGKPLQPVVHIWDSETLLKLQEIGLGAFERGVGALAFSAADQGAFLCVVDDSNEHMLSVWDCSRGMKLAEIKSTNDSVLAVGFNPRDSSCIVTSGKSHVHFWNWSGGVGVPGNGTLTRKQGVFGKYKKPKFIPCFVFLPDGDILTGDSEGNILTWGRSPSDSKTPGRGGAKETYGIVAQAHAHEGSIFALCLRRDGTVLSGGGRDRRLVQWGPGLVALQEAEIPEHFGAVRAIAEGLGSELLVGTTKNALLRGDLAQGFSPVIQGHTDELWGLCTHPSQNRFLTCGHDRQLCLWDGESHALAWSIDLKETGLCADFHPSGAVVAVGLNTGRWLVLDTETREIVSDVIDGNEQLSVVRYSPDGLYLAIGSHDNVIYIYSVSSDGAKSSRFGRCMGHSSFITHLDWSKDGNFIMSNSGDYEILYWDVAGGCKQLKNRYESRDREWATYTCVLGFHVYVPVRSCQGAEPHVRGPRQPRDQRPIHARRLAPRLAGRQGRQHLPVASAGRWGRGAGARHALSNPLPVPRLLPRRLIAAWRDRLARRRGPAPPCPSLAQSPTTRGRLFPGLTSRHSRSRIFLEGANGAPAHTV

SEQ ID NO: 71945 - protein, 53 aa, Homo sapiens
MSYTGFVQGSETTLQSTYSDTSAQPTCDYGYGTWNSGTNRGMTLMSPATRGPS

SEQ ID NO: 71946 - protein, 619 aa, Homo sapiens
  MOD_RES (1)..(1): Any amino acid
XAFCGSENHSAAYRVDQGVLNNGCFVDALNVVPHVFLLFITFPILFIGWGSQSSKVHIHHSTWLHFPGHNLRWILTFMLLFVLVCEIAEGILSDGVTESHHLHLYMPAGMAFMAAVTSVVYYHNIETSNFPKLLIGIQLLLSTSVSDNRLSTQHCRTGLCKKPLGLVLGALLIPCVTLHKTSKLSEPRIPHLGRKTLLVYWTLAFITKTIKFVKFLDHAIGFSQLRFCLTGLLVILYGMLLLVEVNVIRVRRYIFFKTPREVKPPEDLQDLGVRFLQPFVNLLSKGTYWWMNAFIKTAHKKPIDLRAIGKLPIAMRALTNYQRLCEAFDAQVRKDIQGTQGARAIWQALSHAFGRRLVLSSTFRILADLLGFAGPLCIFGIVDHLGKENDVFQPKTQFLGVYFVSSQEFLANAYVLAVLLFLALLLQRTFLQASYYVAIETGINLRGAIQTKIYNKIMHLSTSNLSMGEMTAGQICNLVAIDTNQLMWFFFLCPNLWAMPVQIIVGVILLYYILGVSALIGAAVIILLAPVQYFVATKLSQAQRSTLEYSNERLKQTNEMLRGIKLLKLYAWENIFRTRVETTRRKEMTSLRAFAIYTSISSWPHWTALPPSHPGHLHV

SEQ ID NO: 71947 - protein, 39 aa, Homo sapiens
LTIISGCLFLAADIFAIASIANPDWINTGESAGSLCMLN

SEQ ID NO: 71948 - protein, 150 aa, Homo sapiens
MPKAKGKTRRQKFGYSVNRKRLNRNARRKAAPRIECSHIRHAWDHAKSVRQNLAEMGLAVDPNRAVPLRKRKVKAMEVDIEERPKELVRKPYVLNDLEAEASLPEKKGNTLSRDLIDYVRYMVENHGEDYKVSGSGPVGWLGRRPGPFAA

SEQ ID NO: 71949 - protein, 79 aa, Homo sapiens
MAQKHPGERGLYGAHHSGGASLRTLGPSVDPEIPSFSGLRDSAGTAPNGTRCLTEHSGPKHTQHPNPAHWLDPSHGPPG

SEQ ID NO: 71950 - protein, 109 aa, Homo sapiens
MIRAAPPPLFLLLLLLLLLVSWASRGEAAPDQDEIQRLPGLAKQPSFRQYSGYLKGSGSKHLHYWFVESQKDPENSPVVLWLNGGPGCSSLDGLLTEHGPFLVQPDGVT

SEQ ID NO: 71951 - protein, 34 aa, Homo sapiens
  MOD_RES (1)..(1): Any amino acid
XELPLDEQWREAFQTAYLSLGGLGERVLGDHGNG

SEQ ID NO: 71952 - protein, 1125 aa, Homo sapiens
  MOD_RES (1)..(1): Any amino acid
XQSPVGRHVVGVKGVGGMSVACVLKRKAVLWQDSFSPHLKHHPQEPANPNMPVVLTSGTGSQAQPQPAANQALAAGTHSSPVPGSIGVAGRSQDDAMVDYFFQRQHGEQLGGGGSGGGGYNNSKHRWPTGDNIHAEHQVRSMDELNHDFQALALEGRAMGEQLLPGKKFWETDESSKDGPKGIFLGDQWRDSAWGTSDHSVSQPIMVQRRPGQSFHVNSEVNSVLSPRSESGGLGVSMVEYVLSSSPGDSCLRKGGFGPRDADSDENDKGEKKNKGTFDGDKLGDLKEEGDVMDKTNGLPVQNGIDADVKDFSRTPGNCQNSANEVDLLGPNQNGSEGLAQLTSTNGAKPVEDFSNMESQSVPLDPMEHVGMEPLQFDYSGTQVPVDSAAATVGLFDYNSQQQLFQRPNALAVQQLTAAQQQQYALAAAHQPHIAGLAPAAFVPNPYIISAAPPGTDPYTAGLAAAATLGPAVVPHQYYGVTPWGVYPASLFQQQAAAAAAATNSANQQTTPQAQQGQQQVLRGGASQRPLTPNQNQQGQQTDPLVAAAAVNSALAFGQGLAAGMPGYPVLAPAAYYDQTGALVVNAGARNGLGAPVRLVAPAPVIISSSAAQAAVAAAAASANGAAGGLAGTTNGPFRPLGTQQPQPQPQQQPNNNLASSSFYGNNSLNSNSQSSSLFSQGSAQPANTSLGFGSSSSLGATLGSALGGFGTAGGLTNGSGRYISAAPGAEAKYRSASSASSLFSPSSTLFSSSRLRYGMSDVMPSGRSRLLEDFRNNRYPNLQLREIAGHIMEFSQDQHGSRFIQLKLERATPAERQLVFNEILQAAYQLMVDVFGNYVIQKFFEFGSLEQKLALAERIRGHVLSLALQMYGCRVIQKALEFIPSDQQNEMVRELDGHVLKCVKDQNGNHVVQKCIECVQPQSLQFIIDAFKGQVFALSTHPYGCRVIQRILEHCLPDQTLPILEELHQHTEQLVQDQYGNYVIQHVLEHGRPEDKSKIVAEIRGNVLVLSQHKFASNVVEKCVTHASRTERAVLIDEVCTMNDGPHSALYTMMKDQYANYVVQKMIDVAEPGQRKIVMHKIRPHIATLRKYTYGKHILAKLEKYYMKNGVDLGPICGPPNGII

SEQ ID NO: 71953 - protein, 71 aa, Homo sapiens
MTTHVTLEDALSNVDLLEELPLPDQQPCIEPPPSSIMYQANFDTNFEDRNAFVTGIARYIEQATVHSSMIF

SEQ ID NO: 71954 - protein, 86 aa, Homo sapiens
  MOD_RES (1)..(1): Any amino acid
XPYKKDENKLSSANGHEERSKKRKKSKSRSRSHERKRSKSKERKRSRDRERKKSKSRERKRSRSKERRRSRSRSRDRRFRGRYRSP

SEQ ID NO: 71955 - protein, 412 aa, Homo sapiens
MIPDLSEYKWIVPDIVWEIDEYIDFEKIRKALPSSEDLVKLAPDFDKIVESLSLLKDFFTSGSPEETAFRATDRGSESDKHFRKVSDKEKIDQLQEELLHTQLKYQRILERLEKENKELRKLVLQKDDKGIHHRKLKKSLIDMYSEVLDVLSDYDASYNTQDHLPRVVVVGDQSAGKTSVLEMIAQARIFPRGSGEMMTRSPVKVTLSEGPHHVALFKDSSREFDLTKEEDLAALRHEIELRMRKNVKEGCTVSPETISLNVKGPGLQRMVLVDLPGVINTVTSGMAPDTKETIFSISKAYMQNPNAIILCIQDGSVDAERSIVTDLVSQMDPHGRRTIFVLTKVDLAEKNVASPSRIQQIIEGKLFPMKALGYFAVVTGKGNSSESIEAIREYEEEFFQNSKLLKHGGSHL

SEQ ID NO: 71956 - protein, 423 aa, Homo sapiens
MADDAGLETPLCSEQFGSGEARGCRAAADGSLQWEGFPDSVSPDYLPYQLWDSVQAFASSLSGSLATQAVLLGIGVGNAKATVSAATATWLVKDSTGMLGRIVFAWWKGSKLDCNAKQWRLFADILNDVAMFLEIMAPVYPICFTMTVSTSNLAKCIVSVAGGATRAALTVHQARRNNMADVSAKDSSQETLVNLAGLLVSLLMLPLVSGCPGFSLGCFFFLTALHIYANYRAVRALVMETLNEGRLRLVLKHYLQRGEVLDPTAANRMEPLWTGFWPAPSLSLGVPLHRLVSSVFELQQLVEGHQESYLLCWDQSQNQVQVVLNQKAGPKTILRAATHGLMLGALQGDGPLPAELEELRNRVRAGPKKESWVVVKETHEVLDMLFPKFLKGLQDAGWKTEKHQLEVDEWRATWLLSPEKKVL

SEQ ID NO: 71957 - protein, 1207 aa, Homo sapiens
MNTKDTTEVAENSHHLKIFLPKKLLECLPRCPLLPPERLRWNTNEEIASYLITFEKHDEWLSCAPKTRPQNGSIILYNRKKVKYRKDGYLWKKRKDGKTTREDHMKLKVQGMEPVSWQCLYGCYVHSSIVPTFHRRCYWLLQNPDIVLVHYLNVPALEDCGKGCSPIFCSISSDRREWLKWSREELLGQLKPMFHGIKWSCGNGTEEFSVEHLVQQILDTHPTKPAPRTHACLCSGGLGSGSLTHKCSSTKHRIISPKVEPRALTLTSIPHAHPPEPPPLIAPLPPELPKAHTSPSSSSSSSSSGFAEPLEIRPSPPTSRGGSSRGGTAILLLTGLEQRAGGLTPTRHLAPQADPRPSMSLAVVVGTEPSAPPAPPSPAFDPDRFLNSPQRGQTYGGGQGVSPDFPEAEAAHTPCSALEPAAALEPQAAARGPPPQSVAGGRRGNCFFIQDDDSGEELKGHGAAPPIPSPPPSPPPSPAPLEPSSRVGRGEALFGGPVGASELEPFSLSSFPDLMGELISDEAPSIPAPTPQLSPALSTITDFSPEWSYPEGGVKVLITGPWTEAAEHYSCVFDHIAVPASLVQPGVLRCYCPAHEVGLVSLQVAGREGPLSASVLFEYRARRFLSLPSTQLDWLSLDDNQFRMSILERLEQMEKRMAEIAAAGQVPCQGPDAPPVQDEGQGPGFEARVVVLVESMIPRSTWKGPERLAHGSPFRGMSLLHLAAAQGYARLIETLSQWRSVETGSLDLEQEVDPLNVDHFSCTPLMWACALGHLEAAVLLFRWNRQALSIPDSLGRLPLSVAHSRGHVRLARCLEELQRQEPSVEPPFALSPPSSSPDTGLSSVSSPSELSDGTFSVTSAYSSAPDGSPPPAPLPASEMTMEDMAPGQLSSGVPEAPLLLMDYEATNSKGPLSSLPALPPASDDGAAPEDADSPQAVDVIPVDMISLAKQIIEATPERIKREDFVGLPEAGASMRERTGAVGLSETMSWLASYLENVDHFPSSTPPSELPFERGRLAVPSAPSWAEFLSASTSGKMESDFALLTLSDHEQRELYEAARVIQTAFRKYKGRRLKEQQEVAAAVIQRCYRKYKQLTWIALKFALYKKMTQAAILIQSKFRSYYEQKRFQQSRRAAVLIQQHYRSYRRRPGPPHRTSATLPARNKGSFLTKKQDQAARKIMRFLRRCRHRMRELKQNQELEGLPQPGLAT

SEQ ID NO: 71958 - protein, 566 aa, Homo sapiens
AYMTKCGHSFCYKCIHQSLEDNNRCPKCNYVVDNIDHLYPNFLVNELILKQKQRFEEKRFKLDHSVSSTNGHRWQIFQDWLGTDQDNLDLANVNLMLELLVQKKKQLEAESHAAQLQILMEFLKVARRNKREEMSGLYSPVSEDSTVPQFEAPSPSHSSIIDSTEYSQPPGFSGSSQTKKQPWYNSTLASRRKRLTAHFEDLEQCYFSTRMSRISDDSRTASQLDEFQECLSKFTRYNSVRPLATLSYASDLYNGSSIVSSIEFDRDCDYFAIAGVTKKIKVYEYDTVIQDAVDIHYPENEMTCNSKISCISWSSYHKNLLASSDYEGTVILWDGFTGQRSKVYQEHEKRCWSVDFNLMDPKLLASGSDDAKVKLWSTNLDNSVASIEAKANVCCVKFSPSSRYHLAFGCADHCVHYYDLRNTKQPIMVFKGHRKAVSYAKFVSGEEIVSASTDSQLKLWNVGKPYCLRSFKGHINEKNFVGLASNGDYIACGSENNSLYLYYKGLSKTLLTFKFDTVKSVLDKDRKEDDTNEFVSAVCWRALPDGESNVLIAANSQGTIKVLELV

SEQ ID NO: 71959 - protein, 144 aa, Homo sapiens
MRRQPAASLDPLAKEPGPPGSRDDRLEDALLSLGSVIDISGLQRAVKEALSAVLPRVETVYTYLLDGESQLVCEDPPHELPQEGKVREAIISQKRLGCNGLGFSDLPGKPLARLVAPLAPDTQVLVMPLADKEAGAVAAVILVH

SEQ ID NO: 71960 - protein, 182 aa, Homo sapiens
MEPLKVEKFATAKRGNGLRAVTPLRPGELLFRSDPLAYTVCKGSRGVVCDRCLLGKEKLMRCSQCRVAKYCSAKCQKKAWPDHKRECKCLKSCKPRYPPDSVRLLGRVVFKLMDGAPSESEKLYSFYDLESNINKLTEDKKEGLRQLVMTFQHFMREEIQDASQLPPAFDLFEAFAKPIGMK

SEQ ID NO: 71961 - protein, 128 aa, Homo sapiens
MAKRLQAELSCPVCLDFFSCSISLSCTHVFCFDCIQRYILENHDFRAMCPLCRDVVKVPALEEWQVSVLTLMTKQHNSRLEQSLHVREELRHFREDVTLDAATASSLLVFSNDLRSAQCKKIHHDLTK

SEQ ID NO: 71962 - protein, 81 aa, Homo sapiens
MERASCLLLLLLPLVHVSATTPEPCELDDEDFRCVCNFSEPQPDWSEAFQCVSAVEVEIHAGGLNLEPFLKRVDADADPRQ

SEQ ID NO: 71963 - protein, 585 aa, Homo sapiens
GAPAYRVLMEQLTSVSEELDVRKEEVLILRSQLVSQKEAIQPKNTMTDSTILLEDVQKMKDKGEIAQAYIGLKETNRLLESQLQSQKRSHENEAEALRGEIQSLKEENNRQQQLLAQNLQLPPEARIEASLQHEITRLTNENLDLMEQLEKQDKTVRKLKKQLKVFAKKIGELEVGQMENISPGQIIDEPIRPVNIPRKEKDFQGMLEYKKEDEQKLVKNLILELKPRGVAVNLIPGLPAYILFMCVRHADYLNDDQKVRSLLTSTINSIKKVLKKRGDDFETVSFWLSNTCRFLHCLKQYSGEEGFMKHNTSRQNEHCLTNFDLAEYRQVLSDLAIQIYQQLVRVLENILQPMIVSGMLEHETIQGVSGVKPTGLRKRTSSIADEGTYTLDSILRQLNSFHSVMCQHGMDPELIKQVVKQMFYIIGAITLNNLLLRKDMCSWSKGMQIRYNVSQLEEWLRDKNLMNSGAKETLEPLIQAAQLLQVKKKTDDDAEAICSMCNALTTAQIVKVLNLYTPVNEFEERVSVSFIRTIQMRLRDRKDSPQLLMDAKHIFPVTFPFNPSSLALETIQIPASLGLGFISRV

SEQ ID NO: 71964 - protein, 288 aa, Homo sapiens
MAAEGWIWRWGWGRRCLGRPGLLGPGPGPTTPLFLLLLLGSVTADITDGNSEHLKREHSLIKPYQGVGSSSMPLWDFQGSTMLTSQYVRLTPDERSKEGSIWNHQPCFLKDWEMHVHFKVHGTGKKNLHGDGIALWYTRDRLVPDNFHGLAIFLDTYPNDETTERVFPYISVMVNNGSLSYDHSKDGRWTELAGCTADFRNRDHDTFLAVRYSRGRLTVMTDLEDKNEWKNCIDITGVRLPTGYYFGASAGTGDLSDNHDIISMKLFQLMVEHTPDEESIDWTKIEPS

SEQ ID NO: 71965 - protein, 56 aa, Homo sapiens
MRNWMFLQIVIVGENVSFKSQMRTENLKSEEHLKSSNIRQAEVLKADMTDSKLGPA

SEQ ID NO: 71966 - protein, 198 aa, Homo sapiens
MGTRDDEYDYLFKVVLIGDSGVGKSNLLSRFTRNEFNLESKSTIGVEFATRSIQVDGKTIKAQIWDTAGQERYRAITSAYYRGAVGALLVYDIAKHLTYENVERWLKELRDHADSNIVIMLVGNKSDLRHLRAVPTDEARAFAEAAFQTILTEIYRIVSQKQMSDRRENDMSPSNNVVPIHVPPTTENKPKVQCCQNI

SEQ ID NO: 71967 - protein, 136 aa, Homo sapiens
MSTVEEDSDTVTVETVNSVTLTQDTEGNLILHCPQNEADEIDSEDSIEPPHKRLCLSSEDDQSIDDSTPCISVVALPLSENDQSFEVTMTATTEVADDEVTEGTVTQIQILQNEQLDEISPLGNEEVSAVSQAWFT

SEQ ID NO: 71968 - protein, 135 aa, Homo sapiens
  MOD_RES (1)..(1): Any amino acid
XKPLLLYNGELTCQTQSGKVNNIYLSTHGFLSNLKDTGPDELRPMLAQNLMLKRFSDAWEMCRILNDEAAWNELARACLHHMEVEFAIRVYRRIGNVGIVMSLEQIKDTLPCLPTIITWLRTCTLHPAVLLLPWR

SEQ ID NO: 71969 - protein, 438 aa, Homo sapiens
MSLTVVSMACVGFFLLQGAWPLMGGQDKPFLSARPSTVVPRGGHVALQCHYRRGFNNFMLYKEDRSHVPIFHGRIFQESFIMGPVTPAHAGTYRCRGSRPHSLTGWSAPSNPLVIMVTGNHRKPSLLAHPGPLLKSGETVILQCWSDIMFEHFFLHREGISEDPSRLVGQIHDGVSKANFSIGPLMPVLAGTYRCYGSVPHSPYQLSAPSDPLDIVITGLYEKPSLSAQPGPTVQAGENVTLSCSSWSSYDIYHLSREGEAHERRLRAVPKVNRTFQADFPLGPATHGGTYRCFGSFRALPCVWSNSSDPLLVSVTGICRHLHVLIGTSVVIFLFILLLFFLLYRWCSNKKNAAVMDQEPAGDRTVNRQDSDEQDPQEVTYAQLDHCVFIQRKISRPSQRPKTPLTDTSVYTELPNAEPRSKVVSCPRAPQSGLEGVF

SEQ ID NO: 71970 - protein, 71 aa, Homo sapiens
MCVPGFRSSSNQDRFITNDGTVCIENVNANCHLDNVCIAANINKTLTKIRSIKEPVALLQEVYRNSVTDLS

SEQ ID NO: 71971 - protein, 144 aa, Homo sapiens
MEGGAYGAGKAGGAFDPYTLVRQPHTILRVVSWLFSIVVFGSIVNEGYLNSASEGEEFCIYNRNPNACSYGVAVGVLAFLTCLLYLALDVYFPQISSVKDRKKAVLSDIGVSGEPHPAGTPCTESTEGCPGHRRRLPPFFPCFR

SEQ ID NO: 71972 - protein, 21 aa, Homo sapiens
MSLHFLYYCSEPTLDVKIAFC

SEQ ID NO: 71973 - protein, 451 aa, Homo sapiens
MANMQGLVERLERAVSRLESLSAESHRPPGNCGEVNGVIAGVAPSVEAFDKLMDSMVAEFLKNSRILAGDVETHNDVAALLKPISEKIQEIQTFRERNRGSNMFNHLSAVSESIPALGWIAVSPKPGPYVKEMNDAATFYTNRVLKDYKHSDLRHVDWVKSYLNIWSELQAYIKEHHTTGLTWSKTGPVASTVSAFSVLSSGPGLPPPPPPLPPPGPPPLFENEGKKEESSPSRSALFAQLNQGEAITKGLRHVTDDQKTYKNPSLRAQGGQTQSPTKSHTPSPTSPKSYPSQKHAPVLELEGKKWRVEYQEDRNDLVISETELKQVAYIFKCEKSTIQIKGKVNSIIIDNCKKLGLVFDNVVGIVEVINSQDIQIQVMGRVPTISINKTEGCHIYLSEDALDCEIVSAKSSEMNILIPQDGDYREFPIPEQFKTAWDGSKLITEPAEIMA

SEQ ID NO: 71974 - protein, 100 aa, Homo sapiens
MKSRIPVVLLACGSFNPITNMHLRMFEVARDHLHQTGMYQVIQGIISPVNDTYGKKDLAASHHRVAMARLALQTSDWIRVDPWESEQAQWMETVKVLSCA

SEQ ID NO: 71975 - protein, 347 aa, Homo sapiens
MRECGGGPGAGKRLCAICGDRSSGKHYGVYSCEGCKGFFKRTIRKDLTYSCRDNKDCTVDKRQRNRCQYCRYQKCLATGMKREAVQEERQRGKDKDGDGEGAGGAPEEMPVDRILEAELAVEQKSDQGVEGPGGTGGSGSSPNDPVTNICQAADKQLFTLVEWAKRIPHFSSLPLDDQVILLRAGWNELLIASFSHRSIDVRDGILLATGLHVHRNSAHSAGVGAIFDRSLSRVLTELVSKMRDMRMDKTELGCLRAIILFNPDAKGLSNPSEVEVLREKVYASLETYCKQKYPEQQGRFAKLLLRLPALRSIGLKCLEHLFFFKLIGDTPIDTFLMEMLEAPHQLA

SEQ ID NO: 71976 - protein, 650 aa, Homo sapiens
MFRQFYLWTCLASGIILGSLFEICLGQYDDDCKLARGGPPATIVAIDEESRNGTILVDNMLIKGTAGGPDPTIELSLKDNVDYWVLMDPVKQMLFLNSTGRVLDRDPPMNIHSIVVQVQCINKKVGTIIYHEVRIVVRDRNDNSPTFKHESYYATVNELTPVGTTIFTGFSGDNGATDIDDGPNGQIEYVIQYNPDDPTSNDTFEIPLMLTGNIVLRKRLNYEDKTRYFVIIQANDRAQNLNERRTTTTTLTVDVLDGDDLGPMFLPCVLVPNTRDCRPLTYQAAIPELRTPEELNPIIVTPPIQAIDQDRNIQPPSDRPGILYSILVGTPEDYPRFFHMHPRTAELSLLEPVNRDFHQKFDLVIKEEPKKIKKPKVEIREPSEEEEVVVTIEKPPAAEPTYTTWKRARIFPMIFKKVRGLADKRGIVDLEGEEWQRRLEEEDKDYLKLTLDQEEATESTVESEEESSSDYTEYSEEESEFSESETTEEESESETPSEEEESSTPESEESESTESEGEKARKNIVLARRRPMVEEVKEVKGRKEEPQEEQKEPKMEEEEHSEEEESGPAPVEESTDPEAQDIPEEGSAESASVEGGVESEEESESGSSSSSSESQSGGPWGYQVPAYDRSKNANQKKSPGANSEGYNTAL

SEQ ID NO: 71977 - protein, 188 aa, Homo sapiens
MEKIPVSAFLLLVALSYTLARDTTVKPGAKKDTKDSRPKLPQTLSRGWGDQLIWTQTYEEALYKSKTSNKPLMIIHHLDECPHSQALKKVFAENKEIQKLAEQFVLLNLVYETTDKHLSPDGQYVPRIMFVDPSLTVRADITGRYSNRLYAYEPADTALCKCDLQFGCCPRVEHLYCCSDGTRGCMVR

SEQ ID NO: 71978 - protein, 437 aa, Homo sapiens
MEEQREALRKIIKTLAVKNEEIQSFIYSLKQMLLNVEANSAKVQEDLEAEFQSLFSLLEELKEGMLMKIKQDRASRTYELQNQLAACTRALESSEELLETANQTLQAMDSEDFPQAAKQIKDGVTMAPAFRLSLKAKVSDNMSHLMVDFAQERQMLQALKFLPVPSAPVIDLAESLVADNCVTLVWRMPDEDSKIDHYVLEYRRTNFEGPPRLKEDQPWMVIEGIRQTEYTLTGLKFDMKYMNFRVKACNKAVAGEFSEPVTLETPAFMFRLDASTSHQNLRVDDLSVEWDAMGGKVQDIKAREKDGKGRTASPINSPARGTPSPKRMPSGRGGRDRFTAESYTVLGDTLIDGGEHYWEVRYEPDSKAFGVGVAYRSLGRFEQLGKTAASWCLHVNNWLQASCPSTMPAPNKCCTLSRPGSHSRCCLLSRYGVAASR

SEQ ID NO: 71979 - protein, 418 aa, Homo sapiens
MPATLLRAVARSHHILSKAHQCRRIGHLMLKPLKEFENTTCSTLTIRQSLDLFLPDKTASGLNKSQILEMNQKKSDTSMLSPLNAARCQDEKAHLPTMKSFGTHRRVTHKPNLLGSKWFIKILKRHFSSVSTETFVPKQDFPQVKRPLKASRTRQPSRTNLPVLSVNEDLMHCTAFATADEYHLGNLSQDLASHGYVEVTSLPRDAANILVMGVENSAKEGDPGTIFFFREGAAVFWNVKDKTMKHVMKVLEKHEIQPYEIALVHWENEELNYIKIEGQSKLHRGEIKLNSELDLDDAILEKFAFSNALCLSVKLAIWEASLDKFIESIQSIPEALKAGKKVKLSHEEVMQKIGELFALRHRINLSSDFLITPDFYWDRENLEGLYDKTCQFLSIGRRVKSLQFFVSKDLLILALQTR

SEQ ID NO: 71980 - protein, 291 aa, Homo sapiens
MAEAASPHLSLPSGLLELCALLGAPRDSLRSLEQVAYKKGVKHLSALLDPEVLSIFVPPFISKEDSQMAGANCGTLGKTRMRSLRKKREKPRPEQWKGLPGPPRAPEPEDVAVPGGVDLLTLPQLCFPGGVCVATEPKEDCVHFLVLTDVCGNRTYGVVAQYYRPLHDEYCFYNGKTHRECPGCFVPFAVCVVSRFPYYNSLKDCLSCLLALLKPCKDFEVDSHIKDFAAKLSLIPSPPPGPLHLVQPCLSSHSVNTEFELKCDFKVFNMKSLQIVLPARADPESPILDLD

SEQ ID NO: 71981 - protein, 176 aa, Homo sapiens
MRWQLSEQLRCLELQGELRRELLQELAEFMRRRAEVELEYSRGLEKLAERFSSRGGRLGSSREHQSFRKEPSLLSPLHCWAVLLQHTRQQSRESAALSEVLAGPLAQRLSHIAEDVGRLVKKSRDLEQQLQDELLEVVSELQTAKKTYQAYHMESVNAEAKLREAERQEEKRAGRS

SEQ ID NO: 71982 - protein, 320 aa, Homo sapiens
TAFPGWSSHSPLTKPLDICVKYLSGLLEVITSFYVERGGNAMSFMGKGVTKSTILCLLHLSHEMMAQAGSLEWMSLWFLPLGSHSEEHIPTQQGLAWLIPLWVDRDPEVRFTSLGLGSALTTLETGCVALANSCQNISGGLWGTVVNILLDQSECSMVRREAAFILQNLLVIPMPTEIIKDYTWQGPCVHDEDSGLSLIGKPALQALLYHCHFYEHLNQMVKHCYLGRCMFDLNFSAFDRNSESNDLNGLDDSFKFWRAPSRTSQDRDPSSLSTSETTVTRKVHHHGHLMIHLFLLPCPNCVFLLLHLFFQQCAASWTTS

SEQ ID NO: 71983 - protein, 57 aa, Homo sapiens
MAPRAGFRPKVVSEQRLLVSSSPSRPAPPPGFIHSLFSFTKLSQVVLMELENHMQKS

SEQ ID NO: 71984 - protein, 94 aa, Homo sapiens
MLLEKDVNPGGKEETPGQRPAVTETHQLAELNEKKNERLRAAFGISDSYVDGSSFDPQRRAREAKQPAPEPPKPYSLVRESSSSRSPTPKQKKK

SEQ ID NO: 71985 - protein, 41 aa, Homo sapiens
MKTGPFAEHSNQLWNISAVPSWSKVNQGLIRMYKAEAGPCD

SEQ ID NO: 71986 - protein, 266 aa, Homo sapiens
MAAALFVLLGFALLGTHGASGAVFTTVEDLGSKILLTCSLNDSATEVTGHRWLKGGVVLKEDALPGQKTEFKVDSDDQWGEYSCVFLPEPMGTANIQLHGPPRVKAVKSSEHINEGETAMLVCKSESVPPVTDWAWYKITDSEDKALMNGSESRFFVSSSQGRSELHIENLNMEADPGQYRCNGTSSKGSDQAIITLRVRSHLAALWPFLGIVAEVLVLVTIIFIYEKRRKPEDVLDDDDAGSAPLKSSGQHQNDKGKNVRQRNSS

SEQ ID NO: 71987 - protein, 26 aa, Homo sapiens
  MOD_RES (1)..(1): Any amino acid
XIGLDSCKELLKPDRKSGALRCVRAF

SEQ ID NO: 71988 - protein, 136 aa, Homo sapiens
MPSQEPPVDDKNEDADLPSEETDGIAYISSSRKHDSIKDDSEDLKPVIDGMDGIKISQGLGLQDFDLIRVIGRGSYAKVLLVRLKKNDQIYAMKVVKKELVHDDEDIDWVQTEKHVFEQASSNPFLVGLHSCFQTT

SEQ ID NO: 71989 - protein, 197 aa, Homo sapiens
MAKSGLRQDPQSTAAATVLKRAVELDSESRYPQALVCYQEGIDLLLQVLKGTKDNTKRCNLREKISKYMDRAENIKKYLDQEKEDGKYHKQIKIEENATGFSYESLFREYLNETVTEVWIEDPYIRHTHQGIEQVQQSRGLQEIEESLRSHGVLLEVQYSSSIHDREIRFNNGWMIKIGRGLDYFKKPQSRFSLGYC

SEQ ID NO: 71990 - protein, 1274 aa, Homo sapiens [sequence omitted]

SEQ ID NO: 71991 - protein, 108 aa, Homo sapiens
MSSTKDMEFSTSGHAYTDTGKASGNLETKYKVCNYGLTFTQKWNTDNTLGTEISWENKLAEGLKLTLDTIFVPNTGKKSGKLKASYKRDCFSVGSNVDIDFSGPTIYG

SEQ ID NO: 71992 - protein, 1315 aa, Homo sapiens
  MOD_RES (1)..(1): Any amino acid
XEWRPDSTMIAVSTANGYILFFHITSTRGDKYLYEPVYPKGSPQMKGTPHFKEEQCAPALNLEMRKILDLQAPIMSLQSVLEDLLVATSDGLLHLIHWEGMTNGRKAINLCTVPFSVDLQSSRVGSFLGFTDVHIRDMEYCATLDGFAVVFNDGKVGFITPVSSRFTAEQLHGVWPQDVVDGTCVAVNNKYRLMAFGCVSGSVQVYTIDNSTGAMLLSHKLELTAKQYPDIWNKTGAVKLMRWSPDNSVVIVTWEYGGLSLWSVFGAQLICTLGGDFAYRSDGTKKDPLKINSMSWGAEGYHLWVISGFGSQNTEIESDLRSVVKQPSILLFQFIKSVLTVNPCMSNQEQVLLQGEDRLYLNCGEASQTQNPRSSSTHSEHKPSREKSPFADGGLESQGLSTLLGHRHWHVVQISSTYLESNWPIREQNMIVTGGLAWWNDFMVLACYNINDRQEELRVYLRTSNLDNAFAHVTKAQAETLLLSVFQDMVIVFRADCSICLYSIERKSDGPNTTAGIQVLQEVSMSRYIPHPFLVVSVTLTSVSTENGITLKMPQQARGAESIMLNLAGQLIMMQRDRSGPQIREKDSNPNNQRKLLPFCPPVVLAQSVENVWTTCRANKQKRHLLEALWLSCGGAGMKVWLPLFPRDHRKPHSFLSQRIMLPFHINIYPLAVLFEDALVLGAVNDTLLYDSLYTRNNAREQLEVLFPFCVVERTSQIYLHHILRQLLVRNLGEQALLLAQSCATLPYFPHVLELMLHEVLEEEATSREPIPDPLLPTVAKFITEFPLFLQTVVHCARKTEYALWNYLFAAVGNPKDLFEECLMAQDLDTAASYLIILQNMEVPAVSRQHATLLFNTALEQGKWDLCRHMIRFLKAIGSGESETPPSTPTAQEPSSSGGFEFFRNRSISLSQSAENVPASKFSLQKTLSMPSGPSGKRWSKDSDCAENMYIDMMLWRHARRLLEDVRLKDLGCFAAQLGFELISWLCKERTRAARVDNFVIALKRLHKDFLWPLPIIPASSISSPFKNGKYRTVGEQLLKSQSADPFLNLEMDAGISNIQRSQSWLSNIGPTHHEIDTASSHGPQMQDAFLSPLSNKGDECSIGSATDLTESSSMVDGDWTMVDENFSTLSLTQSELEHISMELASKGPHKSQVQLRYLLHIFMEAGCLDWCIVIGLILRESSIINQILVITQSSEVDGEMLQNIKTGLHAVDRWASTDCPGYKPFLNIIKPQLQKLSEITEEQVQPDAFQPITMGKTPEQTSPRAEESRGSSSHGSIPQGEVGSSNMVSRKEEDTAQAEEEEPFQDGTYDCSVS

SEQ ID NO: 71993 - protein, 297 aa, Homo sapiens
MDFENLFSKPPNPALGKTATDSDERIDDEIDTEVEETQEEKIKLECEQIPKKFRHSAISPKSSLHRKSRSKDYDVYSDNDICSQESEDNFAKELQQYIQAREMANAAQPEESTKKEGVKDTPQAAKQKNKNLKAGHKNGKQKKMKRKWPGPGNKGSNALLRNSGSQEEDGKPKEKQQHLSQAFINQHTVERKGKQICKYFLERKCIKGDQCKFDHDAEIEKKKEMCKFYVQGYCTRGENCLYLHNEYPCKFYHTGTKCYQGEYCKFSHAPLTPETQELLAKVLDTEKKSCNKIDIKR

SEQ ID NO: 71994 - protein, 67 aa, Homo sapiens
MVLKKFLKEIQSILPGISAKLTWTSEEGSYSQDMTGVTPFQMIFEVRFHFSVKVNGILSTEIFGVEN

SEQ ID NO: 71995 - protein, 161 aa, Homo sapiens
MEEPAAPSEAHEAAGAQAGAEAAREGVSGPDLPVCEPSGESAAPDSALPHAARGWAPFPVAPVPAHLRRGGLRPAPASGGGAWPSPLPSRSSGIWTKQIICRCIRRWRSARQFENRIVKSCPQCRVTSELVIPSEFWVEEEEEKQKLIQQYKEAMSNKACR

SEQ ID NO: 71996 - protein, 79 aa, Homo sapiens
MLENYRNLVSLDFRSVTQAKVQWCHLGSLQPPLPRFKQFSCLSLPSSWDYRARQYRSVPHRDIAKTSKSSHWRFLLPEN

SEQ ID NO: 71997 - protein, 936 aa, Homo sapiens
MLLFFTLGLLIHFVFFASIFDIYFTSPLVHGMTPQFTPLPPPARRLVLFVADGLRADALYELDENGNSRAPFIRNIIMHEGSWGISHTRVPTESRPGHVALIAGFYEDVSAVAKGWKENPVEFDSLFNESKYTWSWGSPDILPMFAKGASGDHVYTYSYDAKREDFGAQDATKLDTWVFDNVKDFFHHARNNQSLFSKINEEKIVFFLHLLGIDTNGHAHRPSSRDYKHNIKKVDDGVKEIVSMFNHFYGNDGKTTFIFTSDHGMTDWGSHGAGHPSETLTPLVTWGAGIKYPQRVSAQQFDDAFLKEWRLENWKRLDVNQADIAPLMTSLIGVPFPLNSVGILPVDYLNNTDLFKAESMFTNAVQILEQFKVKMTQKKEVTLPFLFTPFKLLSDSKQFNILRKARSYIKHRKFDEVVSLCKELIHLALKGLSYYHTYDRFFLGVNVVIGFVGWISYASLLIIKSHSNLIKGVSKEVKKPSHLLPCSFVAIGILVAFFLLIQACPWTYYVYGLLPLPIWYAVLREFQVIQDLVVSVLTYPLSHFVGYLLAFTLGIEVLVLSFFYRYMLTAGLTAFAAWPFLTRLWTRAKMTSLSWTFFSLLLAVFPLMPVVGRKPDISLVMGAGLLVLLLSLCVVTSLMKRKDSFIKEELLVHLLQVLSTVLSMYVVYSTQSSLLRKQGLPLMNQIISWATLASSLVVPLLSSPVLFQRLFSILLSLMSTYLLLSTGYEALFPLVLSCLMFVWINIEQETLQQSGVCCKQKLTSIQFSYNTDITQFRQLYLDDIRRAFFLVFFLVTAFFGTGNIASINSFDLASVYCFLTVFSPFMMGALMMWKILIPFVLVMCAFEAVQLTTQLSSKSLFLIVLVISDIMALHFFFLVKDYGSWLDIGTRQLLACTAWLFMYISASPNRLWMLSDPGLDLNLLHAIRAWYVKGTP

SEQ ID NO: 71998 - protein, 231 aa, Homo sapiens
MSFLVSKPERIRRWVSEKFIVEGLRDLELFGEQPPGDTRRKTNDASSESIASFSKQEVMSSFLPEGGCYELLTVIGKGFEDLMTVNLARYKPTGEYVTVRRINLEACSNEMVTFLQGELHVSKLFNHPNIVPYRATFIADNELWVVTSFMAYGSAKDLICTHFMDGMNELAIAYILQGVLKALDYIHHMGYVHRISRVMMPSLTSTVWESQPVNWPTAMSPLRICLPPRCC

SEQ ID NO: 71999 - protein, 292 aa, Homo sapiens
MASNVTNKTDPRSMNSRVFIGNLNTLVVKKSDVEAIFSKYGKIVGCSVHKGFAFVQYVNERNARAAVAGEDGRMIAGQVLDINLAAEPKVNRGKAGVKRSAAEMYGSSFDLDYDFQRDYYDRMYSYPARVPPPPPIARAVVPSKRQRVSGNTSRRGKSGFNSKSGQRGSSKSGKLKGDDLQAIKKELTQIKQKVDSLLENLEKIEKEQSKQAEMKNDKSEEEQSSSSVKKDETNVKMESEGGADDSAEEGDLLDDDDNEDRGDDQLELIKDDEKEAEEGEDDRDSANGEDDS

SEQ ID NO: 72000 - protein, 185 aa, Homo sapiens
MQRLLFPPLRALKGRQYLPLLAPRAAPRAQCDCIRRPLRPGQYSTISEVALQSGRGTVSLPSKAAERVVGRWLLVCSGTVAGAVILGGVTRLTESGLSMVDWHLIKEMKPPTSQEEWEAEFQRYQQFPEFKMPCVHPACCLLLEKGLAQPWHERTCSCPLWPRLLPGSVGMVYGEKWTRRKIRLP

SEQ ID NO: 72001 - protein, 163 aa, Homo sapiens
MVSDEYEQLSSEALEAARICANKYMVKSCGKDGFHIRVRLHPFHVIRINKMLSCAGADRLQTGMRGAFGKPQGTVARVHIGQVIMSIRTKLQNKEHVIEALRRAKFKFPGRQKIHISKKWGFTKFNADEFEDMVAEKRLIPDGCGVKYIPSRGPLDKWRALHS

SEQ ID NO: 72002 - protein, 158 aa, Homo sapiens
MTPGALLMLLGALGAPLAPGVRGSEAEGRLREKLFSGYDSSVRPAREVGDRVRVSVGLILAQLISLNEKDEEMSTKVYLDLAVLECGGSSHPPASGGTSTSAEITAEWTDYRLSWDPAEHDGIDSLRITAESVWLPDVVLLNNNDGNFDVALDISVVV

SEQ ID NO: 72003 - protein, 475 aa, Homo sapiens
MGRCCFYTAGTLSLLLLVTSVTLLVARVFQKAVDQSIEKKIVLRNGTEAFDSWEKPPLPVYTQFYFFNVTNPEEILRGETPRVEEVGPYTYRNKANIQFGDNGTTISAVSNKAYVFERDQSVGDPKIDLIRTLNIPVLTVIEWSQVHFLREIIEAMLKAYQQKLFVTHTVDELLWGYKDEILSLIHVFRPDISPYFGLFYEKNGTNDGDYVFLTGEDSYLNFTKIVEWNGKTSLDWWITDKCNMINGTDGDSFHPLITKDEVLYVFPSDFCRSVYITFSDYESVQGLPAFRYKVPAEILANTSDNAGFCIPEGNCLGSGVLNVSICKNGAPIIMSFPHFYQADERFVSAIEGMHPNQEDHETFVDINPLTGIILKAAKRFQINIYVKKLDDFVETGDIRTMVFPVMYLNESVHIDKETASRLKSMINTTLIITNIPYIIMALGVFFGLVFTWLACKGQGSMDEGTADERAPLIRT

SEQ ID NO: 72004 - protein, 1062 aa, Homo sapiens
MGNSLGCFKEPKESIAIPEKAPISPKKRVRFKRRWRGKKIPTPEASHQEETSEGTGVIEETETLTKLTESLQKEDGVGGVEHTPPDILLPGDSAPNSRVVDRGMIVQVKERFQGEVQTAHLLLENESSVAGGVWDSLEEGMTVIAHLLDNPAERNCEKSVSQLVEFPRTASCSSRAVLLPLQGETAVEKGNIQRGFRSCALPRTDYPTDKGNQEQFSEGWSVEEGTKSVSGAPQTASWIIECSVSSLLLDQPGGQRRTEPSHVGQVPPQDSRLPTSQSDLSISGVTVSILPSSSGYGSDGPHIHGIQPKDTEPEKSSTSFSEEDGTLSLEASHTPSWGLEEISDIYISGESGDMSAKEKLLLWTQKVTAGYTGIKCTNFSSCWSDGKMFNALIHRYRPDLVDMERVQIQSNRENLEQAFEVAERLGVTRLLDAEDVDVPSPDEKSVITYVSSIYDAFPKVPEGGEGISATEVDSRWQEYQSRVDSLIPWIKQHTILMSDKTFPQNPVELKALYNQYIHFKETEILAKEREKGRIEELYKLLEVWIEFGRIKLPQGYHPNDVEEEWGKLIIEMLEREKSLRPAVERLELLLQIANKIQNGALNCEEKLTLAKNTLQADAAHLESGQPVQCESDVIMYIQECEGLIRQLQVDLQILRDENYYQLEELAFRVMRLQDELVTLRLECTNLYRKGHFTSLELVPPSTLTTTHLKAEPLTKATHSSSTSWFRKPMTRAELVAISSSEDEGNLRFVYELLSWVEEMQMKLERAEWGNDLPSVELQLETQQHIHTSVEELGSSVKEARLYEGKMSQNFHTSYAETLGKLETQYCKLKETSSFRMRHLQSLHKFVSRATAELIWLNEKEEEELAYDWSDNNSNISAKRNYFSELTMELEEKQDVFRSLQDTAELLSLENHPAKQTVEAYSAAVQSQLQWMKQLCLCVEQHVKENTAYFQFFSDARELESFLRNLQDSIKRKYSCDHNTSLSRLEDLLQDSMAQDEKEQLIQSKSSVASLVGRSKTIVQLKPRSPDHVLKNTISVKAVCDYRQIEGRTILSEGYGPLASAAC

SEQ ID NO: 72005 - protein, 623 aa, Homo sapiens
MNMEIGHPHEGKDDLGDKRVIMGTKFPMELGIRVGLGKEDSRCGESPVVSNKCEGRMAPPETKFPLSKGLEMGLERQNISRTVMQRGSLGVDSVSASQGTKPSLLPGRMGLENESLLAGYTHERIIQPPLGRVCGSSQAAGSRRAPLASGPEGVEELVGKPAFVMEPRQEMEKESTCVLMKPNTEIKLPVEVDIGLTQAEGPDETKNTEPQMGLVIEPPQCQFAQQHEQRKEAGNIESGVEPPDRIRPIYSGKFFDRTPCWPSAGKVIPVGYRVATCLTEKLPRLITPPEAKKYFNFRYPPAGVERVFYGRANDPQIAPYLTHGIRSKISVLANTLINPQPITTFQQKIKDKKESIYLSNRRAPLGKSHDQAPGLPKGMDTTNTTFGTAVIKEYSAKDVVNPPKSYEEVFKEGNEGHDLYVVSHNDYYAGEAKNRKYNPSSFHRCSVYGVPTPHFNDGRAMAKSLYWLHELQMKRGAKFVSKRADDFKEKFQHKLGRVLDPIAETMNVPPDCTFGACLRPEEYGVGDLIHNRLPDEYLRGKDRQRALIAAVRHHLKKVNYQKFDTLLAAFRHYDKASNGGELFGNAWAYRSQQFGVDQGSANYSLWAKSSPLFVCVSKVLLEH

SEQ ID NO: 72006 - protein, 37 aa, Homo sapiens
MEGESTSAVLSGFVLGALAFQHLNTDSDTVGRGGSRL

SEQ ID NO: 72007 - protein, 169 aa, Homo sapiens
MIALKLGVTANDVKNVIIWGNHSSTQYPDVNHAKVKLQGKEVGVYEALKDDSWLKGEFVTTVQQRGAAVIKARKLSSAMSAAKAICDHVRDIWFGTPEGEFVSMGVISDGNSYGVPDDLLYSFPVVIKNKTWKFVEGLPINDFSREKMDLTAKELTEEKESAFEFLSSA

SEQ ID NO: 72008 - protein, 149 aa, Homo sapiens
MPRNEGLVILPRLVWSGTPGLSDPSMSASQSAGITGLGACIAMDTTRYSKWGGSSEEVPGGPWGRWVHWSRRPLFLALAVLVTTVLWAVILSILLSKASTERAALLDGHDLLRTNASKQTAALGALKEEVGDCHSCCSGTQAQLQTTRA

SEQ ID NO: 72009 - protein, 1122 aa, Homo sapiens
PTPGLHLVTMTAGNPLGSANATVEVDVQVPVSGLSIRASEPGGSFVAAGSSVPFWGQLATGTNVSWCWAVPGGSSKRGPHVTMVFPDAGTFSIRLNASNAVSWVSATYNLTAEEPIVGLVLWASSKVVAPGQLVHFQILLAAGSAVTFRLQVGGANPEVLPGPRFSHSFPRVGDHVVSVRGKNHVSWAQAQVRIVVLEAVSGLQVPNCCEPGIATGTERNFTARVQRGSRVAYAWYFSLQKVQGDSLVILSGRDVTYTPVAAGLLEIQVRAFNALGSENRTLVLEVQDAVQYVALQSGPCFTNRSAQFEAATSPSPRRVAYHWDFGDGSPGQDTDEPRAEHSYLRPGDYRVQVNASNLVSFFVAQATVTVQVLACREPEVDVVLPLQVLMRRSQRNYLEAHVDLRDCVTYQTEYRWEVYRTASCQRPGRPARVALPGVDVSRPRLVLPRLALPVGHYCFVFVVSFGDTPLTQSIQANVTVAPERLVPIIEGGSYRVWSDTRDLVLDGSESYDPNLEDGDQTPLSFHWACVASTQREAGGCALNFGPRGSSTVTIPRERLAAGVEYTFSLTVWKAGRKEEATNQTVLIRSGRVPIVSLECVSCKAQAVYEVSRSSYVYLEGRCLNCSSGSKRGRWAARTFSNKTLVLDETTTSTGSAGMRLVLRRGVLRDGEGYTFTLTVLGRSGEEEGCASIRLSPNRPPLGGSCRLFPLGAVHALTTKVHFECTGWHDAEDAGAPLVYALLLRRCRQGHCEEFCVYKGSLSSYGAVLPPGFRPHFEVGLAVVVQDQLGAAVVALNRSLAITLPEPNGSATGLTVWLHGLTASVLPGLLRQADPQHVIEYSLALVTVLNEYERALDVAAEPKHERQHRAQIRKNITETLVSLRVHTVDDIQQIAAALAQCMGPSRELVCRSCLKQTLHKLEAMMLILQAETTAGTVTPTAIGDSILNITGDLIHLASSDVRAPQPSELGAESPSRMVASQAYNLTSALMRILMRSRVLNEEPLTLAGEEIVAQGKRSDPRSLLCYGGAPGPGCHFSIPEAFSGALANLSDVVQLIFLVDSNPFPFGYISNYTVSTKLRQLRQLRCGPAPGLRRCCGHPGQQQPCGRAASAAQLYAAGRPLPV

SEQ ID NO: 72010 - protein, 182 aa, Homo sapiens
  MOD_RES (1)..(1): Any amino acid
XLDNEKNNLIYQVDTLKDVIEEQEEQMAEFYRENEEKSKELERQKHMCSVLQHKMEELKEGLRQRDELIEALEKQKEYIACLRNERDMLREELADLQETVKTGEKHGLVIIPDGTPNGDVSHEPVAGAITVVSQEAAQVLESAGEGPLDVRLRKLAGEKEELLSQIRKLKLQLEEERQKCSR

SEQ ID NO: 72011 - protein, 194 aa, Homo sapiens
  MOD_RES (1)..(1): Any amino acid
XLRQELAVRERQQEVTRKSAPSSPTLDCEKMDSAVQASLSLPATPVGKGTENTFPSPKAIPNGFGTSPLTPSARISALNIVGDLLRKVGALESKLAACRNFAKDQASRKSYISGNVNCGVLNGNGTKFSRSGHTSFFDKGCVLTRMNRILTQSWALRACTPCCGGRTLCPTCLISSRFFSSFCSSLVCRSLSNC

SEQ ID NO: 72012 - protein, 1048 aa, Homo sapiens
  MOD_RES (1)..(1): Any amino acid
XEGIHANEIKNLKKELHDSEGQQLALNKEIMILKDKLEKTRRESQSEREEFESEFKQQYEREKVLLTEENKKLTSELDKLTTLYENLSIHNQQLEEEVKDLADKKESVAHWEAQITEIIQWVSDEKDARGYLQALASKMTEELEALRNSSLGTRATDMPWKMRRFAKLDMSARLELQSALDAEIRAKQAIQEELNKVKASNIITECKLKDSEKKNLELLSEIEQLIKDTEELRSEKGIEHQDSQHSFLAFLNTPTDALDQFETDPVENTYVWNPSVKFHIQSRSTSPSTSSEAEPVKTVDSTPLSVHTPTLRKKGCPGSTGFPPKRKTHQFFVKSFTTPTKCHQCTSLMVGLIRQGCSCEVCGFSCHITCVNKAPTTCPVPPEQTKGPLGIDPQKGIGTAYEGHVRIPKPAGVKKGWQRALAIVCDFKLFLYDIAEGKASQPSVVISQVIDMRDEEFSVSSVLASDVIHASRKDIPCIFRVTASQLSASNNKCSILMLADTENEKNKWVGVLSELHKILKKNKFRDRSVYVPKEAYDSTLPLIKTTQAAAIIDHERIALGNEEGLFVVHVTKDEIIRVGDNKKIHQIELIPNDQLVAVISGRNRHVRLFPMSALDGRETDFYKLSETKGCQTVTSGKVRHGALTCLCVAMKRQVLCYELFQSKTRHRKFKEIQVPYNVQWMAIFSEQLCVGFQSGFLRYPLNGEGNPYSMLHSNDHTLSFIAHQPMDAICAVEISSKEYLLCFNSIGIYTDCQGRRSRQQELMWPANPSSCCYNAPYLSVYSENAVDIFDVNSMEWIQTLPLKKVRPLNNEGSLNLLGLETIRLIYFKNKMAEGDELVVPETSDNSRKQMVRNINNKRRYSFRVPEEERMQQRREMLRDPEMRNKLISNPTNFNHIAHMGPGDGIQILKDLPMNPRPQESRTVFSGSVSIPSITKSRPEPGRSMSASSGLSARSSAQNGSALKREFSGGSYSAKRQPMPSPSEGSLSSGGMDQGSDAPARDFDGEDSDSPRHSTASNSSNLSSPPSPASPRKTKSLSLESTDRGSWDP

SEQ ID NO: 72013 - protein, 232 aa, Homo sapiens
MTKVNGTEIEYEFEEITLERGNSGLGFSIAGGTDNPHIGDDPGIFITKIIPGGAAAEDGRLRVNDCILRVNEVDVSEVSHSKAVEALKEAGSIVRLYVRRRRPILETVVEIKLFKGPKGLGFSIAGGVGNQHIPGDNSIYVTKIIDGGAAQKDGRLQVGDRLLMVNNYSLEEVTHEEAVAILKNTSEVVYLKVGKPTTIYMTDPYGPPDITHSYSPPMENHLLSGNNGTLEY

SEQ ID NO: 72014 - protein, 791 aa, Homo sapiens
MRPRSRSLSPGRSPVSFDSEIIMMNHVYKERFPKAHERSESSEVAFVMQLVKKLMIIIARPARLLECLEFDPEEFYHLLEAAEGHAKEGQGIKCDIPRYIVSQLGLTRDPLEEMAQLSSCDSPDTPETDDSIEGHGASLPSKKTPSEEDFETIKLISNGAYGAVFLVRHKSTRQRFAMKKINKQNLILRNQIQQAFVERDILTFAENPFVVSMFCSFDTKRHLCMVMEYVEGGDCATLLKNIGALPVDMVRLYFAETVLALEYLHNYGIVHRDLKPDNLLITSMGHIKLTDFGLSKIGLMSLTTNLYEGHIEKDAREFLDKQVCGTPEYIAPEVILRQGYGKPVDWWAMGIILYEFLVGCVPFFGDTPEELFGQVISDEIVWPEGDEALPPDAQDLTSKLLHQNPLERLGTGSAYEVKQHPFFTGLDWTGLLRQKAEFIPQLESEDDTSYFDTRSERYHHMDSEDEEEVSEDGCLEIRQFSSCSPRFNKVYSSMERLSLLEERRTPPPTKRSLSEEKEDHSDGLAGLKGRDRSWVIGSPEILRKRLSVSESSHTESDSSPPMTVRRRCSGLLDAPRFPEGPEEASSTLRRQPQEGIWVLTPPSGEGVSGPVTEHSGEQRPKLDEEAVGRSSGSSPAMETRGRGTSQLAEGATAKAISDLAVRRARHRLLSGDSTEKRTARPVNKVIKSASATALSLLIPSEHHTCSPLASPMSPHSQSSNPSSRDSSPRSMASPCGPFASTWVTPMSTPCTIWCGTWRMEVRPVRQGFVKVTSSPMSMGNLCMAWCTRRWS

SEQ ID NO: 72015 - protein, 129 aa, Homo sapiens
MKIFVGNVDGADTTPEELAALFAPYGTVMSCAVMKQFAFVHMRENAGALRAIEALHGHELRPGRALVVEMSRPRPLNTWKIFVGNVSAACTSQELRSLFERRGRVIECDVVKGYTSPRLSGIGLSCWVL

SEQ ID NO: 72016 - protein, 112 aa, Homo sapiens
MAPSDRAMGDSDDEYDRRRRDKFRRERSDYDRSRERDERRRGDDWNDREWDRGRERRSRGEYRDYDRNRRERFSPPRHELSPPQKRMRRDWDEHSSDPYHSGYEMPYAGGGG

SEQ ID NO: 72017 - protein, 260 aa, Homo sapiens
MGADGMYDKLRMLNGQTGSWGTRPGWYPGTSVPGQPTQDGCQQQEGGGENTNSISSNGEDSDEAQMRLQLKRKLQRNRTSFTQEQIEALEKEFERTHYPDVFARERLAAKIDLPEARIQVWFSNRRAKWRREEKLRNQRRQASNTPSHIPISSSFSTSVYQPIPQPTTPVSSFTSGSMLGRTDTALTNTYSALPPMPSFTMANNLPMQPPVPSQTSSYSCMLPTSPSVNGRSYDTYTPPHMQTHMNSQPMGTSGTTSTGL

SEQ ID NO: 72018 - protein, 104 aa, Homo sapiens
MSQDGASQFQEVIRQELELSVKKELEKILTTASSHEFEHTKKDLDGFRKLFHRFLQEKGPSVDWGKIQRPPEDSIQPYEKIKARGLPDNISSVLNKLVVVKLNG

SEQ ID NO: 72019 - protein, 66 aa, Homo sapiens
  MOD_RES (1)..(1): Any amino acid
XVTVDSSKARTSLDALKISIRQLKWKEFPFGRRLPCDIYWHGVSFHDNDIFSGQVNKFPGSNGERR

SEQ ID NO: 72020 - protein, 193 aa, Homo sapiens
EVDDFSWEPPTEAETKVLQARRERQDRISRLMGDYLLRGYRMLGETCADCGTILLQDKQRKIYCVACQELDSDVDKDNPALNAQAALSQAREHQLASASELPLGSRPAPQPPVPRPEHCEGAAAGLKAAQGPPAPAVPPNTDVMACTQTALLQKLTWASAELGSSTSLETSIQLCGLIRACAEALRSLQQLQH

SEQ ID NO: 72021 - protein, 283 aa, Homo sapiens
MSSLPALLVRPLGKEHTVSRLLRVMQCLSRIEEGENLDCSFDMEAELTPLESAINVLEMIKTEFTLTEAVVESSRKLVKEAAVIICIKNKEFEKASKILKKHMSKDPTTQKLRNDLLNIIREKNLAHPVIQNFSYETFQQKMLRFLESHLDDAEPYLLTMAKKALKSESAASSTGKEDKQPAPGPVEKPPREPARQLRNPPTTIGMMTLKAAFKTLSGAQDSEAAFAKLDQKDLVLPTQALPASPALKNKRPRKDENESSAPADGEGGSELQPKNKRMTISRL

SEQ ID NO: 72022 - protein, 170 aa, Homo sapiens
MSVMVVRKKVTRKWEKLPGRNTFCCDGRVMMARQKGIFYLTLFLILGTCTLFFAFECRYLAVQLSPAIPVFAAMLFLFSMATLLRTSFSDPGVIPRALPDEAAFIEMEIEATNGAVPQGQRPPPRIKNFQINNQIVKLKYCYTCKIFRPPRASHCSICDNCVERFDHHCP

SEQ ID NO: 72023 - protein, 148 aa, Homo sapiens
MASPGCLWLLAVALLPWTCASRALQHLDPPAPLPLVIWHGMGDSCCNPLSMGAIKKMVEKKIPGIYVLSLEIGKTLMEDVENSFFLNVNSQVTTVCQALAKDPKLQQGYNAMGFSQGGQFLRAVAQRCPSPPMINLISVGGQHQVPCA

SEQ ID NO: 72024 - protein, 121 aa, Homo sapiens
MTMGDMKTPDFDDLLAAFDIPDMVDPKAAIESGHDDHESHMKQNAHGEDDSHAPSSSDVGVSVIVKNVRNIDSSEGGEKDGHNPTGNGLHNGFLTASSLDSYSKDGAKSLKGDVPASEVTL

SEQ ID NO: 72025 - protein, 1039 aa, Homo sapiens
MAETNNECSIKVLCRFRPLNQAEILRGDKFIPIFQGDDSVVIGGKPYVFDRVFPPNTTQEQVYHACAMQIVKDVLAGYNGTIFAYGQTSSGKTHTMEGKLHDPQLMGIIPRIARDIFNHIYSMDENLEFHIKVSYFEIYLDKIRDLLDVTKTNLSVHEDKNRVPFVKGCTERFVSSPEEILDVIDEGKSNRHVAVTNMNEHSSRSHSIFLINIKQENMETEQKLSGKLYLVDLAGSEKVSKTGAEGAVLDEAKNINKSLSALGNVISALAEGTKSYVPYRDSKMTRILQDSLGGNCRTTMFICCSPSSYNDAETKSTLMFGQRAKTIKNTASVNLELTAEQWKKKYEKEKEKTKAQKETIAKLEAELSRWRNGENVPETERLAGEEAALGAELCEETPVNDNSSIVVRIAPEERQKYEEEIRRLYKQLDDKDDEINQQSQLIEKLKQQMLDQEELLVSTRGDNEKVQRELSHLQSENDAAKDEVKEVLQALEELAVNYDQKSQEVEEKSQQNQLLVDELSQKVATMLSLESELQRLQEVSGHQRKRIAEVLNGLMKDLSEFSVIVGNGEIKLPVEISGAIEEEFTVARLYISKIKSEVKSVVKRCRQLENLQVECHRKMEVTGRELSSCQLLISQHEAKIRSLTEYMQSVELKKRHLEESYDSLSDELAKLQAQETVHEVALKDKEPDTQDADEVKKALELQMESHREAHHRQLARLRDEINEKQKTIDELKDLNQKLQLELEKLQADYEKLKSEEHEKSTKLQELTFLYERHEQSKQDLKGLEETVARELQTLHNLRKLFVQDVTTRVKKSAEMEPEDSGGIHSQKQKISFLENNLEQLTKVHKQVDDWVSKLVRDNADLRCELPKLEKRLRATAERVKALEGALKEAKEGAMKDKRRYQQEVDRIKEAVRYKSSGKRGHSAQIAKPVRPGHYPASSPTNPYGTRSPECISYTNSLFQNYQNLYLQATPSSTSDMYFANSCTSSGATSSGGPLASYQKANMDNGNATDINDNRSDLPCGYEAEDQAKLFPLHQETAAS

SEQ ID NO: 72026 - protein, 16 aa, Homo sapiens
NWFDPWGQGTLVTVSS

SEQ ID NO: 72027 - protein, 478 aa, Homo sapiens
MSVPLLKIGAVLSTMAMVTNWMSQTLPSLVGLNGTVSRAGASEKITLFQNPEEGWQLYTSAQAPDGKCICTAVIPAQSTCSRDGRSRELRQLMEKVQNVSQSMEVLELRTYRDLQYVRGMETLMRSLDARLRAADGSLSAKSFQELKDRMTELLPLSSVLEQYKADTRTIVRLREEVRNLSGSLAAIQEEMGAYGYEDLQQRVMALEARLHACAQKLGCGKLTGVSNPITVRAMGSRFGSWMTDTMAPSADSRVWYMDGYYKGRRVLEFRTLGDFIKGQNFIQHLLPQPWAGTGHVVYNGSLFYNKYQSNVVVKYHFRSRSVLVQRSLPGAGYNNTFPYSWGGFSDMDFMVDESGLWAVYTTNQNAGNIVVSRLDPHTLEVMRSWDTGYPKRSAGEAFMICGVLYVTNSHLAGAKVYFAYFTNTSSYEYTDVPFHNQYSHISMLDYNPRERALYTWNNGHQVLYNVTLFHVISTSGDP

SEQ ID NO: 72028 - protein, 87 aa, Homo sapiens
MVDGVMILPVLIMIALPSPSMEDEKPKVNPKLYMCVCEGLSCGNEDHCEGQQCFSSLSINDGFHVYQKGCFQVYEQGKMTCKTPPSP

SEQ ID NO: 72029 - protein, 46 aa, Homo sapiens
MGFWCRMSENQEQEEVITVRVQDPRVQNEGSWNSYVDYKIFLHACS

SEQ ID NO: 72030 - protein, 537 aa, Homo sapiens
ENYDDPHKTPASPVVHIRGLIDGVVEADLVEALQEFGPISYVVVMPKKRQALVEFEDVLGACNAVNYAADNQIYIAGHPAFVNYSTSQKISRPGDSDDSRSVNSVLLFTILNPIYSITTDVLYTICNPCGPVQRIVIFRKNGVQAMVEFDSVQSAQRAKASLNGADIYSGCCTLKIEYAKPTRLNVFKNDQDTWDYTNPNLSGQGDPGSNPNKRQRQPPLLGDHPAEYGEGRGFPSVDSRGSCAPARRPPCKFSPVLPLFPSHPPGGPHGGYHSHYHDEGYGPPPPHYEGRRMGPPVGGHRRGPSRYGPQYGHPPPPPPPPEYGPHADSPVLMVYGLDQSKMNCDRVFNVFCLYGNVEKVKFMKSKPGAAMVEMADGYAVDRAITHLNNNFMFGQKLNVCVSKQPAIMPGQSYGLEDGSCSYKDFSESRNNRFSTPEQAAKNRIQHPSNVLHFFNAPLEVTEENFFEICDELGVKRPSSVKVFSGKSERSSSGLLEWESKSDALETLGFLNHYQMKNPNGPYPYTLKLCFSTAQHAS

SEQ ID NO: 72031 - protein, 69 aa, Homo sapiens
MSKPHSEAGTAFIQTQQLHAAMADTFLEHMCRLDIDSPPITARNTGIICTIVPCGDHQECAHSHGKLCF

SEQ ID NO: 72032 - protein, 26 aa, Homo sapiens
  MOD_RES (1)..(1): Any amino acid
XGVVSAFSTMMSVHRGEVPCTVTSAS

SEQ ID NO: 72033 - protein, 58 aa, Homo sapiens
  MOD_RES (1)..(1): Any amino acid
XHCTAKDCAGVILYSAECATQVALDGIQCFGHAPQPFLYTEPVNYQAPRKFFSGSQHL

SEQ ID NO: 72034 - protein, 115 aa, Homo sapiens
MAMVSEFLKQAWFIENEEQEYVQTVKSSKGGPGSAVSPYPTFNPSSDVAALHKAIMVKGVDEATIIDILTKRNNAQRQQIKAAYLQETGKPLDETLKKALTGHLEEVVLALLKTP

SEQ ID NO: 72035 - protein, 186 aa, Homo sapiens
MQQVLDNLGSLPSATGAAELDLIFLRGIMESPIVRSLAKAHERLEETKLEAVRDNNLELVQEILRDLAQLAEQSSTAAELAHILQEPHFQSLLETHDSVASKTYETPPPSPGLDPTFSNQPVPPDAVRMVGIRKTAGEHLGVTFRVEGGELVIARILHGGMVAQQGLLHVGDIIKEVNGQPVGSDP

SEQ ID NO: 72036 - protein, 83 aa, Homo sapiens
  MOD_RES (1)..(1): Any amino acid
XQYLAQAEDTRILRKAVSEACTEIDAISVEKRRIMQQWASSLVGMKHRDEAHRAVLEALRCRSRNQSQLWPGKGSSPCVTRVA

SEQ ID NO: 72037 - protein, 604 aa, Homo sapiens
MAQAIFEALEGMDNQTVLAVQSLLDGQGAVPDPTGQSVNAPPAIQPLDDEDVFLCGKCKKQFNSLPAFMTHKREQCQGNAPALATVSLATNSIYPPSAAPTAVQQAPTPANRQISTYITVPPSPLIQTLVQGNILVSDDVLMSAMSAFTSLDQPMPQGPPPVQSSLNMHSVPSYLTQPPPPPPPPPPLPPPPPPQPPPPPPQSLGPPGRPNPGGNGVVEVYSAAAPLAGSGTVEIQALGMQPYPPLEVPNQCVEPPVYPTPTVYSPGKQGFKPKGPNPAAPMTSATGGTVATFDSPATLKTRRAKGARGLPEAAGKPKAQKLKCSYCDKSFTKNFDLQQHIRSHTGEKPFQCIACGRAFAQKSNVKKHMQTHKVWPPGHSGGTVSRNSVTVQVMALNPSRQEDEESTGLGQPLPGAPQPQALSTAGEEEGDKPESKQVVLIDSSYLCQFCPSKFSTYFQLKSHMTQHKNEQVYKCVVKSCAQTFPKLDTFLEHIKSHQEELSYRCHLCGKDFPSLYDLGVHQYSHSLLPQHSPKKDNAVYKCFLVNATCGVICPPTAAGAGSSAKCARSSSGGSIISNCMLTSTRVRSPTNAQCASLRSTARTN

SEQ ID NO: 72038 - protein, 42 aa, Homo sapiens
MGDERPHYYGKHGTPQKYDPTFKGPIYNSLDSWRPSKGDLPH

SEQ ID NO: 72039 - protein, 105 aa, Homo sapiens
MAAERQEALREFVAVTGAEEDRARFFLESAGWDLQIALASFYEDGGDEDIVTISQATPSSVSRGTAPSDNRVTSFRDLIHDQDEDEEEEEGQRGHSVCHMNGKVR

SEQ ID NO: 72040 - protein, 93 aa, Homo sapiens
MSGGSQVHIFWGAPIAPLKITVSEDTASLMSVADPWKKIQLLYSQHSLYLKDEKQHKNLENYKVPESIGSPDLSGHFLANCMNRHVHVKDDFV

SEQ ID NO: 72041 - protein, 470 aa, Homo sapiens
MGWAAFNLSNVTGNSRILCSVYCNGSQITGSSNITVYRLPERVELAPLPPWQPVGQNFTLRCQVEDGSPRTSLTVVLLRWEEELSRQPAVEEPAEVTATVLASRDDHGAPFSCRTELDMQPQGLGLFVNTSAPRQLRTFVLPVTPPRLVAPRFLEVETSWPVDCTLDGLFPASEAQVYLALGDQMLNATVMNHGDTLTATATATARADQEGAREIVCNVTLGGERREARENLTVFSFLGPIVNLSEPTAHEGSTVTVSCMAGARVQVTLDGVPAAAPGQPAQLQLNATESDDGRSFFCSATLEVDGEFLHRNSSVQLRVLYGPKIDRATCPQHLKWKDKTRHVLQCQARGNPYPELRCLKEGSSREVPVGIPFFVNVTHNGTYQCQASSSRGKYTLVVVMDIEAGSSHFVPVFVAVLLTLGVVTIVLALMYVFREHQRSGSYHVREESTYLPLTSMQPTEAMGEEPSRAE

SEQ ID NO: 72042 - protein, 305 aa, Homo sapiens
MSPGEKLDPIPDSFILQPPVFHPVVPYVTTIFGGLHAGKMVMLQGVVPLDAHRFQVDFQCGCSLCPRPDIAFHFNPRFHTTKPHVICNTLHGGRWQREARWPHLALRRGSSFLILFLFGNEEVKVSVNGQHFLHFRYRLPLSHVDTLGIFGDILVEAVGFLNINPFVEGSREYPAGHEVPCSHALPQGLSPGQVIIVRGLVLQEPKHFTVSLRDQAAHAPVTLRASFADRTLAWISRWGQKKLISAPFLFYPQRFFEVLLLFQEGGLKLALNGQGLGATSMNQQALEQLRELRISGSVQLYCVHS

SEQ ID NO: 72043 - protein, 87 aa, Homo sapiens
MDSPCQPQPLSQALPQLPGSSSEPLEPEPGRARMGVESYLPCPLLPSYHCPGVPSEASAGSGTPRATATSTTASPLRDGFGGQDGGE

SEQ ID NO: 72044 - protein, 96 aa, Homo sapiens
MEYTGSKYIGEYVDGRMEGKAKYILPTETIYVGEMKDGMFHGEGTLYFPSGSQYDAIWENGLAIKVWLNSPIWTHLEKSPRAITIVETASITQSRG

SEQ ID NO: 72045 - protein, 137 aa, Homo sapiens
MTRNSSTIIAFAVGGQYVPGNGFSLIGAHTDSPCLRVKRRSRRSQVGFQQVGVETYGGGIWSTWFDRDLTLAGRVIVKCPTSGRLEQQLVHVERPILRIPHLAIHLQRNINENFGPNTEMHLVPILATAIQEELEKG

SEQ ID NO: 72046 - protein, 82 aa, Homo sapiens
RVKEKEAELKEAEKELHEKFDLLKRTHQEEKKKVEDKKKELEEEVNNFQKKKAAAQLLQSQAQQSGAQQTKKDKDKKNFFFM

SEQ ID NO: 72047 - protein, 137 aa, Homo sapiens
GQTNGDSSLEVLATRFQGSVRTYTESQSSLRSSYSSPTSLSPRAGSPFSPPPSSSSLTGEAAISRSFQSLACSPGLPAADRLSYSGRPGSRQHGLGRGKPPPGRGLGSLQDAAGKSRGTGGPPTVQLLSALAGSPGG

SEQ ID NO: 72048 - protein, 191 aa, Homo sapiens
MAGLRNESEQEPLLGDTPGSREWDILETEEHYKSRWRSIRILYLTMFLSSVGFSVVMMSIWPYLQKIDPTADTSFLGWVIASYSLGQMVASPIFGLWSNYRPRKEPLIVSILISVAANCLYAYLHIPASHNKYYMLVARGLLGIGAENIVWMTQEDSVKVLILKKQVQMKLRFPKEILTRLLLWPSMFCFL

SEQ ID NO: 72049 - protein, 106 aa, Homo sapiens
MATNFLAHEKIWFDKFKYDDAERRFYEQMNGPVAGASRQSSGPGASSGTSGDHGELVVRIASLEVENQSLRGVVQELQQAISKLEARLNVLEKSSPGHRATAPQTQ

SEQ ID NO: 72050 - protein, 89 aa, Homo sapiens
MKSVLLLTTLLVPAHLVAAWSNNYAVDCPQHCDSSECKSSPRCKRTVLDDCGCCRVCAAGRGETCYRTVSGMDGMKCGPGLRCQPSNGE

SEQ ID NO: 72051 - protein, 57 aa, Homo sapiens
MLASSKRMNSSSRSQILLRWKSDKAQSGPYNVEKEILTSRFLRDTETCRQNFRNFPY

SEQ ID NO: 72052 - protein, 107 aa, Homo sapiens
YFKARLKFPIDYPYSPPAFRFLTKMWHPNIYETGDVCISILHPPVDAERDGVKVPTTLAEYCVKTKAPAPDEGSDLFYDDYYEDGEVEEEADSCFGDDEDDSGTEES

SEQ ID NO: 72053 - protein, 129 aa, Homo sapiens
MGRKKIQITRIMDERNRQVTFTKRKFGLMKKAYELSVLCDCEIALIIFNSTNKLFQYASTDMDKVLLKYTEYNEPHESRTNSDIVETLRKKGLNGCDSPDPDADDSVGHSPESEDKYRKINEDIDLMIS

SEQ ID NO: 72054 - protein, 152 aa, Homo sapiens
MSSSCSGLSRVLVAVATALVSASSPCPQAWGPPDPPARPVVSCQAADYENFSCTWSPSQISGLPTRYLTSYRKKTVLGADSQRRSPSTGPWPCPQDPLGAARCVVHGAEFWSQYRINVTEVNPLGASTRLLDVSLQSILRPDPPQGLRVESV

SEQ ID NO: 72055 - protein, 97 aa, Homo sapiens
MQEEIFGPILPIVPVKNVDEAINFINEREKPLALYVFSHNHKLIKRMIDETSSGGVTGNDVIMHFTLNSFPFGGVGRILLKNDPVQPPSASTELFLF

SEQ ID NO: 72056 - protein, 323 aa, Homo sapiens
MDVVARGTTTRRSRLKRSDGSTTSTSFILRQGSADSYTSRPSDSDVSLEEDREAIRQEREQQAAIQLERAKSKPVAFAVKTNVSYCGALDEDVPVPSTAISFDAKDFLHIKEKYNNDWWIGRLVKEGCEIGFIPSPLRLENIRIQQEQKRGRFHGGKSSGNSSSSLGEMVSGTFRATPTSTAKQKQKVTEHIPPYDVVPSMRPVVLVGPSLKGYEVQISSVTLQFLIEHPGDSHVDACSSRVCFHVGPDGSQCSAWEGRGYRVGLMRPSALSFLSCTLLIFYVLHCLEIPPSKYSQWEDLVKDLLYIKCKEKDFICLDHSHYY

SEQ ID NO: 72057 - protein, 92 aa, Homo sapiens
  MOD_RES (1)..(1): Any amino acid
XSGASPFLGETKQETLTNISAVNYDFDEEYFSNTSELAKDFIRRLLVKDPKRRMTIAQSLEHSWIKVSGEVGELPGLPALAFSLGSRGAFSI

SEQ ID NO: 72058 - protein, 1629 aa, Homo sapiens
MERCSRCHRLLLLLPLVLGLSAAPGWAGAPPVDVLRALRFPSLPDGVRRAKGICPADVAYRVARPAQLSAPTRQLFPGGFPKDFSLLTVVRTRPGLQAPLLTLYSAQGVRQLGLELGPPVRFLYEDQTGRPQPPSQPVFRGLSLADGKWHRVAVAVKGQSVTLIVDCKKRVTRPLPRSARPVLDTHGVIIFGARILDEEVFEGDVQELAIVPGVQAAYESCEQKELECEGGQRERPQNQQPHRAQRSPQQQPSRLHRPQNQEPQSQAAHGPRGLKGEKGEPAVLEPGMLVEGPPGPEGPAGLIGPPGIQGNPGPVGDPGERGPPGRAGLPGSDGAPGPPGTSLMLPFRFGSGGGDKGPVVAAQEAQAQAILQQARLALRGPPGPMGYTGRPGPLGQPGSPGLKGESGDLGPQGPRGPQGLTGPPGKAGRRGRAGADGARGMPGDPGVKGDRGFDGLPGLPGEKGHRGDTGAQGLPGPPGEDGERGDDGEIGPRGLPGESGPRGLLGPKGPPGIPGPPGVRGMDGPQGPKGSLGPQGEPGPPGQQGTPGTQGLPGPQGAIGPHGEKGPQGKPGLPGMPGSDGPPGHPGKEGPPGTKGNQGPSGPQGPLGYPGPRGVKGVDGIRGLKGHKGEKGEDGFPGFKGDIGVKGDRGEVGVPGSRGEDGPEGPKGRTGPTGDPGPPGLMGEKGKLGVPGLPGYPGRQGPKGSLGFPGFPGASGEKGARGLSGKSGPRGERGPTGPRGQRGPRGATGKSGAKGTSGGDGPHGPPGERGLPGPQGPNGFPGPKGPPGPPGKDGLPGHPGQRGEVGFQGKTGPPGPPGVVGPQGAAGETGPMGERGHPGPPGPPGEQGLPGTAGKEGTKGDPGPPGAPGKDGPAGLRGFPGERGLPGTAGGPGLKGNEGPSGPPGPAGSPGERGAAGSGGPIGPPGRPGPQGPPGAAGEKGVPGEKGPIGPTGRDGVQGPVGLPGPAGPPGVAGEDGDKGEVGDPGQKGTKGNKGEHGPPGPPGPIGPVGQPGAAGADGEPGARGPQGHFGAKGDEGTRGFNGPPGPIGLQGLPGPSGEKGETGDVGPMGPPGPPGPRGPAGPNGADGPQGPPGGVGNLGPPGEKGEPGESGSPGIQGEPGVKGPRGERGEKGESGQPGEPGPPGPKGPTGDDGPKGNPGPVGFPGDPGPPGEGGPRGQDGAKGDRGEDGEPGQPGSPGPTGENGPPGPLGKRGPAGSPGSEGRQGGKGAKGDPGAIGAPGKTGPVGPAGPAGKPGPDGLRGLPGSVGQQGRPGATGQAGPPGPVGPPGLPGLRGDAGAKGEKGHPGLIGLIGPPGEQGEKGDRGLPGPQGSPGQKGEMGIPGASGPIGPGGPPGLPGPAGPKGAKGATGPGGPKGEKGVQGPPGHPGPPGEVIQPLPIQMPKKTRRSVDGSRLMQEDEAIPTGGAPGSPGGLEEIFGSLDSLREEIEQMRRPTGTQDSPARTCQDLKLCHPELPDGEYWVDPNQGCARDAFRVFCNFTAGGETCVTPRDDVTQFSYVDSEGSPVGVVQLTFLRLLSVSAHQDVSYPCSGAARDGPLRLRGANEDELSPETSPYVKEFRDGCQTQQGRTVLEVRTPVLEQLPVLDASFSDLGAPPRRGGVLLGPVCFMG

SEQ ID NO: 72059 - protein, 148 aa, Homo sapiens
MGEFKVHRVRFFNYVPSGIRCVAYNNQSNRLAVSRTDGTVEIYNLSANYFQEKFFPGHESRATEALCWAEGQRLFSAGLNGEIMEYDLQALNIKYAMDAFGGPIWSMAASPSGSQLLVGCEDGSVKLFQITPDKIQFERNFDRQKSRI

SEQ ID NO: 72060 - protein, 9 aa, Homo sapiens
MELILSTSP

SEQ ID NO: 72061 - protein, 143 aa, Homo sapiens
MSSGFAAGVFNFCPSVFSLPQTCPLLLRVFTTNNGRHHRMDEFSRGNVPSSELQIYTWMDATLKELTSLVKEVYPEARKKGTHFNFAIVFTDVKRPGYRVKEIGSTMSGRKGTDDSMTLQSQKFQIGDYLDIAITPPNRAPPP

SEQ ID NO: 72062 - protein, 21 aa, Homo sapiens
MGRDFVVMDNCSVSFHLDFGD

SEQ ID NO: 72063 - protein, 173 aa, Homo sapiens
KVPEEMFREVKYYAVGDIDPQVIQLLKAGKAKEVSYNALASHIISEDGDNPEVGEAREVFDLPVVKVSSEDRSALWALVTFYGGDCQLTLNKKCTHLIVPEPKGEKYECALKRASIKIVTPDWVLDCVSEKTKKDEAFYHPRLIIYEEEEEEEEEEEEVENEEQDSQNEGSTD

SEQ ID NO: 72064 - protein, 83 aa, Homo sapiens
MAKMEVKTSLLDNMIGVGDMVLLEPLNEETFINNLKKRFDHSEIYTYIGSVVISVNPYRSLPIYSPEKVEEYRNRNFYELSPH

SEQ ID NO: 72065 - protein, 247 aa, Homo sapiens
  MOD_RES (1)..(1): Any amino acid
XNNNSIMSFFKTLVSPNKAETKKDPEDTGAEKSPTTSADLKSDKANFTSQETQGAGKNSKGCNPSGHTQSVTTPEPAKEGTKEKSGPTSLPLGKLFWKKSVKEDSVPTGAEENSVKGDGGITHSEEINGKDSSCQTSDSTEKTITPPEPEPTGAPQKGKEGSSKDKKSAAEMNKQKSNKQEAKEPAQCTEQATVDTNSLQNGDKLQKRPEKRQQSLGGFFKGLGPKRMLDAQVQTDPVSIGPVGKSK

SEQ ID NO: 72066 - protein, 249 aa, Homo sapiens
MASDSGNQGTLCTLEFAVQMTCQSCVDAVRKSLQGVAGVQDVEVHLEDQMVLVHTTLPSQEVQALLEGTGRQAVLKGMGSGQLQNLGAAVAILGGPGTVQGVVRFLQLTPERCLIEGTIDGLEPGLHGLHVHQYGDLTNNCNSCGNHFNPDGASHGGPQDSDRTGPRGPCLPSPWGAQILRDWYPQEEMGTLGKQEEASESGNQKIAAWHHVAHIPYTHTGSHSSTAETWAMSVLMLTAAPSSEWRMSS

SEQ ID NO: 72067 - protein, 136 aa, Homo sapiens
  MOD_RES (1)..(1): Any amino acid
XGVWKIIAPWIGGVGYSSFMVCFILGLYFNVVNSWIIFYMSQSFQFPVPWEKCPLTMNSSGFDPECERTTPSIYFWYQQALKASDRIEDGGSPVYSLVLPFFLCWCLVGAFMINGLKSTGKQRQGFTVLARTVSIF

SEQ ID NO: 72068 - protein, 686 aa, Homo sapiens
MERALPRGRCLPLGKDLSSAKRKFADSLNEFKFQCIGDAETDDEMCIARSLQEFATVLRNLEDERIRMIENASEVLITPLEKFRKEQIGAAKEAKKKYDKETEKYCGILEKHLNLSSKKKESQLQEADSQVDLVRQHFYEVSLEYVFKVQEVQERKMFEFVEPLLAFLQGLFTFYHHGYELAKDFGDFKTQLTISIQNTRNRFEGTRSEVESLMKKMKENPLEHKTISPYTMEGYLYVQEKRHFGTSWVKHYCTYQRDSKQITMVPFDQKSGGKGGEDESVILKSCTRRKTDSIEKRFCFDVEAVDRPGVITMQALSEEDRRLWMEAMDGREPVYNSNKDSQSEGTAQLDSIGFSIIRKCIHAVETRGINEQGLYRIVGVNSRVQKLLSVLMDPKTASETETDICAEWEIKTITSALKTYLRMLPGPLMMYQFQRSFIKAAKLENQESRVSEIHSLVHRLPEKNRQMLQLLMNHLANVANNHKQNLMTVANLGVVFGPTLLRPQEETVAAIMDIKFQNIVIEILIENHEKIFNTVPDMPLTNAQLHLSRKKSSDSKPPSCSERPLTLFHTVQSTEKQEQRNSIINSSLESVSSNPNSILNSSSSLQPNMNSSDPDLAVVKPTRPNSLTPFRKAKALYACKAEHDSELSFTAGTVFDNVHPSQEPGWLEGTLNGKTGLIPENYVEFL

SEQ ID NO: 72069 - protein, 312 aa, Homo sapiens
MLLLYPREILILDLEVNQTVGVIAIERTGVPFLQVIPCFQRDGLFCLHENGCITLRVRRSYNNIFTTSNEEPDPDPVQELTYDLRSQCDAIRVTKTVRPFSMVCCPVNENAAALVVSDGRVMIWELKSAVCNRNSRNSSSGVSPLYSPVSFCGIPVGVLQNKLPDLSLDNMIGQSAIAGEEHPRGSILREVHLKFLLTGLLSGLPAPQFAIRMCPPLTTKNIKMYQPLLAVGTSNGSVLVYHLTSGLLHKELSIHSCEVKGIEWTSLTSFLSFATSTPNNMGLVRNELQLVDLPTGRSIAFRGERGNDESAI

SEQ ID NO: 72070 - protein, 56 aa, Homo sapiens
MNNLPHLQVVGLTWGHISWDLLALPPQDIILASDVFFEPEDFEDILATIYFLMHKN

SEQ ID NO: 72071 - protein, 262 aa, Homo sapiens
MADSVKTFLQDLARGIKDSIWGICTISKLDARIQQKREEQRRRRASSVLAQRRAQSIERKQESEPRIVSRIFQCCAWNGGVFWFSLLLFYRVFIPVLQSVTARIIGDPSLHGDVWSWLEFFLTSIFSALWVLPLFVLSKVVNAIWFQDIADLAFEVSGRKPHPFPSVSKIIADMLFNLLLQALFLIQGMFVSLFPIHLVGQLVSLLHMSLLYSLYCFEYRWFNKVAAFSLSSFLYSLSAPMKQRPLAKHISSSCASSPWWSS

SEQ ID NO: 72072 - protein, 754 aa, Homo sapiens
SDLFSYCDIESTKKVVVNGRVLELFRAAQLPNDVVLQIMELCGATRLGYFGRSQFYIALKLVAVAQSGFPLRVESINTVKDLPLPRFVASKNEQESRHAASYSSDSENQGSYSGVIPPPPGRGQVKKGSVSHDTVQPRTSADAQEPASPVVSPQQSPPTSPHTWRKHSRHPSGGNSERPLAGPGPFWSPFGEAQSGSSAGDAVWSGHSPPPPQENWVSFADTPPTSTLLTMHPASVQDQTTVRTVASATTAIEIRRQSSSYDDPWKITDEQRQYYVNQFKTIQPDLNGFIPGSAAKEFFTKSKLPILELSHIWELSDFDKDGALTLDEFCAAFHLVVARKNGYDLPEKLPESLMPKLIDLEDSADVGDQPGEVGYSGSPAEAPPSKSPSMPSLNQTWPELNQSSEDTAIVHPVPIRMTPSKIHMQEMELKRTGSDHTNPTSPLLVKPSDLLEENKINSSVKFASGNTVDGYSSSDSFTSDPEQIGSNVTRQRSHSGTSPDNTAPPPPPPRPQPSHSRSSSLDMNRTFTVTTGQQQAGVVAHPPAVPPRPQPSQAPGPAVHRPVDADGLITHTSTSPQQIPEQPNFADFSQFEVFAASNVNDEQDDEAEKHPEVLPAEKASDPASSLRVAKTDSKTEEKTAASAPANVSKGTTPLAPPPKPVRRRLKSEDELRPEVDEHTQKTGVLAAVLASQPSIPRSVGKDKKAIQASIRRNKETNTVLARLNSELQQQLKDVLEERISLEVQLEQLRPFSHL

SEQ ID NO: 72073 - protein, 70 aa, Homo sapiens
  MOD_RES (1)..(1): Any amino acid
XFIKAGSRYEDFSNLGTTHLLRLTSSLTTKGASSFKITRGIEAVGGKLSVHSIFNQEQILSQETTLFAHP

SEQ ID NO: 72074 - protein, 109 aa, Homo sapiens
MCCNYYGNSCGYGSSYGCGYGSGYGCGYGSSYGCGYGSGYGCGYGSSYGCGYGSGYSCGYGSGSGCGYGTGYGCGYGCGYGTGYGCGCGSGSGYCGYRPFCFRRCYSSC

SEQ ID NO: 72075 - protein, 77 aa, Homo sapiens
  MOD_RES (1)..(1): Any amino acid
XGLPHKVCRRCDENCLSCAGSSRNCSRCKTGFTQLGTSCITNHTCSNGDIWQRLETFWVVTTGRMYSHPVGGGQECC

SEQ ID NO: 72076 - protein, 53 aa, Homo sapiens
MVVFRGNTPSLWLSMSIVTVQLGQCGNQIGFEVFDALLSDSHSSQGLCSMREN

SEQ ID NO: 72077 - protein, 221 aa, Homo sapiens
MEDPFDFSREPWNKEADQPTTEPGMVLDSVEAGDTTPPTKRKSKFSGFGKIFKPWKWRKKKSSDKFKETSEVLERKISMRKPREELVKRGVLLEDPEQGGEDPGKPSDAMLKNGHTTPIGNARSSSPVQVEEEPVRLASLRKAIPEEDLKKRLGSTGSQPNSEAESVPENVPKPPLLPPKRPLSSSHEASEGQAKDATSSGGTARFIISTSITTAPAATTA

SEQ ID NO: 72078 - protein, 229 aa, Homo sapiens
PVASMEFAAICLRNALLLLPEEQQDPKQENGAKNSNQLGGNTESSESSETCSSKSHDGDKFIPAPPSSPLRKQELENLKCSILACSAYVALALGDNLMALNHADKLLQQPKLSGSLKFLGHLYAAEALISLDRISDAITHLNPENVTDVSLGISSNEQDQAGKRAPQCYPSSVNSARTVMLFNLGSAYCLRSEYDKARKCLHQAASMIHPKEVPPEAILLAVYLELQNG

SEQ ID NO: 72079 - protein, 36 aa, Homo sapiens
MEAGEGKERVPKQRQSRWHNITTAGAEQSPGSRGAA

SEQ ID NO: 72080 - protein, 70 aa, Homo sapiens
  MOD_RES (1)..(1): Any amino acid
XGQMKEPIQLEITEKRHGTLVWDTEVKPVDLQLVAASAPPPFSGVRMWPGCCPILPRTGCTCLCLNPWLP

SEQ ID NO: 72081 - protein, 191 aa, Homo sapiens
MNSVVSLLLILEPDKQEALIESLCEKLVKFREGERPSLRLQLLSNLFHGMDKNTPVRYTVYCSLIKVAASCGAIQYIPTELDQVRKWISDWNLTTEKKHTLLRLLYEALVDCKKSDAASKVMVELLGSYTEDNASQARVDAHRCIVRALKDPNAFLFDHLLTLKPVKFLEGELIHDLLTIFVSAKLASYVK

SEQ ID NO: 72082 - protein, 78 aa, Homo sapiens
MDKFWWHAAWGLCLVPLSLAQIDLNITCRFAGVFHVEKNGRYSISRTEAADLCKAFNSTLPTMAQMEKALSIGFETCR

SEQ ID NO: 72083 - protein, 1285 aa, Homo sapiens
MRTTKVYKLVIHKKGFGGSDDELVVNPKVFPHIKLGDIVEIAHPNDEYSPLLLQVKSLKEDLQKETISVDQTVTQVFRLRPYQDVYVNVVDPKDVTLDLVELTFKDQYIGRGDMWRLKKSLVSTCAYITQKVEFAGIRAQAGELWVKNEKVMCGYISEDTRVVFRSTSAMVYIFIQMSCEMWDFDIYGDLYFEKAVNGFLADLFTKWKEKNCSHEVTVVLFSRTFYDAKSVDEFPEINRASIRQDHKGRFYEDFYKVVVQNERREEWTSLLVTIKKLFIQYPVLVRLEQAEGFPQGDNSTSAQGNYLEAINLSFNVFDKHYINRNFDRTGQMSVVITPGVGVFEVDRLLMILTKQRMIDNGIGVDLVCMGEQPLHAVPLFKLHNRSAPRDSRLGDDYNIPHWINHSFYTSKSQLFCNSFTPRIKLAGKKPASEKAKNGRDTSLGSPKESENALPIQVDYDAYDAQVFRLPGPSRAQCLTTCRSVRERESHSRKSASSCDVSSSPSLPSRTLPTEEVRSQASDDSSLGKSANILMIPHPHLHQYEVSSSLGYTSTRDVLENMMEPPQRDSSAPGRFHVGSAESMLHVRPGGYTPQRALINPFAPSRMPMKLTSNRRRWMHTFPVGPSGEAIQIHHQTRQNMAELQGSGQRDPTHSSAELLELAYHEAAGRHSNSRQPGDGMSFLNFSGTEELSVGLLSNSGAGMNPRTQNKDSLEDSVSTSPDPILTLSAPPVVPGFCCTVGVDWKSLTTPACLPLTTDYFPDRQGLQNDYTEGCYDLLPEADIDRRDEDGVQMTAQQVFEEFICQRLMQGYQIIVQPKTQKPNPAVPPPLSSSPLYSRGLVSRNRPEEEDQYWLSMGRTFHKVTLKDKMITVTRYLPKYPYESAQIHYTYSLCPSHSDSEFVSCWVEFSHERLEEYKWNYLDQYICSAGSEDFSLIESLKFWRTRFLLLPACVTATKRITEGEAHCDIYGDRPRADEDEWQLLDGFVRFVEGLNRIRRRHRSDRMMRKGTAMKGLQMTGPISTHSLESTAPPVGKKGTSALSALLEMEASQKCLGEQQAAVHGGKSSAQSAESSSVAMTPTYMDSPRKVSVDQTATPMLDGTSLGICTGQSMDRGNSQTFGNSQNIGEQGYSSTNSSDSSSQQLVASSLTSSSTLTEILEAMKHPSTGVQLLSEQKGLSPYCFISAEVVHWLVNHVEGIQTQAMAIDIMQWPCSSPPPPGTQQEWTTSPASSASGLRWPLWQKSSCTLRFLPFSCPGCLAGQPPMQVGTAPLAEVLEDGARRQHF

SEQ ID NO: 72084 - protein, 28 aa, Homo sapiens
  MOD_RES (1)..(1): Any amino acid
XSPDSNLPVQLLTIRVASTNPAVQAFDI

SEQ ID NO: 72085 - protein, 242 aa, Homo sapiens
MLDHKDLEAEIHPLKNEERKSQENLGNPSKNEDNVKSAPPQSRLSRCRAAAFFLSLFLCLFVVFVVSFVIPCPDRPASQRMWRIDYSAAVIYDFLAVDDINGDRIQDVLFLYKNTNSSNNFSRSCVDEAAVSGANGSTLWERPVAQDVALVECAVPQPRGSEAPSACILVGRPSSFIAVNLFTGETLWNHSSSFSGNASILSPLLQVPDVDGDGAPDLLVLTQEREEVSGHLYSGSTGHQIG

SEQ ID NO: 72086 - protein, 365 aa, Homo sapiens
MAPKLITVLCLGFCLNQKICPHAGAQDKFSLSAWPSPVVPLGGRVTLSCHSHLRFVIWTIFQTTGTRSHELHTGLSNNITISPVTPEHAGTYRCVGIYKHASKWSAESNSLKIIVTGLFTKPSISAHPSSLVHAGARVSLRCHSELAFDEFILYKEGHIQHSQQLDQGMEAGIHYVEAVFSMGPVTPAHAGAYRCCGCFSHSRYEWSAPSDPLDIVITGKYKKPSLSTQVDPMMRLGEKLTLFCSSEISFDQYHLFRHGVAHGQWLSGGQRHREAFQANFSVGRATPVPGGTYRCYGSFNDSPYKPPVTRCNFTPQETLRVLLCHSQNPPLNLTPPWQTQSPRKANGRMKRSLQQKRHRRSYMPS

SEQ ID NO: 72087 - protein, 466 aa, Homo sapiens
DAAVSALAALCSEYYMKEPGEADPAIQEELITQYLAELRNPEEMTRCGFSLALGALPGFLLKGRLQQVLTGLRAVTHTSPEDVSFAESRRDGLKAIARICQTVGVKAGAPDEAVCGENVSQIYCALLGCMDDYTTDSRGDVGTWVRKAAMTSLMDLTLLLARSQPELIEAHTCERIMCCVAQQASEKIDRFRAHAASVFLTLLHFDSPPIPHVPHRGELEKLFPRSDVASVNWSAPSQAFPRITQLLGLPTYRYHVLLGLVVSLGGLTESTIRHSTQSLFEYMKGIQSDPQALGSFSGTLLQIFEDNLLNERVSVPLLKTLDHVLTHGCFDIFTTEEDHPFAVKLLALCKKEIKNSKDIQKLLSGIAVFCGMVQFPGDVRRQALLQLCLLLCHRFPLIRKTTASQVYETLLTYSDVVGADVLDEVVTVLSDTAWDAELAVVREQRNRLCDLLGVPRPQLVPQPGAC

SEQ ID NO: 72088 - protein, 102 aa, Homo sapiens
MKGASEEKLASVSNLVTVFENSRTPEAAPRGQRLEDVHHRPECRPPESPGPREKTNVGEAVGSEPRTVSRRYLNSLKNKLSSEAWRKSCQPVTLSGSGTQDS

SEQ ID NO: 72089 - protein, 547 aa, Homo sapiens
MMEEEELEFVEELEAVLQLTPEVQLAIEQVFPSQDPLDRADFNAVEYINTLFPTEQSLANIDEVVNKIRLKIRRLDDNIRTVVRGQTNVGQDGRQALEEAQKAIQQLFGKIKDIKDKAEKSEQMVKEITRDIKQLDHAKRHLTTSITTLNHLHMLAGGVDSLEAMTRRRQYGEVANLLQGVMNVLEHFHKYMGIPQIRQLSERVKAAQTELGQQILADFEEAFPSQGTKVAWLDKIDRRYAWIKRQLVDYEEKYGRMFPREWCMAERIAVEFCHVTRAELAKIMRTRAKEIEVKLLLFAIQRTTNFEGFLAKRFSGCTLTDGTLKKLESPPPSTNPFLEDEPTPEMEELATEKGDLDQPKKPKAPDNPFHGIVSKCFEPHLYVYIESQDKNLGELIDRFVADFKAQGPPKPNTDEGGAVLPSCADLFVYYKKCMVQCSQLSTGEPMIALTTIFQKYLREYAWKILSGNLPKTTTSSGGLTISSLLKEKEGSEVAKFTLEELCLICNILSTAEYCLATTQQLEEKLKEKVDRHLQQYSAAGSGSGCCL

SEQ ID NO: 72090 - protein, 101 aa, Homo sapiens
MEKSGPSSTISEQQLQRQEGWINTKTDLAEQSLISSEKWLQLHGLKSNKLTLKQILSQIGFPHCEDYVASLGRPVASRYADGLFPQLYRAEDGRVYNLNQN

SEQ ID NO: 72091 - protein, 58 aa, Homo sapiens
MAMQKIFAREILDSRGNPTVEVDLHTAKDFFPSPLLPTWNQSWKLGEAGVSLCTASCP

SEQ ID NO: 72092 - protein, 54 aa, Homo sapiens
MTSFHPRGLQAARAQKFKSKRPRSNSDCFQEEDLRQGFQWSRGRASLLGQPHLT

SEQ ID NO: 72093 - protein, 95 aa, Homo sapiens
  MOD_RES (1)..(1): Any amino acid
XLTIDPIRQEDAGEYQCEVSNPVSSNRSDPLKLTVKYDNTLGILIGVLVGSLLVAALVCFLLLRKTGRASDQSDFREQQPPASTPGHGPSDSSIS

SEQ ID NO: 72094 - protein, 186 aa, Homo sapiens
  MOD_RES (1)..(1): Any amino acid
XQTSRQPEWRLDARGDKSTLLRNIYLMSPLPFRLKKPLHHHPRQPSPGDSSGLLVGQKPDLPSQPHQDQPPSGGKPVVPTRLSSRHTMARLSRSSEPSQERPTALEDYPRAINNGNSVPYSDHSLDRNNNPQSELAPSRGDSESPRHFIPADYLESTEEFIRRRHDDKEMRPARAKFDFKAQTLKE

SEQ ID NO: 72095 - protein, 61 aa, Homo sapiens
MSTSWSDRLQNAADMPANMDKHALKKYRREAYHRVFVNRSLAMEKIKCFGFDMDYTLAETL

SEQ ID NO: 72096 - protein, 60 aa, Homo sapiens
MKIPNIGNVMNKFEILGVVGEGAYGVVLKCRHKETHEIVAIKKFKDSEENEEVKETTLRE

SEQ ID NO: 72097 - protein, 56 aa, Homo sapiens
MDWQPDEQGLQQVLQLLKDSQSPNTATQRIVQDKLKQLNQFPDFNNYLIFVLTRLK

SEQ ID NO: 72098 - protein, 125 aa, Homo sapiens
MNVIYPLAVPKGRRLCCEVCEAPAERVCAACTVTYYCGVVHQKADWDSIHEKICQLLIPLRTSMPFYNSEEERQHGLQQLQQRQVWAESFRLKNIYSKPSGQSSNQLTVVMPPTLYCIGIWDFSI

SEQ ID NO: 72099 - protein, 316 aa, Homo sapiens
MFPPSGHQDVSERRLDTQRPQVTMWERDVSSDRQEPGRRGRSWGLEGSQALSQQAEVIVRQLQELRRLEEEVRLLRETSLQQKMRLEAQAMELEALARAEKAGRAEAEGLRAALAGAEVVRKNLEEGSQRELEEVQRLHQEQLSSLTQAHEEALSSLTSKAEGLEKSLSSLETRRAGEAKELAEAQREAELLRKQLSKTQEDLEAQVTLVENLRKYVGEQVPSEVHSQTWELERQKLLETMQHLQEDRDSLHATAELLQVRVQSLTHILALQEEELTRKVQPSDSLEPEFTRKCQSLLNRWREKVFALMVQLKAQE

SEQ ID NO: 72100 - protein, 64 aa, Homo sapiens
MEEDDSYVPSDLTAEERQELENIRRRKQELLADIQRLKDEIAEVANEIENLGSTEESFSFCYFF

SEQ ID NO: 72101 - protein, 1700 aa, Homo sapiens
MTSAQCPALACVMSPLRFWGPWPLLMWQLLWLLVKEAQPLEWVKDPLQLTSNPLGPPEPWSSHSSHFPRESPHAPTLPADPWDFDHLGPSASSEMPAPPQESTENLVPFLDTWDSAGELPLEPEQFLASQQDLKDKLSPQERLPVSPKKLKKDPAQRWSLAEIIGIIRQLSTPQSQKQTLQNEYSSTDTPYPGSLPPELRVKSDEPPGPSEQVGPSQFHLEPETQNPETLEDIQSSSLQQEAPAQLPQLLEEEPSSMQQEAPALPPESSMESLTLPNHEVSVQPPGEDQAYYHLPNITVKPADVEVTITSEPTNETESSQAQQETPIQFPEEVEPSATQQEAPIEPPVPPMEHELSISEQQQPVQPSESPREVESSPTQQETPGQPPEHHEVTVSPPGHHQTHHLASPSVSVKPPDVQLTIAAEPSAEVGTSLVHQEATTRLSGSGNDVEPPAIQHGGPPLLPESSEEAGPLAVQQETSFQSPEPINNENPSPTQQEAAAEHPQTAEEGESSLTHQEAPAQTPEFPNVVVAQPPEHSHLTQATVQPLDLGFTITPESKTEVELSPTMKETPTQPPKKVVPQLRVYQGVTNPTPGQDQAQHPVSPSVTVQLLDLGLTITPEPTTEVGHSTPPKRTIVSPKHPEVTLPHPDQVQTQHSHLTRATVQPLDLGFTITPKSMTEVEPSTALMTTAPPPGHPEVTLPPSDKGQAQHSHLTQATVQPLDLELTITTKPTTEVKPSPTTEETSTQPPDLGLAIIPEPTTETGHSTALEKTTAPRPDRVQTLHRSLTEVTGPPTELEPAQDSLVQSESYTQNKALTAPEEHKASTSTNICELCTCGDEMLSCIDLNPEQRLRQVPVPEPNTHNGTFTILNFQGNYISYIDGNVWKAYSWTEKLILRENNLTELHKDSFEGLLSLQYLDLSCNKIQSIERHTFEPLPFLKFINLSCNVITELSFGTFQAWHGMQFLHKLILNHNPLTTVEDPYLFKLPALKYLDMGTTLVPLTTLKNILMMTVELEKLILPSHMACCLCQFKNSIEAVCKTVKLHCNSACLTNTTHCPEEASVGNPEGAFMKVLQARKNYTSTELIVEPEEPSDSSGINLSGFGSEQLDTNDESDFISTLRYILPYFSAVNLDVKSLLLPLIKLPTTGNSLAKIQTVGQNRQRVKRVLMGPRSIQKRHFKEVGRQSIRREQGAQASVENAAEEKRLGSPAPREVEQPHTQQGPEKLAGNAVYTKPSFTQEHKAAVSVLKPFSKGAPSTSSPAKALPQVRDRWKDLTHAISTLESAKARVTNTKTSKPIVHARKKYRFHKTRSHVTHRTPKVKKSPKVRKKSYLSRLMLANRLPFSAAKSLINSPSQGAFSSLGDLSPQENPFLEVSAPSEHFIEKNNTKHTTARNAFEENDFMENTNMPEGTISENTNYNHPPEADSAGTAFNLGPTVKQTETKWEYNNVGTDLSPEPKSFNYPLLSSPGDQFEIQLTQQLQSLIPNNNVRRLIAHVIRTLKMDCSGTHVQVTCAKLISRTGHLMKLLSGQQEVKASKIEWDTDQWKIENYINESTEAQSEQKEKSLELKKEVPGYGYTDKLILALIVTGILTILIILFCLIVICCHRRSLQEDEEGFSRGIFRFLPRRGCSSRRESQDGLSSFGQPLWFKDMYKPLSATRINNHAWKLHKKSSNEDKILNRDPGDSEAPTEEEESEALP

SEQ ID NO: 72102 - protein, 148 aa, Homo sapiens
MILIPRMLLVLFLLLPILSSAKAQVNPAICRYPLGMSGGQIPDEDITASSQWSESTAAKYGRLDSEEGDGAWCPEIPVEPDDLKEFLQIDLHTLHFITLVGTQGRHAGGHGIEFAPMYKINYSRDGTRWISWRNRHGKQVLDGNSNPY

SEQ ID NO: 72103 - protein, 84 aa, Homo sapiens
MFVPESTSKLQKFTSWFMGRRPEYTDPKVVAQGEGREVTRVRSQGFVTLLFNVVTKDMRKLGYDTGPSDTQGVLGPSPPQSFPQ

SEQ ID NO: 72104 - protein, 95 aa, Homo sapiens
MAAQIPIVATTSTPGIVRNSKKRPASPSHNGSSGGGYGASKKKKASASSFAQANYTDPQSKLRFSTIEEFSYIRRLPSDVVTGYLALRKATSIVP

SEQ ID NO: 72105 - protein, 486 aa, Homo sapiens
MLDDRARMEAAKKEKVEQILAEFQLQEEDLKKVMRRMQKEMDRGLRLETHEEASVKMLPTYVRSTPEGSEVGDFLSLDLGGTNFRVMLVKVGEGEEGQWSVKTKHQMYSIPEDAMTGTAEMLFDYISECISDFLDKHQMKHKKLPLGFTFSFPVRHEDIDKGILLNWTKGFKASGAEGNNVVGLLRDAIKRRGDFEMDVVAMVNDTVATMISCYYEDHQCEVGMIVGTGCNACYMEEMQNVELVEGDEGRMCVNTEWGAFGDSGELDEFLLEYDRLVDESSANPGDRACRGGSETPPARFLGLTQHSPKYEKLIGGKYMGELVRLVLLRLVDENLLFHGEASEQLRTRGAFETRFVSQVESDTGDRKQIYNILSTLGLRPSTTDCDIVRRACESVSTRAAHMCSAGLAGVINRMRESRSEDVMRITVGVDGSVYKLHPSFKERFHASVRRLTPSCEITFIESEEGSGRGAALVSAVACKKACMLGQ

SEQ ID NO: 72106 - protein, 39 aa, Homo sapiens
MVGYDPKPDGRNNTKFQVAVAGSVSGLVTRALISPFDVI

SEQ ID NO: 72107 - protein, 74 aa, Homo sapiens
MAGRGGAARPNGPAAGNKICQFKLVLLGESAVGKSSLVLRFVKGQFHEYQESTIGAAFLTQTVCLDDTTVKFEI

SEQ ID NO: 72108 - protein, 139 aa, Homo sapiens
MYPESTTGSPARLSLRQTGSPGMIYSTRYGSPKRQLQFYRNLGKSGLRVSCLGLGTWVTFGGQITDEMAEQLMTLAYDNGINLFDTAEVYAAGKAEVVLGNIIKKKGWRRSSLVITTKIFWGGKVPKPLVTSHAVGLFS

SEQ ID NO: 72109 - protein, 100 aa, Homo sapiens
MPGFQTPSEFLENPSQSSRLTAPFRKHVRPKKQHEIRRLGELVKKLSDFTGCTQVVDVGSGQGHLSRFMALGLGLMVKSIEGDQRLVERAQRLDQELLQA

SEQ ID NO: 72110 - protein, 792 aa, Homo sapiens
MERAGATSRGGQAPGFLLRLHTEGRAEAARVQEQDLRQWGLTGIHLRSYQLEGVNWLAQRFHCQNGCILGDEMGLGKTCQTIALFIYLAGRLNDEGPFLILCPLSVLSNWKEEMQRFAPGLSCVTYAGDKEERACLQQDLKQESRFHVLLTTYEICLKDASFLKSFPWSVLVVDEAHRLKNQSSLLHKTLSEFSVVFSLLLTGTPIQNSLQELYSLLSFVEPDLFSKEEVGDFIQRYQDIEKESESASELHKLLQPFLLRRVKAEVATELPKKTEVVIYHGMSALQKKYYKAILMKDLDAFENETAKKVKLQNILSQLRKCVDHPYLFDGVEPEPFEVGDHLTEASGKLHLLDKLLAFLYSGGHRVLLFSQMTQMLDILQDYMDYRGYSYERVDGSVRGEERHLAIKNFGQQPIFVFLLSTRAGGVGMNLTAADTVIFVDSDFNPQNDLQAAARAHRIGQNKSVKVIRLIGRDTVEEIVYRKAASKLQLTNMIIEGGHFTLGAQKPAADADLQVLIPGLVEGSTKRKRVLSPEELEDRQKKRQEAAAKRRRLIEEKKRQKEEAEHKKKMAWWESNNYQSFCLPSEESEPEDLENGEESSAELDYQDPDATSLKYVSGDVTHPQAGAEDALIVHCVDDSGHWGRGGLFTALEKRSAEPRKIYELAGKMKDLSLGGVLLFPVDDKESRNKGQDLLALIVAQHRDRSNVLSGIKMAALEEGLKKIFLAAKKKKASVHLPRIGHATKGFNWYGTERLIRKHLAARGIPTYIYYFPRSKSAVLHSQSSSSSSRQLVP

SEQ ID NO: 72111 - protein, 37 aa, Homo sapiens
MNAIVALCHFCELHGPRTLFCTEVLHAPLPQGDGNED

SEQ ID NO: 72112 - protein, 751 aa, Homo sapiens
MVFNEGEAQRLIEILSEKAGIIQDTWHKATQKGDPVAILKRQLEEKEKLLATEQEDAAVAKSKLRELNKEMAAEKAKAAAGEAKVKKQLVAREQEITAVQARMQASYREHVKEVQQLQGKIRTLQEQLENGPNTQLARLQQENSILRDALNQATSQVESKQNAELAKLRQELSKVSKELVEKSEAVRQDEQQRKALEAKAAAFEKQVLQLQASHRESEEALQKRLDEVSRELCHTQSSHASLRADAEKAQEQQQQMAELHSKLQSSEAEVRSKCEELSGLHGQLQEARAENSQLTERIRSIEALLEAGQARDAQDVQASQAEADQQQTRLKELESQVSGLEKEAIELREAVEQQKVKNNDLREKNWKAMEALATAEQACKEKLLSLTQAKEESEKQLCLIEAQTMEALLALLPELSVLAQQNYTEWLQDLKEKGPTLLKHPPAPAEPSSDLASKLREAEETQSTLQAECDQYRSILAETEGMLRDLQKSVEEEEQVWRAKVGAAEEELQKSRVTVKHLEEIVEKLKGELESSDQVREHTSHLEAELEKHMAAASAECQNYAKEVAGLRQLLLESQSQLDAAKSEAQKQSDELALVRQQLSEMKSHVEDGDIAGAPASSPEAPPAEQDPVQLKTQLEWTEAILEDEQTQRQKLTAEFEEAQTSACRLQEELEKLRTAGPLESSETEEASQLKERLEKEKKLTSDLGRAATRLQELLKTTQEQLAREKDTVKKLQEQLEKAEDGSSSKEGTSV

SEQ ID NO: 72113 - protein, 74 aa, Homo sapiens
MATEGDVELELETETSGPERPPEKPRKHDSGAADLERVTDYAEEKEIQSSNLETGERTGKSHYQEGRSGANSEW

SEQ ID NO: 72114 - protein, 280 aa, Homo sapiens
PAIEGVGPVTALEDSRSQEGANGEAESGELSRLRAELAGALAEMETMKAVAEVSESTKAEAVAAVQRQCQEEVASLQAILKDSISSYEAQITALKQERQQQQQDCEEKERELGRLKQLLSRAYPLDSLEKQMEKAHEDSEKLREIVLPMEKEIEELKAKLLRAEELIQEIQRRPRHAPSLHGSTELLPLSRDPSPPLEPLEELSGDGGPAAEAFAHNCDDSASISSFSLGGGVGSSSSLPQSRQGLSPEQEETASLVSTGTLVPEGIYLPPPGYQLVPDT

SEQ ID NO: 72115 - protein, 491 aa, Homo sapiens
EVKGLFKSENCPKVISCEFAHNSNWYITFQSDTDAQQAFKYLREEVKTFQGKPIMARIKAINTFFAKNGYRLMDSSIYSHPIQTQAQYASPVFMQPVYNPHQQYSVYSIVPQSWSPNPTPYFETPLAPFPNGSFVNGFNSPGSYKTNAAAMNMGRPFQKNRVKPQFRSSGGSEHSTEGSVSLGDGQLNRYSSRNFPAERHNPTVTGHQEQTYLQKETSTLQVEQNGDYGRGRRTLFRGRRRREDDRISRPHPSTAESKAPTPKFDLLASNFPPLPGSSSRMPGELVLENRMSDVVKGVYKEKDNEELTISCPVPADEQTECTSAQQLNMSTSSPCAAELTALSTTQQEKDLIEDSSVQKDGLNQTTIPVSPPSTTKPSREPRKLSYAEVCQKPPKEPSSVLVQPLRELRSNVVSPTKNEDNGAPENSVEKPHEKPEARASKDYSGFRGNIIPRGAAGKIREQRRQFSHRAIPQGVTRRNGKEQYVPPRSPK

SEQ ID NO: 72116 - protein, 282 aa, Homo sapiens
MAGNFWQSSHYLQWILDKQDLLKERQKDLKFLSEEEYWKLQIFFTNVIQALGEHLKLRQQVIATATVYFKRFYARYSLKSIDPVLMAPTCVFLASKVEEFGVVSNTRLIAAATSVLKTRFSYAFPKEFPYRMNHILECEFYLLELMDCCLIVYHPYRPLLQYVQDMGQEDMLLPLAWIVNDTYRTDLCLLYPPFMIALACLHVACVVQQKDARQWFAELSVDMEKILEIIRVILKLYEQWKNFDERKEMATILSKMPKPKPPPNSEGEQGPNGSQNSSYSQS

SEQ ID NO: 72117 - protein, 113 aa, Homo sapiens
MAAAATLRLSAQESHSVIQTGVQWRDHSSPQPPPTGDILIQGTVTFEDVAVNFTWEEWNLLSEAQRCLYRDVTLENLALISSLDPALDGSADNTQTGNLGQSVLPSHPEQKTA

SEQ ID NO: 72118 - protein, 214 aa, Homo sapiens
  MOD_RES (1)..(1): Any amino acid
XSWPATSLPVNNSNSGPNEIGNFGRGDVLPPVPGQGDKTATMLSDGAIYSSIDFTTKTSYNSSSQITQATPYATTQILHSNSIHELAVDLPDPQWKSSIQQKTDLMGFGYSLPDQNKGNNALLYIPDYRLAEGLSNRMPHNQSQDFSTTSSHNSSERSGSLSGGKGGKKKKNKNSSKPQKNNGSTWANVPLPPPPVQPLPGTELEHYAVEQQEN

SEQ ID NO: 72119 - protein, 71 aa, Homo sapiens
MRLRRLALFPGVALLLAAARLAAASDVLELTDDNFESRISDTGSAGLMLVEFFAPCSIPAGFEEESLLQPH

SEQ ID NO: 72120 - protein, 175 aa, Homo sapiens
MATQAHSLSYAGCNFLRQRLVLSTLSGRPVKIRKIRARDDNPGLRDFEASFIRLLDKITNGSRIEINQTGTTLYYQPGLLYGGSVEHDCSVLRGIGYYLESLLCLAPFMKHPLKIVLRGVTNDQVDPSVSIENKPWCGFCFVSCHNPTCEKKVPYKAQFYYKCILLLLFTLRFRG

SEQ ID NO: 72121 - protein, 258 aa, Homo sapiens
  MOD_RES (1)..(1): Any amino acid
XEGDEAARGQQPHQGLWRRRRTSDPSAAVNHVSSTTSLGENYEDDDLVNSDEVMKKPCPVQIVLAHEDDHNFELDEEALEQILLQEHIRDLNIVVVSVAGAFRKGKSFLLDFMLRYMYNKVYNLSQNIQEDDLQHLQLFTEYGRLAMEEIYQKPFQTLMFLIRDWSYPYEHSYGLEGGKQFLEKRLQVKQNQHEELQNVRKHIHNCFSNLGCFLLPHPGLKVATNPSFDGRLKDIDEDFKRELRNLVPLLLAPENLVE

SEQ ID NO: 72122 - protein, 450 aa, Homo sapiens
MAAVATCGSVAASTGSAVATASKSNVTSFQRRGPRASVTNDSGPRLVSIAGTRPSVRNGQLLVSTGLPALDQLLGGGLAVGTVLLIEEDKYNIYSPLLFKYFLAEGIVNGHTLLVASAKEDPANILQELPAPLLDDKCKKEFDEDVYNHKTPESNIKMKIAWRYQLLPKMEIGPVSSSRFGHYYDASKRMPQELIEASNWHGFFLPEKISSTLKVEPCSLTPGYTKLLQFIQNIIYEEGFDGSNPQKKQRNILRIGIQNLGSPLWGDDICCAENGGNSHSLTKFLYVLRGLLRTSLSACIITMPTHLIQNKAIIARVTTLSDVVVGLESFIGSERETNPLYKDYHGLIHIRQIPRLNNLICDESDVKDLAFKLKRKLFTIEAEVQKGVSTATFLLDGPRKKLFPCLFQLLEVACIPWLMASSSVFKASNIGFESLCYQLSGFFSASLLHF

SEQ ID NO: 72123 - protein, 827 aa, Homo sapiens
MLLLEVISGERLAKPERGKMRVHKISNVNKALDFIASKGVKLVSIGAEEIVDGNVKMTLGMIWTIILRFAIQDISVEETSAKEGLLLWCQRKTAPYKNVNIQNFHISWKDGLGFCALIHRHRPELIDYGKLRKDDPLTNLNTAFDVAEKYLDIPKMLDAEDIVGTARPDEKAIMTYVSSFYHAFSGAQKAETAANRICKVLAVNQENEQLMEDYEKLASDLLEWIRRTIPWLENRVPENTMHAMQQKLEDFRDYRRLHKPPKVQEKCQLEINFNTLQTKLRLSNRPAFMPSEGRMVSDINNAWGCLEQVEKGYEEWLLNEIRRLERLDHLAEKFRQKASIHEAWTDGKEAMLRQKDYETATLSEIKALLKKHEAFESDLAAHQDRVEQIAAIAQELNELDYYDSPSVNARCQKICDQWDNLGALTQKRREALERTEKLLETIDQLYLEYAKRAAPFNNWMEGAMEDLQDTFIVHTIEEIQGLTTAHEQFKATLPDADKERLAILGIHNEVSKIVQTYHVNMAGTNPYTTITPQEINGKWDHVRQLVPRRDQALTEEHARQQHNERLRKQFGAQANVIGPWIQTKMEEIGRISIEMHGTLEDQLSHLRQYEKSIVNYKPKIDQLEGDHQLIQEALIFDNKHTNYTMEHIRVGWEQLLTTIARTINEVENQILTRDAKGISQEQMNEFRASFNHFDRDHSGTLGPEEFKACLISLGYDIGNDPQGEAEFARIMSIVDPNRLGVVTFQAFIDFMSRETADTDTADQVMASFKILAGDKNYITMDELRRELPPDQAEYCIARMAPYTGPDSVPGALDYMSFSTALYGESDL

SEQ ID NO: 72124 - protein, 217 aa, Homo sapiens
MAQEKMKLGFKSLPSSTTADGNILRRVNSAPLINGLGFNSQVLQADMLRIRTNRTTFRNRRSLLLPPPPFHGSISRLHQIKQEEAMDLINRETMSEWKLQSEIQISHSWEEGLKLNDNGLQKSSSLKCIDLTPVSSMASSIKKTGKQCFSPSLQTCVSCTGSPSSPIPSPMQQYIILLPATFDGNDSNAGSSGNSSAEIGTVTNSPVSPSDTGSHLF

SEQ ID NO: 72125 - protein, 343 aa, Homo sapiens
MSFLVSKPERIRRWVSEKFIVEGLRDLELFGEQPPGDTRRKTNDASSESIASFSKQEVMSSFLPEGGCYELLTVIGKGFEDLMTVNLARYKPTGEYVTVRRINLEACSNEMVTFLQGELHVSKLFNHPNIVPYRATFIADNELWVVTSFMAYGSAKDLICTHFMDGMNELAIAYILQGVLKALDYIHHMGYVHRSVKASHILISVDGKVYLSGLRSNLSMISHGQRQRVVHDFPKYSVKVLPWLSPEVLQQNLQGYDAKSDIYSVGITACELANGHVPFKDMPATQMLLEKLNGTVPCLLDTSTIPAEELTMSPSRSVANSGLSDSLTTSTPRPSNGPVPAPS

SEQ ID NO: 72126 - protein, 482 aa, Homo sapiens
MSIAYLDPGNIESDLQSGAVAGFKLLWILLLATLVGLLLQRLAARLGVVTGLHLAEVCHRQYPKVPRVILWLMVELAIIGSDMQEVIGSAIAINLLSVGRIPLWGGVLITIADTFVFLFLDKYGLRKLEAFFGFLITIMALTFGYEYVTVKPSQSQVLKGMFVPSCSGCRTPQIEQAVGIVGAVIMPHNMYLHSALVKSRQVNRNNKQEVREANKYFFIESCIALFVSFIINVFVVSVFAEAFFGKTNEQVVEVCTNTSSPHAGLFPKDNSTLAVDIYKGGVVLGCYFGPAALYIWAVGILAAGQSSTMTGTYSGQFVMEGFLNLKWSRFARVVLTRSIAIIPTLLVAVFQDVEHLTGMNDFLNVLQSLQLPFALIPILTFTSLRPVMSDFANGLGWRIAGGILVLIICSINMYFVVVYVRDLGHVALYVVAAVVSVAYLGFVFYLGWQCLIALGMSFLDCGHTVSISKGLLTEEATRGYVK

SEQ ID NO: 72127 - protein, 151 aa, Homo sapiens
MQGDARRRRNENYFDDIPRSKLERQMAQSSVCEIWTNQNAGFPFSAIHQVHNTGDWGEPSITLRPPNEATASTPVQYWQHHPEKLIFQSCDYKAFYLGSMLIKELRGTESTQDACAKMRGKEKSTEQMKKVPTIILSVSYKGVKFIDATNK

SEQ ID NO: 72128 - protein, 206 aa, Homo sapiens
MGRCCFYTAGTLSLLLLVTSVTLLVARVFQKAVDQSIEKKIVLRNGTEAFDSWEKPPLPVYTQFYFFNVTNPEEILRGETPRVEEVGPYTYRELRNKANIQFGDNGTTISAVSNKAYVFERDQSVGDPKIDLIRTLNIPVLTVIEWSQVHFLREIIEAMLKAYQQKLFVTHTVDELLWGYKDEILSLIHVFRPDISPYFGLFYEVT

SEQ ID NO: 72129 - protein, 57 aa, Homo sapiens
MDTEPNPGTSSVSTTTSSTTTTTITTSSSRMQQPQISVYSGSDRHAVQELYSLGYET

SEQ ID NO: 72130 - protein, 52 aa, Homo sapiens
MLQLSEFDPLLREIAPGPLTTPSVPGSTPGPCFLCGSAPGTLHCPSCKQALC

SEQ ID NO: 72131 - protein, 61 aa, Homo sapiens
LGKSFLQFSTMKMAHAPPGHHSVIGRPSVNGLAYAEYVIYRGEQVDTLKARHLCSIPAKNT

SEQ ID NO: 72132 - protein, 62 aa, Homo sapiens
MAIKDILLDDIVLTHSLFLPTEKFLQELHQYFVRAGGMEGPEGLGRKQACLAMLLHFLDTYQ

SEQ ID NO: 72133 - protein, 77 aa, Homo sapiens
MPDEINIDELLELESEEERSRKIQGLLKSCGKPVEDFIQELLAKLQGLHRQPGLRQPSPSHDGSLSPLQDRARTAHP

SEQ ID NO: 72134 - protein, 156 aa, Homo sapiens
AAATGAGGAGAYGTGGPGGPGGPAGGGGACSMGPLTGSYNVNMALAGGPGPGGGGGSSGGAGALSAAGVIRVPAHRPLAGAVAHPQPLATGLPTVPSVPAMPGVNNLTGLTFPWMESNRRYTKDRFTVALSPFTVTRRIGHPYQNRTPPKKKKPRT

SEQ ID NO: 72135 - protein, 89 aa, Homo sapiens
MDNRFATAFVIACVLSLISTIYMAASIGTDFWYEYRSPVQENSSDLNKSIWDEFISDEADEKTYNDALFRYNGTVGLWRRCITIPKNMH

SEQ ID NO: 72136 - protein, 120 aa, Homo sapiens
MGENEDEKQAQAGQVFENFVQASTCKGTLQAFNILTRHLDLDPLDHRNFYSKLKSKVTTWKAKALWYKLDKRGSHKEYKRGKSCTNTKCLIVGGGPCGLRTAIELAYLGAKVVVVEKRDS

SEQ ID NO: 72137 - protein, 188 aa, Homo sapiens
MCKYVSRPRRPLAPARMATVVLGGDTMGPERIFPNQTEELGHQGPSEGTGDWSSEEPEEEQEETGSGPAGYSYQPLNQDPEQEEVELAPVGDGDVVADIQDRIQALGLHLPDPPLESEDEDEEGATALNNHSSIPMDPEHVELVKRTMAGVSLPAPGVPAWAREISDAQWEDVVQKALQARQASPAWK

SEQ ID NO: 72138 - protein, 164 aa, Homo sapiens
MDPGLQQALNGMAPPGDTAMHVPAGSVASHLGTTSRSYFYLTTATLALCLVFTVATIMVLVVQRTDSIPNSPDNVPLKGGNCSEDLLCILKRAPFKKSWAYLQVAKHLNKTKLSWNKDGILHGVRYQDGNLVIQFPDYCGMILHHSHSTLDSGKGHCCLETLQP

SEQ ID NO: 72139 - protein, 311 aa, Homo sapiens
MSDNQSWNSSGSEEDPETESGPPVERCGVLSKWTNYIHGWQDRWVVLKNNALSYYKSEDETEYGCRGSICLSKAVITPHDFDECRFDISVNDSVWYLRAQDPDHRQQWIDAIEQHKTESGYGSESSLRRHGSMVSLVSGASGYSATSTSSFKKGHSLREKLAEMETFRDILCRQVDTLQKYFDACADAVSKDELQRDKVVEDDEDDFPTTRSDGDFLHSTNGNKEKLFPHVTPKGINGIDFKGEAITFKATTAGILATLSHCIELMVKREDSWQKRLDKETEKKRRTEEAYKNAMTELKKKSHFGGPDYEV

SEQ ID NO: 72140 - protein, 111 aa, Homo sapiens
  MOD_RES (1)..(1): Any amino acid
XSKFEEYVIVGLNWLQAVIKRWWSELSSKTEIINDGNIQILKQQLSGLWEQENHLTLVPGYTGNIAKKLKEEGRARWLMPVIPVLWEAKVGRSRAQEIETIPANMVKPHLY

SEQ ID NO: 72141 - protein, 70 aa, Homo sapiens
MSVTLTSVKRVQSSPNLLAAGRDSQSPDSAWRSYNDGNQETLNGDATYSSLAAKGFRSVRPNLQDKRSPT

SEQ ID NO: 72142 - protein, 117 aa, Homo sapiens
MGQGNVDLLVLLDLIGAPNPTFPNFFPNSARWFERLQAIEHELHELGLLKDHSLEGRYFQNYSYGGVIQDDHIPFLRRGVPVLHLIPSPFPEVWHTMDDNEENLDESTIDNLNKILQ

SEQ ID NO: 72143 - protein, 122 aa, Homo sapiens
MEGDDCEFRYGDGTNEAQDNDFPTVERSRLQEMLSLLGLETYQVQKLSLQDSLQISFDSMKNWAPQVPKDLPWNFLRKLQALNADARNTTMVLDVLPDARPVEKESQMEEEIIYWDPADDLA

SEQ ID NO: 72144 - protein, 136 aa, Homo sapiens
MNGQEVFYLTYTPEDVEGNVQLETGDKINFVIDNNKHTGAVSARNIMLLKKKQARCQGVVCAMKEAFGFIERGDVVKEIFFHYSEFKGDLETLQPGDDVEFTIKDRNGKEVATDVRLLPQGTVIFEDISIEHFEGT

SEQ ID NO: 72145 - protein, 258 aa, Homo sapiens
EKRYECNECGKAFNYGSELTLHQRIHTGEKPYECKECGKAFRQRSQLTQHQRLHTGEKPYECKQCGKAFIRGFQLTEHLRLHTGEKPYECKECGKTFRHRSHLTIHQRIHTGEKPYECRECGKAFSYHSSFSHHQKIHSGKKPYECHECGKAFCDGLQLTLHQRIHTGEKPYECKECGKTFRQCSHLKRHQRIHTGEKPHECMICGKAFRLHSHLIQHQRIHTGEKPYECKECGKAFSYHSSFSHHQRIHSDATTAIS

SEQ ID NO: 72146 - protein, 108 aa, Homo sapiens
  MOD_RES (1)..(1): Any amino acid
XDIASNRIKKIENISHLTELQEFWMNDNLLESWSDLDELKGARSLETVYLERNPLQKDPQYRRKVMLALPSVRQIDATFVRALLQRAPGRADCFHVCPSVLATSLACG

SEQ ID NO: 72147 - protein, 215 aa, Homo sapiens
MPPGGGGEVVFSCPVRKVLKPIQLTDPGKIKRIRGMAYSVRVSPQMANRIVDSARSILNKFIPDIYIYTDHMKGVNSGKSPGFGLSLVAETTSGTFLSAELASNPQGQGAAVLPEDLGRNCARLLLEEIYRGGCVDSTNQSLALLLMTLGQQDVSKVLLGPLSPYTIEFLRHLKSFFQIMFKIETKPCGEELKGGDKVLMTCVGIGFSNLSKTLK

SEQ ID NO: 72148 - protein, 170 aa, Homo sapiens
MASTAGYIVSTSCKHIIDDQHWLSSAYTQFAVPYFIYDIYAMFLCHWHKHQVKGHGGDDGAARAPGSTWAIARGYLHKEFLMVLHHAAMVLVCFPLSVVWRQGKGDFFLGCMLMAEVSTPFVCLGKILIQVSEHGRVQEPNGEVTGRGGTFKVAAKGSSPFVIPPSPRAF

SEQ ID NO: 72149 - protein, 141 aa, Homo sapiens
MRVEPSWPNQLLKTSVKFLMTSPEIASLSWGQMKVKGSNTTYKDCKVWPGGSRTWDWRETGTEHSPGVQPADVKEVVEKGVQTLVIGRGMSEALKVPSSTVEYLKKHGIDVRVLQTEQAVKEYNALVAQGVRVGGVFHSTC

SEQ ID NO: 72150 - protein, 98 aa, Homo sapiens
MAKQPSDVSSECDREGRQLQPAERPPQLRPGAPTSLQTEPQDRSPAPMSCDKSTQTPSPPCQAFNHYLSAMDDSAGSSLRIALHREVQWPLKWLAKSS

SEQ ID NO: 72151 - protein, 38 aa, Homo sapiens
MKDCPMPRNAARISEKRKEYMDACGEANNQNFQQRYHA

SEQ ID NO: 72152 - protein, 196 aa, Homo sapiens
DLDETLVHSSFKPISNADFIVPVEIDGTIHQVYVLKRPHVDEFLQRMGQLFECVLFTASLAKYADPVADLLDRWGVFRARLFRESCVFHRGNYVKDLSRLGRELSKVIIVDNSPASYIFHPENAVPVQSWFDDMTDTELLDLIPFFEGLSREDDVYSMLHRLCNSNEASCQLHPPNSTLVCGLLCEYSEGKSFSAD

SEQ ID NO: 72153 - protein, 95 aa, Homo sapiens
MNVTSLFSFTSPAVKRLLGWKQGDEEEKWAEKAVDALVKKLKKKKGAMEELEKALSCPGQPSNCVTIPRSLDGRLQVSHRKGLPHVIYCRVWRWP

SEQ ID NO: 72154 - protein, 52 aa, Homo sapiens
MRIEGCIIGFDEYMNLVLDDAEEIHSKTKSRKQLGRIMLKGDNITLLQSVSN

SEQ ID NO: 72155 - protein, 149 aa, Homo sapiens
METSSRELQAAEYLEKHQIKEVVSYLTSALLFFRPEKPKEYLISLLERLRIAKVTGVAFPFFMDNSNIVAMFEMMDSSGRGTISFVQYKEALKTLGLCTEDEDLQDDGHKITLDKFKEEVNKRMKEICEKTKGKDSESYQTAAGLLLLH

SEQ ID NO: 72156 - protein, 582 aa, Homo sapiens
MVSNPVHGLPFLPGTSFKDSTKTAFHRSQTLSYRNGYAIVRRPTVGIGGDRLQFNQLSQAELDELASKAPVLTYGQPKQAPPADFIPAHVAFDKKVLKFDAYFQEDVPMSTEEQYRIRQVNIYYYLEDDSMSVIEPVVENSGILQGKLIKRQRLAKNDRGDHYHWKDLNRGINITIYGKTFRVVDCDQFTQVFLESQGIELNPPEKMALDPYTELRKQPLRKYVTPSDFDQLKQFLTFDKQVLRFYAIWDDTDSMYGECRTYIIHYYLMDDTVEIREVHERNDGRDPFPLLMNRQRVPKVLVENAKNFPQCVLEISDQEVLEWYTAKDFIVGKSLTILGRTFFIYDCDPFTRRYYKEKFGITDLPRIDVSKREPPPVKQELPPYNGFGLVEDSAQNCFALIPKAPKKDVIKMLVNDNKVLRYLAVLESPIPEDKDRRFVFSYFLATDMISIFEPPVRNSGIIGGKYLGRTKVVKPYSTVDNPVYYGPSDFFIGAVIEVFGHRFIILDTDEYVLKYMESNAAQYSPEALASIQNHVRKREAPAPEAERFAFTSFHWLHIQILLKGSCVDIPTVSFLFYNSIYI

SEQ ID NO: 72157 - protein, 542 aa, Homo sapiens
MAALTIATGTGNWFSALALGVTLLKCLLIPTYHSTDFEVHRNWLAITHSLPISQWYYEATSEWTLDYPPFFAWFEYILSHVAKYFDQEMLNVHNLNYSSSRTLLFQRFSVIFMDVLFVYAVRECCKCIDGKKVGKELTEKPKFILSVLLLWNFGLLIVDHIHFQYNGFLFGLMLLSIARLFQKRHMEGAFLFAVLLHFKHIYLYVAPAYGVYLLRSYCFTANKPDGSIRWKSFSFVRVISLGLVVFLVSALSLGPFLALNQLPQVFSRLFPFKRGLCHAYWAPNFWALYNALDKVLSVIGLKLKFLDPNNIPKASMTSGLVQQFQHTVLPSVTPLATLICTLIAILVQAILLPQPPEYLGIQPSIFCLWFKPQGPRGFLRCLTLCALSSFMFGWHVHEKAILLAILPMSLLSVGKAGDASIFLILTTTGHYSLFPLLFTAPELPIKILLMLLFTIYSISSLKTLFRKEKPLFNWMETFYLLGLGPLEVCCEFVFPFTSWKVKYPFIPLLLTSVYCAVGITYAWFKLYVSVLIDSAIGKTKKQ

SEQ ID NO: 72158 - protein, 109 aa, Homo sapiens
MRDRRGPLGTCLAQVQQAGGGDSDKLSCSLKKRMPEGPWPADAPSWMNKPVVDGNSQSEALSLEMRKDPSGAGLWLHSGGPVLPYVRESVRRNPASAATPSTAVGLFPA

SEQ ID NO: 72159 - protein, 1043 aa, Homo sapiens
MMCTMQAHITQALSNPGDVIKPMFVINEMRRIARHFRFGNQEDAHEFLQYTVDAMQKACLNGSNKLDRHTQATTLVCQIFGGYLRSRVKCLNCKGVSDTFDPYLDITLEIKAAQSVNKALEQFVKPEQLDGENSYKCSKCKKMVPASKRFTIHRSSNVLTLSLKRFANFTGGKIAKDVKYPEYLDIRPYMSQPNGEPIVYVLYAVLVHTGFNCHAGHYFCYIKASNGLWYQMNDSIVSTSDIRSVLSQQAYVLFYIRSHDVKNGGELTHPTHSPGQSSPRPVISQRVVTNKQAAPGFIGPQLPSHMIKNPPHLNGTGPLKDTPSSSMSSPNGNSSVNRASPVNASASVQNWSVNRSSVIPEHPKKQKITISIHNKLPVRQCQSQPNLHSNSLENPTKPVPSSTITNSAVQSTSNASTMSVSSKVTKPIPRSESCSQPVMNGKSKLNSSVLVPYGAESSEDSDEESKGLGKENGIGTIVSSHSPGQDAEDEEATPHELQEPMTLNGANSADSDSDPKENGLAPDGASCQGQPALHSENPFAKANGLPGKLMPAPLLSLPEDKILETFRLSNKLKGSTDEMSAPGAERGPPEDRDAEPQPGSPAAESLEEPDAAAGLSSTKKAPPPRDPGTPATKEGAWEAMAVAPEEPPPSAGEDIVGDTAPPDLCDPGSLTGDASPLSQDAKGMIAEGPRDSALAEAPEGLSPAPPARSEEPCEQPLLVHPSGDHARDAQDPSQSLGAPEAAERPPAPVLDMAPAGHPEGDAEPSPGERVEDAAAPKAPGPSPAKEKIGSLRKVDRGHYRSRRERSSSGEPARESRSKTEGHRHRRRRTCPRERDRQDRHAPEHHPGHGDRLSPGERRSLGRCSHHHSRHRSGVELDWVRHHYTEGERGWGREKFYPDRPRWDRCRYYHDRYALYAARDWKPFHGGREHERAGLHERPHKDHNRGRRGCEPARERERHRPSSPRAGAPHALAPHPDRFSHDRTALVAGDNCNLSDRFHEHENGKSRKRRHDSVENSDSHVEKKARRSEQKDPLEEPKAKKHKK

SEQ ID NO: 72160 - protein, 732 aa, Homo sapiens
MSSTRSQNPHGLKQIGLDQIWDDLRAGIQQVYTRQSMAKSRYMELYTHVYNYCTSVHQSNQARGAGVPPSKSKKGQTPGGAQFVGLELYKRLKEFLKNYLTNLLKDGEDLMDESVLKFYTQQWEDYRFSSKVLNGICAYLNRHWVRRECDEGRKGIYEIYSLALVTWRDCLFRPLNKQVTNAVLKLIEKERNGETINTRLISGVVQSYVELGLNEDDAFAKGPTLTVYKESFESQFLADTERFYTRESTEFLQQNPVTEYMKKAEARLLEEQRRVQVYLHESTQDELARKCEQVLIEKHLEIFHTEFQNLLDADKNEDLGRMYNLVSRIQDGLGELKKLLETHIHNQGLAAIEKCGEAALNDPKMYVQTVLDVHKKYNALVMSAFNNDAGFVAALDKACGRFINNNAVTKMAQSSSKSPELLARYCDSLLKKSSKNPEEAELEDTLNQVQACGFEYTSKLQRMFQDIGVSKDLNEQFKKHLTNSEPLDLDFSIQVLSSGSWPFQQSCTFALPSELERSYQRFTAFYASRHSGRKLTWLYQLSKGELVTNCFKNRYTLQASTFQMAILLQYNTEDAYTVQQLTDSTQIKMDILAQVLQILLKSKLLVLEDENANVDEVELKPDTLIKLYLGYKNKKLRVNINVPMKTEQKQEQETTHKNIEEDRKLLIQAAIVRIMKMRKVLKHQQLLGEVLTQLSSRFKPRVPVIKKCIDILIEKEYLERVDGEKDTYSYLA

SEQ ID NO: 72161 - protein, 67 aa, Homo sapiens
MSRRRFDCRSISGLLTTTPQIPIKMENFNNFYILTSKELGRGKFAVVRQCISKSTGQEYAAKFLKKR

SEQ ID NO: 72162 - protein, 494 aa, Homo sapiens
MGGAGILLLLLAGAGVVVAWRPPKGKCPLRCSCSKDSALCEGSPDLPVSFSPTLLSLSLVRTGVTQLKAGSFLRIPSLHLLLFTSNSFSVIEDDAFAGLSHLQYLFIEDNEIGSISKNALRGLRSLTHLSLANNHLETLPRFLFRGLDTLTHVDLRGNPFQCDCRVLWLLQWMPTVNASVGTGACAGPASLSHMQLHHLDPKTFKCRAIELSWFQTVGESALSVEPFSYQGEPHIVLAQPFAGRCLILSWDYSLQRFRPEEELPGEPPPRPSACPAACLAGLTCLPTSPQRPPWCPASHWCWARASSCWLPACGGAHSCGPGPVPACAWPQRRPWPRGGCCGPMTPSSCGWKGNPASWWPMPPRRAAPRCCAATGPAFTRTRACTPGTGTRTLRPWSWTAGPTCCWPRLPSGPCSSTGPVAASRDAQTSPRPRMSMPHATSRLVGTCSCASHATLGTPWSCAGTAPCFVCCSNFPRAVPTSSSHCSSPGTSWPS

SEQ ID NO: 72163 - protein, 63 aa, Homo sapiens
MHKVNVVSMLQEFWESKQQQKAAFPSEGVVVYESLPAPGPPFVSYVTLPGGSCFGNFQCCLSR

SEQ ID NO: 72164 - protein, 117 aa, Homo sapiens
MGIKTALPAAELGLYSLVLSGALAYAGRGLLEASQDGAHRKAFRESVRPGWEYIGRKMDVADFEWVMWFTSFRNVIIFALSGHVLFAKLCTMVAPKLRSWMYAVYGALAVMGTMGPW

SEQ ID NO: 72165 - protein, 110 aa, Homo sapiens
  MOD_RES (1)..(1): Any amino acid
XAIAFADMLKVNKTLTSLNIESNFITGTGILALVEALKENDTLTEIKIDNQRQQLGTAVEMEIAQMLEENSRILKFGYQFTKQGPRTRVAAAITKNNDLVRKKRVEADRR

SEQ ID NO: 72166 - protein, 30 aa, Homo sapiens
VEEILSKGQHLYKEKPATQPVKLLLRLLLW

SEQ ID NO: 72167 - protein, 140 aa, Homo sapiens
MPVAEGKSVQQTVELLTRKLEMLGAEKQGTFCVDCETYHTAASTLGSQGQTGKLMYVMHNSEYPLSCFALFENGPCLIADTNFDVLMVKLKGFFQSAKASKIETRGTRYQYCDFLVKVGTVTMGPSARGISVEVEYGPCV

SEQ ID NO: 72168 - protein, 246 aa, Homo sapiens
MYLKHGSPVKMMESYIAVLTKGICQSEENGSFLSKDFDARKAYLAGSIKDIVSQFGMETVILHTALMLKKRIVVYHPKIEAVQEFTRTLPALVWHRQDWTILHSYVHLNADELEALQMCTGYVAGFVDLEVSNRPDLYDVFVNLAESEITIAPLAKEAMAMGKLHKEMGQLIVQSAEDPEKSESHVIQDIALKTREIFTNLAPFSEVSADGEKRVLNLEALKQKRFPPATENFLYHLAAAEQMLKI

SEQ ID NO: 72169 - protein, 137 aa, Homo sapiens
MNKLSGGGGRRTRVEGGQLGGEEWTRHGSFVNKPTRGWLHPNDKVMGPGVSYLVRYMGCVEVLQSMRALDFNTRTQVTREAISLVCEAVPGAKGATRRRKPCSRPLSSILGRSNLKFAGMPITLTVSTSSLNLMAAD

SEQ ID NO: 72170 - protein, 259 aa, Homo sapiens
  MOD_RES (1)..(1): Any amino acid
XTLYKERFKQGTSKKCIQSEDKKWFTPREFEIEGDRGASKNWKLSIRCGGYTLKVLMERILESHNNTLVDPCPENSNICEVCNKWGRLFCCDTCPRSFHEHCHIPSVEANKNPWSCIFCRIKTIQERCPESQSGHQESEVLMRQMLPEEQLKCEFLLLKVYCDSKSCFFASEPYYNREGSQGPQKPMWLNKVKTSLNEQMYTRVEGFVQDMRLIFHNHKEFYREDKFTRLGIQVQDIFEKNFRNIFAIQETSKNIIMFI

SEQ ID NO: 72171 - protein, 456 aa, Homo sapiens
DGPTETLEELVLGLAAEVCDDFLVYCGDTHGSFVVRTLLQVLGGTILESERARPRGSQSSEAQKTPAQECKPADFEVPETFLNRLQDLSSSFLKDIAVFITDKISSFCLQVALQVLHRKLPQFCAHLCNAVIGYLSTRGSSVDGSPLLLFLRDQTSSRLLEQVLLVLEPPRLQSLFEEHLQGQLQTLAAHPIANFPLQRLLDAVTTPELLSPVFEELSPVLEAVLAQGHPGVVIALVGACRRVGAYQAKVLQLLLEAFHCAEPSSRQVACVPLFATLMAYEVYYGLTEEEGAVPAEHQVAMAAARALGDVTVLGSLLLQHLLHFSTPGLVLRSLGALTGPQLLSLAQSPAGSHVLDAILTSPSVTRKLRRRVLQNLKGQYVALACSRHGSRVLDAIWSGAALRARKEIAAELGEQNQELIRDPFGHHVARNVALTTFLKRREAWEQQQVFAVGRLE

SEQ ID NO: 72172 - protein, 51 aa, Homo sapiens
WTLEGGSLSKRQGLFEKHEKPKYVLCVTFLEGGDVVTGDSGGNLYVWGKGP

SEQ ID NO: 72173 - protein, 117 aa, Homo sapiens
  MOD_RES (1)..(1): Any amino acid
XEQEEYVQEGIRWTPIQYFNNKVVCDLIENKLSPPGIMSVLDDVCATMHATGGGADQTLLQKLQAAVGTHEHFNSWSAGFVIHHYAGKVSYDVSGFCERNRDVLFSDLIELMQTSEQ

SEQ ID NO: 72174 - protein, 149 aa, Homo sapiens
MQEVSRLLSEGADVNAKHRLGWTALMVAAINRNNSVVQVLLAAGADPNLGDDFSSVYKTAKEQGIHSLEDGGQDGASRHITNQWTSALEFRRWLGLPAGVLITREDDFNNRLNNRASFKGCTALHYAVLADDYRTVKELLDGGANPLQR

SEQ ID NO: 72175 - protein, 382 aa, Homo sapiens
MVVEVDSMPAASSVKKPFGLRSKMGKWCCRCFPCCRESGKSNVGTSGDHDDSAMKTLRSKMGKWCRHCFPCCRGSGKSNVGASGDHDDSAMKTLRNKMGKWCCHCFPCCRGSSKSKVGAWGDYDDSAFMEPRYHVRGEDLDKLHRAAWWGKVPRKDLIVMLRDTDVNKQDKQKRTALHLASANGNSEVVKLLLDRRCQLNVLDNKKRTALIKAVQCQEDECALMLLEHGTDPNIPDEYGNTTLHYAIYNEDKLMAKALLLYGADIESKNKHGLTPLLLGVHEQKQQVVKFLIKKKANLNALDRYGRTALILAVCCGSASIVSLLLEQNIDVSSQDLSGQTAREYAVSSHHHVICQLLSDYKEKQMLKISSENSNPGKEAEEE

SEQ ID NO: 72176 - protein, 451 aa, Homo sapiens
MAAQGYGYYRTVIFSAMFGGYSLYYFNRKTFSFVMPSLVEEIPLDKDDLGFITSSQSAAYAISKFVSGVLSDQMSARWLFSSGLLLVGLVNIFFAWSSTVPVFAALWFLNGLAQGLGWPPCGKVLRKWFEPSQFGTWWAILSTSMNLAGGLGPILATILAQSYSWRSTLALSGALWVVVSFLCLLLIHNEPADVGLRNLDPMPSEGKKGSLKEESTLQELLLSPYLWVLSTGYLVVFGVKTCCTDWGQFFLIQEKGQSALVGSSYMSALEVGGLVGSIAAGYLSDRAMAKAGLSNYGNPRHGLLLFMMAGMTVSMYLFRVTVTSDSPKDVAFWTLALHPLAELTGFTEHELWILVLGAVFGFSSYGPIALFGVIANESAPPNLCGTSHAIVGLMANVGGFLAGLPFSTIAKHYSWSTAFWVAEVICAASTAAFFLLRNIRTKMGRVSKKAE

SEQ ID NO: 72177 - protein, 255 aa, Homo sapiens
  MOD_RES (1)..(1): Any amino acid
XGPAVTGKVRARRPPDLRKQARQLENELDLKLVSFSKLCTSYSHSSTRDGRRDRYSSDTTPLLNGSSQDRMFETMAIEIEQLLARLTGVNDKMAEYTNSAGVPSLNAALMHTLQRHRDILQDYTHEFHKTKANFMAIRERENLMGSVRKDIESYKSGSGVNNRRTELFLKEHDHLRNSDRLIEETISIAMATKENMTSQRGMLKSIHSKMNTLANRFPAVNSLIQRINLRKRRDSLILGGVIGICTILLLLYAFH

SEQ ID NO: 72178 - protein, 768 aa, Homo sapiens
MTTEDHLLRTASQHSDSSGFAEDSTDCLSLNHLQVQESLQAMGSSADSCDSETTVTSLGEDLATPTAQDQPYFNESEEESLVPLQKGLEKAAAVADKRKSGSQDFPQCNTIENTGTKQSTCSPGDHIIEITEVEEDLFPAETVELLREASAESDVGKSSESEFTQYTTHHILKSLASIEAKCSDMSSENTTGPPSSMDRVNTALQRAQMKVCSLSNQRMGRSLLKSKDLLKQRYLFAKAGYPLRRSQSLPTTLLSPVRVVSSVNVRLSPGKETRCSPPSFTYKYTPEEEQELEKRVMEHDGQSLVKSTIFISPSSVKKEEAPQSEAPRVEECHHGRTPTCSRLAPPPMSQSTCSLHSIHSEWQERPLCEHTRTLSTHSVPNISGATCSAFASPFGCPYSHRHATYPYRVCSVNPPSAIEMQLRRVLHDIRNSLQNLSQYPMMRGPDPAAAPYSTQKSSVLPLYENTFQELQVMRRSLNLFRTQMMDLELAMLRQQTMVYHHMTEEERFEVDQLQGLRNSVRMELQDLELQLEERLLGLEEQLRAVRMPSPFRSSALMGMCGSRSADNLSCPSPLNVMEPVTELMQEQSYLKSELGLGLGEMGFEIPPGESSESVFSQATSESSSVCSGPSHANRRTGVPSTASVGKSKTPLVARKKVFRASVALTPTAPSRTGSVQTPPDLESSEEVDAAEGAPEVVGPKSEVEEGHGKLPSMPAAEEMHKNVEQDELQQVIREIKESIVGEIRREIVSGLLAAVSSSKASNSKQDYH

SEQ ID NO: 72179 - protein, 65 aa, Homo sapiens
KRKGGRNFQTAHRRNMLKGQHEKEAADRKRKQEEQMETEHINPVTEKRIQVEQTRDEDLDTDSLD

SEQ ID NO: 72180 - protein, 70 aa, Homo sapiens
MSNVSEERRKRQQNIKEGLQFIQSPLSYPGTQEQYAVYLRALVRNLFNEGNDVYREHDWNNSISQYTEAL

SEQ ID NO: 72181 - protein, 301 aa, Homo sapiens
  MOD_RES (1)..(1): Any amino acid
XAVDAAFEPVYWLVDNVIRWFGVVFVVLVIVLTGSIVAIAYLCVLPLILRTYSVPRLCWHFFYSHWNLILIVFHYYQAITTPPGYPPQGRNDIATVSICKKCIYPKPARTHHCSICNRCVLKMDHHCPWLNNCVGHYNHRYFFSFCFFMTLGCVYCSYGSWDLFREAYAAIEKMKQLDKNKLQAVANQTYHQTPPPTFSFRERMTHKSLVYLWFLCSRGETSIERHINKKERRRLQAKGRVFRNPYNYGCLDNWKVFLGVDTGRHWLTRVLLPSSHLPHGNGMSWEPPPWVTAHSASVMAV

SEQ ID NO: 72182 - protein, 139 aa, Homo sapiens
MAIDSGFRNSGITVGKRGKTMLAVRSTHGLEVPLSHKGKLMVTEEYIDFLLNVANQKMEENKKRIERFYNCLQHALERETMTNLHPKIKEKNNSSYIHKKKRNPEKTRAQCITKESDEELENDDDDDLGINVTIFPEDY

SEQ ID NO: 72183 - protein, 41 aa, Homo sapiens
  MOD_RES (1)..(1): Any amino acid
XFAVLYLERAGQLSVKLYGPQEPCLPCSPLAPCERLGPEWV

SEQ ID NO: 72184 - protein, 96 aa, Homo sapiens
MEAQSHSSTTTEKKKVENSIVKCSTRTDVSEKAVASSTTSNGNHLEAQARGWTRRIGCIRAVHPCCCTNDSATDPLGWATLKGGSSKECVQTHTFT

SEQ ID NO: 72185 - protein, 275 aa, Homo sapiens
MDGDEKELESSEEGGSAEERRLEPPSSSHYCLYSYRGSRLAQQRGDSEDGSPSGTNAETPSGDDFSLSLADTNLPSEVEPELRSFIAKRLSRGAVFEGLGNVASVELKIPGYRVGCYYCLFQNEKLLPETVTIDSERNPSEYVVCFLGGSEKGLELFRLELDKYIQGLKNNMNCEARGLESHIKSYLSSWFEDVVCPIQRVVLLFQEKLTFLLHAALSYTPVEVKESDEKTKRDINRFLSVASLQGLIHEGTMTSLCMAMTEEQHKSVVIDCSSS

SEQ ID NO: 72186 - protein, 130 aa, Homo sapiens
VSLRAGGGATAPLGGSRAMVCGRQLSGAGSETLKQRRTQIMSRGLPKQKPIEGVKQVIVVASGKGGVGKSTTAVNLALALAANDSSKAIGLLDVDVYGPSVPKMMNLKGNPELSQSISQRCCRSCSRPPQ

SEQ ID NO: 72187 - protein, 116 aa, Homo sapiens
  MOD_RES (1)..(1): Any amino acid
XDLDHPGFSDQVYRQRRKLIAEIAFQYRHGDPIPRVEYTAEEIATWDCCHELLGHVPMLADRTFAQFSQDIGLASLGASDEEIEKLSTLYWFTVEFGLCKQNGEVKAYGAGLLSSY

SEQ ID NO: 72188 - protein, 228 aa, Homo sapiens
MSRRSQRLTRYSQGDDDGSSSSGGSSVAGSQSTLFKDSPLRTLKRKSSNMKRLSPAPQLGPSSDAHTSYYSESLVHESWFPPRSSLEELHGDANWGEDLRVRRRRGTGGSESSRASGLVGRKATEDFLGSSSGYSSEDDYVGYSDVDQQSSSSRLRSAVSRAGSLLWMVATSPGRLFRLLYWWAGTTWYRLTTAASLLDVFVLTRRFSSLKTFLWFLLPLLLLTCLTY

SEQ ID NO: 72189 - protein, 40 aa, Homo sapiens
MPARTAPARVPTLAVPAISLPDDVRRRLKDLERDSLTEKK

SEQ ID NO: 72190 - protein, 67 aa, Homo sapiens
MGLGQPQAWLLGLPTAVVYGSLALFTTILHNVFLLYYVDTFVSVYKINKMAFWVGETVFLLWNSLND

SEQ ID NO: 72191 - protein, 39 aa, Homo sapiens
MQSPPHLAVCRSNKSPWVCLTCSSVHCGRYVNGHAKKHY

SEQ ID NO: 72192 - protein, 372 aa, Homo sapiens
VVPEKKVPLVVPKKPEAPPAKVPEVPKEVVPEKKVAVPKKPEVPPAKVPEVPKKPVLEEKPAVPVPERAESPPPEVYEEPEEIAPEEEIAPEEEKPVPVAEEEEPEVPPPAVPEEPKKIIPEKKVPVIKKPEAPPPKEPEMPKKVVPVKKVPTVKKPETPAAKVPEVPKKLVPVKKEPVPVTKKPEVLPEKVPKVPEKIIPEKEVSVPIPAEPEVPPAEVEETPEEIIYEEKASITIGRKETPPVEEREIEKYIKPEEPEPEPQPEEIPVKEPEPEKVIEKPKLKPRPPPPPPAPPKEDVKEKIFQLKAIPKKKVPEKPQVPEKVELTPLKVPEPPPPKPVEEVEVPTVTKRERKIPEPTKVPEIKPAIPLP

SEQ ID NO: 72193 - protein, 115 aa, Homo sapiens
MDVFMKGLSKAKEGVVAAAEKTKQGVAEAAGKTKEGVLYVGSKTKEGVVHGVATVAEKTKEQVTNVGGAVVTGVTAVAQKTVEGAGSIAAATGFVKKDQLGKVWLCTFCVTFISW

SEQ ID NO: 72194 - protein, 571 aa, Homo sapiens
MMRQATMDFSTPSVFDQQRGDSSEEVDLTMVYQAASNGDVNALTAVIREDPSILECCDSEGCTPLMHAVSGRQADTVKLLLKMGANINMQDAYGRTSLCLATYLGWLEGCVSLLRNGAKHNIPDKNGRLPLHAATAEPDMRLLTVLLQQSNISEINHQDNESGNRILCSIILSHHQGPSIINYDDESGKTCVHIAAAAGFSDIIHELARVPECNLQALDVDDRTPLHWAAAAGKAECVQSLLELGMDSNLRDINESTPLAYALYCGHTACVKLLSQESRTEPTRPPPSQSSRPQKKERRFNVLNQIFCKNKKEEQRAHQKDPSRDRYREEDTSEVNDIITTFDSIVGTNCQEQPGDQVAMVEFKKKTSDNSKYLLPEKKPLARKGLPPIRTQSLPPITLGNNFLTASHRATSHAGLSSAPHHMAQRSQKSRSEQDLLNNRTGCQMLLDNPWKSDSNQVFSYKVWTVSSSDKLLDRLLSVRPGHQEVSVPPHLRHLHNPSSGQNFQHLSPNRHKIRDLPFTRNNLAPLPDQKFLSGEPLRTNRVLPAIPSQRRHSTAAEESEHSANPTSDEN

SEQ ID NO: 72195 - protein, 184 aa, Homo sapiens
MKAIIHLTLLALLSVNTEDNQSSGPPTGTALLETSTLNSTGPSNPCQDDPCADNSLCVKLHNTSFCLCLEGYYYNSSTCKKGKVFPGKISVTVSETFDPEEKHSMAYQDLHSEITSLFKDVFGTSVYGQTVILTVSTSLSPRSEMRADDKFVNVTIVTILAETTSDNEKTVTEKINKAIRSSSS

SEQ ID NO: 72196 - protein, 481 aa, Homo sapiens
MATSTSTEAKSASWWNYFFLYDGSKVKEEGDPTRAGICYFYPSQTLLDQQELLCGQIAGVVRCVSDISDSPPTLVRLRKLKFAIKVDGDYLWVLGCAVELPDVSCKRFLDQLVGFFNFYNGPVSLAYENCSQEELSTEWDTFIEQILKNTSDLHKIFNSLWNLDQTKVEPLLLLKAARILQTCQRSPHILAGCILYKGLIVSTQLPPSLTAKVLLHRTAPQEQRLPTGEDAPQEHGKWMLWSFKNRVTHQNPNGAALPPNVQIIPVFVTKEEAISLHEFPVEQMTRSLASPAGLQDGSAQHHPKGGSTSALKENATGHVESMAWTTPDPTSPDEACPDGRKENGCLSGHDLESIRPAGLHNSARGEVLGLSSSLGKELVFLQEELDLSEIHIPEAQEVEMASGHFAFLHVPVPDGRAPYCKASLSASSSLEPTPPEDTAISSLRPPSAPEMLTQHGAQEQLEDHPGHSSQAPIPRADPLPR

SEQ ID NO: 72197 - protein, 87 aa, Homo sapiens
MAATLGSGERWTEAYIDAVRRNKYPEDTPPESHDPCGCCNCMKAQKEKKSENEWTQTRQGEGNSTYSEEQLLGVQSNRKCICSPEQS

SEQ ID NO: 72198 - protein, 307 aa, Homo sapiens
  MOD_RES (1)..(1): Any amino acid
XKQLGNLGVLGITAPVQYGGSGLGYLEHVLVMEEISRASGAVGLSYGAHSNLCINQLVRNGNEAQKEKYLPKLISGEYIGALAMSEPNAGSDVVSMKLKAEKKGNHYILNGNKFWITNGPDADVLIVYAKTDLAAVPASRGITAFIVEKGMPGFSTSKKLDKLGMRGSNTCELIFEDCKIPAANILGHENKGVYVLMSGLDLERLVLAGGPLGLMQAVLDHTIPYLHVREAFGQKIGHFQPGSMDLGVCSVNICSWGNNEGQTFSAQHPPGREGETRGQTSLEQVSTARELRCKILLPELTPRVLLP

SEQ ID NO: 72199 - protein, 348 aa, Homo sapiens
MSLVLLSLAALCRSAVPREPTVQCGSETGPSPEWMLQHDLIPGDLRDLRVEPVTTSVATGDYSILMNVSWVLRADASIRLLKATKICVTGKSNFQSYSCVRCNYTEAFQTQTRPSGGKWTFSYIGFPVELNTVYFIGAHNIPNANMNEDGPSMSVNFTSPGSLWDPNITACKKNEETVEVNFTTTPLGNRYMALIQHSTIIGFSQVFEPHQKKQTRASVVIPVTGDSEGATVQLTPYFPTCGSDCIRHKGTVVLCPQTGVPFPLDNNKSKPGGWLPLLLLSLLVATWVLVAGIYLMWRHERIKKTSFSTTTLLPPIKVLVVYPSEICFHHTICYFTEFLQNHCRSEVI

SEQ ID NO: 72200 - protein, 830 aa, Homo sapiens
MTPSLSAEENRMYNKMWHQTQEALGALLDKEPQKMIEPQRNQVFIFQTLATFYVKYVQIFRNLENVYDQFVHPQKRILIRKVLDGVMGRILELKNEMVELELTEFHYFDDILQDLKLAPQQLDIPIPKYFLKEKLEVIKGREKILAQILADSGIDTSDMKYPVKSIPFDEAVKLIQIAERARQGRLRALFMKQIYLQEYRAKQSKMLGKKVTDTWAAALRIQKVWRRFHQRKETEKLREEEMIFLGMNPPPLFNEVSATVIQAEKVDRLRNEVQIKHEEDYREALVTIKNDLKLIEGVDIKENLQDQIRHWFIECRNLTGTFPDYPDVEEGGSAIIFSDKTIQQVIEDIIANQEEEEKNKKKKKKKEKQPKKAKKQKKGTKEKNKEEDEKWKMSPSLFLPAMKEGCNAYKEIWMKKDESWNFSQDYDPELIKEEKRKELQSEIRIQVDELMRQELKNLKLAVDRERERPVKAGKKKDKKKGKKGKKKEKKAKKDKDLTADRTIESLYKELVEEGLLIQALKVNLSDYIGEYSYLGTTLRQVSIEPMPSLLDVRQLITLYGIWPLGSAAVHEKAPLVKSLLLAGPSGVGKKMLVHAICTETGANLFNLSSSNIAGKYPGKNGLQMMLHAVFKVARQLQPSVVWIEDTEKTFYKKVPNAEKMNEPKRLKKHLPQILKLLKPDDRILIVGTTRRPFDAELQSFCKVYQKIILVPRPDYASRYVLWKQIIERNGGVLTSALNVSCLAKVTDGFTQGHIVEVVKGVLTDQRIRRQIHKPLTAVEFITAITSMNPVYKEEEESFKNWYAKTPLGKKRALAITGGSTEKAKDKGKRK

SEQ ID NO: 72201 - protein, 74 aa, Homo sapiens
DKTLKLWNPLRGTLLRTYSGHGYEVLDAAGSFDNSSLCSGGGDKAVVLWDVASGQVVRKFRGHAGLRGWPRETL

SEQ ID NO: 72202 - protein, 64 aa, Homo sapiens
MENPSPAAALGKALCALLLATLGAAGQPLGGESICSARALAKYSITFTGKWSQTAFPKQYPLFR

SEQ ID NO: 72203 - protein, 21 aa, Homo sapiens
MLRGTMTAWRGMRPEVTLACL

SEQ ID NO: 72204 - protein, 20 aa, Homo sapiens
YYYYYYMDVWGKGTTVTVSS

SEQ ID NO: 72205 - protein, 134 aa, Homo sapiens
MAAGQREARPQVSLTFEDVAVLFTWDEWRKLAPSQRNLYRDVMLENYRNLVSLGLSFTKPKVISLLQQGEDPWEVEKDSSGVSSLGCKSTPKMTKSTQTQDSFQEQIRKRLKRDEPWNFISERSCIYEEKLKKQ

SEQ ID NO: 72206 - protein, 157 aa, Homo sapiens
MARERGQLVFLEGLKSAVDVVFQAQKEPHPLQFLREANAGNLKPLFEFVREALKPVDSGEARWTYPVLLVDDLSVLLSLGMGAVAVLDFIHYCRATVCWELKGNMVVLVHDSGDAEDEENDILLNGLSHQSHLILRAEGLATGFCRDVHGQVCRGLL

SEQ ID NO: 72207 - protein, 876 aa, Homo sapiens
  MOD_RES (1)..(1): Any amino acid
XPAAAPGHSFRKVTLTKPTFCHLCSDFIWGLAGFLCDVCNFMSHEKCLKHVRIPCTSVAPSLVRVPVAHCFGPRGLHKRKFCAVCRKVLEAPALHCEVCELHLHPDCVPFACSDCRQCHQDGHQDHDTHHHHWREGNLPSGARCEVCRKTCGSSDVLAGVRCEWCGVQAHSLCSAALAPECGFGRLRSLVLPPACVRLLPGGFSKTQSFRIVEAAEPGEGGDGADGSAAVGPGRETQATPESGKQTLKIFDGDDAVRRSQFRLVTVSRLAGAEEVLEAALRAHHIPEDPGHLELCRLPPSSQACDAWAGGKAGSAVISEEGRSPGSGEATPEAWVIRALPRAQEVLKIYPGWLKVGVAYVSVRVTPKSTARSVVLEVLPLLGRQAESPESFQLVEVAMGCRHVQRTMLMDEQPLLDRLQDIRQMSVRQVSQTRFYVAESRDVAPHVSLFVGGLPPGLSPEEYSSLLHEAGATKGAVVLDVACFAEAERLYMLLKDMAVRGRLLTALVLPDLLHAKLPPDSCPLLVFVNPKSGGLKGRDLLCSFRKLLNPHQVFDLTNGGPLPGLHLFSQVPCFRVLVCGGDGTVGWVLGALEETRYRLACPEPSVAILPLGTGNDLGRVLRWGAGYSGEDPFSVLLSVDEADAVLMDRWTILLDAHEAGSAENDTADAEPPKIVQMSNYCGIGIDAELSLDFHQAREEEPGKFTSRLHNKGVYVRVGLQKISHSRSLHKQIRLQVERQEVELPSIEGLIFINIPSWGSGADLWGSDSDTRFEKPRMDDGLLEVVGVTGVVHMGQVQGGLRSGIRIAQGSYFRVTLLKATPVQVDGEPWVQAPGHMIISAAGPKVHMLRKAKQKPRRAGTTRDARADAAPAPESDPR

SEQ ID NO: 72208 - protein, 116 aa, Homo sapiens
MASPPACPSEEDESLKGCELYVQLHGIQQVLKDCIVHLCISKPERPMKFLREHFEKLEKEENRQILARQKSNSQSDSHDEEVSPTPPNPVVKARRRRGGVSAEVYTEEDAVSYVRK

SEQ ID NO: 72209 - protein, 85 aa, Homo sapiens
MADGGGGGGTGAVGGGGTSQASAGAATGATGASGGGGPINPASLPPGDPQLIALIVEQLKSRGLFDSFRRDCLADVDTKNTPDTF

SEQ ID NO: 72210 - protein, 119 aa, Homo sapiens
  MOD_RES (1)..(1): Any amino acid
XYIESPNYPGNYPANTECTWTINPPPKRRILIVVPEIFLPIEDDCGDYLVMRKTSSSNSVTTYETCQTYERPIAFTSRSKKLWIQFKSNEGNSARGFQVPYVTYDGKHSLQHMERASLL

SEQ ID NO: 72211 - protein, 842 aa, Homo sapiens
MQRSPLEKASVVSKLFFSWTRPILRKGYRQRLELSDIYQIPSVDSADNLSEKLEREWDRELASKKNPKLINALRRCFFWRFMFYGIFLYLGEVTKAVQPLLLGRIIASYDPDNKEERSIAIYLGIGLCLLFIVRTLLLHPAIFGLHHIGMQMRIAMFSLIYKKTLKLSSRVLDKISIGQLVSLLSNNLNKFDEGLALAHFVWIAPLQVALLMGLIWELLQASAFCGLGFLIVLALFQAGLGRMMMKYRDQRAGKISERLVITSEMIENIQSVKAYCWEEAMEKMIENLRQTELKLTRKAAYVRYFNSSAFFFSGFFVVFLSVLPYALIKGIILRKIFTTISFCIVLRMAVTRQFPWAVQTWYDSLGAINKIQDFLQKQEYKTLEYNLTTTEVVMENVTAFWEETSLLMVIMGELEPSEGKIKHSGRISFCSQFSWIMPGTIKENIIFGVSYDEYRYRSVIKACQLEEVAASLVVLWLLGNTPLQDKGNSTHSRNNSYAVIITSTSSYYVFYIYVGVADTLLAMGFFRGLPLVHTLITVSKILHHKMLHSVLQAPMSTLNTLKAGGILNRFSKDIAILDDLLPLTIFDFIQLLLIVIGAIAVVAVLQPYIFVATVPVIVAFIMLRAYFLQTSQQLKQLESEGRSPIFTHLVTSLKGLWTLRAFGRQPYFETLFHKALNLHTANWFLYLSTLRWFQMRIEMIFVIFFIAVTFISILTTGEGEGRVGIILTLAMNIMSTLQWAVNSSIDVDSLMRSVSRVFKFIDMPTEGKPTKSTKPYKNGQLSKVMIIENSHVKKDDIWPSGGQMTVKDLTAKYTEGGNAILENISFSISPGQRVRFEHCLLC

SEQ ID NO: 72212 - protein, 40 aa, Homo sapiens
MAANLSRNGPALQEAYVRVVTEKSPTDWWAARRARGSLYL

SEQ ID NO: 72213 - protein, 48 aa, Homo sapiens
MEYLGGGSALDLLKPGPLEETYIATILREILKGLDYLHSERKIHRDIK

SEQ ID NO: 72214 - protein, 107 aa, Homo sapiens
ITQQVQPSKILPKPVTATLPTSSNSPIMVVSSNGAIMTTKLVTTPTGTQATYTRPTVSPSIGRMAATPGAATYVKTTSGSIITVVPKSLATLGGKIISSNIVSGRYI

SEQ ID NO: 72215 - protein, 58 aa, Homo sapiens
  MOD_RES (1)..(1): Any amino acid
XSCTSRASLSGSLWTSLEHLLEQRSQEGHSGQQVALLDQSRAEEWMVPQGMPEGLVPE

SEQ ID NO: 72216 - protein, 165 aa, Homo sapiens
MVRWFHRDLSGLDAETLLKGRGVHGSFLARPSRKNQGDFSLSVRVGDQVTHIRIQNSGDFYDLYGGEKFATLTELVEYYTQQQGVLQDRDGTIIHLKYPLNCSDPTSERWYHGHMSGGQAETLLQAKGEPWTFLVRESLSQPGDFVLSVLSDQPKAGPGSPLRVT

SEQ ID NO: 72217 - protein, 215 aa, Homo sapiens
MEAATTLHPGPRPALPLGGPGPLGEFLPPPECPVFEPSWEEFADPFAFIHKIRPIAEQTGICKVRPPPDWQPPFACDVDKLHFTPRIQRLNELEAQTRVKLNFLDQIAKYWELQGSTLKIPHVERKILDLFQLNKLVAEEGGFAVVCKDRKWTKIATKMGFAPGKAVGSHIRGHYERILNPYNLFLSGDSLRVSLGASLNLFYLTTYWYIVFSGK

SEQ ID NO: 72218 - protein, 244 aa, Homo sapiens
  MOD_RES (1)..(1): Any amino acid
XLTCAICLGLYQDPVTLPCGHNFCGACIRDWWDRCGKACPECREPFPDGAELRRNVALSGVLEVVRAGPARDPGPDPGPGPDPAARCPRHGRPLELFCRTEGRCVCSVCTVRECRLHERALLDAERLKREAQLRASLEVTQQQATQAEGQLLELRKQSSQIQNSACILASWVSGKFSSLLQALEIQHTTALRSIEVAKTQALAQARDEEQRLRVHLEAVARHGCRIRELLEQVDEQTFLQIIAI

SEQ ID NO: 72219 - protein, 53 aa, Homo sapiens
MKPRPAGFVDNKLKQRVIQYLTSNKCGKYVDIGVLASDLQRVYRLWSKKKKCF

SEQ ID NO: 72220 - protein, 293 aa, Homo sapiens
MCAINGRRSGADAWPRGPRCAAPRACAVPRRRLPGLTPNEAPRRRPQGMEKINFSGGEPFLQDRGEYLGKLVRFCKVELRLPSVSIVSNGSLIRERWFQNYGEYLDILAISCDSFDEEVNVLIGRGQGKKNHVENLQKLRRWCRDYRVAFKINSVINRFNVEEDMTEQIKALNPVRWKVFQCLLIEGENCGEDALREAERFVIGDEEFERFLERHKEVSCLVPESNQKMKDSYLILDEYMRFLNCRKGRKDPSKSILDVGVEEAIKFSGFDEKMFLKRGGKYIWSKADLKLDW

SEQ ID NO: 72221 - protein, 123 aa, Homo sapiens
MGPPLWWDLSPALAMRLHLLASLSGGGLAWRAGDRRWLADFSTQVNSSLTSPTGRGSMAAPSLHPSLGPGIGSPGQLHSPISTLSSPINGMGPPFSVISSPMGPHSMSVPTTPTLGFSTGSPQ

SEQ ID NO: 72222 - protein, 528 aa, Homo sapiens
MQASPLQTSQPTPPEELHAAAYVFTNDGQQMRSDEVNLVATGHQSKKKHSRKSKRHSSSKRRKSMSSWLDKQEDAAVTHSICEERINNGQPVADNVLSTAPPWPDATIAHNIREERMENGQSRTDKVLSTAPPQLVHMAAAGIPSMSTRDLHATVTQNVHEERMENNQPQPSYDLSTVLPGLTYLTVAGIPAMSTRDQYATVTHNVHEEKIKNGQAASDNVFSTVPPAFINMAATGVSSMSTRDQYAAVTHNIREEKINNSQPAPGNILSTAPPWLRHMAAAGISSTITRDLYVTATHSVHEEKMTNGQQAPDNSLSTVPPGCINLSGAGISCRSTRDLYATVIHDIQEEEMENDQTPPDGFLSNSDSPELINMTGHCMPPNALDSFSHDFTSLSKDELLYKPDSNEFAVGTKNYSVSAGDPPVTVMSLVETVPNTPQISPAMAKKINDDIKYQLMKEVRRFGQNYERIFILLEEVQGSMKVKRQFVEFTIKEAARFKKVVLIQQLEKALKEIDSHCHLRKVKHMRKR

SEQ ID NO: 72223 - protein, 159 aa, Homo sapiens
MKPALFNVLCEIKEKTVLSIRGAQEEEPTDPQLMRLDNMLLAEGVAGPEKGGGSAAAAAAAAASGGAGSDNSVEHSDYRAKLSQIRQIYHTELEKYEQACNEFTTHVMNLLREQSRTRPISPKEIERMVSIIHRKFSSIQMQLKQSTCEAVMILRSRFL

SEQ ID NO: 72224 - protein, 122 aa, Homo sapiens
MAAQRIRAANSNGLPRCKSEGTLIDLSEGFSETSFNDIKVPSPSALLVDNPTPFGNAKEVIAIKDYCPTNFTTLKFSKGDHLYVLDTSGGEWWYAHNTTEMGYIPSSYVQPLNYRNSTLSDS

SEQ ID NO: 72225 - protein, 104 aa, Homo sapiens
MTDTVFSNSSNRWMYPSDRPLQSNDKEQLQAGWSVHPGGQPDRQRKQEELTDEEKEIINRVIARAEKMEEMEQERIGRLVDRLENMRKNVAGDGVNRCILCGEQ

SEQ ID NO: 72226 - protein, 249 aa, Homo sapiens
MAWQVSLLELEDRLQCPICLEVFKESLMLQCGHSYCKGCLVSLSYHLDTKVRCPMCWQVVDGSSSLPNVSLAWVIEALRLPGDPEPKVCVHHRNPLSLFCEKDQELICGLCGLLGSHQHHPVTPVSTVCSRMKEELAALFSELKQEQKKVDELIAKLVKNRTRIVNESDVFSWVIRREFQELRHPVDEEKARCLEGIGGHTRGLVASLDMQLEQAQGTRERLAQAECVLEQFGNEDHHEFIWFHSMASR

SEQ ID NO: 72227 - protein, 116 aa, Homo sapiens
WKMVLQQKSQIIVMLTQCNEKRRVKCDHYWPFTEEPIAYGDITVEMISEEEQDDWACRHFRINYADEMQDVMHFNYTAWPDHGVPTANAAESILQFVHMVRQQATKSKGPMIIHCR

SEQ ID NO: 72228 - protein, 105 aa, Homo sapiens
  MOD_RES (1)..(1): Any amino acid
XTTGEPATPKRRKAEPEALQSLRRSTRHSANCDRLSESSASPQPKRRQQDTSASMPKLFLHLEKTSPAVLTPSGVLLSIILLELPKVIPVPFCVQLSVGGIVPGA

SEQ ID NO: 72229 - protein, 58 aa, Homo sapiens
MENSTTTISREELEELQEAFNKIDIDNSGYVSDYELQDLFKEASLPLPGYKVREIVEK

SEQ ID NO: 72230 - protein, 120 aa, Homo sapiens
MASQKQMEVVTKGTGFRRRPKTITYTPGTCELLRVMMKESKLTNIQQRHIMDIMKRGDALPLQCSPTSSQRVLPSKQIASPIYLPPILAARPHLRPANMCQANGAYSREQFKPQATRDLE

SEQ ID NO: 72231 - protein, 49 aa, Homo sapiens
MDTMMLNVRNLFEQLVRRVEILSEGNEVRLGLFFGEDFQTEEERKEALY

SEQ ID NO: 72232 - protein, 53 aa, Homo sapiens
MEPGPALAWLLLLSLLADCLKAAQSRDFTVKDIIYLHPSTTPYPGGFKCFTCE

SEQ ID NO: 72233 - protein, 664 aa, Homo sapiens
MAEFRVRVSTGEAFGAGTWDKVSVSIVGTRGESPPLPLDNLGKEFTAGAEEDFQVTLPEDVGRVLLLRVHKAPPVLPLLGPLAPDAWFCRWFQLTPPRGGHLLFPCYQWLEGAGTLVLQEGTAKVSWADHHPVLQQQRQEELQARQEMYQWKAYNPGWPHCLDEKTVEDLELNIKYSTAKNANFYLQAGSAFAEMKIKGLLDRKGLWRSLNEMKRIFNFRRTPAAEHAFEHWQEDAFFASQFLNGLNPVLIRRCHYLPKNFPVTDAMVASVLGPGTSLQAELEKGSLFLVDHGILSGIQTNVINGKPQFSAAPMTLLYQSPGCGPLLPLAIQLSQTPGPNSPIFLPTDDKWDWLLAKTWVRNAEFSFHEALTHLLHSHLLPEVFTLATLRQLPHCHPLFKLLIPHTRYTLHINTLARELLIVPGQVVDRSTGIGIEGFSELIQRNMKQLNYSLLCLPEDIRTRGVEDIPGYYYRDDGMQIWGAVERDESVQDDRELQAWVREIFSKGFLNQESSGIPSSLETREALVQYVTMVIFTCSAKHAAVSAGQFDSCAWMPNLPPSMQLPPPTSKGLATCEGFIATLPPVNATCDVILALWLLSKEPGDQRPLGTYPDEHFTEEAPRRSIATFQSRLAQISRGIQERNQGLVLPYTYLDPPLIENSVSI

SEQ ID NO: 72234 - protein, 177 aa, Homo sapiens
MPRLLRLSLLWLGLLLVRFSRELSDISSARKLCGRYLVKEIEKLCGHANWSQFRFEEETPFSRLIAQASEKVEAYSPYQFESPQTASPARGRGTNPVSTSWEEAVNSWEMQSLPEYKDKKGYSPLGLLEFAGGPLQMLFAWVSPAEAAEQQRLLPVPSSGSFIPEGHPLDASQSFPV

SEQ ID NO: 72235 - protein, 80 aa, Homo sapiens
MIENVTFHHEGFFWRCWFNGIVEENDSNIWKFWYTNQPPSKNCTHAYLSPYPFMRGEHNSTSYDSAVIYRGFWAVLMLLG

SEQ ID NO: 72236 - protein, 33 aa, Homo sapiens
MNPEWGQAFVHVAVAGGLCAVAVFTGIFDSVSV

SEQ ID NO: 72237 - protein, 133 aa, Homo sapiens
MDFLLGNPFSSPVGQRIEKATDGSLQSEDWALNMEICDIINETEEGPKDALRAVKKRIVGNKNFHEVMLALTVLETCVKNCGHRFHVLVASQDFVESVLVRTILPKNNPPTIVHDKVLNLIQLARSDRCGHHL

SEQ ID NO: 72238 - protein, 178 aa, Homo sapiens
  MOD_RES (1)..(1): Any amino acid
XTAGHLIGLYLYQFQFFQEAVPPNDYYARLFGIKSVIQTDCSSTWKIIVNPDLSWYHHANPILLLVMYYTLATLIRIWLQEPLVQDEGTKEEDKALACSPIQITAGRRRSLWYATHYPTDERKGLLVTVNGNPVDYHTIHPSLPMENGPGKADLYSTPQYRWEPSDESSEKREEEEEE

SEQ ID NO: 72239 - protein, 1093 aa, Homo sapiens
MEPTVADVHLVPRTTKEVPALDAACCRAASIGVVATSLVVLTLGVLLAFLSTQGFHVDHTAELRGIRWTSSLRRETSDYHRTLTPTLEALFVSSFQKTELEASCVGCSVLNYRDGNSSVLVHFQLHFLLRPLQTLSLGLEEELLQRGIRARLREHGISLAAYGTIVSAELTGRHKGPLAERDFKSGRCPGNSFSCGNSQCVTKVNPECDDQEDCSDGSDEAHCECGLQPAWRMAGRIVGGMEASPGEFPWQASLRENKEHFCGAAIINARWLVSAAHCFNEFQDPTKWVAYVGATYLSGSEASTVRAQVVQIVKHPLYNADTADFDVAVLELTSPLPFGRHIQPVCLPAATHIFPPSKKCLISGWGYLKEDFLVKPEVLQKATVELLDQALCASLYGHSLTDRMVCAGYLDGKVDSCQGDSGGPLVCEEPSGRFFLAGIVSWGIGCAEARRPGVYARVTRLRDWILEATTKASMPLAPTMAPAPAAPSTAWPTSPESPVVSTPTKSMQALSTVPLDWVTVPKLQECGARPAMEKPTRVVGGFGAASGEVPWQVSLKEGSRHFCGATVVGDRWLLSAAHCFNHTKVEQVRAHLGTASLLGLGGSPVKIGLRRVVLHPLYNPGILDFDLAVLELASPLAFNKYIQPVCLPLAIQKFPVGRKCMISGWGNTQEGNATKPELLQKASVGIIDQKTCSVLYNFSLTDRMICAGFLEGKVDSCQGDSGGPLACEEAPGVFYLAGIVSWGIGCAQVKKPGVYTRITRLKGWILEIMSSQPLPMSPPSTTRMLATTSPRTTAGLTVPGATPSRPTPGAASRVTGQPANSTLSAVSTTARGQTPFPDAPEATTHTQLPDCGLAPAALTRIVGGSAAGRGEWPWQVSLWLRRREHRCGAVLVAERWLLSAAHCFDVYGDPKQWAAFLGTPFLSGAEGQLERVARIYKHPFYNLYTLDYDVALLELAGPVRRSRLVRPICLPEPAPRPPDGTRCVITGWGSVREGGSMARQLQKAAVRLLSEQTCRRFYPVQISSRMLCAGFPQGGVDSCSGDAGGPLACREPSGRWVLTGVTSWGYGCGRPHFPGVYTRVAAVRGWIGQHIQE

SEQ ID NO: 72240 - protein, 109 aa, Homo sapiens
MNTGRDSQSPDSAWRSYNDGNQETLNGDATYSSLAAKGFRSVRPNLQDKRSPTQSQITVNGNSGGAVSPMSYYQRPFSPSAYSLPASLNSSIVMQHGTSLDSTDTYPQH

SEQ ID NO: 72241 - protein, 176 aa, Homo sapiens
MATASPAADGGRGRPWEGGLVSWPPAPPLTLPWTWMGPSWGQHPGEIIEFPILKLNGRTMEIESTFHMYVQPVVHPQLTPFCTELTGIIQAMVDGQPSLQQVLERVDEWMAKEGLLDPNVKSIFVTCGDWDLKVMLPGQCQYLGLPVADYFKQWINLKKAYSFAMGCWPKNGLLDM

SEQ ID NO: 72242 - protein, 173 aa, Homo sapiens
MAACIAAGHWAAMGLGRSFQAARTLLPPPASIACRVHAGPVRQQSTGPSEPGAFQPPPKPVIVDKHRPVEPERRFLSPEFIPRRGRTDPLKFQIERKDMLERRKVLHIPEFYVGSILRVTTADPYASGKISQFLGICIQRSGRGLGATFILRNVIEGQGPVYIHNPERWLPGP

SEQ ID NO: 72243 - protein, 160 aa, Homo sapiens
MAAPAGGGGSAVSVLAPNGRRHTVKVTPSTVLLQVLEDTCRRQDFNPCEYDLKFQRSVLDLSLQWRFANLPNNAKLEMVPASRSREGPENMVRIALQLDDGSRLQDSFCSGQTLWELLSHFPQISPWTGSPWTGSRWCATPTWRSGCRPGQRSCLMSSLS

SEQ ID NO: 72244 - protein, 61 aa, Homo sapiens
MKTVLMVAEKPSLAQSIAKILSRGSLSSHKGLNGACSVHEYTGTFAGQPVRFKMTSVCGHV

SEQ ID NO: 72245 - protein, 236 aa, Homo sapiens
  MOD_RES (1)..(1): Any amino acid
XAGSPTCLTLIYILWQLTGSAASGPVKELVGSVGGAVTFPLKSKVKQVDSIVWTFNTTPLVTIQPEGGTIIVTQNRNRERVDFPDGGYSLKLSKLKKNDSGIYYVGIYSSSLQQPSTQEYVLHVYEHLSKPKVTMGLQSNKNGTCVTNLTCCMEHGEEDVIYTWKALGQAANESHNGSILPISWRWGESDMTFICVARNPVSRNFSSPILARKLCEENNPKGRSSKYGLLHCGNTE

SEQ ID NO: 72246 - protein, 20 aa, Homo sapiens
  MOD_RES (1)..(1): Any amino acid
XDTGRRALTFGSGTRLQVQP

SEQ ID NO: 72247 - protein, 150 aa, Homo sapiens
MRGDRGRGRGGRFGSRGGPGGGFRPFVPHIPFDFYLCEMAFPRVKPAPDETSFSEALLKRNQDLAPNSAEQASILSLVTKINNVIDNLIVAPGTFEVQIEEVRQVGSYKKGTMTTGHNVADLVVILKILPTCECACFWSWEQNIALGLGV

SEQ ID NO: 72248 - protein, 65 aa, Homo sapiens
MSHPSWLPPKSTGEPLGHVPARMETTHSFGNPSISVSTQQPPKKFAPVVAPKPKYNPYKQPGGEG

SEQ ID NO: 72249 - protein, 213 aa, Homo sapiens
MEENLISMREDHSFHVRYRMEASCLELALEGERLCKSGDCRAGVSFFEAAVQVGTEDLKTLSAIYSQLGNAYFYLHDYAKALEYHHHDLTLARTIGDQLGEAKASGNLGNTLKVLGNFDEAIVCCQRHLDISRELNDKVGEARALYNLGNVYHAKGKSFGCPGPQDVGEFPEEVRDALQAAVDFYEENLSLVTALGDRAAQGRAFGNLGNTHY

SEQ ID NO: 72250 - protein, 52 aa, Homo sapiens
MVGAMWKVIVSLVLLMPGPCDGLFRSLYRSVSMPPKGDSGQPLFLTPYIEAG

SEQ ID NO: 72251 - protein, 98 aa, Homo sapiens
MEYMAESTDRSPGHILCCECGVPISPNPANICVACLRSKVDISQGIPKQVSISFCKQCQRYFQPPGTWIQCALESRELLALCLKKIKAPLSKVRLVDA

SEQ ID NO: 72252 - protein, 217 aa, Homo sapiens
MAGSRGAGRTAAPSVRPEKRRSEPELEPEPEPEASTPCPRTEMASARIGDEYAEDSSDEEDIRNTVGNVPLEWYDDFPHVGYDLDGRRIYKPLRTRDELDQFLDKMDDPDYWRTVQDPMTGRDLRLTDEQVALVRRLQSGQFGDVGFNPYEPAVDFFSGDVMIHPVTNRPADKRSFIPSLVEKEKVSRMVHAIKMGWIQPRRPRDPTPSFYDLWAQE

SEQ ID NO: 72253 - protein, 101 aa, Homo sapiens
MQLEIKVALNFIISYLYNKLPRRRADLFGEELERLLKKKYEGHWYPEKPLKGSGFRCVHIGEMVDPVVELAAKRSGLAVEDVRANVPEELSVWIDPFEVSY

SEQ ID NO: 72254 - protein, 147 aa, Homo sapiens
MQPPGKLAAMASIRLQGLHKPVYHALSDCGDHVVIMNTRHIAFSGNKWEQKVYSSHTGYPGGFRQVTAAQLHLRDPVAIVKLAIYGMLPKNLHRRTMMERLHLFPDEYIPEDILKNLVEELPQPRKIPKRLDEYTQEEIDAFPRLWT

SEQ ID NO: 72255 - protein, 102 aa, Homo sapiens
  MOD_RES (1)..(1): Any amino acid
XSLIMRNEEASKQLESSRQLASRFHEQFIVREDLMGLAIGTHGANIQQARKVPGVTAIDLDEDTCTFHIYGEDQDAVKKARSFLEFAEDVIQVPRNLVGLKI

SEQ ID NO: 72256 - protein, 48 aa, Homo sapiens
MIPIWKQQARPGDGPVIWADPQKPPLLLVWSRSLQTFSSAFTCMQMYF

SEQ ID NO: 72257 - protein, 232 aa, Homo sapiens
MSPLSAARAALRVYAVGAAVILAQLLRRCRGGFLEPVFPPRPDRVAIVTGGTDGIGYSTAKHLARLGMHVIIVEFLYCDLASMTSIRQFVQKFKMKKIPLHVLINNAGVMMVPQRKTRDGFEEHFGLNYLGHFLLTNLLLDTLKESGSPGHSARVVTVSSATHYVAELNMDDLQSSACYSPHAAYAQSKLALVLFTYHLQRLLAAEGSHVTANVVDPGVVNTDVYKHVFWAT

SEQ ID NO: 72258 - protein, 61 aa, Homo sapiens
MNPSAPSYPMASLYVGDLHPDVTEAMLYEKFSPAGPILSIRVCRDMITRRSLGYAYVNFQQ

SEQ ID NO: 72259 - protein, 144 aa, Homo sapiens
MGQTGKKSEKGPVCWRKRVKSEYMRLRQLKRFRRADEVKSMFSSNRQKILERTEILNQEWKQRRIQPVHILTSVSSLRGTREAIHLLFPLRFSITQFLLGTSLLPRVSVWLCTPTTTIFGLTSLSSSQWSSHTVAYCTSWLIVR

SEQ ID NO: 72260 - protein, 253 aa, Homo sapiens
MTVVTMASARVQDLIGLICWQYTSEGREPKLNDNVSAYCLHIAEDDGEVDTDFPPLDSNEPIHKFGFSTLALVEKYSSPGLTSKESLFVRINAAHGFSLIQVDNTKVTMKEILLKAVKRRKGSQKVSGSRADGVFEEDSQIDIATVQDMLSSHHYKSFKVSMIHRLRFTTDVQLGISGDKVEIDPVTNQKASTKFWIKQKPISIDSDLLCACDLAEEKSPSHAIFKLTYLSNHDYKHLYFESDAATVNEIVLK

SEQ ID NO: 72261 - protein, 170 aa, Homo sapiens
MRPADLPPRPMEESPASSSAPTETEEPGSSAEVMEEVTTCSFNSPLFRQEDDRGITYRIPALLYIPPTHTFLAFAEKRSTRRDEDALHLVLRRGLRIGQLVQVTLHPRSESGPQFLFTKLRALQDLCLFSSVQESPVWGAEAEKTAKTMALTECLLCARGTLGPHSHSVS

SEQ ID NO: 72262 - protein, 373 aa, Homo sapiens [sequence omitted]

SEQ ID NO: 72263 - protein, 335 aa, Homo sapiens
MKYILVTGGVISGIGKGIIASSVGTILKSCGLHVTSIKIDPYINIDAGTFSPYEHGEVFVLDDGGEVDLDLGNYERFLDIRLTKDNNLTTGKIYQYVINKERKGDYLGKTVQVVPHITDAIQEWVMRQALIPVDEDGLEPQVCVIELGGTVGDIESMPFIEAFRQFQFKVKRENFCNIHVSLVPQPSSTGEQKTKPTQNSVRELRGLGLSPDLVVCRCSNPLDTSVKEKISMFCHVEPEQVICVHDVSSIYRVPLLLEEQGVVDYFLRRLDLPIERQPRKMLMKWKEMADRYDRLLETCSIALVGKYTKFSDSYASVIKALEHSALAINHKLEIK

SEQ ID NO: 72264 - protein, 56 aa, Homo sapiens
MAATMFRATLRGWRTGVQRGCGLRLLTPHPTCLTLYDALGCTTSPSTRTSRMATGR

SEQ ID NO: 72265 - protein, 381 aa, Homo sapiens
MLDNRKLGELPEINGKLVKSIFRVVFHDRRLQYTEHQQLEGWRWNRPGDRILDIDIPMSVGIIDPRANPTQLNTVEFLWDPAKRTSVFIQVHCISTEFTMRKHGGEKGVPFRVQIDTFKENENGEYTEHLHSASCQIKVFKPKGADRKQKTDREKMEKRTPHEKEKYQPSYETTILTECSPWPEITYVNNSPSPGFNSSHSSFSLGEGNGSPNHQPEPPPPVTDNLLPTTTPQEAQQWLHRNRFSTFTRLFTNFSGADLLKLTRDDVIQICGPADGIRLFNALKGRMVRPRLTIYVCQESLQLREQQQQQQQQQQKHEDGDSNGTFFVYHAIYLEELTAVELTEKIAQLFSISPCQISQIYKQGPTGIHVLISDEMIQNFQ

SEQ ID NO: 72266 - protein, 450 aa, Homo sapiens
METSRSPSPQFAPQKLTDKPPLLIQDEDSTRIERVMDNNTTVKMVPIKIVHSESQPEKESRQSLACPAEPPALPHGLEKDQIKTLSTSEQFYSRFCLYTRQGAEPEAPHRAQPAEPQPLGTQVPPEKDRCTSPPGLSYMKAKEKTVEDLKSEELAREIVGKDKSLADILDPSVKIKTTMDLMEGIFPKDEHLLEEAQQRRKLLPKIPSPRSTEERKEEPSVPAAVSLATNSTYYSTSAPKAELLIKMKDLQEQQEHEEDSGSDLDHDLSVKKELIESISRKLQVLREARESLLEDVQANTVLGAEVEAIVKGVCKPSEFDKFRMFIGDLDKVVNLLLSLSGRLARVENALNNLDDGASPGDRQSLLEKQRVLIQQHEDAKELKENLDRRERIVFDILANYLSEESLADYEHFVKMKSALIIEQRELEDKIHLGEEQLKCLLDSLQPERGK

SEQ ID NO: 72267 - protein, 165 aa, Homo sapiens
  MOD_RES (1)..(1): Any amino acid
XFHPGFGTAAIMAPPVRYCIPGERLCNLEEGSPGSGTYTRHGYIFSSLAGCLMKSSENGALPVVSVVRETESQLLPDVGAIVTCKVEIYKSFRPGDIVLAKVISLGDAQSNYLLTTAENELGVVVAHSESGIQMVPISWCEMQCPKTHTKEFRKVARVQPEFLQT

SEQ ID NO: 72268 - protein, 127 aa, Homo sapiens
MGVLWGAPEPCRVPAAGDSNAESAWPAERGCWGTEPHPTRLGKALPGSYEIRHYGPAKWVSTSVESMDWDSAIQTGFTKLNSYIQGKNEKEMKIKMTAPVTSYVEPGSGPFSLSMDFLVPKRIKNNF

SEQ ID NO: 72269 - protein, 83 aa, Homo sapiens
MGKKYKNIVLLKGLEVINDYHFRMVKSLLSNDLKLNLKMREEYDKIQIADLMEEKFRGDAGLGKLIKIFEDIPTLEDLAETLK

SEQ ID NO: 72270 - protein, 685 aa, Homo sapiens
MGAAAGRSPHLGPAPARRPQRSLLLLQLLLLVAAPGSTQAQAAPFPELCSYTWEAVDTKNNVLYKINICGSVDIVQCGPSSAVCMHDLKTRTYHSVGDSVLRSATRSLLEFNTTVSCDQQGTNHRVQSSIAFLCGKTLGTPEFVTATECVHYFEWRTTAACKKDIFKANKEVPCYVFDEELRKHDLNPLIKLSGAYLVDDSDPDTSLFINVCRDIDTLRDPGSQLRACPPGTAACLVRGHQAFDVGQPRDGLKLVRKDRLVLSYVREEAGKLDFCDGHSPAVTITFVCPSERREGTIPKLTAKSNCRYEIEWITEYACHRDYLESKTCSLSGEQQDVSIDLTPLAQSGGSSYISDGKEYLFYLNVCGETEIQFCNKKQAAVCQVKKSDTSQVKAAGRYHNQTLRYSDGDLTLIYFGGDECSSGFQRMSVINFECNKTAGNDGKGTPVFTGEVDCTYFFTWDTEYACVKEKEDLLCGATDGKKRYDLSALVRHAEPEQNWEAVDGSQTETEKKHFFINICHRVLQEGKARGCPEDAAVCAVDKNGSKNLGKFISSPMKEKGNIQLSYSDGDDCGHGKKIKTNITLVCKPGDLESAPVLRTSGEGGCFYEFEWHTAAACVLSKTEGENCTVFDSQAGFSFDLSPLTKKNGAYKVETKKYDFYINVCGPVSVSPCQPDSGACQVAKSA

SEQ ID NO: 72271 - protein, 180 aa, Homo sapiens
MAAAPALKHWRTTLERVEKFVSPLYFTDCNLRGRLFGASCPVAVLSSFLTPERLPYQEAVQRDFRPAQVGDSFGPTWWTCWFRVELTIPEAWVGQEVHLCWESDGEGLVWRDGEPVQGLTKEGEKTSYVLTDRLGERDPRRLECNGTISAHCDRRLPGSSNSPASASLLAEITASLSMWK

SEQ ID NO: 72272 - protein, 235 aa, Homo sapiens
MPAVDKLLLEEALQDSPQTRSLLSVFEEDAGTLTDYTNQLLQAMQRVYGAQNEMCLATQQLSKQLLAYEKQNFALGKGDEEVISTLHYFSKVVDELNLLHTELAKQLADTMVLPIIQFREKDLTEVSTLKDLFGLASNEHDLSMAKYSRLPKKKENEKVKTEVGKEVAAARRKQHLSSLQYYCALNALQYRKQMAMMEPMIGFAHGQINFFKKGAEMFSKRMDSFLSSVADMVQR

SEQ ID NO: 72273 - protein, 164 aa, Homo sapiens
MKLKEVDRTAMQAWSPAQNHPIYLATGTSAQQLDATFSTNASLEIFELDLSDPSLDMKSCATFSSSHRYHKLIWGPYKMDSKGDVSGVLIAGGENGNIILYDPSKIIAGDKEVVIAQNDKHTGPVRALDVNIFQTNLVASGANESEIYIWDLNNFATPMTPGAK

SEQ ID NO: 72274 - protein, 110 aa, Homo sapiens
MSSHGNSLFLRESGQRLGRVGWLQRLQESLQQRALRTRLRLQTMTLEHVLRFLRRNAFILLTVSAVVIGVSLAFALRPYQLTYRQIKYFSFPGELLMRMLQMLVLPLIVS

SEQ ID NO: 72275 - protein, 474 aa, Homo sapiens
MAAAALRAPTQGCVTFEDIAIYFSQDEWGLLDEAQRLLYLEVMLENFALVASLGCGHGTEDEETPSDQNVSVGVSQSKAGSSTQKTQSCEMCVPVLKDILHLADLPGQKPYLVGECTNHHQHQKHHSAKKSLKRDMDRASYVKCCLFCMSLKPFRKWEVGKDLPAMLRLLRSLVFPGGKKPGTITECGEDIRSQKSHYKSGECGKASRHKHTPVYHPRVYTGKKLYECSKCGKAFRGKYSLVQHQRVHTGERPWECNECGKFFSQTSHLNDHRRIHTGERPYECSECGKLFRQNSSLVDHQKIHTGARPYECSQCGKSFSQKATLVKHQRVHTGERPYKCGECGNSFSQSAILNQHRRIHTGAKPYECGQCGKSFSQKATLIKHQRVHTGERPYKCGDCGKSFSQSSILIQHRRIHTGARPYECGQCGKSFSQKSGLIQHQVVHTGERPYECNKCGNSFSQCSSLIHHQKCHNT

SEQ ID NO: 72276 - protein, 172 aa, Homo sapiens
MAAAMTFCRLLNRCGEAARSLPLGARCFGVRVSPTGEKVTHTGQVYDDKDYRRIRFVGRQKEVNENFAIDLIAEQPVSEVETRVIACDGGGGALGHPKVYINLVRSWPPVHMLGQPARPHTPLHSQCLFFLSSSLPAPEAALTGFTLLAHSPYSATLQGLHRAACPKTPFQL

SEQ ID NO: 72277 - protein, 382 aa, Homo sapiens
MATRRLTDAFLLLRNNSIQNRQLLAEQVSSHITSSPLHSRSIAAELDELADDRMALVSGISLDPEAAIGVTKRPPPKWVDGVDEIQYDVGRIKQKMKELASLHDKHLNRPTLDDSSEEEHAIEITTQEITQLFHRCQRAVQALPSRARACSEQEGRLLGNVVASLAQALQELSTSFRHAQSGYLKRMKNREERSQHFFDTSVPLMDDGDDNTLYHRGFTEDQLVLVEQNTLMVEEREREIRQIVQSISDLNEIFRDLGAMIVEQGTVLDRIDYNVEQSCIKTEDGLKQLHKDFSHVEGLLSQSLRLWKSYYICQGMALVSHPLGRSSSCLSPLECRVPVCNVFANRKKSERSSYTLACSVPGTGGKKNNKKSKRPAFRMLKL

SEQ ID NO: 72278 - protein, 142 aa, Homo sapiens
MDRFTVAGVLPDIEQFFNIGDSSSGLIQTVFISSYMVLAPVFGYLGDRYNRKYLMCGGIAFWSLVTLGSSFIPGEHFWLLLLTRGLVGVGEASYSTIAPTLIADLFVADQRSRMLSIFYFAIPVGSGLGYIAGSKVKDMAGD

SEQ ID NO: 72279 - protein, 54 aa, Homo sapiens
  MOD_RES (1)..(1): Any amino acid
XLHTEECNVLINLLKECHKNHNILKFFGYCNDVDRELRKCLKNEGPSGLPLEMS

SEQ ID NO: 72280 - protein, 192 aa, Homo sapiens
  MOD_RES (1)..(1): Any amino acid
XYMLKNVRVLGHFEKPLFLELCRHMVFQRLGQGDYVFRPGQPDASIYVVQDGLLELCLPGPDGKECVVKEVVPGDSVNSLLSILDVITHPQRTVSARAARDSTVLRLPVEAFSAVFTKYPESLVRVVQIIMVRLQRVTFLALHNYLGLTNELFSHEIQPLRLFPSPGLPTRTSPVRGSKRMVSTSATDEPRE

SEQ ID NO: 72281 - protein, 765 aa, Homo sapiens
MAQWNQLQQLDTRYLEQLHQLYSDSFPMELRQFLAPWIESQDWAYAASKESHATLVFHNLLGEIDQQYSRFLQESNVLYQHNLRRIKQFLQSRYLEKPMEIARIVARCLWEESRLLQTAATAAQQGGQANHPTAAVVTEKQQMLEQHLQDVRKRVQDLEQKMKVVENLQDDFDFNYKTLKSQGDMQDLNGNNQSVTRQKMQQLEQMLTALDQMRRSIVSELAGLLSAMEYVQKTLTDEELADWKRRQQIACIGGPPNICLDRLENWITSLAESQLQTRQQIKKLEELQQKVSYKGDPIVQHRPMLEERIVELFRNLMKSAFVVERQPCMPMHPDRPLVIKTGVQFTTKVRLLVKFPELNYQLKIKVCIDKDSGDVAALRGSRKFNILGTNTKVMNMEESNNGSLSAEFKHLTLREQRCGNGGRANCDASLIVTEELHLITFETEVYHQGLKIDLETHSLPVVVISNICQMPNAWASILWYNMLTNNPKNVNFFTKPPIGTWDQVAEVLSWQFSSTTKRGLSIEQLTTLAEKLLGPGVNYSGCQITWAKFCKENMAGKGFSFWVWLDNIIDLVKKYILALWNEGYIMGFISKERERAILSTKPPGTFLLRFSESSKEGGVTFTWVEKDISGKTQIQSVEPYTKQQLNNMSFAEIIMGYKIMDATNILVSPLVYLYPDIPKEEAFGKYCRPESQEHPEADPGAAPYLKTKFICVTPNTIDLPMSPRTLDSLMQFGNNGEGAEPSAGGQFESLTFDMELTSECATSPM

SEQ ID NO: 72282 - protein, 867 aa, Homo sapiens
MVVSAGPWSSEKAEMNILEINETLRPQLAEKKQQFRNLKEKCFLTQLAGFLANQQKKYKYEECKDLIKFMLRNERQFKEEKLAEQLKQAEELRQYKVLVHSQERELTQLREKLREGRDASRSLYEHLQALLTPYEPDKSQGQDLQEQLAEGCRLAQHLVQKLSPENDEDEDEDVQVEEAEKVLESSAPREVQKAEESKVPEDSLEECAITCSNSHGPCDSNQPHKNIKITFEEDEVNSTLVVDRESSHDECQDALNILPVPGPTSSATNVSMVVSAGPLSSEKAEMNILEINEKLRPQLAEKKQQFRNLKEKCFLTQLSGFLANQQKKYKYEECKDLIKFMLRNERQFKEEKLAEQLKQAEELRQYKVLVHAQERELTQLREKLREGRDASRSLNEHLQALLTPDEPDKSQGQDLQEQLAEGCRLAQHLVQKLSPENDNDDDEDVQVEVAEKVQKSSAPREMQKAEEKEVPEDSLEECAITYSNSHGSYDSNQPHRKTKITFEEDKVDSTLIGSSSHVEWEDAVHIIPENESDDEEEEEKGPVSPRNLQESEEEEVPQESWDEGYSTLSIPPEMLASYQSYSSTFHSLEEQQVCMAVDIGRHRWDQVKKEDQEATGPRLSRELLDEKEPEVLQDSLDRCYSTPSGYLELPDLGQPYSSAVYSLEEQYLGLALDVDRIKKDQEEEEDQGPPCPRLSRELLEVVEPEVLQDSLDRCYSTPSSCLEQPDSCQPYGSSFYALEEKHVGFSLDVGEIEKKGKGKKRRGRRSKKERRRGRKEGEEDQNPPCPRLNGVLMEVEEREVLQDSLDRCYSTPSMYFELPDSFQHYRSVFYSFEEQHISFALYVDNRFFTLTVTSLHLVFQMGVIFPQ

SEQ ID NO: 72283 - protein, 21 aa, Homo sapiens
MDSVMPSQEPPVDDKNEDADL

SEQ ID NO: 72284 - protein, 1398 aa, Homo sapiens
  MOD_RES (1)..(1): Any amino acid
XSVDCLKESPNKQQERAQSQSGVDLQEDVLVRERPRSLEDLHQKKVGRAKRESRRMRELEQAIFSLELLKVRSLGGISPSEDRRWSTELVPEGLQSPRGTPDSESSQGSLELLSYEESQKSKLESVISDEGDLQFPSPKISSSPKFDSRDNALSASNETSSAEHLKDGTMKEMVVCSSESITCKPQLKDSFISNSLPTFFYIPQQDPLKTNSQLDTSIQRNKLLENEDTAGEALTLDINRETRRYHCSGKDQIVPSLNTESSNPVLKKLEKLNTEKEERQKQLQQQNEKEMMEQIRQQTDILEKERKAFKTIEKPRIGECLVAPSSYQSKQRVERPSSLLSLNTSNKGELNVLGSLSLKDAALAQKDSSSAHLPPKDRPVTVFFERKGSPCQSSTVKELSKTDRMGTQLNVACKLSNNRISKREHFRPTQSYSHNSDDLSREGNARPIFFTPKDNMSIPLVSKEALNSKNPQLHKEDEPAWKPVKLAGPGQREVARPAHKKKARMARTRSDFLTRGTFADGEGDTEEDDYDDIIEPLLSLDQASHCELGPAPSLGQASHSDSEMTSQRFSSVDEQAKLHKTMSQGEITKLAVRQKASDSDIRPQRAKMRFWAKGKQGEKKTTRVKPTTQSEVSPLFAGTDVIPAHQFPDELAAYHPTPPLSPELPGSCRKEFKENKEPSPKAKRKRSVKISNVALDSMHWQNDSVQIIASVSDLKSMDEFLLKKVNDLDNEDSKKDTLVDVVFKKALKEFRQNIFSFYSSALAMDDGKSIRYKDLYALFEQILEKTMRLEQRDSLGESPVRVWVNTFKVFLDEYMNEFKTSDCTATKVPKTERKKRRKKETDLVEEHNGHIFKATQYSIPTYCEYCSSLIWIMDRASVCKLCKYACHKKCCLKTTAKCSKKYDPELSSRQFGVELSRLTSEDRTVPLVVEKLINYIEMHGLYTEGIYRKSGSTNKIKELRQGLDTDAESVNLDDYNIHVIASVFKQWLRDLPNPLMTFELYEEFLRAMGLQERKETIRGVYSVIDQLSRTHLNTLERLIFHLVRIALQEDTNRMSANALAIVFAPCILRCPDTTDPLQSVQDISKTTTCVELIVVEQMNKYKARLKDISSLEFAENKAKTRLSLIRRSMGKGRIRRGNYPGPSSPVVVRLPSVSDVSEETLTSEAAMETDITEQQQAAMQQEERVLTEQIENLQKEKEELTFEMLVLEPRASDDETLESEASIGTADSSENLNMESEYAISEKSERSLALSSLKTAGKSEPSSKLRKQLKKQQDSLDVVDSSVSSLCLSNTASSHGTRKLFQIYSKSPFYRAASGNEALGMEGPLGQTKFLEDKPQFISRGTFNPEKGKQKLKNVKNSPQKTKETPEGTVMSGRRKTVDPDCTSNQQLALFGNNEFMV

SEQ ID NO: 72285 - protein, 242 aa, Homo sapiens
MFAQQMQLMLQNAQMSSLGSFPMTPSIPANPPMAFNPYIPHPGMGLVPAELVPNTPVLIPGNPPLAMPGAVGPKLMRSDKLEVCREFQRGNCTRGENDCRYAHPTDASMIEASDNTVTICMDYIKGRCSREKCKYFHPPAHLQARLKAAHHQMNHSAASAMALQPGTLQLIPKRSALEKPNGATPVFNPTVFHCQQALTNLQLPQPAFIPAGPILCMAPASNIVPMMHGATPTTVSAATTPA

SEQ ID NO: 72286 - protein, 100 aa, Homo sapiens
  MOD_RES (1)..(1): Any amino acid
XLVNNAAVALLQPFLEVTKEAFDRSFEVNLRAVIQVSQIVARGLIARGVPGAIVNVSSQCSQRAVTNHSVYCSTKGALDMLTKVMALELGPHKLSRCRSE

SEQ ID NO: 72287 - protein, 151 aa, Homo sapiens
MLEELECGAPGARGAATARLPFKRLNLVPKGKADDMSDDQGTSVQSKSPDLEASLDTLENNCHVGSDIDFRPKLVNGKGPLDNFLRNRIETSIGQSTVIIDLTEDSNEQPDSLVDHNKLNSEASPSREAINGQREDTGDQQGLLKAIQNDK

SEQ ID NO: 72288 - protein, 208 aa, Homo sapiens
MHYPTALLFLILANGAQAFRICAFNAQRLTLAKVAREQVMDTLVRILARCDIMVLQEVVDSSGSAIPLLLRELNRFDGSGPYSTLSSPQLGRSTYMETYVYFYRSHKTQVLSSYVYNDEDDVFAREPFVAQFSLPSNVLPSLVLVPLHTTPKAVEKELNALYDVFLEVSQHWQSKDVILLGDFNADCASLTKKRLDKLELRTEPGFHW

SEQ ID NO: 72289 - protein, 92 aa, Homo sapiens
MISFQESVTFQDVAVDFTAEEWQLLDCAERTLYWDVMLENYRNLISVGCPITKTKVILKVEQGQEPWMVEGANPHESSPGWSAVAQSQLGFK

SEQ ID NO: 72290 - protein, 137 aa, Homo sapiens
MQLNEEINKGSVSFRDVAIDFSREEWRHLDLSQRNLYRDVMLETYSHLLSVGYQVPKPEVVMLEQGKEPWALQGERPRHSCPGEKLWDHNQHRKIIGYKPASSQDQKIYSGEKSYECAEFGKSFTWKSQFKVHLKVP

SEQ ID NO: 72291 - protein, 373 aa, Homo sapiens
MATSGANGPGSATASASNPRKFSEKIALQKQRQASLSSPQPQLQGSHSHPSLPASSLARHVLPTTSLGHPSLSAPALSSSSSSSSTSSPVLGAPSYPASTPGASPHHRRVPLSPLSLLAGPADARRSQQQLPKQFSPTMSPTLSSITQGVPLDTSKLSTDQRLPPYPYSSPSLVLPTQPHTPKSLQQPGLPSQSCSVQSSGGQPPGRQSHYGTPYPPGPSGHGQQSYHRPMSDFNLGNLEQFSMESPSASLVLDPPGFSEGPGFLGGEGPMGGPQDPHTFNHQNLTHCSRHGSGPNIILTGDSSPGFSKEIAAALAGVPGFEVSAAGLELGLGLEDELRMEPLGLEGLNMLSDPCALLPDPAVEESFRSDRLQ

SEQ ID NO: 72292 - protein, 152 aa, Homo sapiens
MAGSRLETVGSIFSRTRDLVRAGVLKEKPLWFDVYDAFPPLREPVFQRPRVRYGKAKAPIQDIWYHEDRIRAKFYSVYGSGQRAFDLFNPNFKSTCQRFVEKYTELQKLGETDEEKLFVETGKALLAEGVILRRVGEARTVSISLLKLLLGL

SEQ ID NO: 72293 - protein, 154 aa, Homo sapiens
  MOD_RES (1)..(1): Any amino acid
XFLNELEEILDVIEPSEFSKVMEPLFRQLAKCVSSPHFQVAERALYYWNNEYIMSLISDNAARVLPIMFPALYRNSKSHWNKTIHGLIYNALKLFMEMNQKLFDDCTQQYKAEKQNPTPILLLLLRGRFRMKEREEMWQKIEELARLNPQYPMF

SEQ ID NO: 72294 - protein, 393 aa, Homo sapiens
  MOD_RES (1)..(1): Any amino acid
XGIVASILVFLCFGVTQAKDGPFSRPHPAYWRFWLCVSVVYELFLIFILFQTVQDGRQFLKYVDPKLGVPLPERDYGGNCLIYDPDNETDPFHNIWDKLDGFVPAHFLGWYLKTLMIRDWWMCMIISVMFEFLEYSLEHQLPNFSECWWDHWIMDVLVCNGLGIYCGMKTLEWLSLKTYKWQGLWNIPTYKGKMKRIAFQFTPYSWVRFEWKPASSLRRWLAVCGIILVFLLAELNTFYLKFVLWMPPEHYLVLLRLVFFVNVGGVAMREIYDFMDDPKPHKKLGPQAWLVAAITATELLIVVKYDPHTLTLSLPFYISQCWTLGSVLALTWTVWRFFLRDITLRYKETRWQKWQNKDDQGSTVGNGDQHPLGLDEDLLGPGVAEGEGAPTPN

SEQ ID NO: 72295 - protein, 99 aa, Homo sapiens
MVKLNSNPSEKGTKPPSVEDGFQTVPLITPLEVNHLQLPAPEKVIVKTRTEYQPEQKNKGKFRVPKIAEFTVHRTWHFSTSCRGAGMLDQFQSMKCGWK

SEQ ID NO: 72296 - protein, 197 aa, Homo sapiens
  MOD_RES (1)..(1): Any amino acid
XSYREFHSAGRTPPMMPGSQRPLSARTYSIDGPNASRPQSARPSINEIPERTMSVSDFNYSRTSPSKRPNARVGSEHSLLDPPGKSKVPRDWREQVLRHIEAKKLEKSMLSRSFNSNFTTVSSFHCGSSRDLHGSQGSLALSVADRRGSGGHIFRKHPQTSSSGDPCQDGIFISGQQNYSSATLSHKDVPPDSLMKV

SEQ ID NO: 72297 - protein, 86 aa, Homo sapiens
  MOD_RES (1)..(1): Any amino acid
XKLWTSQEQPQPSQQQPSVQPPSQPPPQPSTLPQAQVWPGPQPPQPQPPPQPTQPSAQARCTQHTSKCNLQDSQRPGHQPTSAGIY

SEQ ID NO: 72298 - protein, 20 aa, Homo sapiens
MLSSQGHIKLTDFGLCKESI

SEQ ID NO: 72299 - protein, 88 aa, Homo sapiens
MAEWCPWALETISSTSQRSCHRTTVLGGSARRPRGAQTSPRRSWRRTSSPRATTCPLMSCLRSMATRRQTPFQTGRVRVVTWPRTSQT

SEQ ID NO: 72300 - protein, 255 aa, Homo sapiens
  MOD_RES (1)..(1): Any amino acid
XGCEEDKNLPSGYGYRPASRENEGRRPFKIDNDDEPHTSKRDEVDRAVILFKPMVSEPIHIHRKSPLPRSRKTATNDVVSENANYLRTPRTLVEQKQNPTVGSHCAGLFSTSVLGGSSSAPNLQDYARTHRKKLTSSGCIDDATRGSAVKRFSISFARHPTNGFELYSMVPSICPLETLHNALSLKQVDEFLASIASPSSDVPRKTAEISSTALRSSPIMRKKVSLNTYTPAKILPTPPATLKSTKASSKPATSG

SEQ ID NO: 72301 - protein, 122 aa, Homo sapiens
MALKRIQKELTDLQRDPPAQCSAGPVGDDLFHWQATIMGPNDSPYQGGVFFLTIHFPTDYPFKPPKVAFTTKIYHPNINSNGSICLDILRSQWSPALTVSKGRDADGMLCVLFYTCFYPSTD

SEQ ID NO: 72302 - protein, 90 aa, Homo sapiens
NSIFSPSQLRYQHGLGTPDLRQTLPNLKNFMEHGLMVRWTSALQEHSKLRKGIVATAGRGTDSTTHSARGDSKNPRQAYLQTCVLQNRHH

SEQ ID NO: 72303 - protein, 54 aa, Homo sapiens
TAEQRVSFRHHESCAAQGWRHGPWGREAVPGGLGEEPEAQELQPVSAGETWACL

SEQ ID NO: 72304 - protein, 112 aa, Homo sapiens
MDLRVGQRPPVEPPPEPTLLALQRPQRLHHHLFLAGLQQQRSVEPMRLSMDTPMPELQVGPQEQELRQLLHKDKSKRSAVASSVVKQKLAEVILKKQQAALERTVHPNSPGI

SEQ ID NO: 72305 - protein, 198 aa, Homo sapiens
MRWRTILLQYCFLLITCLLTALEAVPIDIDKTKVQNIHPVESAKIEPPDTGLYYDEYLKQVIDVLETDKHFREKLQKADIEEIKSGRLSKELDLVSHHVRTKLDELKRQEVGRLRMLIKAKLDSLQDIGMDHQALLKQFDHLNHLNPDKFESTDLDMLIKAATSDLEHYDKTRHEEFKKYEMMKEHERREYLKTLNEE

SEQ ID NO: 72306 - protein, 113 aa, Homo sapiens
MPGQELRTVNGSQMLLVLLVLSWLPHGGALSLAEASRASFPGPSELHSEDSRFRELRKRYEDLLTRLRANQSWEDSNTDLVPAPAVRILTPEVRLGSGGHLHLRISRAALPEG

SEQ ID NO: 72307 - protein, 756 aa, Homo sapiens
MVWDRQTKMEYEWKPDEQGLQQILQLLKESQSPDTTIQRTVQQKLEQLNQYPDFNNYLIFVLTKLKSEDEPTRSLSGLILKNNVKAHFQNFPNGVTDFIKSECLNNIGDSSPLIRATVGILITTIASKGELQNWPDLLPKLCSLLDSEDYNTCEGAFGALQKICEDSAEILDSDVLDRPLNIMIPKFLQFFKHSSPKIRSHAVACVNQFIISRTQALMLHIDSFIEYMLQRTQDQDENVALEACEFWLTLAEQPICKDVLVRHLPKLIPVLVNGMKYSDIDIILLKGDVEEDETIPDSEQDIRPRFHRSRTVAQQHDEDGIEEEDDDDDEIDDDDTISDWNLRKCSAAALDVLANVYRDELLPHILPLLKELLFHHEWVVKESGILVLGAIAEGCMQGMIPYLPELIPHLIQCLSDKKALVRSITCWTLSRYAHWVVSQPPDTYLKPLMTELLKRILDSNKRVQEAACSAFATLEEEACTELVPYLAYILDTLVFAFSKYQHKNLLILYDAIGTLADSVGHHLNKPEYIQMLMPPLIQKWNMLKDEDKDLFPLLECLSSVATALQSGFLPYCEPVYQRCVNLVQKTLAQAMLNNAQPDQYEAPDKDFMIVALDLLSGLAEGLGGNIEQLVARSNILTLMYQCMQDKMPEVRQSSFALLGDLTKACFQHVKPCIADFMPILGTNLNPEFISVCNNATWAIGEISIQMGIEMQPYIPMVLHQLVEIINRPNTPKTLLENTDIFSVGYKNHNPLSLPTM

SEQ ID NO: 72308 - protein, 227 aa, Homo sapiens
  MOD_RES (1)..(1): Any amino acid
XQVILEQEGPGTLESQSGRGSYFLCGVGGGEAAEIGSRGSTKAQGPQQQPGSEGPSYAKKVALWLAGLLGAGGTVSVVYIFGNNPVDENGAKIPDEFDNDPILVQQLRRTYKYFKDYRQMIIEPTSPCLLPDPLQEPYYQPPYTLVLELTGVLLHPEWSLATGWRFKKRPGIETLFQQLAPLYEIVIFTSETGMTAFPLIDSVDPHGFISYRLFRDATRYMDGHHVK

SEQ ID NO: 72309 - protein, 77 aa, Homo sapiens
MCGATSFLHECTRLILVTTQNAEFLQKGLQVHTCFGVYPHASVWHDCASQKKGCAVYLHVSVEFNKLIPENGFIKGW

SEQ ID NO: 72310 - protein, 107 aa, Homo sapiens
MKSLKAKFRKSDTNEWNKNDDRLLQAVENGDAEKVASLLGKKGASATKHDSEGKTAFHLAAAKGHVECLRVMITHGVDVTAQDTTGHSALHLAAKNSHHECIRKLLQ

SEQ ID NO: 72311 - protein, 648 aa, Homo sapiens
MLGICRGRRKFLAASLSLLCIPAITWIYLFSGSFEDGKPVSLSPLESQAHSPRYTASSQRERESLEVRMREVEEENRALRRQLSLAQGRAPSHRRGNHSKTYSMEEGTGDSENLRAGIVAGNSSECGQQPVVEKCETIHVAIVCAGYNASRDVVTLVKSVLFHRRNPLHFHLIADSIAEQILATLFQTWMVPAVRVDFYNADELKSEVSWIPNKHYSGIYGLMKLVLTKTLPANLERVIVLDTDITFATDIAELWAVFHKFKGQQVLGLVENQSDWYLGNLWKNHRPWPALGRGYNTGVILLLLDKLRKMKWEQMWRLTAERELMGMLSTSLADQDIFNAVIKQNPFLVYQLPCFWNVQLSDHTRSEQCYRDVSDLKVIHWNSPKKLRVKNKHVEFFRNLYLTFLEYDGNLLRRELFGCPSEADVNSENLQKQLSELDEDDLCYEFRRERFTVHRTHLYFLHYEYEPAADSTDVTLVAQLSMDRLQMLEAICKHWEGPISLALYLSDAEAQQFLRYAQGSEVLMSRHNVGYHIVYKEGQFYPVNLLRNVAMKHISTPYMFLSDIDFLPMYGLYEYLRKSVIQLDLANTKKAMIVPAFETLRYRLSFPKSKAELLSMLDMGTLFTFSFDFSQTLSPIISCKTTVPNTCL

SEQ ID NO: 72312 - protein, 786 aa, Homo sapiens
MSHLSSPPKKHKGEHKGHSLPHGSERGSSSRDKDRSATVSSSVPMPAGGKGSHPSSTPQRVPNRLIHEKSPYLLQHAYNPVDWYPWGQEAFDKARKENKPIFLSVGYSTCHWCHMMEEESFQNEEIGRLLSEDFVSVKVDREERPDVDKVYMTFVQATSSGGGWPMNVWLTPNLQPFVGGTYFPPEDGLTRVGFRTVLLRIREQWKQNKNTLLENSQRVTTALLARSEISVGDRQLPPSAATVNNRCFQQLDEGYDEEYGGFAEAPKFPTPVILSFLFSYWLSHRLTQDGSRAQQMALHTLKMMANGGIRDHVGQGFHRYSTDRQWHVPHFEKMLYDQAQLAVAYSQAFQLSGDEFYSDVAKGILQYVARSLSHRSGGFYSAEDADSPPERGQRPKEGAYYVWTVKEVQQLLPEPVLGATEPLTSGQLLMKHYGLTEAGNISPSQDPKGELQGQNVLTVRYSLELTAARFGLDVEAVRTLLNSGLEKLFQARKHRPKPHLDSKMLAAWNGLMVSGYAVTGAVLGQDRLINYATNGAKFLKRHMFDVASGRLMRTCYTGPGGTVEHSNPPCWGFLEDYAFVVRGLLDLYEASQESAWLEWALRLQDTQDKLFWDSQGGGYFCSEAELGAGLPLRLKDDQDGAEPSANSVSAHNLLRLHGFTGHKDWMDKCVCLLTAFSERMRRVPVALPEMVRALSAQQQTLKQIVICGDRQAKDTKALVQCVHSVYIPNKVLILADGDPSSFLSRQLPFLSTLRRLEDQATAYVCENQACSVPITDPCELRKLLHP

SEQ ID NO: 72313 - protein, 87 aa, Homo sapiens
  MOD_RES (1)..(1): Any amino acid
XDTIEKEIRKIFSIPDEKETRLWNKYMSNTFEPLNKPDSTIQDAGLYQGQVLVIEQKNEDGTWPRGPSTPNFVGHMVSVITITADVV

SEQ ID NO: 72314 - protein, 332 aa, Homo sapiens
MSELSDQMIFMERIKNMIHMLYFDFWFQIYDLKKWDQFYSEVLGRPTTLFETMGKAEMWLIRTYWDFEFPRPFLPNVDFVGGLHCKPAKPLPKEMEEFVQSSGENGIVVFSLGSMISNMSEESANMIASALAQIPQKVLWRFDGKKPNTLGSNTRLYKWLPQNDLLGHPKTKAFITHGGTNGIYEAIYHGIPMVGIPLFADQHDNIAHMKAKGAALSVDIRTMSSRDLLNALKSVINDPVYKENVMKLSRIHHDQPMKPLDRAVFWIEFVMRHKGAKHLRVAAHNLTWIQYHSLDVIAFLLACVATVIFIITKFCLFCFRKLAKKGKKKKRD

SEQ ID NO: 72315 - protein, 690 aa, Homo sapiens
MSTVEEDSDTVTVETVNSVTLTQDTEGNLILHCPQNEADEIDSEDSIEPPHKRLCLSSEDDQSIDDSTPCISVVALPLSENDQSFEVTMTATTEVADDEVTEGTVTQIQILQNEQLDEISPLGNEEVSAVSQAWFTTKEDKDSLTNKGHKWKQGMWSKEEIDILMNNIERYLKARGIKDATEIIFEMSKDERKDFYRTIAWGLNRPLFAVYRRVLRMYDDRNHVGKYTPEEIEKLKELRIKHGNDWATIGAALGRSASSVKDRCRLMKDTCNTGKWTEEEEKRLAEVVHELTSTEPGDIVTQGVSWAAVAERVGTRSEKQCRSKWLNYLNWKQSGGTEWTKEDEINLILRIAELDVADENDINWDLLAEGWSSVRSPQWLRSKWWTIKRQIANHKDVSFPASADSPATVDSETITLNSGTLQTFEILPSFHLQPTGTPGTYLLQTSSSQGLPLTLTASPTVTLTAAAPASPEQIIVHALSPEHLLNTSDNVTVQCHTPRVIIQTVATEDITSSISQAELTVDSDIQSSDFPEPPDALEADTFPDEIHHPKMTVEPSFNDAHVSKFSDQNSTELMNSVMVRTEEEISDTDLKQEESPSDLASAYVTEGLESPTIEEQVDQTIDDETILIVPSPHGFIQASDVIDTESVLPLTTLTDPILQHHQEESNIIGSSLGSPVSEDSKDVEDLVNCH

SEQ ID NO: 72316 - protein, 144 aa, Homo sapiens
MEISRLAQSKRNIISLNMDLERDTQRIDEANQKLLLKIQEREDKIQRLESEIIQTRGLVEDEEWEKENRTTMERERALQELEEETARLERKNKTLVHSITELQQKLTRKSQKITNCEQSSPDGALEETKVKLQQLEASYACQEK

SEQ ID NO: 72317 - protein, 178 aa, Homo sapiens
MAGQRTCQRRSSRAGPGKMQEPPKSIEEFLKFQNWDYWPREIHFRDDDKWSCTLKKIKEDSSFVSIYTHLWENVPRIFEALLIMESKLKEYSLILQNHTSEIFKWKSMISETSSYRKLERYGEFLKKYHKKKKIMLSDEMETEKNIEGVWGMGPHSVAQAGVQWRNRGSLQPLPPRFK

SEQ ID NO: 72318 - protein, 770 aa, Homo sapiens
MSKRGMSSRAKGDKAEALAALQAANEDLRAKLTDIQIELQQEKSKVSKVEREKNQELRQVREHEQHKTAVLLTELKTKLHEEKMKELQAVRETLLRQHEAELLRVIKIKDNENQRLQALLSALRDGGPEKVKTVLLSEAKEEAKKGFEVEKVKMQQEISELKGAKRQVEEALTLVIQADKIKAAEIRSVYHLHQEEITRIKKECEREIRRLEQQLDEKDARRFQLKIAELSAIIRKLEDRNALLSEERNELLKRVREAESQYKPLLDKNKRLSRKNEDLSHALRRMENKLKFVTQENIEMRQRAGIIRRPSSLNDLDQSQDEREVDFLKLQIVEQQNLIDELSKTLETAGYVKSVLERDKLLRFRKQRKKMAKLPKPVVVETFFGYDEEASLESDGSSVSYQTDRTDQTPCTPDDDLEEGMAKEETELRFRQLTMEYQALQRAYALLQEQVGGTLDAERETREQLQAEVQRAQARIEDLEKALAEQGQDMKWIEEKQALYRRNQELVEKIKQMETEEARLRHEVQDARDQNELLEFRILELEERERKSPAISFHHTPFVDGKSPLQVYCEAEGVTDIVVAELMKKLDILGDNANLTNEEQVVVIQARTVLTLAEKWLQQIEETEAALQRKMVDLESEKELFSKQKGYLDEELDYRKQALDQANKHILELEAMLYDALQQEAGAKVAELLSEEEREKLKVAVEQWKRQVMSELRERDAQILRERMELLQLAQQRIKELEERIEAQKRQIKELEEKFLFLFLFFSLAFILWS

SEQ ID NO: 72319 - protein, 52 aa, Homo sapiens
MSSRKLSGPKGRRLSIHVVTWNVASAAPPLDLSDLLQLNNRNLNLDIYVIGN

SEQ ID NO: 72320 - protein, 42 aa, Homo sapiens
MATEEFIIRIPPYHYIHVLDQNSNVSRVEVGPKTYIRQDNER

SEQ ID NO: 72321 - protein, 321 aa, Homo sapiens
  MOD_RES (1)..(1): Any amino acid
XHFPAIQYAVLYTLYSHCTRHDHFISSSLSSSSPSLFDGAVISTVTTATKKHFSIILNLLGILLKKDNLNQDTRKLLMTWALEAAVLMKKSETYAPLFSLPSFHKFCKGLLANTLVEDVNICLQACSSLHALSSSLPDDLLQRCVDVCRVQLVHSGTRIRQAFGKLLKSIPLDVVLSNNNHTEIQEISLALRSHMSKAPSNTFHPQDFSDVISFILYGNSHRTGKDNWLERLFYSCQRLDKRDQSTIPRNLLKTDAVLWQWAIWEAAQFTVLSKLRTPLGRAQDTFQTIEGIIRSLAAHTLNPDQDVSQWTTADNDEGHGH

SEQ ID NO: 72322 - protein, 69 aa, Homo sapiens
MELALRRSPVPRWLLLLPLLLGLNAGSMGLCDGPQGCLHVLVALLCHQLLQELLRTAPGHVASGRSRRF

SEQ ID NO: 72323 - protein, 86 aa, Homo sapiens
MPFTLHLRSRLPSAIRSLILQKKPNIRNTSSMAGELRPASLVVLPRSLAPAFERFCQVNTGPLPLLGQSEPEKWMLPPQGAISETR

SEQ ID NO: 72324 - protein, 111 aa, Homo sapiens
  MOD_RES (1)..(1): Any amino acid
XLSAYVSRLPAAFAPLPRVRMLAVARPLSTALCSAGTQTRLGTLQPALVLAQLSVNSHFMKDLGLDSLDQVEIIMAMEDEFGFEIPDIDAEKLMCPQEIVDYIADKKDVYE

SEQ ID NO: 72325 - protein, 140 aa, Homo sapiens
MAAIPSSGSLVATHDYYRRRLGSTSSNSSCSSTECPGEAIPHPPGECRIAPFSPRSSRSWQHQDPTSLLSGLPKADPGHWWASFFFGKSTLPFMATVLESAEHSEPPQASSSMTACGLARDAPRKQPGGQSSTASAGPPS

SEQ ID NO: 72326 - protein, 192 aa, Homo sapiens
MAAVGRVGSFGSSPPGLSSTYTGGPLGNEIASGNGGAAAGDDEDGQNLWSCILSEVSTRSRSKLPAGKNVLLLDGVSLLLPRLECNGKISAHCNLHLLGSSDSPASASCVAGITGEDGAGKTSLIRKIQGIEEYKKGRGLEYLYLNVHDEDRDDQTRCNVWILDGDLYHKGLLKFSLDAVSLKDTLVMLVVD

SEQ ID NO: 72327 - protein, 60 aa, Homo sapiens
SIKMLVTLCQSDTEEIRNVASETLLSLGEDGRLAYEQLDKFPRDCVKVGGRHGTEVATAF

SEQ ID NO: 72328 - protein, 122 aa, Homo sapiens
EDEEEEKEERKRGPMETFEDLWQRHLENGGDLQKRVAEKASDKETAQFQAEEKGVRVLGGDRSLWQGAERGGGERREDLPHHHHHHHQPEAEPRQEKEEASEREEKEVEQLEHLRDELKKDC

SEQ ID NO: 72329 - protein, 826 aa, Homo sapiens
LDDPVVTVHQSIGEAKEQFYYERTVFLRCVANSNPPVRYSWRRGQEVLLQGSDKGVEIYEPFFTQGETKILKLKNLRPQDYANYSCIASVRNVCNIPDKMVSFRLSNKTASPSIKLLVDDPIVVNPGEAITLVCVTTGGEPAPSLTWVRSFGTLPEKTVLNGGTLTIPAITSDDAGTYSCIANNNVGNPAKKSTNIIVRALKKGRFWITPDPYHKDDNIQIGREVKISCQVEAVPSEELTFSWFKNGRPLRSSERMVITQTDPDVSPGTTNLDIIDLKFTDFGTYTCVASLKGGGISDISIDVNISSSTVPPNLTVPQEKSPLVTREGDTIELQCQVTGKPKPIILWSRADKEVAMPDGSMQMESYDGTLRIVNVSREMSGMYRCQTSQYNGFNVKPREALVQLIVQYPPAVEPAFLEIRQGQDRSVTMSCRVLRAYPIRVLTYEWRLGNKLLRTGQFDSQEYTEYAVKSLSNENYGVYNCSIINEAGAGRCSFLVTGKAYAPEFYYDTYNPVWQNRHRVYSYSLQWTQMNPDAVDRIVAYRLGIRQAGQQRWWEQEIKINGNIQKGELITYNLTELIKPEAYEVRLTPLTKFGEGDSTIRVIKYSAPVNPHLREFHCGFEDGNICLFTQDDTDNFDWTKQSTATRNTKYTPNTGPNADRSGSKEGFYMYIETSRPRLEGEKARLLSPVFSIAPKNPYGPTNTAYCFSFFYHMYGQHIGVLNVYLRLKGQTTIENPLWSSSGNKGQRWNEAHVNIYPITSFQLIFEGIRGPGIEGDIAIDDVSIAEGECAKQDLATKNSVDGAVGILVHIWLFPIIVLISILSPRR

SEQ ID NO: 72330 - protein, 253 aa, Homo sapiens
MPSLLLLFTAALLSSWAQLLTDANSWWSLALNPVQRPEMFIIGAQPVCSQLPGLSPGQRKLCQLYQEHMAYIGEGAKTGIKECQHQFRQRRWNCSTADNASVFGRVMQIGSRETAFTHAVSAAGVVNAISRACREGELSTCGCSRTARPKDLPRDWLWGGCGDNVEYGYRFAKEFVDAREREKNFAKGSEEQGRVLMNLQNNEAGRRAVYKMADVACKCHGVSGSCSLKTCWLQLAEFRKVGDRLKEKYDSAA

SEQ ID NO: 72331 - protein, 12 aa, Homo sapiens
  MOD_RES (1)..(1): Any amino acid
XRKRQSPGPRLL

SEQ ID NO: 72332 - protein, 627 aa, Homo sapiens
MPSEGRCWETLKALRSSDKGRLCYYRDWLLRREDVLEECMSLPKLSSYSGWVVEHVLPHMQENQPLSETSPSSTSASALDQPSFVPKSPDASSAFSPASPATPNGTKGKDESQHTESMVLQSSRGIKVEGCVRMYELVHRMKGTEGLRLWQEEQERKVQALSEMASEQLKRFDEWKELKQHKEFQDLREVMEKSSREALGHQEKLKAEHRHRAKILNLKLREAEQQRVKQAEQERLRKEEGQIRLRALYALQEEMLQLSQQLDASEQHKALLKVDLAAFQTRGNQLCSLISGIIRASSESSYPTAESQAEAERALREMRDLLMNLGQEITRACEDKRRQDEEEAQVKLQEAQMQQGPEAHKEPPAPSQGPGGKQNEDLQVKVQDITMQWYQQLQDASMQCVLTFEGLTNSKDSQKQGEEEVASHHEAAFPIAVVASGIWELHPRVGDLILAHLHKKCPYSVPFYPTFKEGMALEDYQRMLGYQVKDSKVEQQDNFLKRMSGMIRLYAAIIQLRWPYGNRQEIHPHGLNHGWRWLAQILNMEPLSDVTATLLFDFLEVCGNALMKQYQVQFWKMLILIKEDYFPRIEAITSSGQMGSFIRLKQFLEKCLQHKDIPVPKGFLTSSFWRS

SEQ ID NO: 72333 - protein, 61 aa, Homo sapiens
MQRVYGAQNEMCLATQQLSKQLLAYEKQNFALGKGDEEVISTLHYFSKVVDELNLLHTELA

SEQ ID NO: 72334 - protein, 202 aa, Homo sapiens
  MOD_RES (1)..(1): Any amino acid
XFDEAKTAQEKDSLITPHVSRSSTPRESPCGKIAVAILEETTRERTDVIQGDDVADAASEVEVSSTSETTTKAVVSPPKFVFVSESVKRIFSSEKSKPFVFGNSSATGSLFGFSFNAPLKSNNSETSSVAQSGSESKVEPKKCELSKNSDIEQSSDSKVKNLSASFPTEESSINYTFKTPEKGFNFSLFKSNPMAFWTSTPS

SEQ ID NO: 72335 - protein, 163 aa, Homo sapiens
  MOD_RES (1)..(1): Any amino acid
XNIFGVESGKKEYSLDTRGKFILSIAYSPDGKYLASGAIDGIINIFDIATGKLLHTLEGHAMPIRSLTFSPDSQLLVTASDDGYIKIYDVQHANLAGTLSGHASWVLNVAFCPDDTHFVSSSSDKSVKVWDVGTRTCVHTFFDHQDQVSLLAALKPYSPCFCF

SEQ ID NO: 72336 - protein, 283 aa, Homo sapiens
MERARGPRAEADAPEEEEEAGAAMAAVVVAAAGGAGPAVLQVAGLYRGLCAVRSRALGLGLVSPAQLRVFPVRPGSGRPEGGADSSGVGAEAELQANPFYDRYRDKIQLLRRSDPAAFESRLEKRSEFRKQPVGHSRQGDFIKCVEQKTDALGKQSVNRGFTKDKTLSSIFNIEMVKEKTAEEIKQIWQQYFAAKDTVYAVIPAEKFDLIWNRAQSCPTNVAEAQCIANQVQLFYATDRKETYGLVETFNLRPNEFKYMSVIAELEQSGLGAELKCAQNQNKT

SEQ ID NO: 72337 - protein, 202 aa, Homo sapiens
MKSLSLLLAVALGLATAVSAGPAVIECWFVEDASGKGLAKRPGALLLRQGPGEPPPRPDLDPELYLSVHVVLTVLTHTPAPRVRLGQDALLDLSFAYMPPTSEAASSLAPGPPPFGLEWRRQHLGKGHLLLAATPGLNGQMPAAQEGAVAFAAWDDDEPWGPWTGNGTFWLPTVQPFQEGTYLATIHLPYLQGQVTLELAVY

SEQ ID NO: 72338 - protein, 407 aa, Homo sapiens
  MOD_RES (1)..(1): Any amino acid
XYRVVVEGERGNRPHIYCLEQLLQEAIIDVRPASTRFLPQGTRIAAYWSQQYRCLYPGTVVRGLLDLEDDGDLITVEFDDGDTGRIPLSHIRLLPPDYKIQCAEPSPALLVPSAKRRSRKTSKDTGEGKDGGTAGSEEPGAKARGRGRKPSAKAKGDRAATLEEGNPTDEVPSTPLALEPSSTPGSKKSPPEPVDKRAKAPKARPAPPQPSPAPPAFTSCPAPEPFAELPAPATSLAPAPLITMPATRPKPKKARAAEESGAKGPRRPGEEAELLVKLDHEGVTSPKSKKAKEALLLREDPGAGGWQEPKSLLSLGSYPPAAGSSEPKAPWPKATDGDLAQEPGPGLTFEDSGNPKSPDKAQAEQDGAEESESSSSSSSGSSSSSSSSSSSGSETEGEEEGDKNGDG

SEQ ID NO: 72339 - protein, 213 aa, Homo sapiens
GAERKGGGLGLRLGLQGSQASQDEITASAYQAVILDQKYNGEPVQIRVPMGKEPPHLMSIFKGRMVVYQGGTSRTNNLETGPSTRLFQVQGTGANNTKAFEVPARANFLNSNDVFVLKTQSCCYLWCGKGCSGDEREMAKMVADTISRTEKQVVVEGQEPANFWMALGGKAPYANTKRLQEENLVITPRLFECSNKTGRFLATEIPDFNQDDL

SEQ ID NO: 72340 - protein, 288 aa, Homo sapiens
WLSMASLVIFMQLRYLFHEVQRRIRRHKNYLRVVGNMEARFAVATPEELAVNNDDCAICWDSMQAARKLPCGHLFHNSCLRSWLEQDTSCPTCRMSLNIADNNRVREEHQGENLDENLVPVAAAEGRPRLNQHNHFFHFDGDDSSMRVTAPEDVPVGQEVEVVDSDTDAPDLWSRIASWLPSFSVEVMHTTNILGITQASNSQLNAMAHQIQEMFPQVPYHLVLQDLQLTRSVEITTDNILEGRIQVPFPTQRSDSIRPALNSPVERPSSDQEEGETSAQTERVPLDL

SEQ ID NO: 72341 - protein, 144 aa, Homo sapiens
MSWKKALRIPGGLRVATVTPLGPPDAEYWNSQKEVLERTRAELDTVCRHNYQLELRTTLQRRVEPTVTISPSRTEALNHHNLLVCSVTDFYPAQIKVRWFRNDQEETTGVVSTPLIRNGDWTFQILVMLEMTPQRGDVYTCHVE

SEQ ID NO: 72342 - protein, 72 aa, Homo sapiens
TIAENMADLIDGYCRLVNGTSQSFIIRPQKEGERALPSIPKLANSEKQGMRTHAVSVSAQSWRKRRLSKKSA

SEQ ID NO: 72343 - protein, 47 aa, Homo sapiens
MVQLAPAAAMDEVTFRSDTVLSDVHLYTPNHRHLMVRLNSVGQPGRD

SEQ ID NO: 72344 - protein, 114 aa, Homo sapiens
MADKQISLPAKLINGGIAGLIGVTCVFPIDLAKTRLQNQQNGQRVYTSMSDCLIKTVRSEGYFGMYRGAAVNLTLVTPEKAIKLAANDFFRHQLSKDGQKLTLLKEMLAGCGAG

SEQ ID NO: 72345 - protein, 647 aa, Homo sapiens
MVNTICDVLQEPEQFPLVQGVAIGGSYGRKTVLRGNSDGTLVLFFSDLKQFQDQKRSQRDILDKTGDKLKFCLFTKWLKNNFEIQKSLDGFTIQVFTKNQRISFEVLAAFNALSLNDNPSPWIYRELKRSLDKTNASPGEFAVCFTELQQKFFDNRPGKLKDLILLIKHWHQQCQKKIKDLPSLSPYALELLTVYAWEQGCRKDNFDIAEGVRTVLELIKCQEKLCIYWMVNYNFEDETIRNILLHQLQSARPVILDPVDPTNNVSGDKICWQWLKKEAQTWLTSPNLDNELPAPSWNVLPAPLFTTPGHLLDKFIKEFLQPNKCFLEQIDSAVNIIRTFLKENCFRQSTAKIQIVRGGSTAKGTALKTGSDADLVVFHNSLKSYTSQKNERHKIVKEIHEQLKAFWREKEEELEVSFEPPKWKAPRVLSFSLKSKVLNESVSFDVLPAFNALGQLSSGSTPSPEVYAGLIDLYKSSDLPGGEFSTCFTVLQRNFIRSRPTKLKDLIRLVKHWYKECERKLKPKGSLPPKYALELLTIYAWEQGSGVPDFDTAEGFRTVLELVTQYQQLCIFWKVNYNFEDETVRKFLLSQLQKTRPVILDPAEPTGDVGGGDRWCWHLLAKEAKEWLSSPCFKDGTGNPIPPWKVP

SEQ ID NO: 72346 - protein, 121 aa, Homo sapiens
MVTAPHSSTRHTSVVMLTPNPDGPPSQAAAPMATPTPRAEGHPPTHTISTIAATVTAPHSESSLSTGPAPAAMATTSSKPEGRPRGQAAPTILLTKPPGATSRPTTAPPRTTTRRPPRPPG

SEQ ID NO: 72347 - protein, 36 aa, Homo sapiens
MERSPSRRRRLEEAPNQDPIPWRIFNPSHSTHHFPG

SEQ ID NO: 72348 - protein, 487 aa, Homo sapiens
MAAKSQPNIPKAKSLDGVTNDRTASQGQWGRAWEVDWFSLASVIFLLLFAPFIVYYFIMACDQYSCALTGPVVDIVTGHARLSDIWAKTPPITRKAAQLYTLWVTFQVSSPCPGVGTQQVLLYTSLPDFCHKFLPGYVGGIQEGAVTPAGVVNKYQINGLQAWLLTHLLWFANAHLLSWFSPTIIFDNWIPLLWCANILGYAVSTFAMVKGYFFPTSARDCKFTGNFFYNYMMGIEFNPRIGKWFDFKLFFNGRPGIVAWTLINLSFAAKQRELHSHVTNAMVLVNVLQAIYVIDFFWNETWYLKTIDICHDHFGWYLGWGDCVWLPYLYTLQGLYLVYHPVQLSTPHAVGVLLLGLVGYYIFRVANHQKDLFRRTDGRCLIWGRKPKVIECSYTSADGQRHHSKLLVSGFWGVARHFNYVGDLMGSLAYCLACGGGHLLPYFYIIYMAILLTHRCLRDEHRCASKYGRDWERYTAAVPYRLLPGIF

SEQ ID NO: 72349 - protein, 173 aa, Homo sapiens
MKGGNAGYSRWCCFADSWQREKLASMESPEEPGASMDENYFVNYTFKDRSHSGRVAQGIMKLCLEEELFADVTISVEGREFQLHRLVLSAQSCFFRSMFTSNLKEAHNRVIVLQDVSESVFQLLVDYIYHGTVKLRAEELQEIYEVSDMYQLTSLFEECSRFLARTVQVGNCL

SEQ ID NO: 72350 - protein, 147 aa, Homo sapiens
MMMMALSKTFGQKPVKFQLEDDGEFYMIGSEVGNYLRMFRGSLYKRYPSLWRRLATVEERKKIVASSHDHGYTTLATSVTLLKASEVEEILDGNDEKYKAVSISTEPPTYLSFDDHDPAVIHENASQPEVLVPIRLDMEIDGQKLRD

SEQ ID NO: 72351 - protein, 120 aa, Homo sapiens
MASERLPNRPACLLVASGAAEGVSAQSFLHCFTMASTAFNLQVATPGGKAMEFVDVTESNARWVQDFRLKAYASPAKLESIDGARYHALLIPSCPGALTDLASSGSLARILQHFHSESSR

SEQ ID NO: 72352 - protein, 97 aa, Homo sapiens
MFSCVKPYEDQNYSALRRDCRRRKVLFEDPLFPATDDSLYYKGTPGPAVRWKRPKGICEDPRLFVDGISSHDLHQGQVGNCWFVAACSSLASRESLW

SEQ ID NO: 72353 - protein, 166 aa, Homo sapiens
MRSLLLLSAFCLLEAALAAEVKKPAAAAAPGTAEKLSPKAATLAERSAGLAFSLYQAMAKDQAVENILVSPVVVASSLGLVSLGGKATTASQAKAVLSAEQLRDEEVHAGLGELLRSLSNSTARNVTWKLGSRLYGPSSVSFADDFVRSSKQHYNCEHSKINFRDK

SEQ ID NO: 72354 - protein, 110 aa, Homo sapiens
MVYLQAKTRIPEHRKVTQLIKCWSPDLNPVFLKDLSSTPMASNNTASIAQARKLVEQLKMEANIDRIKVSKAAADLMAYCEAHAKEDPLLTPVPASENPFREKKFFCAIL

SEQ ID NO: 72355 - protein, 202 aa, Homo sapiens
  MOD_RES (1)..(1): Any amino acid
XECCIDGHKYKGVTQEVDGLSQTDGTLTYFDKVDKNREELFLRALCLCHTVEIKTNDAVDGATESAELTYISSSPDEIALVKGAKRYELLHTLNFDAVRRRMSVIVKTQEGDILLFCKGADSAVFPRVQNHEIELTKVHVERNAMDGYRTLCVAFKEIAPDDYERINRQLIEAKMALQDREEKMEKVFDDIETNMNLIGATA

SEQ ID NO: 72356 - protein, 86 aa, Homo sapiens
MWHEARKHERKLRGMMVDYKKRAERRREYYEKIKKDPAQFLQVHGRACKVHLDSAVALAAESPVNMMPWQGDTNNMIDRFDVRAHL

SEQ ID NO: 72357 - protein, 52 aa, Homo sapiens
MKGQLRRKAERETFAVSETSCTAVTGNGRWITSMAAQAAEVAGRTKEAGKCS

SEQ ID NO: 72358 - protein, 392 aa, Homo sapiens
MARAMAAAWPLLLVALLVLSWPPPGTGDVVVQAPTQVPGFLGDSVTLPCYLQVPNMEVTHVSQLTWARHGESGSMAVFHQTQGPSYSESKRLEFVAARLGAELRNASLRMFGLRVEDEGNYTCLFVTFPQGSRSVDIWLRVLAKPQNTAEVQKVQLTGEPVPMARCVSTGGRPPAQITWHSDLGGMPNTSQVPGFLSGTVTVTSLWILVPSSQVDGKNVTCKVEHESFEKPQLLTVNLTVYYPPEVSISGYDNNWYLGQNEATLTCDARSNPEPTGYNWSTTMGPLPPFAVAQGAQLLIRPVDKPINTTLICNVTNALGARQAELTVQVKEGPPSEHSGMSRNAIIFLVLGILVFLILLGIGIYFYWSKCSREVLWHCHLCPSSEHHQSCRN

SEQ ID NO: 72359 - protein, 73 aa, Homo sapiens
MERLQKAKMDNQVLGYKDLAAIPKDKAILDIERPDLMIYEPHFTYSLLEHVELPRSRERSLSPKSTSPPPSPE

SEQ ID NO: 72360 - protein, 58 aa, Homo sapiens
MSSFSRAPQQWATFARIWYLLDGKMQPPGKLAAMASIRLQGLHKPVYHALTTQVDLDK

SEQ ID NO: 72361 - protein, 38 aa, Homo sapiens
MGCRCCKIIQRQSLAVVTPAEVQWHDLGSRQPLPPGFN

SEQ ID NO: 72362 - protein, 178 aa, Homo sapiens
MKKQFNRMRQLANQTVGRAEKTEVLSEDLLQVEKRLELVKQVSHSTHKKLTACLQGQQGAEADKRSKKLPLTTLAQCLMEGSAILGDDTLLGKMLKLCGETEDKLAQELIHFELQVERDVIEPLFLLAEVEIPNIQKQRKHLAKLVLDMDSSRTRTSSQLICTVLWPKKLTMQTTFKR

SEQ ID NO: 72363 - protein, 218 aa, Homo sapiens
MNGRADFREPNAEVPRPIPPVPLAATSMLITQGLISKGILSSHPKYGSIPKLILACIMGYFAGKLSYVKTCQEKFKKLENSPLGEALRSGQARRSSPPGHYYQKSKYDSSVSGQSSFVTSPAADNIEMLPHYEPIPFSSSMNESAPTGITDHIVQGPDPNLEESPKRKNITYEELRNKNRESYEVSLTQKTDPSVRPMHERVPKKEVKVNKYGDTWDE

SEQ ID NO: 72364 - protein, 1504 aa, Homo sapiens [sequence omitted]

SEQ ID NO: 72365 - protein, 228 aa, Homo sapiens
MCPKSLSEKNSNNEVACKKTKIKKTCRRIIPPKMKNTSSKAESTLQNSSSAVHTESNKLQPKRTADAMNLSVDVESSQDGDSDEDTTPSLDFSGLSPYERKRLKNISENADFFASLQLSESAARLREMIEKRQPPKSKRKKPKRENGIGCRRSMRLLKVDPSGVSLPAAPTPPTLVADETPLLPPGPLEMTSENQEDNNERFKGFLHTWAGMSKPSSKNTEKGLSSIK

SEQ ID NO: 72366 - protein, 1073 aa, Homo sapiens
MALSDEPAAGGPEEEAEDETLAFGAALEAFGESAETRALLGRLREVHGGGAEREVALERFRVIMDKYQEQPHLLDPHLEWMMNLLLDIVQDQTSPASLVHLAFKFLYIITKVRGYKTFLRLFPHEVADVEPVLDLVTIQNPKDHEAWETRYMLLLWLSVTCLIPFDFSRLDGNLLTQPGQARMSIMDRILQIAESYLIVSDKARDAAAVLVSRFITRPDVKQSKMAEFLDWSLCNLARSSFQTMQGVITMDGTLQALAQIFKHGKREDCLPYAATVLRCLDGCRLPESNQTLLRKLGVKLVQRLGLTFLKPKVAAWRYQRGCRSLAANLQLLTQGQSEQKPLILTEDDDEDDDVPEGVERVIEQLLVGLKDKDTVVRWSAAKGIGRMAGRLPRALADDVVGSVLDCFSFQETDKAWHGGCLALAELGRRGLLLPSRLVDVVAVILKALTYDEKRGACSVGTNVRDAACYVCWAFARAYEPQELKPFVTAISSALVIAAVFDRDINCRRAASAAFQENVGRQGTFPHGIDILTTADYFAVGNRSNCFLVIRGLGGQLMRQAVCVLIEKLSLSKMPFRGDTVIDGWQWLINDTLRHLHLISSHSRQQMKDAAVSALAALCSEYYMKEPGEADPAIQEELITQYLAELRNPEEMTRCGFSLALGALPGFLLKGRLQQVLTGLRAVTHTSPEDVSFAESRRDGLKAIARICQTVGVKAGAPDEAVCGENVSQIYCALLGCMDDYTTDSRGDVGTWVRKAAMTSLMDLTLLLARSQPELIEAHTCERIMCCVAQQASEKIDRFRAHAASVFLTLLHFDSPPIPHVPHRGELEKLFPRSDVASVNWSAPSQAFPRITQLLGLPTYRYHVLLGLVVSLGGLTESTIRHSTQSLFEYMKGIQSDPQALGSFSGTLLQIFEDNLLNERVSVPLLKTLDHVLTHGCFDIFTTEEDHPFAVKLLALCKKEIKNSKDIQKLLSGIAVFCEMVQFPGDVRRQALLQLCLLLCHRFPLIRKTTASQVYETLLTYSDVVGADVLDEVVTVLSDTAWDAELAVVREQRNRLCDLLGVPRPQLVPQPGAC

SEQ ID NO: 72367 - protein, 144 aa, Homo sapiens
MSTAGSKRSSSSRNRGPHGRSNGASSHKPGSSPSSPREKDLLSMLCRNQLSPVNIHPSYAPSSPSSSNSGSYKGSDCSPIMRRSGRYMSCGENHGVRPPNPEQYLTPLQQKEVTVRHLKTKLKESERRLHERESEIVELKSQLA

SEQ ID NO: 72368 - protein, 111 aa, Homo sapiens
MKQLKRKRKSNFSVQETQTLLKEITKRKEVIFSKQLNTTINVMKRMAWEEIAQCVNAVGEGEQRTGTEVKRRYLDWRALMKRKRMKANIKLVGSGFPLPSSDLDDSLTEEI

SEQ ID NO: 72369 - protein, 94 aa, Homo sapiens
MASLQRSRVLRCCSCRLFQAHQVKKSVKWTCKACGEKQSFLQSSPDTELLLPSFLFLQEVKWMEQNLERLFSQILCSKSIESHSKPTGRAESQL

SEQ ID NO: 72370 - protein, 50 aa, Homo sapiens
VQPKPDYGGTWLCGDRVDLARHQPYTLLHLAQLPHGCGACLQGTLESRPL

SEQ ID NO: 72371 - protein, 229 aa, Homo sapiens
MEPVETWTPGKVATWLRGLDDSLQDYPFEDWQLPGKNLLQLCPQSLEALAVRSLGHQELILGGVEQLQALSSRLQTENLQSLTEGLLGATHDFQSIVQGCLGDCAKTPIDVLCAAVELLHEADALLFWLSRYLFSHLNDFSACQEIRDLLEELSQVLHEDGPAAEKEGTVLRIPRGWDLPQHPGLLPQGAAGTEGRARAGAAGQSIGPRNSHHQQLPALCVPSGHPGSH

SEQ ID NO: 72372 - protein, 252 aa, Homo sapiens
MELGPEPPHRRRLLFACSPPPASQPVVKALFGASAAGGLSPVTNLTVTMDQLQGLGSDYEQPLEVKNNSNLQRMGSSESTDSGFCLDSPGPLDSKENLENPMRRIHSLPKLLGCSPALKRSHSDSLDHDIFQLIDPDENKENEAFEFKKPVRPVSRGCLHSHGLQEGKDLFTQRQNSAPARMLSSNERDSSEPGNFIPLFTPQSPVTATLSDEDDGFVDLLDGENLKNEEETPSCMASLWTAPLVMRTTNLV

SEQ ID NO: 72373 - protein, 220 aa, Homo sapiens
MGATTMDQKSLWAGVVVLLLLQGGSAYKLVCYFTNWSQDRQEPGKFTPENIDPFLCSHLIYSFASIENNKVIIKDKSEVMLYQTINSLKTKNPKLKILLSIGGYLFGSKGFHPMVDSSTSRLEFINSIILFLRNHNFDGLDVSWIYPDQKENTHFTVLIHELAEAFQKDFTKSTKERLLLTAGVSAGRQMIDNSYQVEKLAKDLDFINLLSFDFHGSWEK

SEQ ID NO: 72374 - protein, 76 aa, Homo sapiens
MPLTSAFRAVDNDPGIIVWRIEETPWKDRWDLLSRLLAASIREMEHVFHGAPWLLQNMGRENGAGAGACERPRQLL

SEQ ID NO: 72375 - protein, 92 aa, Homo sapiens
MDPGSRWRNLPSGPSLKHLTDPSYGIPREQQKAALQELTRAHVESFNYAVHEGLGLAVQSTYSSKRDHLQRGQCLSSRMPGPKEYLPWEVDS

SEQ ID NO: 72376 - protein, 400 aa, Homo sapiens [sequence omitted]

SEQ ID NO: 72377 - protein, 55 aa, Homo sapiens
MELLSFEDVAMYFTREEWGHLNWGQKDLYRDVMLENYRNMVLLVYFQFDAAIPLC

SEQ ID NO: 72378 - protein, 112 aa, Homo sapiens
MSLLDGLASSPRAPLQSSKARMKKLPKKSQNEKYRLKYLRLRKAAKATVFIITDRPGFHDESAIYPVGYCSTRIYASMKCPDQKCLYTCQIKDGGVQPQFEIVPEDDPQNAI

SEQ ID NO: 72379 - protein, 56 aa, Homo sapiens
MKFPGPLENQRLSFLLEKAITREAQMWKVNVRKMPSNQNSSTKGIGKRQFLWMFLI

SEQ ID NO: 72380 - protein, 58 aa, Homo sapiens
  MOD_RES (1)..(1): Any amino acid
XCCRRPPLGLYARMRRLPGPEVSGRSVAAASGPGAWGTDHYCLELLRLKTQSLRKQLD

SEQ ID NO: 72381 - protein, 129 aa, Homo sapiens
MTKGRRFNPPSDKDGRWFPHIGLTQKTPESITSATSKEPQSPHLPRQAEGKLPPIYKVREKQAVNNQFPFSVHDNRHSLENSGCYLDSERMTATDPQGEPDKRQEFYEPVRTQSIPHPGLRTNAPLLAV

SEQ ID NO: 72382 - protein, 128 aa, Homo sapiens
MPHLMERMVGSGLLWLALVSCILTQASAVQRGYGNPIEASSYGLDLDCGAPGTPEAHVCFDPCQNYTLLDEPFRSTENSAGSQGCDKNMSGWYRFVGEGGVRMSETCVQVHRCQTDAPMWLNGTHPAL

SEQ ID NO: 72383 - protein, 83 aa, Homo sapiens
MSSVQSQQEQLSQSDPSPSPNSCSSFELIDMDAGSLYEPVSPHWFYCKIIDSKETWIPFNSEDSQQLEEAYSSGNLHACCNFG

SEQ ID NO: 72384 - protein, 159 aa, Homo sapiens
MESAITLWQFLLQLLLDQKHEHLICWTSNDGEFKLLKAEEVAKLWGLRKNKTNMNYDKLSRALRYYYDKNIIKKVIGQKFVYKFVSFPEILKMDPHAVEISRESLLLQDSDCKASPEGREAHKHGLAALRSTSRNEYIHSGLYSSFTINSLQNPPDAFK

SEQ ID NO: 72385 - protein, 33 aa, Homo sapiens
QKNRCDNNDTTIIRGRCRTCSSELTCPFGTKSL

SEQ ID NO: 72386 - protein, 22 aa, Homo sapiens
  MOD_RES (1)..(1): Any amino acid
XLLLRFTDDTFDPELAATIGKS

SEQ ID NO: 72387 - protein, 277 aa, Homo sapiens
MGQGMGMVGDLRSPRPTSPLPLPQLTLLVVQVSILYYGGHLVISGQMTSGNLIAFIIYEFVLGDCMENVSFSLSPGKVTALVGPSGSGKSSCVNILENFYPLEGGRVLLDGKPISAYDHKYLHRVISLVSQEPVLFARSITDNISYGLPTVPFEMVVEAAQKANAHGFIMELQDGYSTETGEKGAQLSGGQKQRVAMARALVRNPPVLILDEATSALDAESEYLIQQAIHGNLQKHTVLIIAHRLSTVEHAHLIVVLDKGRVVQQGTHQQLLAQGGL

SEQ ID NO: 72388 - protein, 62 aa, Homo sapiens
AAAGAGAAVTSAAASAGPGEDSSDSEAEQEGPQKLIRKVSTSGQIRTKGFIMLARLVTSELK

SEQ ID NO: 72389 - protein, 169 aa, Homo sapiens
MDEDGLPLMGSGIDLTKVPAIQQKRTVAFLNQFVVHTVQFLNRFSTVCEEKLADLSLRIQQIETTLNILDAKLSSIPGLDDVTVEVSPLNVTSVTNGAHPEATSEQPQQNSTQDSGLQESEVSAENILTVAKDPRYARYLKMVQVGVPVMAIRNKMISEGLDPDLLEVK

SEQ ID NO: 72390 - protein, 503 aa, Homo sapiens
MLGICRGRRKFLAASLSLLCIPAITWIYLFSGSFEDGKPVSLSPLESQAHSPRYTASSQRERESLEVRMREVEEENRALRRQLSLAQGRAPSHRRGNHSKTYSMEEGTGDSENLRAGIVAGNSSECGQQPVVEKCETIHVAIVCAGYNASRDVVTLVKSVLFHRRNPLHFHLIADSIAEQILATLFQTWMVPAVRVDFYNADELKSEVSWIPNKHYSGIYGLMKLVLTKTLPANLERVIVLDTDITFATDIAELWAVFHKFKGQQVLGLVENQSDWYLGNLWKNHRPWPALGRGYNTGVILLLLDKLRKMKWEQMWRLTAERELMGMLSTSLADQDIFNAVIKQNPFLVYQLPCFWNVQLSDHTRSEQCYRDVSDLKVIHWNSPKKLRVKNKHVEFFRNLYLTFLEYDGNLLRRELFGCPSEADVNSENLQKQLSELDEDDLCYEFRRERFTVHRTHLYFLHYEYEPAADSTDVTLVAQLSMDRSMEMHGIDFLVIVRIKWAF

SEQ ID NO: 72391 - protein, 237 aa, Homo sapiens
MLPHVVLTFRRLGCALASCRLAPARHRGSGLLHTAPVARSDRSAPVFTRALAFGDRIALVDQHGRHTYRELYSRSLRLSQEICRLCGCVGGDLREERVSFLCANDASYVVAQWASWMSGGVAVPLYRKHPAAQLEYVICDSQSSVVLASQEYLELLSPVVRKLGVPLLPLTPAIYTGAVEEPAEVPVPEQGWRNKGAMIIYTSGTTGRPKGVLSTHQNIRAVVTGLVHKWAWTKDDV

SEQ ID NO: 72392 - protein, 159 aa, Homo sapiens
MEESPLSRAPSRGGVNFLNVARTYIPNTKVECHYTLPPGTMPSASDWIGIFKVEAACVRDYHTFVWSSVPESTTDGSPIHTSVQFQASYLPKPGAQLYQFRYVNRQGQVCGQSPPFQFREPRPMDELVTLEEADGGSDILLVVPKATVLQNQLDESQQE

SEQ ID NO: 72393 - protein, 159 aa, Homo sapiens
MPNGNKLEEQDPRPLQPIPGLMEGNKLEEQDSSPPQSTPGLMKGNKREEQGLGPEPAAPQQPTAEEEALIEFHRSYRELFEFFCNNTTIHGAIRLVCSQHNRMKTAFWAVLWLCTFGMMYWQFGLLFGEYFSYPVSLNINLNSDKLVFPAVTICTLNPY

SEQ ID NO: 72394 - protein, 32 aa, Homo sapiens
MGRSGKLPSGVSAKLKRWKKGHSSDSNPAICR

SEQ ID NO: 72395 - protein, 287 aa, Homo sapiens
RYSISRTEAADLCKAFNSTLPTMAQMEKALSIGFETCRYGFIEGHVVIPRIHPNSICAANNTGVYILTSNTSQYDTYCFNASAPPEEDCTSVTDLPNAFDGPITITIVNRDGTRYVQKGEYRTNPEDIYPSNPTDDDVSSGSSSERSSTSGGDQDTFHPSGGSHTTHGSESDGHSHGSQEGGANTTSGPIRTPQIPEWLIILASLLALALILAVCIAVNSRRRCGQKKKLVINSGNGAVEDRKPSGLNGEASKSQEMVHLVNKESSETPDQFMTADETRNLQNVDMK

SEQ ID NO: 72396 - protein, 1152 aa, Homo sapiens
MQYLNIKEDCNAMAFCAKMRSSKKTEVNLEAPEPGVEVIFYLSDREPLRLGSGEYTAEELCIRAAQACRISPLCHNLFALYDENTKLWYAPNRTITVDDKMSLRLHYRMRFYFTNWHGTNDNEQSVWRHSPKKQKNGYEKKKIPDATPLLDASSLEYLFAQGQYDLVKCLAPIRDPKTEQDGHDIENECLGMAVLAISHYAMMKKMQLPELPKDISYKRYIPETLNKSIRQRNLLTRMRINNVFKDFLKEFNNKTICDSSVSTHDLKVKYLATLETLTKHYGAEIFETSMLLISSENEMNWFHSNDGGNVLYYEVMVTGNLGIQWRHKPNVVSVEKEKNKLKRKKLENKHKKDEEKNKIREEWNNFSYFPEITHIVIKESVVSINKQDNKKMELKLSSHEEALSFVSLVDGYFRLTADAHHYLCTDVAPPLIVHNIQNGCHGPICTEYAINKLRQEGSEEGMYVLRWSCTDFDNILMTVTCFEKSEQVQGAQKQFKNFQIEVQKGRYSLHGSDRSFPSLGDLMSHLKKQILRTDNISFMLKRCCQPKPREISNLLVATKKAQEWQPVYPMSQLSFDRILKKDLVQGEHLGRGTRTHIYSGTLMDYKDDEGTSEEKKIKVILKVLDPSHRDISLAFFEAASMMRQVSHKHIVYLYGVCVRDVENIMVEEFVEGGPLDLFMHRKSDVLTTPWKFKVAKQLASALSYLEDKDLVHGNVCTKNLLLAREGIDSECGPFIKLSDPGIPITVLSRQECIERIPWIAPECVEDSKNLSVAADKWSFGTTLWEICYNGEIPLKDKTLIEKERFYESRCRPVTPSCKELADLMTRCMNYDPNQRPFFRAIMRDINKLEEQNIVSEKKPATEVDPTHFEKRFLKRIRDLGEGHFGKVELCRYDPEGDNTGEQVAVKSLKPESGGNHIADLKKEIEILRNLYHENIVKYKGICTEDGGNGIKLIMEFLPSGSLKEYLPKNKNKINLKQQLKYAVQICKGMDYLGSRQYVHRDLAARNVLVESEHQVKIGDFGLTKAIETDKEYYTVKDDRDSPVFWYAPECLMQSKFYIASDVWSFGVTLHELLTYCDSDSSPMALFLKMIGPTHGQMTVTRLVNTLKEGKRLPCPPNCPDEVYQLMRKCWEFQPSNRTSFQNLIEGFEALLK

SEQ ID NO: 72397 - protein, 355 aa, Homo sapiens
MAGPGGWRDREVTDLGHLPDPTGIFSLDKTIGLGTYGRIYLGLHEKTGAFTAVKVMNARKTPLPEIGRRVRVNKYQKSVGWRYSDEEEDLRTELNLLRKYSFHKNIVSFYGAFFKLSPPGQRHQLWMVMELCAAGSVTDVVRMTSNQSLKEDWIAYICREILQGLAHLHAHRVIHRDIKGQNVLLTHNAEVKLVDFGVSAQVSRTNGRRNSFIGTPYWMAPEVIDCDEDPRRSYDYRSDVWSVGITAIEMAEGAPPLCNLQPLEALFVILRESAPTVKSSGWSRKFHNFMEKCTIKNFLFRPTSANMLQHPFVRDIKNERHVVESLTRHLTGIIKKRQKKGFAVSQDHATALQPG

SEQ ID NO: 72398 - protein, 123 aa, Homo sapiens
MKHIINSYENINNTARNNSDCPRVVLPEEIFFTISIVGVLENLIVLLAVFKNKNLQAPMYFFICSLAISDMLGSLYKILENILIILRNMGYLKPRGSFETTADDIIDSLFVLSLLGSIFSLSV

SEQ ID NO: 72399 - protein, 85 aa, Homo sapiens
MPTSSVKDETNDNITIFTRILDGLLDGYDNRLRPGLGERITQVRTDIYVTSFGPVSDTEMEYTIDVFFRQSWKDERLRFKGPMQR

SEQ ID NO: 72400 - protein, 545 aa, Homo sapiens
MEELQDDYEDMMEENLEQEEYEDPDIPESQMEEPAAHDTEATATDYHTTSHPGTHKVYVELQELVMDEKNQELRWMEAARWVQLEENLGENGAWGRPHLSHLTFWSLLELRRVFTKGTVLLDLQETSLAGVANQLLDRFIFEDQIRPQDREELLRALLLKHSHAGELEALGGVKPAVLTRSGDPSQPLLPQHSSLETQLFCEQGDGGTEGHSPSGILEKIPPDSEATLVLVGRADFLEQPVLGFVRLQEAAELEAVELPDTYTQKLSVPDGFKVSNSSARGWVIHPLGLRSEFPIWMMFASALPALLVFILIFLESQITTLIVSKPERKMVKGSGFHLDLLLVVGMGGVAALFGMPWLSATTVRSVTHANALTVMGKASTPGAAAQIQEVKEQRISGLLVAVLVGLSILMEPILSRIPLAVLFGIFLYMGVTSLSGIQLFDRILLLFKPPKYHPDVPYVKRVKTWRMHLFTGIQIICLAVLWVVKSTPASLALPFVLILTVPLRRVLLPLIFRNVELQCLDADDAKATFDEEEGRDEYDEVAMPV

SEQ ID NO: 72401 - protein, 48 aa, Homo sapiens
RFYELAPNLVPMDYRKSPIVHVPMSLIIQMPELRGSCPNANSGSVHVE

SEQ ID NO: 72402 - protein, 271 aa, Homo sapiens
MELIIGKKFKLPVWETIVCTMREGEIAQFLCDIKHVVLYPLVAKSLRNIAVGKDPLEGQRHCCGVAQMREHSSLGHADLDALQQNPQPLIFHMEMLKVESPGTYQQDPWAMTDEEKAKAVPLIHQEGNRLYREGHVKEAAAKYYDAIACLKNLQMKEQPGSPEWIQLDQQITPLLLNYCQCKLVVEEYYEVLDHCSSILNKYDDNVKAYFKRGKAHAAVWNAQEAQADFAKVLELDPALAPVVSRELRALEARIRQKDEEDKARFRGIFSH

SEQ ID NO: 72403 - protein, 1227 aa, Homo sapiens
MYQPEDDNNSDVTSDDDMTRNRRESSPPHSVHSFSGDRDWDRRGRSRDMEPRDRWSHTRNPRSRMPPRDLSLPVVAKTSFEMDREDDRDSRAYESRSQDAESYQNVVDLAEDRKPHNTIQDNMENYRKLLSLGVQLAEDDGHSHMTQGHSSRSKRSAYPSTSRGLKTMPEAKKSTHRRGICEDESSHGVIMEKFIKDVSRSSKSGRARESSDRSQRFPRMSDDNWKDISLNKRESVIQQRVYEGNAFRGGFRFNSTLVSRKRVLERKRRYHFDTDGKGSIHDQKGCPRKKPFECGSEMRKAMSVSSLSSLSSPSFTESQPIDFGAMPYVCDECGRSFSVISEFVEHQIMHTRENLYEYGESFIHSVAVSEVQKSQVGGKRFECKDCGETFNKSAALAEHRKIHARGYLVECKNQECEEAFMPSPTFSELQKIYGKDKFYECRVCKETFLHSSALIEHQKIHFGDDKDNEREHERERERERGETFRPSPALNEFQKMYGKEKMYECKVCGETFLHSSSLKEHQKIHTRGNPFENKGKVCEETFIPGQSLKRRQKTYNKEKLCDFTDGRDAFMQSSELSEHQKIHSRKNLFEGRGYEKSVIHSGPFTESQKSHTITRPLESDEDEKAFTISSNPYENQKIPTKENVYEAKSYERSVIHSLASVEAQKSHSVAGPSKPKVMAESTIQSFDAINHQRVRAGGNTSEGREYSRSVIHSLVASKPPRSHNGNELVESNEKGESSIYISDLNDKRQKIPARENPCEGGSKNRNYEDSVIQSVFRAKPQKSVPGEGSGEFKKDGEFSVPSSNVREYQKARAKKKYIEHRSNETSVIHSLPFGEQTFRPRGMLYECQECGECFAHSSDLTEHQKIHDREKPSGSRNYEWSVIRSLAPTDPQTSYAQEQYAKEQARNKCKDFRQFFATSEDLNTNQKIYDQEKSHGEESQGENTDGEETHSEETHGQETIEDPVIQGSDMEDPQKDDPDDKIYECEDCGLGFVDLTDLTDHQKVHSRKCLVDSREYTHSVIHTHSISEYQRDYTGEQLYECPKCGESFIHSSFLFEHQRIHEQDQLYSMKGCDDGFIALLPMKPRRNRAAERNPALAGSAIRCLLCGQGFIHSSALNEHMRLHREDDLLEQSQMAEEAIIPGLALTEFQRSQTEERLFECAVCGESFVNPAELADHVTVHKNEPYEYGSSYTHTSFLTEPLKGAIPFYECKDCGKSFIHSTVLTKHK

SEQ ID NO: 72404 - protein, 76 aa, Homo sapiens
  MOD_RES (1)..(1): Any amino acid
XDLREKLTIIPQDPILFSGSLRMNLDPFNNYSDEEIWKALELAHLKSFVASLQLGLSHEVTEAGGNLRGKLEVHLG

SEQ ID NO: 72405 - protein, 130 aa, Homo sapiens
MAMALPMPGPQEAVVFEDVAVYFTRIEWSCLAPDQQALYRDVMLENYGNLASLALISLLEQGEEPGALILQVAEQSVAKASLCTDSRMEAGIMESPLQRKLSRQAGLPGTVWGCLPWGHPVGGHPAPPHP

SEQ ID NO: 72406 - protein, 89 aa, Homo sapiens
MELAQEARELGCWAVEEMGVPVAARAPESTLRRLCLGQGADIWAYILQHVHSQRTVKKIRGNLLWYGHQDSPQVRSICYKILFHPKNDL

SEQ ID NO: 72407 - protein, 184 aa, Homo sapiens
MKLHYVAVLTLAILMFLTWLPESLSCNKALCASDVSKCLIQELCQCRPGEGNCSCCKECMLCLGALWDECCDCVGMCNPRNYSDTPPTSKSTVEELHEPIPSLFRALTEGDTQLNWNIVSFPVAEELSHHENLVSFLETVNQPHHQNVSVPSNNVHAPYSSDKGNCQQLTFSIPPPHVVCPCNL

SEQ ID NO: 72408 - protein, 237 aa, Homo sapiens
  MOD_RES (1)..(1): Any amino acid
XTVDKLLSESNERLQLHLKERMAALEDKNSLLREVESAKKQLEETQHDKDQLVLNIEALRAELDHMRLRGASLHHGRPHLGSVPDFRFPMADGHTDSYSTSAVLRRPQKGRLAALRDEPSKVRDDKTTIKCETSPPSSPRALRLDRLHKGALHTVSHEDIRDIRNSTGSQDGPVSNPSSSNSSQDSLHKAPKKKGIKSSIGRLFGKKEKGRPGQTGKEALGQAGVSETDNSSQDALG

SEQ ID NO: 72409 - protein, 836 aa, Homo sapiens
MASYPSGSGKPKAKYPFKKRASLQASTAAPEARGGLGAPPLQSARSLPGPAPCLKHFPLDLRTSMDGKCKEIAEELFTRSLAESELRSAPYEFPEESPIEQLEERRQRLERQISQDVKLEPDILLRAKQDFLKTDSDSDLQLYKEQGEGQGDRSLRERDVLEREFQRVTISGEEKCGVPFTDLLDAAKSVVRALFIREKYMALSLQSFCPTTRRYLQQLAEKPLETRTYEQGPDTPVSADAPVHPPALEQHPYEHCEPSTMPGDLGLGLRMVRGVVHVYTRREPDEHCSEVELPYPDLQEFVADVNVLMALIINGPIKSFCYRRLQYLSSKFQMHVLLNEMKELAAQKKVPHRDFYNIRKVDTHIHASSCMNQKHLLRFIKRAMKRHLEEIVHVEQGREQTLREVFESMNLTAYDLSVDTLDVHADRNTFHRFDKFNAKYNPIGESVLREIFIKTDNRVSGKYFAHIIKEVMSDLEESKYQNAELRLSIYGRSRDEWDKLARWAVMHRVHSPNVRWLVQVPRLFDVYRTKGQLANFQEMLENIFLPLFEATVHPASHPELHLFLEHVDGFDSVDDESKPENHVFNLESPLPEAWVEEDNPPYAYYLYYTFANMAMLNHLRRQRGFHTFVLRPHCGEAGPIHHLVSAFMLAENISHGLLLRKAPVLQYLYYLAQIGIAMSPLSNNSLFLSYHRNPLPEYLSRGLMVSLSTDDPLQFHFTKVRAQQAARRAGEPLMEEYSIATQVWKLSSCDMCELARNSVLMSGFSHKVKSHWLGPNYTKEGPEGNDIRRTNVPDIRVGYRYETLCQELALITQAVQSEMLETIPEEAGITMSPGPQ

SEQ ID NO: 72410 - protein, 162 aa, Homo sapiens
MTSKKLVNSVAGCADDALAGLVACNPNLQLLQGHRVALRSDLDSLKGRVALLSGGGSGHEPAHAGFIGKGMLTGVIAGAVFTSPAVGSILAAIRAVAQAGTVGTLLIVKNYTGDRLNFGLAREQARAEGIPVEMVVIGDDSAFTVLKKAGRRGLCGTVLIHK

SEQ ID NO: 72411 - protein, 804 aa, Homo sapiens
MASGADSKGDDLSTAILKQKNRPNRLIVDEAINEDNSVVSLSQMDELQLFRGDTVLLKGKKRREAVCIVLSDDTCSDEKIRMNRVVRNNLRVRLGDVISIQPCPDVKYGKRIHVLPIDDTVEGITGNLFEVYLKPYFLEAYRPIRKGDIFLVRGGMRAVEFKVVETDPSPYCIVAPDTVIHCEGEPIKREDEEESLNEVGYDDIGGCRKQLAQIKEMVELPLRHPALFKAIGVKPPRGILLYGPPGTGKTLIARAVANETGAFFFLINGPEIMSKLAGESESNLRKAFEEAEKNAPAIIFIDELDAIAPKREKTHGEVERRIVSQLLTLMDGLKQRAHVIVMAATNRPNSIDPALRRFGRFDREVDIGIPDATGRLEILQIHTKNMKLADDVDLEQVANETHGHVGADLAALCSEAALQAIRKKMDLIDLEDETIDAEVMNSLAVTMDDFRWALSQSNPSALRETVVEVPQVTWEDIGGLEDVKRELQELVQYPVEHPDKFLKFGMTPSKGVLFYGPPGCGKTLLAKAIANECQANFISIKGPELLTMWFGESEANVREIFDKARQAAPCVLFFDELDSIAKARGGNIGDGGGAADRVINQILTEMDGMSTKKNVFIIGATNRPDIIDPAILRPGRLDQLIYIPLPDEKSRVAILKANLRKSPVAKDVDLEFLAKMTNGFSGADLTEICQRACKLAIRESIESEIRRERERQTNPSAMEVEEDDPVPEIRRDHFEEAMRFARRSVSDNDIRKYEMFAQTLQQSRGFGSFRFPSGNQGGAGPSQGSGGGTGGSVYTEDNDDDLYG

SEQ ID NO: 72412 - protein, 184 aa, Homo sapiens
MGLQLRALLGAFGRWTLRLGPRPSCSPRMAGNAEPPPAGAACPQDRRSCSGRAGGDRVWEDGEHPAKKLKSGGDEERREKPPKRKIVLLMAYSGKGYHGMQRNVGSSQFKTIEDDLVSALVRSGCIPENHGEDMRKMSFQRCARTDKSQDLILLPRLECSGMIMAHCSLKLLGSSNPPASASRV

SEQ ID NO: 72413 - protein, 254 aa, Homo sapiens
MRRISLTSSPVRLLLFLLLLLIALEIMVGGHSLCFNFTIKSLSRPGQPWCEAQVFLNKNLFLQYNSDNNMVKPLGLLGKKVYATSTWGELTQTLGEVGRDLRMLLCDIKPQIKTSDPSTLQVEMFCQREAERCTGASWQFATNGEKSLLFDAMNMTWTVINHEASKIKETWKKDRGLEKYFRKLSKGDCDHWLREFLGHWEAMPEPTVSPVNASDIHWSSSSLPDRWIILGAFILLVLMGIVLICVWWQNGEVR

SEQ ID NO: 72414 - protein, 117 aa, Homo sapiens
MSFLLPKLTSKKEVDQAIKSTAEKVLVLRFGRDEDPVCLQLDDILSKTSSDLSKMAAIYLVDVDQTAVYTQYFDISYIPSTVFFFNGQHMKVDYGGEDPALRSIKAVRRTSPAGTLG

SEQ ID NO: 72415 - protein, 464 aa, Homo sapiens
MTPTLAALLCLGLSLGPRTHVQAGPFPKPTLWAEPGSVISWGSPVTIWCQGSLEAQEYRLDKEGSPEPWDRNNPLEPKNKARFSIPSITEHHAGRYRCHYYSSAGWSEPSDPLELVMTGAYSKPTLSALPSPVVASGGNMTLQCGSQKGYHHFVLMKEGEHQLPRTLDSQQLHSGGFQALFPVGPVNPSHRWRFTCYYYYMNTPRVWSHPSDPLEILPSGVSRKPSLLTLQGPVLAPGQSLTLQCGSDVGYDRFVLYKEGERDFLQRPGQQPQAGLSQANFTLGPVSPSHGGQYRCYGAHNLSSEWSAPSDPLNILMAGQIYDTVSLSAQPGPTVASGENVTLLCQSWWQFDTFLLTKEGAAHPPLRLRSMYGAHKYQAEFPMSPVTSAHAGTYRCYGSYSSNPHLLSFPSEPLELMVSASHAKDYTVENLIRMGMAGLVLVFLGILLFEAQHSQRNPQDAAGR

SEQ ID NO: 72416 - protein, 131 aa, Homo sapiens
MGLPVSWAPPALWVLGCCALLLSLWALCTACRRPEDAVAPRKRARRQRARLQGSATAAEAQVGHQTARAAPGPAQQQGPAACQHGSPAPTLAGGVQGHHRTAGSPLCLPTPGAAPGSAGSCSHRRVRWPRG

SEQ ID NO: 72417 - protein, 117 aa, Homo sapiens
MSTAVLENPGLGRKLSDFGQETSYIEDNCNQNGAISLIFSLKEEVGALAKVLRLFEENDVNLTHIESRPSRLKKDEYEFFTHLDKRSLPALTNIIKILRHDIGATVHELSRDKKKDT

SEQ ID NO: 72418 - protein, 108 aa, Homo sapiens
MVEKGSDHSSDKSPSTPEQGVQRSCSSQSGRSGGKNSKKSQSWYNVLSPTYKQRNEDFRKLFKQLPDTERLIVDYSCALQRDILLQGRLYLSENWICFYSNIFRWETL

SEQ ID NO: 72419 - protein, 90 aa, Homo sapiens
MEMKADINAKQEDMMFHKIYIQKHDNVSILFADIEGFTSLASQCTAQELVMTLNELFARFDKLAAENHCLRIKILGDCYYCVSGLPEARA

SEQ ID NO: 72420 - protein, 57 aa, Homo sapiens
  MOD_RES (1)..(1): Any amino acid
XETLEDIDKNGDGFVDQDEYIDKETSGSVTELSQKPGFIFWLLNSVLSTPPHGLHHE

SEQ ID NO: 72421 - protein, 1586 aa, Homo sapiens
QDRKRRTGELRQFAGASEPFICHSSSSEIIEKKKDATRTPSSADPLAPDSPRSSAPVEEVRRVVSKKVVAALPSQAPYDDPRVTLHELSQSVPQETAEGIPPGSQDSSPEHQEPRTLDTTYGEVSDNLLVTAQGEKTAHFESQSVTCDVQNSTSASGPKQDHVQCPEASTGFEEGRASPKQDTILPGALTRVALEAPTQQCVQCKESVGSGLTEVCRAGSKHSRPIPLPDQRPSANPGGIGEEAPCRHPREALDGPVFSRNPEGSRTLSPSRGKESRTLPCRQPCSSQPVATHAYSSHSSTLLCFRDGDLGKEPFKAAPHTIHPPCVVPSRAYEMDETGEISRGPDVHLTHGLEPKDVNREFRLTESSTCEPSTVAAVLSRAQGCRSPSAPDVRTGSFSHSATDGSVGLIGVPEKKVAEKQASTELEAASFPAGMYSEPLRQFRDSSVGDQNAQVCQTNPEPPATTQGPHTLDLSEGSAESKLVVEPQHECLENTTRCFLEKPQFSTELRDHNRLDSQAKFVARLKHTCSPQEDSPWQEEEQHRDQASGGGEGFAQGVNPLPDEDGLDGCQILDAGREEVAVAKPPVSKILSQGFKDPATVSLRQNETPQPAAQRSGHLYTGREQPAPNHRGSLPVTTIFSGPKHSRSSPTPQFSVVGSSRSLQELNLSVEPPSPTDEDTQGPNRLWNPHLRGYSSGKSVARTSLQAEDSNQKASSRLDDGTTDHRHLKPATPPYPMPSTLSHMPTPDFTTSWMSGTLEQAQQGKREKLGVQVRPENWCSQMDKGMLHFGSSDISPYALPWRPEEPARISWKQYMSGSAVDVSCSQKPQGLTLSNVARCSSMDNGLEDQNSPFHSHLSTYANICDLSTTHSSTENAQGSNEAWEVFRGSSSIALGDPHIPTSPEGVAPTSGHDRRPQFRGPSGEADCLRSKPPLAKGSAAGPVDEIMLLYPSEAGCPVGQTRTNTFEQGTQTLGSRRHWSSTDISFAQPEASAVSAFDLASWTSMHNLSLHLSQLLHSTSELLGSLSQPDVARREQNTKRDIPDKAPQALMMDGSTQTTVDEGSQTDLTLPTLCLQTSEAEPQGANVILEGLGSDTSTVSQEEGDVPGVPQKREAEETAQKMAQLLYLQEESTPYKPQSPSIPSSHLRFQKAPVGQHLPSVSPSVSDAFLPPSSQPEESYCLVVSSPSPSSPHSPGLFPSTSEYPGDSRVQKKLGPTSALFVDRASSPILTLSASTQEPGLSPGSLTLSAPSTHPVEGHQKLDSSPDPVDAPRTPMDNYSQTTDELGGSQRGRSSLQRSNGRSFLELHSPHSPQQSPKLQFSFLGQHPQQLQPRTTIGVQSRLLPPPLRHRSQRLGNSFVPEKVASPEHCPLSGREPSQWQSRTENGGESSASPGEPQRTLDRPSSWGGLQHLSPCPVSELTDTAGLRGSALGLPQACQPEELLCFSCQMCMAPEHQHHSLRDLPVHNKFSNWCGVQKGSPGGLDMTEEELGASGDLSSEKQEQSPPQPPNDHSQDSEWSKREQIPLQVGAQNLSLSVELTEAKLHHGFGEADALLQVLQSGTGEALAADEPVTSTWKELYARGQR

SEQ ID NO: 72422 - protein, 185 aa, Homo sapiens
  MOD_RES (1)..(1): Any amino acid
XAGGAFRGLRADGGGEPGRDPLPAVLQFGFVTIFVAACPLAPLFALLNNWVEIRLDARKFVCEYRRPVAERAQDIGIWFHILAGLTHLAVISNAFLLAFSSDFLPRAYYRWTRAHDLRGFLNFTLARAPSSFAAAHNRTCRYRAFRDDDGHYSQTYWNLLAIRLAFVIVFEHVVFSVGRLLDLLV

SEQ ID NO: 72423 - protein, 89 aa, Homo sapiens
MSQLSLSWLGLWPVAASPWLLLLLVGASWLLAHVLAWTYAFYDNCRRLRCFPQPPRRNWFWGHQGMLPLHQRTSSSTASWSPGWGMGSC

SEQ ID NO: 72424 - protein, 108 aa, Homo sapiens
MLPRLVLNSWVQVILLRWPPKVLGLQMTDMGPAKDKLVIGRIFHIVENDLYIDFGGKFHCVCRRPEVDGEKYQKGTRVRLRLLDLELTSRFLGATTDTTVLEANAVLL

SEQ ID NO: 72425 - protein, 290 aa, Homo sapiens
MLKAVILIGGPQKGTRFRPLSFEVPKPLFPVAGVPMIQHHIEACAQVPGMQEILLIGFYQPDEPLTQFLEAAQQEFNLPVRYLQEFAPLGTGGGLYHFRDQILAGSPEAFFVLNADVCSDFPLSAMLEAHRRQRHPFLLLGTTANRTQSLNYGCIVENPQTHEVLHYVEKPSTFISDIINCGIYLFSPEALKPLRDVFQRNQQDGQLEDSPGLWPGAGTIRLEQDVFSALAGQGQIYVHLTDGIWSQIKSAGSALYASRLYLSRYQDTHPERLAKHTPGGPWIRGPLFCF

SEQ ID NO: 72426 - protein, 372 aa, Homo sapiens
MALGPRCGAIRACRRVLERAFSLRKAHSIKDMENTLQLVRNIIPPLSSTKHKGQDGRIGVVGGCQEYTGAPYFAAISALKVGADLSHVFCASAAAPVIKAYSPELIVHPVLDSPNAVHEVEKWLPRLHALVVGPGLGRDDALLRNVQGILEVSKARDIPVVIDADGLWLVAQQPALIHGYRKAVLTPNHVEFSRLYDAVLRGPMDSDDSHGSVLRLSQALGNVTVVQKGERDILSNGQQVLVCSQEGSSRRCGGQGDLLSGSLGVLVHWALLAGPQKTNGGISDLKLTIWGPEIETGVKTRAQGSCGPRTTTPTSPHLLLSPSPQVQPSPGGRVWRLLSHQAVQPPSLPEARSLHHHLRHDRRGGGRLQQAL

SEQ ID NO: 72427 - protein, 128 aa, Homo sapiens
MGFSVKEDLSWPGLAVGNLFHRPRATVMVMVKGVNKLALPPGSVISYPLENAVPFSLDSVANSIHSLFSEETPVVLQLAPSEERVYMVGKANSVFEDLSVTLRQLRNRLFQENSVLSSLPLNSLSRNN

SEQ ID NO: 72428 - protein, 118 aa, Homo sapiens
DAGAVCDGMPLGYVPPTAPTDSNNSTPREAASRPPSTMTSQAPGTAGVSPPPASPTVLWEPGPEAGPPGLDSISDPFSWSWIPGLGRDRDAWLPGELATKPSASVTASVLEKTTTKAP

SEQ ID NO: 72429 - protein, 36 aa, Homo sapiens
MDTGVIEGGLNVTLTIRLLMHGKEVGSIIGKKGESV

SEQ ID NO: 72430 - protein, 423 aa, Homo sapiens
MSWTDHYLQWNVSEYPGVKTVRFPDGQIWKPDILLYNSADERFDATFHTNVLVNSSGHCQYLPPGIFKSSCYIDVRWFPFDVQHCKLKFGSWSYGGWSLDLQMQEADISGYIPNGEWDLVGIPGKRSERFYECCKEPYPDVTFTVTMRRRTLYYGLNLLIPCVLISALALLVFLLPADSGEKISLGITVLLSLTVFMLLVAEIMPATSDSVPLIAQYFASTMIIVGLSVVVTVIVLQYHHHDPDGGKMPKWTRVILLNWCAWFLRMKRPGEDKVRPACQHKQRRCSLASVEMSAVAPPPASNGNLLYIGFRGLDGVHCVPTPDSGVVCGRMACSPTHDEHLLHGGQPPEGDPDLAKILEEVRYIANRFRCQDESEAVCSEWKFAACVVDRLCLMAFSVFTIICTIGILMSAPNFVEAVSKDFA

SEQ ID NO: 72431 - protein, 333 aa, Homo sapiens [sequence omitted]

SEQ ID NO: 72432 - protein, 26 aa, Homo sapiens
RQYLAQWLEKQDWSLSSFRRPLCPLW

SEQ ID NO: 72433 - protein, 1621 aa, Homo sapiens
MNSQPQTRSPFFQRPQIQPPRATIPNSSPSIRPGAQTPTAVYQANQHIMMVNHLPMPYPVPQGPQYCIPQYRHSGPPYVGPPQQYPVQPPGPGPFYPGPGPGDFPNAYGTPFYPSQPVYQSAPIIVPTQQQPPPAKREKKTIRIRDPNQGGKDITEEIMSGGGSRNPTPPIGRPTSTPTPPQLPSQVPEHSPVVYGTVESAHLAASTPVTAASDQKQEEKPKPDPVLKSPSPVLRLVLSGEKKEQEGQTSETTAIVSIAELPLPPSPTTVSSVARSTIAAPTSSALSSQPIFTTAIDDRCELSSPREDTIPIPSLTSCTETSDPLPTNENDDDICKKPCSVAPNDIPLVSSTNLINEINGVSEKLSATESIVEIVKQEVLPLTLELEILENPPEEMKLECIPAPITPSTVPSFPPTPPTPPASPPHTPVIVPAAATTVSSPSAAITVQRVLEEDESIRTCLSEDAKEIQNKIEVEADGQTEEILDSQNLNSRRSPVPAQIAITVPKTWKKPKDRTRTTEEMLEAELELKAEEELSIDKVLESEQDKMSQGFHPERDPSDLKKVKAVEENGEEAEPVRNGAESVSEGEGIDANSGSTDSSGDGVTFPFKPESWKPTDTEGKKQYDREFLLDFQFMPACIQKPEGLPPISDVVLDKINQPKLPMRTLDPRILPRGPDFTPAFADFGRQTPGGRGVPICKVQSRHGLPILEQSKAPTCPPLVMSHPPMKSLPLGLLNVGSRRSQPGQRREPRKIITVSVKEDVHLKKAENAWKPSQKRDSQADDPENIKTQELFRKVRSILNKLTPQMFNQLMKQVSGLTVDTEERLKGVIDLVFEKAIDEPSFSVAYANMCRCLVTLKVPMADKPGNTVNFRKLLLNRCQKEFEKDKADDDVFEKKQKELEAASAPEERTRLHDELEEAKDKARRRSIGNIKFIGELFKLKMLTEAIMHDCVVKLLKNHDEESLECLCRLLTTIGKDLDFEKAKPRMDQYFNQMEKIVKERKTSSRIRFMLQDVIDLRLCNWVSRRADQGPKTIEQIHKEAKIEEQEEQRKVQQLMTKEKRRPGVQRVDEGGWNTVQGAKNSRVLDPSKFLKITKPTIDEKIQLVPKAQLGSWGKGSSGGAKASETDALRSSASSLNRFSALQPPAPSGSTPSTPVEFDSRRTLTSRGSMGREKNDKPLPSATARPNTFMRGGSSKDLLDNQSQEEQRREMLETVKQLTGGVDVERNSTEAERNKTRESAKPEISAMSAHDKAALSEEELERKSKSIIDEFLHINDFKEAMQCVEELNAQGLLHVFVRVGVESTLERSQITRDHMGQLLYQLVQSEKLSKQDFFKGFSETLELADDMAIDIPHIWLYLAELVTPMLKEGGISMRELTIEFSKPLLPVGRAGVLLSEILHLLCKQMSHKKVGALWREADLSWKDFLPEGEDVHNFLLEQKLDFIESDSPCSSEALSKKELSAEELYKRLEKLIIEDKANDEQIFDWVEANLDEIQMSSPTFLRALMTAVCKAAIIADSSTFRVDTAVIKQRVPILLKYLDSDTEKELQALYALQASIVKLDQPANLLRMFFDCLYDEEVISEDAFYKWESSKDPAEQNGKGVALKSVTAFFTWLREAEEESEDN

SEQ ID NO: 72434 - protein, 161 aa, Homo sapiens
MLLLHRAVVLRLQQACRLKSIPSRICIQACSTNDSFQPQRPSLTFSGDNSSTQGWRVMGTLLGLGAVLAYQDHRCRAAQESTHIYTKEEVSSHTSPETGIWVTLGSEVFDVTEFVDLHPGGPSKLMLAAGGPLEPFWALYAVHNQSHVRELLAQYKIGELN

SEQ ID NO: 72435 - protein, 89 aa, Homo sapiens
MKNYKAIGKIGEGTFSEVMKMQSLRDGNYYACKQMKQRFESIEQVNNLREIQALRRLNPHPNILMLHEVVLEKIPIIRKKNYALYVPVM

SEQ ID NO: 72436 - protein, 95 aa, Homo sapiens
RGYAIASSSDDRMNEPPTSLGLVPHQIRGFLSRFDNVLPVSLAFDKCTACSSKVLDQYEREGFNFLAKVFNSSHSFLEDLTGLTLLHQETQAAEH

SEQ ID NO: 72437 - protein, 80 aa, Homo sapiens
MLLIVVSVCTATGAWNWLIDPETQKVSFFTSLWNHPFFTISCITLIGLFFAGIHKRVVAPSIIAARCRTVLAEYNMSCDD

SEQ ID NO: 72438 - protein, 62 aa, Homo sapiens
MWTLVSWVALTAGLVAGTRCPDGQFCPVACCLDPGGASYSCCRPLLDKWPTTLSRHLGGPCQ

SEQ ID NO: 72439 - protein, 72 aa, Homo sapiens
MKYQEVRCLTSFNISVSFPAETDDYAEIIDEEDTYTMPSTRDYEIQRERIELGRCIGEGQFGDVHQGIYMSP

SEQ ID NO: 72440 - protein, 590 aa, Homo sapiens
MAFPHRPDAPELPDFSMLKRLARDQLIYLLEQQHEVDKLYKVENKPALSSNEQLCFLVRPRIKNMRYIASLVNADKLAGRTRKYKVIFSPQKFYACEMVLEEEGIYGDVSCDEWAFSLLPLDVDLLSMELPEFFRDYFLEGDQRWINTVAQALHLLSTLYGPFPNCYGIGRCAKMAYELWRNLEEEEDGETKGRRPEIGHIFLLDRDVDFVTALCSQVVYEGLVDDTFRIKCGSVDFGPEVTSSDKSLKVLLNAEDKVFNEIRNEHFSNVFGFLSQKARNLQAQYDRRRGMDIKQMKNFVSQELKGLKQEHRLLSLHIGACESIMKKKTKQDFQELIKTEHALLEGFNIRESTSYIEEHIDRQVSPIESLRLMCLLSITENGLIPKDYRSLKTQYLQSYGPEHLLTFSNLRRAGLLTEQAPGDTLTAVESKVSKLVTDKAAGKITDAFSSLAKRSNFRAISKKLNLIPRVDGEYDLKVPRDMAYVFGGAYVPLSCRIIEQVLERRSWQGLDEVVRLLNCSDFAFTDMTKEDKASSESLRLILVVFLGGCTFSEISALRFLGREKGYRFIFLTTAVTNSARLMEAMSEVKA

SEQ ID NO: 72441 - protein, 461 aa, Homo sapiens
MMEGLKKRTRKAFGIRKKEKDTDSTGSPDRDGIKKSNGAPNGFYAEIDWERYNSPELDEEGYSIRPEEPGSTKGKHFYSSSESEEEEESHKKFNIKIKPLQSKDILKNAATVDELKASIGNIALSPSPVGAIKRNLSSEEVARPRRSTPTPELISKKPPDDTTALAPLFGPPLESAFDEQKTEVLLDQPEIWGSGQPINPSMESPKLTRPFPTGTPPPLPPKNVPATPPRTGSPLTIGPGNDQSATEVKIEKLPSINDLDSIFGPVLSPKSVAVNAEEKWVHFSDTSPEHVTPELTPREKVVSPPATPDNPADSPAPGPLGPPGPTGPPGPPGPPRNVLSPLNLEEVQKKVAEQTFIKDDYLETISSPKDFGLGQRATPPPPPPPTYRTVVSSPGPGSGPGPGTTSGASSPARPATPLVPCRSTTPPPPPPRPPSRPKLPPGKPGVGDVVCSLLPWLAQKQ

SEQ ID NO: 72442 - protein, 143 aa, Homo sapiens
MRPLEQPQALLPGGRARGASGSAGWHSHPARRMAGKNSTFQTYKKEVCLPRHSMHPGPWAICCECQTRFGGRLPVSRVEAALPYWVPLSLRPRKQHPCWMHAAGTTAGGSAVMSACCPSSSSSRPPTRTSYRLLQRVCCPSAS

SEQ ID NO: 72443 - protein, 176 aa, Homo sapiens
MKRRLDDQESPVYAAQQRRIPGSTEAFPHQHRVLAPAPPVYEAVSETMQSATGIQYSVTPSYQVSAMPQSSGSHGPAIAAVHSSHHHPTAVQPHGGQVVQSHAHPAPPVAPVQGQQQFQRLKVEDALSYLDQVKLQFGSQPQVYNDFLDIMKEFKSQSIDTPGVISRVSQLFKGHP

SEQ ID NO: 72444 - protein, 66 aa, Homo sapiens
LALRNLRAWMKDERVPKNLATQLDSAFIRKEPFGLVLIIAPWNYPLNLTLVPLVGALAAGSASESG

SEQ ID NO: 72445 - protein, 51 aa, Homo sapiens
MVQTGRSEGIPGWEQSMSKGREIPGSDSESGSPETKKPTFMDEEVQSILTK

SEQ ID NO: 72446 - protein, 31 aa, Homo sapiens
MDEDGLELQQEPNSFFDATGADGTHMDGDQI

SEQ ID NO: 72447 - protein, 209 aa, Homo sapiens
MEEPGPRFSQDLPRKRKWSRSTVQPPCSRGVQDSGGSEVAWGPQKGQAGLTWKVKQGSSPCLQENSADCSAGELRGPGKELWSPIQQVTATSSKWAQFVLPPRKSSHVDSEQPRSLQRDPRPAGPAQAKQGTPRAQASREGLSRPTAAVQLPRATHPVTSGSERPCGKTSWDARTPWAEGGPLVLEAQNPRPTRLCDLFITGEDFDDDV

SEQ ID NO: 72448 - protein, 193 aa, Homo sapiens
MGNSRSRVGRSFCSQFLPEEQAEIDQLFDALSSDKNSPNVSSKSFSLKALQNHVGEALPPEMVTRLYDGMRRVDLTGKAKGPSENVSQEQFTASMSHLLKGNSEEKSLMIMKMISATEGPVKAREVQKFTEDLVGSVVHVLSHRQELRGWTGKEAPGPNPRVQVLAAQLLSDMKLQGKDFWGPSGWTMTVTEL

SEQ ID NO: 72449 - protein, 264 aa, Homo sapiens
DFELGISSKQKRKKTKTVKMIGVLTLFRYSDWQDKLFMSLGTIMAIAHGSGLPLMMIVFGEMTDKFVDTAGNFSFPVNFSLSLLNPGKILEEEMTRYAYYYSGLGAGVLVAAYIQVSFWTLAAGRQIRKIRQKFFHAILRQEIGWFDINDTTELNTRLTDDISKISEGIGDKVGMFFQAVATFFAGFIVGFIRGWKLTLVIMAISPILGLSAAVWAKILSAFSDKELAAYAKAGAVAEEALGAIRTVIAFGGQNKELESPHRPH

SEQ ID NO: 72450 - protein, 185 aa, Homo sapiens
MVSSCCGSVCSDQGCGQDLCQETCCRPSCCETTCCRTTCCRPSCCVSSCCRPQCCQSVCCQPTCYRPSCCVSSCCRPQCCQPACCQPTCCRPRCCISSCCRPSCCVSSCCKPQCCQSVCCQPNCCRPSCSISSCCRPSCCESSCCRPCCCVRPVCGRVSCHTTCYRPTCVISSCPRPLCCASSCC

SEQ ID NO: 72451 - protein, 139 aa, Homo sapiens
  MOD_RES (1)..(1): Any amino acid
XGRGSFPGLAVEPGSNLDMEDEEEEELTMEMFGNSSIKVPGRPQFELDIEPKVFKPPSSTEALNDSQEFPFPETPTKVWPQDEYIVEYSLEYGFLRLSQATRQRLSIPVMVVTLDPTRDQCFGDRFSRLLLDEFLGYDD

SEQ ID NO: 72452 - protein, 139 aa, Homo sapiens
MDSVEKTTNRSEQKSRKFLKSLIRKQPQELLLVIGTGVSAAVAPGIPALCSWRSCIEAVIEAAEQLEVLHPGDVAEFRRKVTKDRDLLVVAHDLIRKMSPRTGDAKPSFFQDCLMEVFDDLEQHIRSPVVLQSILSLMD

SEQ ID NO: 72453 - protein, 105 aa, Homo sapiens
MSKPLEAEKQGLDSPSEHTDTERNGPDTNHQNPQNKTSPFSVSPTGPSTKVGILSGLHLTFWGPGPCLSPPQIKAEDPSGDSAPAAPLPPQPAQPHLPQAQLMLT

SEQ ID NO: 72454 - protein, 418 aa, Homo sapiens
MLPEDKEADSLRGNISVKAVKKEVEKKLRCLLADLPLPPELPGGDDLSKSPEEKKTATQLHSKRRPKICGPRYGETKEKDIDWGKRCVDKFDIIGIIGEGTYGQVYKARDKDTGEMVALKKVRLDNEKEGFPITAIREIKILRQLTHQSIINMKEIVTDKEDALDFKKDKGAFYLVFEYMDHDLMGLLESGLVHFNENHIKSFMRQLMEGLDYCHKKNFLHRDIKCSNILLNNRGQIKLADFGLARLYSSEESRPYTNKVITLWYRPPELLLGEERYTPAIDVWSCGCILGELFTKKPIFQANQELAQLELISRICGSPCPAVWPDVIKLPYFNTMKPKKQYRRKLREEFVFIPAAALDLFDYMLALDPSKRCTAEQALQCEFLRDVEPSKCLHQISLYGKIVMSYGVKSEEDRSRWA

SEQ ID NO: 72455 - protein, 8 aa, Homo sapiens
MDKSGIDS

SEQ ID NO: 72456 - protein, 51 aa, Homo sapiens
QGHIFLNTSLTEAFCMAIVEAASCGLQVYDRVSVEAVLPMDKRLDRLISHC

SEQ ID NO: 72457 - protein, 99 aa, Homo sapiens
GARTLREAGTGAGGDGGSLLQDQRLVGVPSLRVHLPVGSHADVARRSHVPEIPEPIPLLFHVPELRAVSPVLLPERLPLPPAGAGRAAHHGPHCGFLTR

SEQ ID NO: 72458 - protein, 147 aa, Homo sapiens
MSPRRQGLMGLECSHRISAHCNLELLGSSDSPASASRAVGTTEPVPAGGGCRRRVLTAIPPGHPGEAPAACGGARRAHPPVGPCHGPAPAALEALAPGAGFLPGGHTVHDHQAHREPVPDLHGHVPHLLAPPAQEVHRDHSPGDVPQ

SEQ ID NO: 72459 - protein, 53 aa, Homo sapiens
EDVEVGRCVRRFAGVQCVWSYEDKRVRKPLLCNELKRCLSPNGKLSLCSSDGL

SEQ ID NO: 72460 - protein, 100 aa, Homo sapiens
  MOD_RES (1)..(1): Any amino acid
XRSVRALLCTLRAVPSPAAPCPPRPWQLGVGAVRTLRTGPALLSALEVKRNETAGLRSRCQQGCIPSQGSRGESVHLPFPASRGCLHSLACGPFLHLQNQ

SEQ ID NO: 72461 - protein, 105 aa, Homo sapiens
MASALRPPRVPKPKGVLPSHYYESFLEKKGPCDRPRKNSVNLSCWGEGQDRITRSSGQACRVSPFISTIAIGTSSTWRSSTWEHLRNSQMRFPGEAHVTLAPTSA

SEQ ID NO: 72462 - protein, 83 aa, Homo sapiens
MRLSSLTRHMRSHTGYELFEKPYKCKECEKAFSYLKSFQRHERSHTGEKPYKCKQCGKTFIYHQPFQRHERTHIGEKPYECKQ

SEQ ID NO: 72463 - protein, 168 aa, Homo sapiens
MVYDDTSKKWVPIKPGQQGFSRINIYHNTASNTFRVVGVKLQDQQVVINYSIVKGLKYNQATPTFHQWRDARQVYGLNFASKEEATTFSNAMLFALNIMNSQEGGPSSQRQVQNGPSPDEMDIQRRQVMEQHQQQRQESLERRTSATGPILPPGHPSSAASAPVSCSG

SEQ ID NO: 72464 - protein, 463 aa, Homo sapiens
MAVLLLLLRALRRGPGPGPRPLWGPGPAWSPGFPARPGRGRPYMASRPPGDLAEAGGRALQSLQLRLLTPTFEGINGLLLKQHLVQNPVRLWQLLGGTFYFNTSRLKQKNKEKDKSKGKAPEEDEEERRRRERDDQMYRERLRTLLVIAVVMSLLNALSTSGGSISWNDFVHEMLAKGEVQRVQVVPESDVVEVYLHPGAVVFGRPRLALMYRMQVANIDKFEEKLRAAEDELNIEAKDRIPVSYKRTGFFGNALYSVGMTAVGLAILWYVFRLAGMTGREGGFSAFNQLKMARFTIVDGKMGKGVSFKDVAGMHEAKLEVREFVDYLKSPERFLQLGAKVPKGALLLGPPGCGKTLLAKAVATEAQVPFLAMAGPEFVEVIGGLGAARVRSLFKEARARAPCIVYIDEIDAVGKKRSTTMSGFSNTEEEQTLNQLLVEMDVFYAEIEELKLVYPYHGVLHSD

SEQ ID NO: 72465 - protein, 52 aa, Homo sapiens
MQETFRNLASIGKKWKPQNIYVEYENLRRNLRIVGERLFESKEGHQHGEILT

SEQ ID NO: 72466 - protein, 66 aa, Homo sapiens
MTDLEGCFECCIKCLGGIPYASLIATILLYAGVALFCGCGHEALSGTVNILQTYFEMARTAGDTLD

SEQ ID NO: 72467 - protein, 146 aa, Homo sapiens
FFEGEIISKKHPFLTRKWDADEDVDRKHWNIGRYLDLQTLLDWTETFWGKFLAFYQYAKSFNSDDFDYEELKNGDYVFMRWKEQFLVPDHTIKDISGASFAGFYYICFQKSAASIEGYYYHRSSEWYQSLNLTHVPEHSAPIYEFR

SEQ ID NO: 72468 - protein, 318 aa, Homo sapiens
MDRGSLGGSSLTDLGPGSSRRVCMTNCPTLIVMVGLPARGKTYISKKLTRYLNWIGVPTREFNVGQYRRDVVKTYKSFEFFLPDNEEGLKIRKQCALAALRDVRRFLSEEGGHVAVFDATNTTRERRATIFNFGEQNGYKTFFVESICVDPEVIAANIVQVKLGSPDYVNRDSDEATEDFMRRIECYENSYESLDEDLDRDLSYIKIMDVGQSYVVNRVADHIQSRIVYYLMNIHVTPRSIYLCRHGESELNLKGRIGGDPGLSPRGREFAKSLAQFISDQNIKDLKVWTSQMKRTIQTAEALGVPYEQWKVLNEIDA

SEQ ID NO: 72469 - protein, 186 aa, Homo sapiens
MGSSRLAALLLPLLLIVIDLSDSAGIGFRHLPHWNTRCPLASHTEVLPISLAAPGGPSSPQSLGVCESGTVPAVCASICCQVAQVFNGASSTSWCRNPKSLPHSSSIGDTRCQHLLRGSCCLVVTCLRRAITFPSPPQTSPTRDFALKGPNLRIQRHGKVFPDWTHKGMEDPSSPLICCLRPGLFG

SEQ ID NO: 72470 - protein, 61 aa, Homo sapiens
MERRRITSAARRSYVSSGEMMVGGLAPGRRLGPGTRLSLARMPPPLPTRVDFSLAGALNAG

SEQ ID NO: 72471 - protein, 176 aa, Homo sapiens
MGEVEAPGRLWLESPPGGAPPIFLPSDGQALVLGRGPLTQVTDRKCSRTQVELVADPETRTVAVKQLGVNPSTTGTQELKPGLEGSLGVGDTLYLVNGLHPLTLRWEETRTPESQPDTPPGTPLVSQDEKRDAELPKKRMRKSNPGWENLEKLLVFTAAGVKPQGKVAGFDLDGTL

SEQ ID NO: 72472 - protein, 32 aa, Homo sapiens
MEGKWLLCMLLVLGTAIVEAHDGHDDDVIDIE

SEQ ID NO: 72473 - protein, 558 aa, Homo sapiens
RTYGDSGKTKTVTRKKYERIVQLLNGSESSSTDNAKFKFWVKSKGFQLGQPDEVRGGGGGAKQVLYVPVKTTDGVGVDEKLSLRRVAVVEDFFDIIYSMHVETGPNGEQIRKHAGQKRTYKAISESYAFLPREAVTRFLMSCSECQKRMHLNPDGTDHKDNGKPPTLVTSMIDYNMPITMAYMKHMKLQLLNSQQDEDESSIESDEFDMSDSTRMSAVNSDLSSNLEERMQSPQNLHGQQDDDSAAESFNGNETLGHSSIASGGTHSREMGDSNSDGKTGLEQDEQPLNLSDSPLSAQLTSEYRIDDHNSNGKNKYKNLLISDLKMEREARENGSKSPAHSYSSYDSGKNESVDRGAEDLSLNRGDEDEDDHEDHDDSEKVNETDGVEAERLKAFNSRPIPSHLTSAVAESILASACESESRNAAKRMRLERQQDESAPADKQCKPEATQATYSTSAVPGSQDVLYINGNGTYSYHSYRGLGGGLLNLNDASSSGPTDLSMKRQLATSSGSSSSSNSRPQLSPTEINAVRQLVAGYRESAAFLLRSADELENLILQQN

SEQ ID NO: 72474 - protein, 460 aa, Homo sapiens
MRPWTGSWRWIMLILFAWGTLLFYIGGHLVRDNDHPDHSSRELSKILAKLERLKQQNEDLRRMAESLRIPEGPIDQGPAIGRVRVLEEQLVKAKEQIENYKKQTRNGLGKDHEILRRRIENGAKELWFFLQSELKKLKNLEGNELQRHADEFLLDLGHHERSIMTDLYYLSQTDGAGDWREKEAKDLTELVQRRITYLQNPKDCSKAKKLVCNINKGCGYGCQLHHVVYCFMIAYGTQRTLILESQNWRYATGGWETVFRPVSETCTDRSGISTGHWSGEVKDKNVQVVELPIVDSLHPRPPYLPLAVPEDLADRLVRVHGDPAVWWVSQFVKYLIRPQPWLEKEIEEATKKLGFKHPVIGVHVRRTDKVGTEAAFHPIEEYMVHVEEHFQLLARRMQVDKKRVYLATDDPSLLKEAKTNWTAQSIHRKFTSWSDPGYTFSLSGRLPSVYFFIPGLSSCL

SEQ ID NO: 72475 - protein, 81 aa, Homo sapiens
  MOD_RES (1)..(1): Any amino acid
XWIVMIAIGWARGAGGTIITNFERLVKGDWKPEGDEWLKMSYPAKVTLLGSVIFTFQHTQHLAISKHNLMFLYTIFIVATK

SEQ ID NO: 72476 - protein, 264 aa, Homo sapiens
MHRKHLQEIPDLSSNVATSFTWGWDSSKTSELLSGMGVSALEKEEPDSENIPQELLSNLGHPESPPRKRLKSKGSDKDFVIVRRPKLNRENFPGVSWDSLPDELLLGIFSCLCLPELLKVSGVCKRWYRLASDESLWQTLDLTGKNLHPDVTGRLLSQGVIAFRCPRSFMDQPLAEHFSPFRVQHMDLSNSVIEVSTLHGILSQCSKLQNLSLEGLRLSDPIVNTLAKNSNLVRLNLSGCSGFSEFALQTLLSSCSRYERYWMS

SEQ ID NO: 72477 - protein, 152 aa, Homo sapiens
SGGRTPRGPPTSTTPSVGASAAERRLRHLGGVARILTHEAGITDIVVLQAALLHDTVEDTDTTLDEVELHFGAQVRRLVEEVTDDKTLPKLERKRLQVEQAPHSSPGAKLVKLADKLYNLRDLNRCTPEGWSEHRVQEYFEWAAQVVKGLQG

SEQ ID NO: 72478 - protein, 686 aa, Homo sapiens
MGNILTCRVHPSVSLEFDQQQGSVCPSESEIYEAGAGDRMAGAPMAAAVQPAEVTVEVGEDLHMHHVRDREMPEALEFNLSANPEASTIFQRNSQTDALEFNPSANPEASTIFQRNSQTDVVEIRRSNCTNHVSTVRFSQQYSLCSTIFLDDSTAIQHYLTMTIISVTLEIPHHITQRDADRSLSIPDEQLHSFAVSTVHIMKKRNGGGSLNNYSSSIPSTPSTSQEDPQFSVPPTANTPTPVCKRSMRWSNLFTSEKGSDPDKERKAPENHADTIGSGRAIPIKQGMLLKRSGKWLKTWKKKYVTLCSNGVLTYYSSLGDYMKNIHKKEIDLQTSTIKVPGKWPSLATSACTPISTSKSNGLSKDMDTGLGDSICFSPSISSTTSPKLNPPPSPHANKKKHLKKKSTNNFMIVSATGQTWHFEATTYEERDAWVQAIQSQILASLQSCESSKSKSQLTSQSKAMALQSIQNMRGNAHCVDCETQNPKWASLNLGVLMCIECSGIHRSLGTRLSRVRSLELDDWPVELRKVMSSIGNDLANSIWEGSSQGQTKPSEKSTREEKERWIRSKYEEKLFLAPLPCTELSLGQQLLRATADEDLQTAILLLAHGSREEVNETCGEGDGCTALHLACRKGNVVLAQLLIWYGVDVMARDAHGNTALTYARQASSQECINVLLQYGCPDKCV

SEQ ID NO: 72479 - protein, 124 aa, Homo sapiens
EPCKCTGSLQYVHQDCMKKWLQAKINSGSSLEAVTTCELCKEKLELNLEDFDIHELHRAHANEQAEYEFISSGLYLVVLLHLCEQSFSDMMGNTNEPSTRVRLQRMIPKKTETITGHLILPNFI

SEQ ID NO: 72480 - protein, 331 aa, Homo sapiens
MAAAMPLALLVLLLLGPGGWCLAEPPRDSLREELVITPLPSGDVAATFQFRTRWDSELQREGVSHYRLFPKALGQLISKYSLRELHLSFTQGFWRTRYWGPPFLQAPSGAELWVWFQDTVTDVDKSWKELSNVLSGIFCASLNFIDSTNTVTPTASFKPLGLANDTDHYFLRYAVLPREVVCTENLTPWKKLLPCSSKAGLSVLLKADRLFHTSYHSQAVHIRPVCRNARCTSISWELRQTLSVVFDAFITGQGKKALRSVSQTGPSSGCSPEPSRSPAPWLQRAESMWTSPPTTSPAFVSPGQRDIRGAPTPDHYISGRHPRHSEDLCHL

SEQ ID NO: 72481 - protein, 67 aa, Homo sapiens
MEAPEYLDLDEIDFSDDISDNRSQGNRLQKLGLEDTDREDAMGFGSHRAKLTVVAALGACHCPENEY

SEQ ID NO: 72482 - protein, 238 aa, Homo sapiens
  MOD_RES (1)..(1): Any amino acid
XYAETPEALARAAREAGLRLVLINTPPGDQEKGEMGLGAVPGRQAAFREGLEQAVRYAKALGCPRIHLMAGRVPQGADRIAVKAEMEAVFLENLRHAAGVLAQEDLVGLLEPINTRITDPQYFLDTPQQAAAILQKVGRPNLQLQMDIFHWQIMDGNLTGNIREFLPIVGHVQVAQVPGRGEPSSPGELNFPYLFQLLEDEGYKGFVGCEYQPRGDTVEGLSWLRSYWDRRGHPEAGQ

SEQ ID NO: 72483 - protein, 184 aa, Homo sapiens
MPGRSCVALVLLAAAVSCAVAQHAPPWTEDCRKSTYPPSGPTVFPAVIRYRGAVPWYTINLDLPPYKRWHELMLDKAPVLKVIVNSLKNMINTFVPSGKIMQVVDEKLPGLLGNFPGPFEEEMKGIAAVTDIPLGEIISFNIFYELFTICTSIVAEDKKGHLIHGRNMDFGVFLGWNINNDTWV

SEQ ID NO: 72484 - protein, 294 aa, Homo sapiens
MYPELQIARVEQATQAIPMERWCGGSRSGSCAHPHHQVVPFRCLPGEFVSEALLVPEGCRFLHQERMDQCESSTRRHQEAQEACSSQGLILHGSGMLLPCGSDRFRGVEYVCCPPPGTPDPSGTAVGDPSTRSWPPGSRVEGAEDEEEEESFPQPVDDYFVEPPQAEEEEETVPPPSSHTLAVVGKVTPTPRPTDGVDIYFGMPGEISEHEGFLRAKMDLEERRMRQINEVMREWAMADNQSKNLPKADRQALNEHFQSILQTLEEQVSGERQRLVETHATRVIALINDQRRAA

SEQ ID NO: 72485 - protein, 138 aa, Homo sapiens
  MOD_RES (1)..(1): Any amino acid
XPRIPLQNGRLPNHLTHRQHLQRLRSYSAGEARVQWCDLGSLQPPPPRFKQFSCLSLSSSWDYRFRFSGRILGLALIHQYLLDAFFTRPFYKALLRLPCDLSDLEYLDEEFHQSLQWMKDNNITDILDLTFTVNEEVF

SEQ ID NO: 72486 - protein, 128 aa, Homo sapiens
MDMGTSALSKKPWWTLPQNFHAPMVFHMEEDQEELIFGHGDTYLRCIEVHSHTLIQLESWFTATGQTRVTVVGPHRARQWLLHMFCCVGSQDSYHHARGLEMLERVRSQPLTNDDLVTSISVPPYTGD

SEQ ID NO: 72487 - protein, 137 aa, Homo sapiens
MGENARHFDRRNEGVVRTEKNSLNNRFLPWNEIETEAILSIDDDAHLRHDEIMFGFRVWREARDRIVGFPGRYHAWDIPHQSWLYNSNYSCELSMVLTGAAFFHKYYAYLYSYVMPQAIRDMVDEYINCEDIAMNFL

SEQ ID NO: 72488 - protein, 181 aa, Homo sapiens
MWSSGLLIQDSTIMFEIKKICCIGAGYVGGPTCSVIAHMCPEIRVTVVDVNESRINAWNSPTLPIYEPGLKEVVESCRGKNLFFSTNIDDAIKEADLVFISVNTPTKTYGMGKGRAADLKYIEACARRIVQNSNGYKIVTEKSTVPVRAAESIRRIFDANTKPNLNLQVLSNPEFLAEGTA

SEQ ID NO: 72489 - protein, 1100 aa, Homo sapiens
MARFAFFKVLPGDYEILATHPTWALKEASTTVRVTNSNANAASPLIVAGYNVSGSVRSDGEPMKGVKFLLFSSLVTKEDVLGCNVSPVPGFQPQDESLVYLCYTVSREDGSFSFYSLPSGGYTVIPFYRGERITFDVAPSRLDFTVEHDSLKIEPVFHVMGFSVTGRVLNGPEGDGVPEAVVTLNNQIKVKTKADGSFRLENITTGTYTIHAQKEHLYFETVTIKIAPNTPQLADIIATGFSVCGQISIIRFPDTVKQMNKYKVVLSSQDKDKSLVTVETDAHGSFCFKAKPGTYKVQVMVPEAETRAGLTLKPQTFPLTVTNRPMMDVAFVQFLASVSGKVSCLDTCGDLLVTLQSLSRQGEKRSLQLSGKVNAMTFTFDNVLPGKYKISIMHEDWCWKNKSLEVEVLEDDMSAVEFRQTGYMLRCSLSHAITLEFYQDGNGRENVGIYNLSKGVNRFCLSKPGVYKVTPRSCHRFEQAFYTYDTSSPSILTLTAIRHHVLGTITTDKMMDVTVTIKSSIDSEPALVLGPLKSVQELRREQQLAEIEARRQEREKNGNEEGEERMTKPPVQEMVDELQGPFSYDFSYWARSGEKITVTPSSKELLFYPPSMEAVVSGESCPGKLIEIHGKAGLFLEGQIHPELEGVEIVISEKGASSPLITVFTDDKGAYSVGPLHSDLEYTVTSQKEGYVLTAVEGTIGDFKAYALAGVSFEIKAEDDQPLPGVLLSLSGGLFRSNLLTQDNGILTFSNLSPGQYYFKPMMKEFRFEPSSQMIEVQEGQNLKITITGYRTAYSCYGTVSSLNGEPEQGVAMEAVGQNDCSIYGEDTVTDEEGKFRLRGLLPGCVYHVQLKAEGNDHIERALPHHRVIEVGNNDIDDVNIIVFRQINQFDLSGNVITSSEYLPTLWVKLYKSENLDNPIQTVSLGQSLFFHFPPLLRDGENYVVLLDSTLPRSQYDYILPQVSFTAVGYHKHITLIFNPTRKLPEQDIAQGSYIALPLTLLVLLAGYNHDKLIPLLLQLTSRLQGVRALGQAASDNSGPEDAKRQAKKQKTRRTLRLQEEFQLTWCLVPWRGTLGIHLFSSLPFASEILLETTATCIHY

SEQ ID NO: 72490 - protein, 129 aa, Homo sapiens
MSARNRFASMCLCVKYRYQDEDTPPLEHSPAHLPNQANSPPVIVNTDTLEAPGYELQVNGTEGEMEYEEITLERGNSGLGFSIAGGTDNPHIGDDPSIFITKIIPGGAAAQDGRLRVNDSILFVNEVDV

SEQ ID NO: 72491 - protein, 81 aa, Homo sapiens
NAFPVSGQLYTTHLLSLDALLTVIDSTEAHCQAKVLNSLTQQEKKETARPSSDKKFARKPPRFSCLLPDPRELIEIKNKKK

SEQ ID NO: 72492 - protein, 128 aa, Homo sapiens
MAATLDLKSKEEKDAELDKRIEALRRKNEALIRRYQEIEEDRKKAELEGVAVTAPRKGRSVEKENVAVESEKNLGPSRRSPGTPRPPGASKGGRTPPQQGGRAGMGRASRSWEGSPGEQPRGGGAGGR

SEQ ID NO: 72493 - protein, 130 aa, Homo sapiens
MKFLIFAFFGGVHLLSLCSGKAICKNGISKRTFEEIKEEIASCGDVAKAIINLAVYGKAQNRSYERLALLVDTVGPRLSGSKNLEKAIQIMYQNLQQDGLEKVHLEPVRIPHWERGEESAVMLEPRIHKI

SEQ ID NO: 72494 - protein, 84 aa, Homo sapiens
MKYSCCALVLAVLGTELLGSLCSTVRSPRFRGRIQQERKNIRPNIILVLTDDQDVELGSLQVMNKTRKIMEHGGATFINAFVTT

SEQ ID NO: 72495 - protein, 274 aa, Homo sapiens
MAMSNGNNDFVVLSNSSIATSAANPSPLTPCDGDHAAQQLTPKEATRTKVSPNGCLQLNGTVKSSFLPLDNQRMPQMLPQCCHPCPYHHPLTSHSSHQECHPEAGPAAPSALASCCMQPHSEYSASLCPNHSPVYQTTCCLQPSPSFCLHHPWPDHFQHQPVQQHIANIRPSRPFKLPKSYAALIADWPVVVLGMCTMFIVVCALVGVLVPELPDFSDPLLGFEPRGTAIGQRLVTWNNMVKNTGYKATLANYPFKYADEQAKRSEKINVGCFF

SEQ ID NO: 72496 - protein, 232 aa, Homo sapiens
LSLLYKSSVHGGSIEDMVERCSRQGCTITMAYIDYNMIVAFMLGNYINLHESSTEPNDSLWFSLQKKNDTTEIETLLLNTAPKIIDEQLVCRLSKTDIFIICRDNKIYLDKMITRNLKLRFYGHRQYLECEVFRVEGIKDNLDDIKRIIKAREHRNRLLADIRDYRPYADLVSEIRILLVGPVGSGKSSFFNSVKSIFHGHVTGQAVVGSDITSITERGNPNIQLNAKSNGK

SEQ ID NO: 72497 - protein, 96 aa, Homo sapiens
  MOD_RES (1)..(1): Any amino acid
XLVPYLLKLLEGIGLENLDSPAATKAQIVKALKAMTRSLQYGEQVNEILCRSSVWSAFKDQKHDLFISESQTAGYLTGVSPSLLTGSSPLHLRSGL

SEQ ID NO: 72498 - protein, 146 aa, Homo sapiens
MMFPNPEPPPETVSINKAINTQEVAVKEKHARTCILGTHHEKGAQTFWSVVNRLPLSSNAVLCWKFCHVFHKLLRDGHPNVLKDSLRYRNELSDMSRMWGHLSEGYGQLCSIYLKLLRTKMEYHTKNPRFPGNLQMSDRQLDEAGE

SEQ ID NO: 72499 - protein, 448 aa, Homo sapiens
MLDDRARMEAAKKEKVEQILAEFQLQEEDLKKVMRRMQKEMDRGLRLETHEEASVKMLPTYVRSTPEGSEVGDFLSLDLGGTNFRVMLVKVGEGEEGQWSVKTKHQMYSIPEDAMTGTAEMMKHKKLPLGFTFSFPVRHEDIDKGILLNWTKGFKASGAEGNNVVGLLRDAIKRRGDFEMDVVAMVNDTVATMISCYYEDHQCEVGMIVGTGCNACYMEEMQNVELVEGDEGRMCVNTEWGAFGDSGELDEFLLEYDRLVDESSANPGQQLYEKLIGGKYMGELVRLVLLRLVDENLLFHGEASEQLRTRGAFETRFVSQVESDTGDRKQIYNILSTLGLRPSTTDCDIVRRACESVSTRAAHMCSAGLAGVINRMRESRSEDVMRITVGVDGSVYKLHPSFKERFHASVRRLTPSCEITFIESEEGSGRGAALVSAVACKKACMLGQ

SEQ ID NO: 72500 - protein, 70 aa, Homo sapiens
MVWEVKTNQMPNAVQKLLLVMDKRASGMNDSLELLQCNENLPSSPGYNSCDEHMELDDLPELQAVQSDPT

SEQ ID NO: 72501 - protein, 215 aa, Homo sapiens
MFKQLSCISLPSSCDYSSRSLLQPPSPKMVMLLLLLSALAGLFGAAEGQAFHLGKCPNPPVQENFDVNKYLGRWYEIEKIPTTFENGRCIQANYSLMENGKIKVLNQELRADGTVNQIEGEATPVNLTEPAKLEVKFSWFMPSAPYWILATDYENYALVYSCTCIIQLFHVDFAWILARNPNLPPETVDSLKNILTSNNIDVKKMTVTDQVNCPK

SEQ ID NO: 72502 - protein, 193 aa, Homo sapiens
  MOD_RES (1)..(1): Any amino acid
XKIKDCPWYDRGFCKHGPLCRHRHTRRVICVNYLVGFCPEGPSCKFMHPRFELPMGTTEQPPLPQQTQPPAKQSNNPPLQRSSSLIQLTSQNSSPNQQRTPQVIGVMQSQNSSAGNRGPRPLEQVTCYKCCCLSLLFPHFLLFPVWRERTLRQQMHQRALGLSQWTVTAAGASSEQPGGPAVGSVHLTVSCAC

SEQ ID NO: 72503 - protein, 111 aa, Homo sapiens
MLRHLMYKIKSTGPITVAEYMKEVLTNPAKGYYVYRDMLGEKGDFITSPEISQIFGELLGIWFISEWMATGKSTAFQLVELGPGRGTLVGDILRVFTQLGSVLKNCDISVH

SEQ ID NO: 72504 - protein, 241 aa, Homo sapiens
MAVFLQLLPLLLSRAQGNPGASLDGRPGDRVNLSCGGVSHPIRWVWAPSFPACKGLSKGRRPILWASSSGTPTVPPLQPFVGRLRSLDSGIRRLELLLSAGDSGTFFCKGRHEDESRTVLHVLGDRTYCKAPGPTHGSVYPQLLIPLLGAGLVLGLGALGLVWWLHRRLPPQPIGPLPRFAPLVKTEPQRPVKEEEPKIPGDLDQEPSLLYADLDHLALSRPRRLSTADPADASTIYAVVV

SEQ ID NO: 72505 - protein, 133 aa, Homo sapiens
  MOD_RES (1)..(1): Any amino acid
XQNEYFDSLLHACIPCQLRCSSNTPPLTCQRYCNASVTNSVKGTNAILWTCLGLSLIISLAVFVLMFLLRKINSEPLKDEFKNTEMESRSVAQAGVQWRDLNSLQPLPLGFKQFSHLSLLSNWDYRIRSPGHG

SEQ ID NO: 72506 - protein, 276 aa, Homo sapiens
MDHLGASLWPQVGSLCLLLAGAAWAPPPNLPDPKFESKGWGGAGSPELEVLNAAPSSAGRWVGRCAPVVTAGDTALLAARGPEELLCFTERLEDLVCFWEEAASAGVGPGNYSFSYQLEDEPWKLCRLHQAPTARGAVRFWCSLPTADTSSFVPLELRVTAASGAPRYHRVIHINEVVLLDAPVGLVARLADESGHVVLRWLPPPETPMTSHIRYEVDVSAGNGAGSVQRGTVFLSPDWLSSTRARPHVIYFCLLRVPRPDSAPRWRSWRAAPSVC

SEQ ID NO: 72507 - protein, 332 aa, Homo sapiens
MSCPCKQNFLHILSFNKSGGGGDIHQGFQSLLTEVNKTGTQYLLRMANRLFGEKSCDFLSSFRDSCQKFYQAEMEELDFISAVEKSRKHINTWVAEKTEGKIAELLSPGSVDPLTRLVLVNAVYFRGNWDEQFDKENTEERLFKVSKNEEKPVQMMFKQSTFKKTYIGEIFTQILVLPYVGKELNMIIMLPDETTDLRTVEKELTYEKFVEWTRLDMMDEEEVEVSLPRFKLEESYDMESVLRNLGMTDAFELGKADFSGMSQTDLSLSKVVHKSFVEVNEEGTEAAAATAAIMMMRCARFVPRFCADHPFLFFIQHSKTNGILFCGRFSSP

SEQ ID NO: 72508 - protein, 448 aa, Homo sapiens
MIPTLTALLCLGLSLGPRTHMQAGPLPKPTLWAEPGSVISWGNSVTIWCQGTLEAREYRLDKEESPAPWDRQNPLEPKNKARFSIPSMTEDYAGRYRCYYRSPVGWSQPSDPLELVMTGAYSKPTLSALPSPLVTSGKSVTLLCQSRSPMDTFLLIKERAAHPLLHLRSEHGAQQHQAEFPMSPVTSVHGGTYRCFSSHGFSHYLLSHPSDPLELIVSGSLEGPRPSPTRSVSTAAGPEDQPLMPTGSVPHSGLRRHWEVLIGVLVVSILLLSLLLFLLLQHWRQGKHRTLAQRQADFQRPPGAAEPEPKDGGLQRRSSPAADVQGENFCAAVKNTQPEDGVEMDTRQSPHDEDPQAVTYAKVKHSRPRREMASPPSPLSGEFLDTKDRQAEEDRQMDTEAAASEAPQDVTYARLHSFTLRQKATEPPPSQEGASPAEPSVYATLAIH

SEQ ID NO: 72509 - protein, 39 aa, Homo sapiens
MASASSGPSSSVGFSSFDPAVPSCTLSSGKPGRAWVGSW

SEQ ID NO: 72510 - protein, 72 aa, Homo sapiens
  MOD_RES (1)..(1): Any amino acid
XMFHCPYEGCSQVYVALSSFQVSVNSPARPAASPSRGRTTWRYIGAPTPARPPCSARSVATSAGSARRSTGT

SEQ ID NO: 72511 - protein, 231 aa, Homo sapiens
APSSPSSPIAKDPRYEKRWLDTLSVPLSMARISRYKAGTEKLRWNAFEVLALDGVSSGILRFYTAQDGTDWLRAVSANIRELTLQNMKMANKCCSPSDQVVHMGWVNEKLQGADSSQTFRPKFLALKGPSFYVFSTPPVSTFDWVRAERTYHLCEVLFKVHKFWLTEDCWLQANLYLGLQDFDFEDQRPYCFSIVAGHGKSHVFNVELGSELAMWEKSFQRATFMEVQRTG

SEQ ID NO: 72512 - protein, 1150 aa, Homo sapiens
MAKSGGCGAGAGVGGGNGALTWVNNAAKKEESETANKNDSSKKLSVERVYQKKTQLEHILLRPDTYIGSVEPLTQFMWVYDEDVGMNCREVTFVPGLYKIFDEILVNAADNKQRDKNMTCIKVSIDPESNIISIWNNGKGIPVVEHKVEKVYVPALIFGQLLTSSNYDDDEKKVTGGRNGYGAKLCNIFSTKFTVETACKEYKHSFKQTWMNNMMKTSEAKIKHFDGEDYTCITFQPDLSKFKMEKLDKDIVALMTRRAYDLAGSCRGVKVMFNGKKLPVNGFRSYVDLYVKDKLDETGVALKVIHELANERWDVCLTLSEKGFQQISFVNSIATTKGGRHVDYVVDQVVGKLIEVVKKKNKAGVSVKPFQVKNHIWVFINCLIENPTFDSQTKENMTLQPKSFGSKCQLSEKFFKAASNCGIVESILNWVKFKAQTQLNKKCSSVKYSKIKGIPKLDDANDAGGKHSLECTLILTEGDSAKSLAVSGLGVIGRDRYGVFPLRGKILNVREASHKQIMENAEINNIIKIVGLQYKKSYDDAESLKTLRYGKIMIMTDQDQDGSHIKGLLINFIHHNWPSLLKHGFLEEFITPIVKASKNKQELSFYSIPEFDEWKKHIENQKAWKIKYYKGLGTSTAKEAKEYFADMERHRILFRYAGPEDDAAITLAFSKKKIDDRKEWLTNFMEDRRQRRLHGLPEQFLYGTATKHLTYNDFINKELILFSNSDNERSIPSLVDGFKPGQRKVLFTCFKRNDKREVKVAQLAGSVAEMSAYHHGEQALMMTIVNLAQNFVGSNNINLLQPIGQFGTRLHGGKDAASPRYIFTMLSTLARLLFPAVDDNLLKFLYDDNQRVEPEWYIPIIPMVLINGAEGIGTGWACKLPNYDAREIVNNVRRMLDGLDPHPMLPNYKNFKGTIQELGQNQYAVSGEIFVVDRNTVEITELPVRTWTQVYKEQVLEPMLNGTDKTPALISDYKEYHTDTTVKFVVKMTEEKLAQAEAAGLHKVFKLQTTLTCNSMVLFDHMGCLKKYETVQDILKEFFDLRLSYYGLRKEWLVGMLGAESTKLNNQARFILEKIQGKITIENRSKKDLIQMLVQRGYESDPVKAWKEAQEKAAEEDETQNQHDDSSSDSGTPSGPDFNYILNMSLWSLT

SEQ ID NO: 72513 - protein, 138 aa, Homo sapiens
MLKSNDCLFSLENLFFEKPDEVENHPDNEKSLDWFLPPAPLISEIPDTQELEEELESHKLLGQEKRPKMLTSNLKITNEDTNYISLTQKFQFAFPSDKYEQDDLNLEGVGNNDLSHIAGKLTYASQKYKNHIGTEIAP

SEQ ID NO: 72514 - protein, 130 aa, Homo sapiens
MEGREVYLWYSVDSRGDFLVFLCPIFFSFSFSEVESLSPRLECSGTISAHCNLCLLGSSYSPASASRVTGITGMCHHAQLIFVFLVEMEFRHVGQTSFELLASSSPPASASQSAGITGVSHCAWPLAQYL

SEQ ID NO: 72515 - protein, 78 aa, Homo sapiens
METDCNPMELSSMSGFEEGSELNGFEGTDMKDMRLEAEAVVNDVLFAVNNMFVSKSLRCADDVAYINVETKERNRYCL

SEQ ID NO: 72516 - protein, 647 aa, Homo sapiens
MVPRLLLRAWPRGPAVGPGAPSRPLSAGSGPGQYLQRSIVPTMHYQDSLPRLPIPKLEDTIRRYLSAQKPLLNDGQFRKTEQFCKSFENGIGKELHEQLVALDKQNKHTSYISGPWFDMYLSARDSVVLNFNPFMAFNPDPKSEYNDQLTRATNMTVSAIRFLKTLRAGLLEPEVFHLNPAKSDTITFKRLIRFVPSSLSWYGAYLVNAYPLDMSQYFRLFNSTRLPKPSRDELFTDDKARHLLVLRKGNFYIFDVLDQDGNIVSPSEIQAHLKYILSDSSPAPEFPLAYLTSENRDIWAELRQKLMSSGNEESLRKVDSAVFCLCLDDFPIKDLVHLSHNMLHGDGTNRWFDKSFNLIIAKDGSTAVHFEHSWGDGVAVLRFFNEVFKDSTQTPAVTPQSQPATTDSTVTVQKLNFELTDALKTGITAAKEKFDATMKTLTIDCVQFQRGGKEFLKKQKLSPDAVAQLAFQMAFLRQYGQTVATYESCSTAAFKHGRTETIRPASVYTKRCSEAFVREPSRHSAGRKPSHWPRYTASQGFDRHLFALRHLAAAKGIILPELYLDPAYGQINHNVLSTSTLSSPAVNLGGFAPVVSDGFGVGYAVHDNWIGCNVSSYPGRNAREFLQCVEKALEDMFDALEGKSIKS

SEQ ID NO: 72517 - protein, 518 aa, Homo sapiens
  MOD_RES (1)..(1): Any amino acid
XDIDQLSGRDFCHSKKMTGSNTEEIDSRIRDAGNDSASTAPRSTEESLSEDVFTESELSPIREELVSSDELRQDKSSGASSESVQTVNQAEVESLTVKSESTGTPGHLRSDTEHSTNEVGTLCHKTDLNNLEMAIKEDQIADNFQGISGPKEDSTSIKGNSDQDSFLHENSLHQEESQKENMPCGETAEFKQKQSVNKGKQGKEQNQDSQTEAEELRKLWKTHTMQQTKQQRENIQQVSQKEAKHKITSADGHIESSALLKEKQRHRLHKFLCLRVGKPMRKTFVSQASATMQQYAQRDKKHEYWFAVPQERTDHLYAFFIQWSPEIYAEDTGEYTREPGFIVVKKIEESETIEDSSNQAAAREWELTKHLPPRTIGYPWTLVYGTGKHGTSLKTLYRTMTGLDTPVLMVIKDSDGQVFGALASEPLKVSDGFYGTGETFVFTFCPEFEVFKWTGDNMFFIKGDMDSLAFGGGGGEFALWLDGDLYHGRSHSCKTFGNRTLSKKEDFFIQDIEIWAFE

SEQ ID NO: 72518 - protein, 137 aa, Homo sapiens
MYGKIIFVLLLSEIVSISALSTTEVAMHTSTSSSVTKSYISSQTNDTHKRDTYAATPRAHEVSEISVRTVYPPEEETEITLIIFGVMAGVIGTILLISYGIRRLIKKSPSDVKPLPSPDTDVPLSSVEIENPETSDQ

SEQ ID NO: 72519 - protein, 106 aa, Homo sapiens
MENQAHNTMGTSPCEAELQELMEQIDIMVSNKKMDWERKMRALETRLDLRDQELANAQTCLDQKGQEVGLLRQKLDSLEKCNLAMTQNYEGQLQSLKAQVRKLIII

SEQ ID NO: 72520 - protein, 194 aa, Homo sapiens
MSFHKEDGVNSLCQKALHIVTELCFAGQVEWEKCSGIFPRDRGSQGGSSTDISVSLLAVVVSFCGLALLVVSLFVFWKLCWPCWKSKPVTSNITTLPQSISSAPTEVFETEEKKEIKENEKPAVKAIEPAIKISHTSPDIPAEVQTALKEHLIKHARVQRQITEPTSSTRGWGKKKKKRILSTCNFVTMPRHPS

SEQ ID NO: 72521 - protein, 86 aa, Homo sapiens
MRGQGPPLSSFGVWLASRAASDPSRPRRQGYDIHFHDKKILLLEAGPKKVLEKLSETYSNRVSSISPGSATLLSSVGRLLRGPDNV

SEQ ID NO: 72522 - protein, 137 aa, Homo sapiens
MIHFILLFSRQGKLRLQKWYITLPDKERKKITREIVQIILSRGHRTSSFVDWKELKLVYKRYASLYFCCAIENQDNELLTLEIVHRYVELLDKYFGNEFNCWFLLMRLLSVLDSWSTPALNSEVPQLATITPDFCLF

SEQ ID NO: 72523 - protein, 206 aa, Homo sapiens
MATGQKLMRAVRVFEFGGPEVLKLRSDIAVPIPKDHQVLIKVHACGVNPVETYIRSGTYSRKPLLPYTPGSDVAGVIEAVGDNASAFKKGDRVFTSSTISGGYAEYALAADHTVYKLPEKLDFKQGAAIGIPYFTAYRALIHSACVKAGESVLVHGASGGVGLAACQIARAYGLKILGTAGTEEGQKIVLQNGAHEVFNHREVNYI

SEQ ID NO: 72524 - protein, 426 aa, Homo sapiens [sequence omitted]

SEQ ID NO: 72525 - protein, 163 aa, Homo sapiens
MSEEIITPVYCTGVSAQVQKQRARELGLGRHENAIKYLGQDYEQLRVRCLQSGTLFRDEAFPPVPQSLGYKDLGPNSSKTYGIKWKRPTELLSNPQFIVDGATRTDICQGALGDCWLLAAIASLTLNDTLLHRVVPHGQSFQNGYAGIFHFQLWQFGEWVDVV

SEQ ID NO: 72526 - protein, 93 aa, Homo sapiens
VEAGKGLEMRKLVLSGFLASEEIYINQLEALLLPMKPLKATATTSQPVLTIQQIETIFYKIQDIYEIHKEFYDNLCPKVQQWDSQVTMGHLFQ

SEQ ID NO: 72527 - protein, 296 aa, Homo sapiens
MEPSGGEQEPGAVRFLDLPWEDVLLPHVLNRVPLRQLLRLQRVSRAFRSLVQLHLAGLRRFDAAQVGPQIPRAALARLLRDAEGLQELALAPCHEWLSDEDLVPVLARNPQLRSVALGGCGQLSRRALGALAEGCPRLQRLSLAHCDWVDGLALRGLADRCPALEELDLTACRQLKDEAIVYLAQRRGAGLRSLSLAVNANVGDAAVQELARNCPELHHLDLTGCLRVGSDGVRTLAEYCPVLRSLRVRHCHHVAESSLSRLRKRGVDIDVEPPLHQALVLLQDMAGFAPFVNLQV

SEQ ID NO: 72528 - protein, 245 aa, Homo sapiens
QTTQTESRPLMGPGIRRRRVLTKDGRSNVRMEHIADKRFLYLKDLWTTFIDMQWRYKLLLFSATFAGTWFLFGVVWYLVAVAHGDLLELDPPANHTPCVVQVHTLTGAFLFSLESQTTIGYGFRYISEECPLAIVLLIAQLVLTTILEIFITGTFLAKIARPKKRAETIRFSQHAVVASHNGKPCLMIRVANMRKSLLIGCQVTGKLLQTHQTKEGENIRLNQAAQRRSVSLCPVNGRTQANMFL

SEQ ID NO: 72529 - protein, 525 aa, Homo sapiens
MTADPRKELSLTFALRQQNVERLSELVQAVSDPSSPQYGKYLTLENVADLVRPSPLTLHTVQKWLLAAGAQKCHSVITQDFLTCWLSIRQAELLLPGAEFHHYVGGPTETHVVRSPHPYQLPQALAPHVDFVGGLHRFPPTSSLRQRPEPQVTGTVGLHLGVTPSVIRKRYNLTSQDVGSGTSNNSQACAQFLEQYFHDSDLAQFMRLFGGNFAHQASVARVVGQQGRGRAGIEASLDVQYLMSAGANISTWVYSSPGRHEGQEPFLQWLMLLSNESALPHVHTVSYGDDEDSLSSAYIQRVNTELMKAAARGLTLLFASGDSGAGCWSVSGRHQFRPTFPASSPYVTTVGGTSFQEPFLITNEIVDYISGGGFSNVFPRPSYQEEAVTKFLSSSPHLPPSSYFNASGRAYPDVAALSDGYWVVSNRVPIPWVSGTSASTPVFGGILSLINEHRILSGRPPLGFLNPRLYQQHGAGLFDVTRGCHESCLDEEVEGQGFCSGPGWDPVTGWGTPNFPALLKTLLNP

SEQ ID NO: 72530 - protein, 103 aa, Homo sapiens
MQAKGRRHRSSALIGRPVTTRKRRRGGATKQLMDIESKHEVTILGGLNEFVVKFYGPQGTPYEGGVWKVRVDLPDKYPFKSPSIGFMNKIFHPNIDEASGTVC

SEQ ID NO: 72531 - protein, 138 aa, Homo sapiens
MASFVRQLNMYGFRKVVHIEQGGLVKPERDDTEFQHPCFLRGQEQLLENIKRKVTSVSTLKSEDIKIRQDSVTKLLTDVQLMKGKQECMDSKLLAMKHENEALWREVASLRQKHAQQQKVVNKLIQFLISLVQSNRIL

SEQ ID NO: 72532 - protein, 189 aa, Homo sapiens
MGRARKSGLGQRSRPTASRSEAAVQPGVRKARGAGNWRVGLQTGEAAPSPHRDLRDTPDPRPWLARTHRMTTTLVSATIFDLSEVLCKGNKMLNYSAPSAGGCLLDRKAVGTPAGGGFPRRHSVTLPSSKFHQNQLLSSLKGEPAPALSSRDSRFRDRSFSEGGERLLPTQKQPGGGQVNSSRYKTELC

SEQ ID NO: 72533 - protein, 404 aa, Homo sapiens
  MOD_RES (1)..(1): Any amino acid
XAKNLLETLKELREDGFQPQTYLVQGVKALHTALKLWMKKELVSEHAFEIPDNVRPGHLIKELSKVIRAIEEENGKPVKSQGIPIVCPVSRSSNEATSPYHSRRKMRKLRDHNVRTPSNLDILELHTREVLKRLEMCPWEEDILSSKLNGKFNKHLQPSSTVPEWRAKDNDLRLLLTNGRIIKDERQPFADQSLYTADSENEEDKRRTKKAKMKIEESSGVEGVEHEESQKPLNGFFTRVKSELRSRSSGYSDISESEDSGPECTALKSIFTTEESESSGDEKKQEITSNFKEESNVMRNFLQKSQKPSRSEIPIKRECPTSTSTEEEAIQGMLSMAGLHYSTCLQRQIQSTDCSGERNSLQDPSSCHGSNHEVRQLYRYDKPVECETRSHLCCPDWSPTPELK

SEQ ID NO: 72534 - protein, 105 aa, Homo sapiens
  MOD_RES (1)..(1): Any amino acid
XAYQPGMVPAPMPMMPAMGTVPAMPATASQPGCRAAGRPAAELYPAAGANPGPADDSPGHVPVPGAADAAAAAAGSGLRGCVPGLTLSRHLQAQEAPHTPGEATA

SEQ ID NO: 72535 - protein, 133 aa, Homo sapiens
MPPLEQFMEIPSMDRRELFFRDIERGDIVIGRISSIREFGFFMVLICLGSGIMRDIAHLEITALCPLRDVPSHSNHGDPLSYYQTGDIIRAGIKDIDRYHEKLAVSLYSSSLPPHLSGIKLGVISSEELPLYY

SEQ ID NO: 72536 - protein, 258 aa, Homo sapiens
MSLGWLERPPALSRAAGCRGAQVEEIWSLEPENFEKLKPVHGLIFLFKWQPGEEPAGSVVQDSRLDTIFFAKQVINNACATQAIVSVLLNCTHQDVHLGETLSEFKEFSQSFDAAMKGLALSNSDVIRQVHNSFARQQMFEFDTKTSAKEEDAFHFVSYVPVNGRLYELDGLREGPIDLGACNQDDWISAVRPVIEKRIQKYSEGEIRFNLMAIVSDRKMIYEQKIAELQRQLAEEPMDTDQGNSMLSAIQSEVAKNQ

SEQ ID NO: 72537 - protein, 158 aa, Homo sapiens
  MOD_RES (1)..(1): Any amino acid
XDLLPSKYFEVDFPMIVTRKLHSIKCKPPLSSPILELHSEDTLQMDGHILDSKRYAVIGADLRDLSELEEKLKKCNMNTQLPTLLIAECVLVYMTPEQSANLLKWAANSFERAMFINYEQVNMGDRFGQIMIENLRRRQCDLAGVETCKSLESQDRIT

SEQ ID NO: 72538 - protein, 352 aa, Homo sapiens
MSRDVCIHTWPCTYYLEPKRRWVTGQLSLTSLSLRFMTDSTGEILVSFPLSSIVEIKKEASHFIFSSITILEKGHAKHWFSSLRPSRNVVFSIIEHFWRELLLSQPGAVADASVPRTRGEELTGLMAGSQKRLEDTARVLHHQGQQLDSVMRGLDKMESDLEVADRLLTELESPAWWPFSSKLWKTPPETKPREDVSMTSCEPFGKEGILIKIPAVISHRTESHVKPGRLTVLVSGLEIHDSSSLLMHRFEREDVDDIKVHSPYEISIRQRFIGKPDMAYRLISAKMPEVIPILEVQFSKKMELLEDALVLRSARTSSPAEKSCSVWHAATAPGLHPSGLRRVRALLAEHLG

SEQ ID NO: 72539 - protein, 101 aa, Homo sapiens
MSQGSVTFRDVAIDFSQEEWKWLQPAQRDLYRCVMLENYGHLVSLGLSISKPDVVSLLEQGKEPWLGKREVKRDLFSVLKEAGNARIILRCCKKIRDVLGK

SEQ ID NO: 72540 - protein, 34 aa, Homo sapiens
MASPGKPGADEAQEEEGELEGGSAGPRAAILEQA

SEQ ID NO: 72541 - protein, 84 aa, Homo sapiens
MDNRQNVTPALIFAITVATIGSFQFGYNTGVINAPETIIKEFINKTLTDKANAPPSEVLLTNLWSLSVAIFSVGGMIGSFSVGL

SEQ ID NO: 72542 - protein, 158 aa, Homo sapiens
MSDPEMGWVPEPPTMTLGASRVELRVSCHGLLDRDTLTKPHPCVLLKLYSDEQWVEVERTEVLRSCSSPVFSRVLALEYFFEEKQPLQFHVFDAEDGATSPRNDTFLGSTECTLGQIVSQTKVTKPLLLKNGKTAGKSTITDLFSKSDPFMEIYKTNE

SEQ ID NO: 72543 - protein, 61 aa, Homo sapiens
MAPSALLRPLSRLLAPARLPSGPSVRSKFYVREPPNAKPDWLKVGFTLGTTVFLWIYVCSV

SEQ ID NO: 72544 - protein, 61 aa, Homo sapiens
MPDVKESVPPKYPGDSEGRSCKPETSGPPQEDKSGSEDPPPCPRAEVFKEFLVLEKEVTQA

SEQ ID NO: 72545 - protein, 167 aa, Homo sapiens
MPEIRVTPLGACPVLSWNLVLPPGRGSRAPSSTDTRTGFHVLPHGPLGCGPVILMCGAGFGHFEWLAGGGAGQDVGRSCILVSIAGKNVMLDCGMHMGFNDDRRFPDFSYITQNGRLTDFLDCVIISHFHLDHCGALPYFSEMVGYDGPIYMTHPTQAICPILLEDY

SEQ ID NO: 72546 - protein, 307 aa, Homo sapiens
MEFLRNNRTTEVPRLDSMKPLEKHYSVVLPTVSHSGFLYKTASAGKLLQDRRAREEFSRRWCVLGDGVLSYFENERAVTPNGEIRASEIVCLAVPPPDTHGFEHTFEVYTEGERLYLFGLESAEQAHEWVKCIAKAFVPPLAEDLLARDFERLGRLPYKAGLSLQRAQEGWFSLSGSELRAVFPEGPCEEPLQLRKLQELSIQGDSENQVLVLVERRRTLYIQGERRLDFMGWLGAIQKAAASMGDTLSEQQLGDSDIPVIVYRCVDYITQCGLTSEGIYRKCGQTSKTQRLLESLRQDARSVHLKE

SEQ ID NO: 72547 - protein, 128 aa, Homo sapiens
  MOD_RES (1)..(1): Any amino acid
XEPVMRVTLGTAKYEHAFNSIVWRINRLPDKNSASGHPHCFFCHLELGSDREVPSRFANHVNVEFSMPTTSASKASVRSISVEDKTDVRKWVNYSAHYSYQVEIEQKKSLKPDFEGDEMENPKECGVQ

SEQ ID NO: 72548 - protein, 161 aa, Homo sapiens
MPVSTSLHQDGSQERPVSLTSTTSSSGSSCDSRSAMEEPSSSEAPAKNGAGSLRSRHLPNSNNNSSSWLNVKGPLSPFNSRAAAGPAHHKLSYLGRVVREIVETERMYVQDLRSIVEDYLLKIIDTPGLLKPEQVSALFGNIENIYALNSQLLRDLDSCNS

SEQ ID NO: 72549 - protein, 272 aa, Homo sapiens
  MOD_RES (1)..(1): Any amino acid
XFKSYKLDDTQASRKKMEELKTGGEHVYFAKFLTSEKLMDLQLSDSNFRRHILLQYLILFQYLKGQVKFKSSNYVLTDEQSLWIEDTTKSVYQLLSENPPDGERFSKMVEHILNTEENWNSWKNEGCPSFVKESVCFVHDRTSDTKPTRIIRKRTAPEDFLGKGPTKKILMGNEELTRLWNLCPDNMEACKSETREHMPTLEEFFEEAIEQADPENMVENEYKAVNNSNYGWRALRLLARRSPHFFQPTNQQFKSLPEYLENMVIKLAKELP

SEQ ID NO: 72550 - protein, 100 aa, Homo sapiens
MQSSPSPAHPQLPVLQTQMVSDGMTGSNPVSPASSSSPASSGAGGISPQHIAQDSSLDGPPGPPDGATVPLEGFSLSQAADLANKGPKWEKSHAEIAEQA

SEQ ID NO: 72551 - protein, 82 aa, Homo sapiens
MKGWGWLALLLGALLGTAWARRSQDLHCGACRALVDELEWEIAQVDPKKTIQMGSFRINPDGSQSVVEIPEIARHGFTYCGR

SEQ ID NO: 72552 - protein, 51 aa, Homo sapiens
MRRRVVLLSQEMDAGLQAWQLRQQKLQEEQRKQENALKPKGASLKSPLPSQ

SEQ ID NO: 72553 - protein, 184 aa, Homo sapiens
  MOD_RES (1)..(1): Any amino acid
XSQKLMAGFVECLDCEDAEEFVRLEEGSELEKKLVAIRHETRIHILNLLITSLECNPPNLALYLLGFELKKPVSTTNLQDPGVLGCPRTCLHAILNILEKGTEGRTGPVAVRESPQLAELCYQLCACSDTSGPTMRYLRTSQDFLFSQLQYLPFSNKEYEISMLNQMSWLMKTASIELRVTSLN

SEQ ID NO: 72554 - protein, 151 aa, Homo sapiens
MLDKAPVLKVIVNSLKNMINTFVPSGKIMQVVDEKLPGLLGNFPGPFEEEMKGIAAVTDIPLGEIISFNIFYELFTICTSIVAEDKKGHLIHGRNMDFGVFLGWNINNDTWVITEQLKPLTVNLDFQRNNKTVFKASSFAGYVGMLTGFKP

SEQ ID NO: 72555 - protein, 138 aa, Homo sapiens
MSPKPRASGPPAKAKEAGKRKSSSQPSPSDPKKKTTKVAKKGKAVRRGRRGKKGAATKMAAVTAPEAESGPAAPGPSDQPSQELPQHELPPEEPVSEGTQHDPLSQESELEEPLSQESEVEEPLSVTAKYSPISESSD

SEQ ID NO: 72556 - protein, 343 aa, Homo sapiens
MAASQAVEEMRSRVVLGEFGVRNVHTTDFPGNYSGYDDAWDQDRFEKNFRVDVVHMDENSLEFDMVGIDAAIANAFRRILLAEVPTMAVEKVLVYNNTSIVQDEILAHRLGLIPIHADPRLFEYRNQGDEEGTEIDTLQFRLQVRCTRNPHAAKDSSDPNELYVNHKVYTRHMTWIPLGNQADLFPEGTIRPVHDDILIAQLRPGQEIDLLMHCVKGIGKDHAKFSPVATASYRLLPDITLLEPVEGEAAEELSRCFSPGVIEVQEVQGKKVARVANPRLDTFSREIFRNEKLKKVVRLARVRDHYIYGVSLCCSGWRAVARSRLTATSTSRVQAILLPQPLE

SEQ ID NO: 72557 - protein, 134 aa, Homo sapiens
MSMLAERRRKQKWAVDPQNTAWSNDDSKFGQRMLEKMGWSKGKGLGAQEQGATDHIKVQVKNNHLGLGATINNEDNWIAHQDDFNQLLAELNTCHGQETTDSSDKKEKKSFSLEEKSKISKNRVHYMKFTKVYC

SEQ ID NO: 72558 - protein, 211 aa, Homo sapiens
MALEGMSKRKRKRSVQEGENPDDGVRGSPPEDYRLGQVASSLFRGEHHSRGGTGRLASLFSSLEPQIQPVYVPVPKQTIKKTKRNEEEESTSQIERPLSQEPAKKVKAKKKHTNAEKKLADSSPFRLMLRPCLSISSNTLYCIYRFTIYFWESALASADLEEEIHQKQGQKRKNSQPGVKVADRKILDDTEDTVVSQRKKIQINQEEERLK

SEQ ID NO: 72559 - protein, 603 aa, Homo sapiens
MAVARKIRTLLTVNILVFVGIVLFSVYCRLQGRSQELVRIVSGDRRVRSRHAKVGTLGDREAILQRLDHLEEVVYNQLNGLAKPIGLVEGPGGLGQGGLAATLRDDGQEAEGKYEEYGYNAQLSDRISLDRSIPDYRPRKCRQMSYAQDLPQVSVVFIFVNEALSVILRSVHSVVNHTPSQLLKEVILVDDNSDNVELKFNLDQYVNKRYPGLVKIVRNSRREGLIRARLQGWKAATAPVVGFFDAHVEFNTGWAEPALSRIREDRRRIVLPAIDNIKYSTFEVQQYANAAHGYNWGLWCMYIIPPQDWLDRGDESAPIRTPAMIGCSFVVDREYFGDIGLLDPGMEVYGGENVELGMRVWQCGGSMEVLPCSRVAHIERTRKPYNNDIDYYAKRNALRAAEVWMDDFKSHVYMAWNIPMSNPGVDFGDVSERLALRQRLKCRSFKWYLENVYPEMRVYNNTLTYGEVRNSKASAYCLDQGAEDGDRAILYPCHGMSSQLVRYSADGLLQLGPLGSTAFLPDSKCLVDDGTGRMPTLKKCEDVARPTQRLWDFTQSGPIVSRATGRCLEVEMSKDANFGLRLVVQRCSGQKWMIRNWIKHARH

SEQ ID NO: 72560 - protein, 45 aa, Homo sapiens
MITLHEMAETDEGWLDVVQSLIRVIPLEDPLGPAVITLLLDECPL

SEQ ID NO: 72561 - protein, 28 aa, Homo sapiens
MSGTSSHESFYDSLSDMQEESKNTDFFP

SEQ ID NO: 72562 - protein, 119 aa, Homo sapiens
MKVLLRLICFIALLISSLEADKCKEREEKIILVSSANEIDVRPCPLNPNEHKGTITWYKDDSKTPVSTEQASRIHQHKEKLWFVPAKVEDSGHYYCVVRIANLYFLTIYTLVESKIGSS

SEQ ID NO: 72563 - protein, 41 aa, Homo sapiens
  MOD_RES (1)..(1): Any amino acid
XLLQQEWPRGENLFLKAVNKICQQGNFQYENFFNYVTTCRY

SEQ ID NO: 72564 - protein, 102 aa, Homo sapiens
MMEIFSETKDVFQLKDLEKIAPKEKGITAMSVKEVLQSLVDDGMVDCERIGTSNYYWAFPSKALHARKHKLEVLESQLSEGSQKHASLQKSIEKAKIGRCET

SEQ ID NO: 72565 - protein, 28 aa, Homo sapiens
MVNMIALTALHTEEENYNVVAPGCLSQS

SEQ ID NO: 72566 - protein, 78 aa, Homo sapiens
MSKIRGLPPEVREPGPGVELGVENGLLCQLIHSPEFNLFSNSVVFESNFIQLDKTEDPEKNDTGFLQPMTLKCIWGGQ

SEQ ID NO: 72567 - protein, 156 aa, Homo sapiens
MTSRKKVLLKVIILGDSGVGKTSLMNQYVNKKFSNQYKATIGADFLTKEVMVDDRLVTMQIWDTAGQERFQSLGVAFYRGADCCVLVFDVTAPNTFKTLDSWRDEFLIQASPRDPENFPFVVLGNKIDLENRQVSTNDDRYSGTGLVLQQKQHSLL

SEQ ID NO: 72568 - protein, 88 aa, Homo sapiens
MLNGAGLDKALKMSLPRRSRIRSSVGPVRSSLGYKKAEDEMSRATSVGDQLEAPARTIYLNQPHLNKFRDNQIRSDTRQTMQLTKRKQ

SEQ ID NO: 72569 - protein, 82 aa, Homo sapiens
QPESAEKHVTQRLQPERGSPKKCEAEEAEPPAATQPQTSETQTSHLPESERIHHTVFFSGHSHASPGHMKLGVIEFPVPPLQ

SEQ ID NO: 72570 - protein, 86 aa, Homo sapiens
MNVPETMNEVLDMSDDEGNRCTWYKIPKVQEFTVKSEDAMTGDTDKYLGPQDLKELGDDSLPAEGYMGFSLGARSARYFVVAVFHS

SEQ ID NO: 72571 - protein, 137 aa, Homo sapiens
MKASGTLREYKLKKMKKSSGEIVYCGQVFEKSPLRVKNFGIWLRYDSRSGTHNMYREYRDLTTAGAVTQCYRDMGARHRARAHSIQIMKVEEIAASKCRRPAVKQFHDSKIKFPLPHRVLRRQHKPRFTTKRPNTFF

SEQ ID NO: 72572 - protein, 1297 aa, Homo sapiens
AHIYSLGATLKAALEYVAEPTLEPRLSQDLEALLSRMQAEDPGDRPDLESIIALCEEKLQLTSSCRVCRSLSAVGRRVLSIESFGALQDVSESSWRERPAPGNAGPRRPPGDPSTDPEVLPTPEGPESETSRGPRASPTKALLSTPVRNGESHSREGLAGLVLDAERTLGELDRDALRRSRLRKVQTFPRLLSDSPEATLCLPLTRGKSQLPISELFSPDPRKAFLDRKNGLSSFQAQPKCRLWPEQEPEHQLGRVPCAGRSTDRGPGVPGSPGQPETSHPSQGPAEAPADPRDASGEAQTPRDDERIPEGARQLESAAAEQWVSLQDLLSQLGRPFREYELWALCLACLRALQTRPEHPAYLCLDSVLVAEDGAVLFQPPPANGSYDSFFLAPELAEERLVTEKASVYCVAAVLWTAAKFSVPRNHKLALPRRLKTLLLDMARRSAPERPSAAEAIKVCGSYLLQRGMDSRKILAHLRASICQVYQEEETISLQNAFSVVELKPSVAPAPEPSPGFLPVNSDTGLVAVPGPVPGQHPCGEEATQLPAAFTSEATHFKPIVLAQNASVARDQPALAQEESEERGGQREGEGEEKLSLEAHAGSPSLKTPDGPVPGPGPQGAAPEPLGASVQRDSAQGRPCPPPQAPANQPEGASSAAPGSPVPAPPTKASALPVEQGPAEPIPPGVASGGLRPDALGPTTAHHGPRHPPKPPRSKATERPGQEPEGPGATPAGERDDQSPDSVPERPRPADRRLCLPCVDASPLPGRTACPSLQEATRLIQEEFAFDGYLDNGLEALIMGEYIFALKDLTFATFCGAISEKFCDLYWDEKLLQNLFKVVNGQASPSPSTAEEAGSQLEGSQSPRSPSSKRPSLHRLGKEKPAMARTSSRAPCSPTSVSDVDSDALSRGNFEVGFRPQRSVKAERAQQPEAGEDRRPAGGASDVEAVTRLARSKGVGPALSPGPAGFQSCSPGWCSAFYEADCFGADVHNYVKDLGRQQADGALPDAQSPELEQQLMMEKRNYRKTLKFYQKLLQKEKRNKGSDVKTMLSKLKGQLEEMKSRVQFLSLVKKYLQVMYAERWGLEPCTLPVIVNIAAAPCDTLDFSPLDESSSLIFYNVNKHPGGRQKARILQAGTPLGLMAYLYSSDAFLEGYVQQFLYTFRYFCTPHDFLHFLLDRINSTLTRAHQDPTSTFTKIYRRSLCVLQAWVEDCYAVDFPRNSGLLGKLEDFISSKILPLDGSAKHLLGLLEVGMDRRAEGNPRGTDLENPREAEEDARPFNALCKRLSEDGISRKRGHGA

SEQ ID NO: 72573 - protein, 247 aa, Homo sapiens
MKTPNAQEAEGQQTRAAAGRATGSANMTKKKVSQKKQRGRPSSQPRRNIVGCRISHGWKEGDEPITQWKGTVLDQVPINPSLYLVKYDGIDCVYGLELHRDERVLSLKILSDRVASSHISDANLANTIIGKAVEHMFEGEHGSKDEWRGMVLAQAPIMKAWFYITYEKDPVLYMYQLLDDYKEGDLRIMPESSESPPTEREPGGVVDGLIGKHVEYTKEDGSKRIGMVIHQVEAKPSVYFIKFDDDF

SEQ ID NO: 72574 - protein, 158 aa, Homo sapiens
MADRAAAERACKDPNPIIDGRKANVNLAYLGAKPRSLQTGFAIGVQQLHPTLIQRTYGLTPHYIYPPAIVQPSVVIPAAPVPSLSSPYIEYTPASPAYAQYPPATYDQYPYAASPATAASFVGYSYPAAVPQALSAAAPAGTTFVQYQAPQLQPDRMQ

SEQ ID NO: 72575 - protein, 114 aa, Homo sapiens
MGGLPAWLLEKESILLRSSDPDYLAAVDKWLGVLLPKMKPLLYQNGGPVITVQVENEYGSYFACDFDYLRFLQKRFRHHLGDDVVLFTTDGAHKTFLKCGALQGLYTTVDFGTG

SEQ ID NO: 72576 - protein, 63 aa, Homo sapiens
MSNNGLDIQDKPPAPPMRNTSTMIGAGSKDAGTLNHGSKPLPPNPEEKKKKDRFYRSILPGDK

SEQ ID NO: 72577 - protein, 204 aa, Homo sapiens
MKLWVSALLMAWFGVLSCVQAEFFTSIGHMTDLIYAEKELVQSLKEYILVEEAKLSKIKSWANKMEALTSKSAADAEGYLAHPVNAYKLVKRLNTDWPALEDLVLQDSAAGFIANLSVQRQFFPTDEDEIGAAKALMRLQDTYRLDPGTISRGELPGTKYQAMLSVDDCFGMGRSAYNEGDYYHTVLWMEQVLKQLDAGEEATT

SEQ ID NO: 72578 - protein, 52 aa, Homo sapiens
  MOD_RES (1)..(1): Any amino acid
XPFSLSWWFWLTLTGVACSCAVGSVCSVTCSPEQWLCWSSRSSCTYCSSTST

SEQ ID NO: 72579 - protein, 625 aa, Homo sapiens
MCGIFAYLNYHVPRTRREILETLIKGLQRLEYRGYDSAGVGFDGGNDKDWEANACKIQLIKKKGKVKALDEEVHKQQDMDLDIEFDVHLGIAHTRWATHGEPSPVNSHPQRSDKNNEFIVIHNGIITNYKDLKKFLESKGYDFESETDTETIAKLVKYMYDNRESQDTSFTTLVERVIQQLEGAFALVFKSVHFPGQAVGTRRGSPLLIGVRSEHKLSTDHIPILYRTGKDKKGSCNLSRVDSTTCLFPVEEKAVEYYFASDASAVIEHTNRVIFLEDDDVAAVVDGRLSIHRIKRTAGDHPGRAVQTLQMELQQIMKGNFSSFMQKEIFEQPESVVNTMRGRVNFDDYTVNLGGLKDHIKEIQRCRRLILIACGTSYHAGVATRQVLEELTELPVMVELASDFLDRNTPVFRDDVCFFLSQSGETADTLMGLRYCKERGALTVGITNTVGSSISRETDCGVHINAGPEIGVASTKAYTSQFVSLVMFALMMCDDRISMQERRKEIMLGLKRLPDLIKEVLSMDDEIQKLATELYHQKSVLIMGRGYHYATCLEGALGRPVVICDKEDTETIKNTKRTIKVPHSVDCLQGILSVIPLQLLAFHLAVLRGYDVDFPRNLAKSVTVE

SEQ ID NO: 72580 - protein, 334 aa, Homo sapiens
KEIRRFCLMTLRNFGMGKRSIEDRVQEEARCLVEELRKTNASPCDPTFILGCAPCNVICSVIFHDRFDYKDQRFLNLMEKFNENLRILSSPWIQVCNNFPALIDYLPGSHNKIAENFAYIKSYVLERIKEHQESLDMNSARDFIDCFLIKMEQEKHNQQSEFTVESLIATVTDMFGAGTETTSTTLRYGLLLLLKYPEVTAKVQEEIECVVGRNRSPCMQDRSHMPYTDAVVHEIQRYIDLLPTNLPHAVTCDVKFKNYLIPKGTTIITSLTSVLHNDKEFPNPEMFDPGHFLDKSGNFKKSDYFMPFSAALKNLWPCVHSVFWPGTHGGAAWI

SEQ ID NO: 72581 - protein, 36 aa, Homo sapiens
MAGEQEAIDPSCGCWRDGVSPRQNGLEDGWTSQGFC

SEQ ID NO: 72582 - protein, 43 aa, Homo sapiens
MSEQGDLNQAIAEEGGTEQETATPENGIVKSESLDEEEKLELQ

SEQ ID NO: 72583 - protein, 40 aa, Homo sapiens
  MOD_RES (1)..(1): Any amino acid
XRFDVNNCSICYHWVTSRPQEPAVFSADYRGCHVLEKVPT

SEQ ID NO: 72584 - protein, 103 aa, Homo sapiens
  MOD_RES (1)..(1): Any amino acid
XIEGEKEVKSTAPETAIECTQAPAPASEDEKVVVEPPEGEEKVEKAEVKERTEEPMETEPKGVLLVAQAGVQWCDLGLLQPPPPEFKRFSCLSLLSSWDYRCC

SEQ ID NO: 72585 - protein, 117 aa, Homo sapiens
MIPGKYRSVSGRAANNVNCGLHLVIQTSSLPEKNKVEFKLNKDTSSFPGRLLQHDLERNYSSRQELYGLEMKTATRSLSAFGDSSIKTPSKSRIQQGCHSAGPNISGDHINLVSSSL

SEQ ID NO: 72586 - protein, 49 aa, Homo sapiens
MQASPIRIPTVSNDIDWDFCFHMPPSSGQETCYISQEYTVDLEGKYDLK

SEQ ID NO: 72587 - protein, 55 aa, Homo sapiens
  MOD_RES (1)..(1): Any amino acid
XEIRVTPLGAGQDVGRSCILVSIAGKNVMLDCGMHMGFNDDPGVLVPPAGWECPA

SEQ ID NO: 72588 - protein, 170 aa, Homo sapiens
MVLTLGESWPVLVGRRFLSLSAADGSDGSHDSWDVERVAEWPWLSGTIRAVSHTDVTKKDLKVCVEFDGESWRKRRWIEVYSLLRRAFLVEHNLVLAERKSPEISERIVQWPAITYKPLLDKAGLGSITSVRFLGDQQRVFLSKDLLKPIQDVNSLRLSLTDNQIVSKEF

SEQ ID NO: 72589 - protein, 94 aa, Homo sapiens
MAPRVATGTPEPNGGGGGKIDNTVEITPTSNGQVGTLGDAVPTEQLQASQCQRRQRRQRCPSSQRRQPCRHQYRPLVQRLRPAGLQPLPQGLGL

SEQ ID NO: 72590 - protein, 40 aa, Homo sapiens
MKMANSLRGEVLKLYKNKYIIFLFEAAVSWTRLSKRSRLF

SEQ ID NO: 72591 - protein, 354 aa, Homo sapiens
MSGPVPSRARVYTDVNTHRPREYWDYESHVVEWGNQDDYQLVRKLGRGKYSEVFEAINITNNEKVVVKILKPVKKKKIKREIKILENLRGGPNIITLADIVKDPVALDYCHSMGIMHRDVKPHNVMIDHEHRKLRLIDWGLAEFYHPGQEYNVRVASRYFKGPELLVDYQMYDYSLDMWSLGCMLASMIFRKEPFFHGHDNYDQLVRIAKVLGTEDLYDYIDKYNIELDPRFNDILGRHSRKRWERFVHSENQHLVSPEALDFLDKLLRYDHQSRLTAREAMEHPYFYTVVKDQARMGSSSMPGGSTPVSSANMMSGISSVPTPSPLGPLAGSPVIAAANPLGMPVPAAAGAQQ

SEQ ID NO: 72592 - protein, 243 aa, Homo sapiens
MGSNSGQAGRHIYKSLADDGPFDSVEPPKRPTSRLIMHSMAMFGREFCYAVEAAYVTPVLLSVGLPSSLYSIVWFLSPILGFLLQPVVGSASDHCRSRWGRRRPYILTLGVMMLVGMALYLNGATVVAALIANPRRKLVWAISVTMIGVVLFDFAADFIDGPIKAYLFDVCSHQDKEKGLHYHALFTDSQGNDIKVTAESTGEHASSLPLPLHQPPHWMDSLPVQHAVLHRFHGPDCVPRGSL

SEQ ID NO: 72593 - protein, 197 aa, Homo sapiens
MHKGLSERSQAVGAVLSLLLVALTCCLLALLLYKKERRETVISKLTTCCRRSSNVSYKYSKVNKEEETDENETEWLMEEIQLPPPRQGKEGQENGHITTKSVKALSSLHGDDQDSEDEVLTIPEVKVHSGRGAGAESSHPVRNAQSNALQEREDDRVGLVRGEKARKGKSSSAQQKTVSSTKLVSFHDDSDEDLLHI

SEQ ID NO: 72594 - protein, 78 aa, Homo sapiens
MLLTCILWRLTKKHTVSQEVRSIPSGGSKAAQKKIKDICPQDSGNGSQVLQLETAALHHQLHLLLLGAGCLLSAQHVL

SEQ ID NO: 72595 - protein, 162 aa, Homo sapiens
MAYRVLGRAGPPQPRRARRLLFAFTLSLSCTYLCYSFLCCCDDLGRSRLLGAPRCLRGPSAGGQKLLQKSRPCDPSGPTPSEPSAPSAPAAAVPAPRLSGSNHSGSPKLGTKRLPQALIVGVKKGGTRAVLEFIRVHPDVRALGTEPHFFDRNYGRGLDWYR

SEQ ID NO: 72596 - protein, 155 aa, Homo sapiens
MHIQFPSKPTLPRACWEGRITAGSPGMPPDEIEIEPVRQSSDKMLYCEAESPPTVEKVKPARENSETDLEIEGEHGHLGAVRAASPQKLEKSGFQELSSHSFPESALRMACGGNVAERPARFCLESSSGLAGESSCSFPRLSPASGAVPSRRLVK

SEQ ID NO: 72597 - protein, 73 aa, Homo sapiens
MPDVVQTRQQAYRDKLAQQQAAAAAAAAAAASQQGSAKNGENTANGEENGAHTIANNHTDMMEVDGDVEIPPN

SEQ ID NO: 72598 - protein, 61 aa, Homo sapiens
MVELMFPLLLLLLPFLLYMAAPQIRSLPPNPSAARETKGISPIKDSKCVFPRTSPGKDPLP

SEQ ID NO: 72599 - protein, 101 aa, Homo sapiens
MLWDLNEGKHLYTLDGGDIINALCFSPNRYWLCAATGPSIKIWDLEGKIIVDELKQEVISTSSKAEPPQCTSLAWSADGQTLFAGYTDNLVRVWQVTIGTR

SEQ ID NO: 72600 - protein, 38 aa, Homo sapiens
MKSCGKRFHDEVGKFRFLNELIKVVSPKYLGSRTSEKV

SEQ ID NO: 72601 - protein, 71 aa, Homo sapiens
  MOD_RES (1)..(1): Any amino acid
XKQADGTIWCSHENLHQEDLEKEGGIEFPQIYYDRFSGKKFGEKMAFIPQNLFLFQHQEPMKKMVGLFFLW

SEQ ID NO: 72602 - protein, 58 aa, Homo sapiens
MPRAPKRQRCMPEEDLQSQSETQGLEGAQAPLAVEEDASSSTSTSSSFPSSFPSSSSS

SEQ ID NO: 72603 - protein, 59 aa, Homo sapiens
MRMTMEEMKNEAETTSMVSMPLYAVMYPVFNELERVNLSAAQTLRAAFIKGKKERKSSA

SEQ ID NO: 72604 - protein, 447 aa, Homo sapiens
MTDNSNNQLVVRAKFNFQQTNEDELSFSKGDVIHVTRVEEGGWWEGTLNGRTGWFPSNYVREVKASEKPVSPKSGTLKSPPKGFDTTAINKSYYNVVLQNILETENEYSKELQTVLSTYLRPLQTSEKLSSANISYLMGNLEEICSFQQMLVQSLEECTKLPEAQQRVGGCFLNLMPQMKTLYLTYCANHPSAVNVLTEHSEELGEFMETKGASSPGILVLTTGLSKPFMRLDKYPTLLKELERHMEDYHTDRQDIQKSMAAFKNLSAQCQEVRKRKELELQILTEAIRNWEGDDIKTLGNVTYMSQVLIQCAGSEEKNERYLLLFPNVLLMLSASPRMSGFIYQGKLPTTGMTITKLEDSENHRNAFEISGSMIERILVSCNNQQDLQEWVEHLQKQTKVTSVGNPTIKPHSVPSHTLPSHPVTPSSKHADSKPAPLTPAYHTLPH

SEQ ID NO: 72605 - protein, 69 aa, Homo sapiens
MSESWQQPPQTQPQQPQPPQPQHHAEPPPALAEHTLPPGTAENPLGCAVYGILLQPDPGLQPPQHAPLQ

SEQ ID NO: 72606 - protein, 141 aa, Homo sapiens
MQDYNKDDMSYRRISAVEPKTALPFNRFLPNKSRQPSYVPAPLRKKKPDKHEDNRRSWASPVYTEADGTFSSQFLLLQALQTYSDDILSSETHTKIDPTSGPRLITRRKNLSYAPGYRRDDLEMAALDPDLENDDFFVRKT

SEQ ID NO: 72607 - protein, 49 aa, Homo sapiens
MKMTVDFEECLKDSPRFRCRESRGLFYRLLFPKSLVQCVTSILELGSPR

SEQ ID NO: 72608 - protein, 30 aa, Homo sapiens
MGSRNSSSAGSGSGDPSEGLPRRGAGLRRS

SEQ ID NO: 72609 - protein, 473 aa, Homo sapiens
MAERAALEELVKLQGERVRGLKQQKASAELIEEEVAKLLKLKAQLGPDESKQKFVLKTPKGTRDYSPRQMAVREKVFDVIIRCFKRHGAEVIDTPVFELKETLMGKYGEDSKLIYDLKDQGGELLSLRYDLTVPFARYLAMNKLTNIKRYHIAKVYRRDNPAMTRGRYREFYQCVNDRRILDGMFAICGVSDSKFRTICSSVDKLDKVSWEEVKNEMVGEKGLAPEVADRIGDYVQQHGGVSLVEQLLQDPKLSQNKQALEGLGDLKLLFEYLTLFGIDDKISFDLSLARGLDYYTGVIYEAVLLQTPAQAGEEPLGVGSVAAGGRYDGLVGMFDPKGRKVPCVGLSIGVERIFSIVEQRLEALEEKIRTTETQVLVASAQKKLLEERLKLVSELWDAGIKAELLYKKNPKLLNQLQYCEEAGIPLVAIIGEQELKDGVIKLRSVTSREEVDVRREDLVEEIKRRTGQPLCIC

SEQ ID NO: 72610 - protein, 415 aa, Homo sapiens
MIAKEELESVLEEEVDDFPTFGDSQSDYDTVVHPFYAYWQSFCTQKNFAWKEEYDTRQASNRWEKRAMEKENKKIRDKARKEKNELVRQLVAFIRKRDKRVQAHRKLVEEQNAEKARKAEEMRRQQKLKQAKLVEQYREQSWMTMANLEKELQEMEARYEKEFGDGSDENEMEEHELKDEEDGKDSDEAEDAELYDDLYCPACDKSFKTEKAMKNHEKSKKHREMVALLKQQLEEEEENFSRPQIDENPLDDNSEEEMEDAPKQKLSKKQKKKKQKPAQNYDDNFNVNGPGEGVKVDPEDTNLNQDSAKELEDSPQENVSVTEIIKPCDDPKSEAKSVPKPKGKKTKDMKKPVRVPAEPQTMSVLISCTTCHSEFPSRNKLFDHLKATGHARAPSSSSLNSATSSQSKKEKRKNR

SEQ ID NO: 72611 - protein, 225 aa, Homo sapiens
  MOD_RES (1)..(1): Any amino acid
XPADRVPPRSPPSPARWSLGRKRRADGRRWRPEDAEEAEHRGAERRPERYKRKLLINDFGRERKSSSGSSDSKESMSTVPADFETDESVLMRRQKQINYGKNTIAYDRYIKEVPRHLRQPGIHPKTPNKFKKYSRRSWDQQIKLWKVALHFWDPPAEEGCDLQEIHPVDLESAESSSEPQTSSQDDFDVYSGTPTKVRHMDSQVEDEFDLEACLTEPLRDFSAMS

SEQ ID NO: 72612 - protein, 1889 aa, Homo sapiens
QQLCILPPHHVNVLPPLHIKTEAVWLAYKLGDWKTSVSIGVAFQLFCKRDSNFMRSKKKSLNLPLRMTPAQIFQEKLQCVLGQPASLEAKNEMGSKYKQFTDPIEEEDANLLFGSVQEVLKASVMADADILSETFQLLIDSAKDFSKRLWGLVPFGLYLPAPPLYCPQPAILSEEDGDDLLLKAEKNNRQKVSGILQRVLLLFRAAQCSFPVAQWYILQLRWARKVMQKIRMKGSLPSLSPFPQSLLNYCKGGIAFFRPGAAGDHKLDEVSIRAIGCFRELCALCWMLHVRDKLSYSCRQYQKARENVKGEKDLEVEFDSCMIEHCLSAVEWAYRMLPFSRFFNMEELIQDIILSLIGELPPIRKVAEIFVKAFPYPEDVRVPLRDKYHSLHQRLRHCVVKGPQTEEMMSVVMHSIQKVRVKALKRVQRNIGSFEVNIWEPIEEEKPDEAPGVDRYSLGTSLSRSTLTELGDSVVHSDADTFSEALSVEEKSRINIYQRNAPNHMELTSIHKPTDKRKMCNQKENPTKKEDHEKLSQNTLPVIGVWEFERDDDEYIKFLDLFLSYILERDLPYSRDADIPFLTSFSGKLREHELNSLLFDVHTTLKRHQSKTKSQNVFRAGSCFVVAPESYESEKSSSLNDEYGMHLENQKLSSSVLVNQGIKPFLQYPSNEVNKNEGMSGLFGLKQRSIYKIQDDTREKCLIQRSSNHIFWTPKSIKTRRCIFKAIQCNDINPQEDLPLALNTFGSIGRLLEWMIRWSNRRLLCDSGITESSSEYSPVIRVKTSTAAILTSLWLLEQPYFATYKAKNAIIKMVENRDTGCQIGPNIERESKSDAGGSVAVATPGGTEERNGQNKSCQNILNRMPTEAKNPDIKEINDDIISITHNTKKEFIDIDENLLEVEAFTEEEMDMHISDYEDIEESVGGFRSPSLAICMMTLPQQLEEEFTEEVQCQREEPLETIMEEKSTEQKGMIEAFSHPGHTTPQSMQVDTSSEISSAQISTYKEKSSSVPLLISNGVNVASQPPAPTPQKTQRNEFTAQLPDCSESVRQMLQDEMFKLVQLQQINFMSLMQIVGSSFANLPDTQQLVQQSQSVHLGESQESNLRGCGDVEDSNKNLKERFFIKPQSMGENAREPRKNSPHCHEGTIPSGQNSTGNVQNVPHGSIPLCQLNGQPRKKGPIPSSQNLPSTSFYPAPAGNTHLYLLSTPSVVQKAPRLIPHAKTFSPGDGFPLLQFKSKQEFQPLFLHTGSIPQVPFRPLPQPREAWGLSDSFQPALPQRAAQTTPASHLNVSQYNTEARKKEVEQKTWAETVITEIPNHVNLDQYVGQENLTPQQDSSVFIKPEKLFDVKPGTLEISPHHSFGLPLLYLPLKPPNMFPSTSRASITVPSTPIQPIAEERKYPRLSLLHSHLSPENRCKKTQLIPLENLIAFKQSQQKLTHNLFEQGDAGHLQLLKVKIEPPEVRQGKDSKKRQRRRAEKELQEKRCEKLRRKPNVTFRPENSIINNDDSEIIKKPKEQQEHCGSHPLDDFDVPFEMLQDDNTSAGLHFMASVKKKAIGSQDASTNTDPEHEPLTAPQLLVPDVYLNLKLSSEMSEKPWSPSIPHTVTNLVGHTYINVIDIEANDLLQELPVREEPSNDNVIKQQSDHLAVPSSAELHYMAASVTNAVPPHNFKSQEVTPACLDGKSLRAGITEVKEPSVTSPTPSDIQQNKGLPKPEFRFKGQSTKSDSAEDYLLWKRLQGVSAACPAPSSAAHQLEHLSAKLQKIDEQLLAIQNIAENIEQDFPKPEMLDLHCDKIGPVDHIEFSSGPEFKKTLASKTISISEEVRFLTHMDEEDQSDKKETSEPEFSITENYSGQKTCVFPTADSAVSLSSSSDQNTTSPVFQYIRSR

SEQ ID NO: 72613 - protein, 303 aa, Homo sapiens
MISVIVVMTIFLVVLYKYRCYKFIHGWLIMSSLMLLFLFTYIYLGEVLKTYNVAMDYPTLLLTVWNFGAVGMVCIHWKGPLVLQQAYLIMISALMALVFIKYLPEWSAWVILGAISVYDLVAVLCPKGPLRMLVETAQERNEPIFPALIYSSAMVWTVGMAKLDPSSQGALQLPYDPEMEDSYDSFGEPSYPEVFEPPLTGYPGEELEEEEERGVKLGLGDFIFYSVLVGKAAATGSGDWNTTLACFVAILIGLCLTLLLLAVFKKALPALPISITFGLIFYFSTDNLVRPFMDTLASHQLYI

SEQ ID NO: 72614 - protein, 156 aa, Homo sapiens
MQRADSEQPSKRPRCDDSPRTPSNTPSAEADWSPGLELHPDYKTWGPEQVCSFLRRGGFEEPVLLKNIRENEITGALLPCLDESRFENLGVSSLGERKKLLSYIQRLVQIHVDTMKVINDPIHGHIELHPLLVRIIDTPQFQRLRYIKQLGGGWGI

SEQ ID NO: 72615 - protein, 136 aa, Homo sapiens
MWLEILLTSVLGFAIYWFISRDKEETLPLEDGWWGPGTRSAAREDDSIRPFKVETSDEEIHDLHQRIDKFRFTPPLEDSCFHYGFNSNYLKKVISYWRNEFDWKKQVEILNRYPHFKTKIEGLDIHFIHVKPPQLP

SEQ ID NO: 72616 - protein, 632 aa, Homo sapiens
MGGPAAPRGAGRLRALLLALVVAGIPAGAYNLDPQRPVHFQGPADSFFGYAVLEHFHDNTRWVLVGAPKADSKYSPSVKSPGAVFKCRVHTNPDRRCTELDMARGKNRGTSCGKTCREDRDDEWMGVSLARQPKADGRVLACAHRWKNIYYEADHILPHGFCYIIPSNLQAKGRTLIPCYEEYKKKYGEEHGSCQAGIAGFFTEELVVMGAPGSFYWAGTIKVLNLTDNTYLKLNDEVIMNRRYTYLGYAVTAGHFSHPSTIDVVGGAPQDKGIGKVYIFRADRRSGTLIKIFQASGKKMGSYFGSSLCAVDLNGDGLSDLLVGAPMFSEIRDEGQVTVYINRGNGALEEQLALTGDGAYNAHFGESIASLDDLDNDGFPDVAIGAPKEDDFAGAVYIYHGDAGGIVPQYSMKLSGQKINPVLRMFGQSISGGIDMDGNGYPDVTVGAFMSDSVVLLRARPVITVDVSIFLPGSINITAPQCHDGQQPVNCLNVTTCFSFHGKHVPGEIGLNYVLMADVAKKEKGQMPRVYFVLLGETMGQVTEKLQLTYMEETCRHYVAHVKRRVQDVISPIVFEAAYSLSEHVTGEEERELPPLTPVLRWKKGQKIAQKNQVRTLKLILSTQGGSCTEQK

SEQ ID NO: 72617 - protein, 124 aa, Homo sapiens
IFCLHGGLSPSIDTLDHIRALDRLQEVPHEGPMCDLLWSDPDDRGGWGISPRGAGYTFGQDISETFNHANGLTLVSRAHQLVMEGYNWCHDRNVVTIFSAPNYCYRCGNQAAIMELDDTLKYSL

SEQ ID NO: 72618 - protein, 127 aa, Homo sapiens
  MOD_RES (1)..(1): Any amino acid
XIMLLERTLQLKEEENKRLNQRLMSQSMSSVSSRHSEKIAIRDFQVGDLVLIILDERHDNYVLFTVSPTLYFLHSESLPALDLKPASGASRRPWVLGKVMEKEYCQAKKCSFITPKTAGHLFMQKSA

SEQ ID NO: 72619 - protein, 66 aa, Homo sapiens
MEAEETMECLQEFPEHHKMILDRLNEQREQDRFTDITLIVDGHHFKAHKAVLAACSHVLPQIFSIL

SEQ ID NO: 72620 - protein, 57 aa, Homo sapiens
MAADGVDERSPLLSASHSGNVTPTAPPYLQESSPRVDGTEVQHSGKMPTLQKNLLSG

SEQ ID NO: 72621 - protein, 50 aa, Homo sapiens
MNNPIPSNLKSEAKKAAKILREFTEITSRNGPDKIIPAHVIAKAKGLAIL

SEQ ID NO: 72622 - protein, 273 aa, Homo sapiens
MTEQMTLRGTLKGHNGWVTQIATTPQFPDMILSASRGSWDGTLRLWDLTTGTTTRRFVGHTKDVLSVAFSSDNRQIVSGSRDKTIKLWNTLGVCKYTVQDESHSEWVSCVRFSPNSSNPIIVSCGWDKLVKVWNLANCKLKTNHIGHTGYLNTVTVSPDGSLCASGGKDGQAMLWDLNEGKHLYTLDGGDIINALCFSPNRYWLCAATGPSIKIWDLEGKIIVDELKQEVISTSSKAEPPQCTSLAWSADGQTLFAGYTDNLVRVWQVTIGTR

SEQ ID NO: 72623 - protein, 75 aa, Homo sapiens
MTSRFRLPAGRTYNVRASELARDRQHTEVVCNILLLDNTVQAFKVNKHDQGQVLLDVVFKHLDLTEQDYFGLQLA

SEQ ID NO: 72624 - protein, 389 aa, Homo sapiens
  MOD_RES (1)..(1): Any amino acid
XPPCLKAACIHSGMTRKQRESVLQKIRAAQVHVLMLTPEALVGAGGLPPAAQLPPVAFACIDEAHCLSQWSHNFRPCYLRVCKVLRERMGVHCFLGLTATATRRTASDVAQHLAVAEEPDLHGPAPVPTNLHLSVSMDRDTDQALLTLLQGKRFQNLDSIIIYCNRREDTERIAALLRTCLHAAWVPGSGGRAPKTTAEAYHAGMCSRERRRGEDLRELRRHVHADSTDFLAVKRLVQRVFPACTCTCTRPPSEQEGAVGGERPVPKYPPQEAEQLSHQAAPGPRRVCMGHERALPIQLTVQALDMPEEAIETLLCYLELHPHHWLELLATTYTHCRLNCPGGPAQLQALAHRCPPLAVCLAQQLPEDPGQGSSSVEFDMVKLVDSMGW

SEQ ID NO: 72625 - protein, 33 aa, Homo sapiens
  MOD_RES (1)..(1): Any amino acid
XYRTLIDQQVVYIHPSSALFNRQPEWTVPMGHV

SEQ ID NO: 72626 - protein, 309 aa, Homo sapiens
IPFSVSWGVLLLAGLCCLVPSSLVEDPQEDAAQKTDTSHHDQGDWEDLACQKISYNVTDLAFDLYKELADLSQTSNVLVTPTSVAMAFAMLSLGTKADTRTEILEGLNVNLTETPEAKIHECFQQVLQALSRPDTRLQLTTGSSLFVNKSMKLVDTFLEDTKKLYHSEASSINFRDTEEAKEQINNYVEKRTGRKVVDLVKHLKKDTSLALVDYISFHGKWKDKFKAERIMVEGFHVDDKTIIRVPMINHLGRFDIHRDRELSSWVLAQHYVGNATAFFILPDPKKMWQLEEKLTYSHLENIQRAFDIR

SEQ ID NO: 72627 - protein, 124 aa, Homo sapiens
MSATVVDAVNAAPLSGSKEMSLEEPKKMTREDWRKKKELEEQRKLGNAPAEVDEEGKDINPHIPQYISSVPWYIDPSKRPTLKHQRPQPEKQKQFSSSGEWYKRGVKENSIITKYRKGACENCG

SEQ ID NO: 72628 - protein, 138 aa, Homo sapiens
MDKNIGEQLNKAYEAFRQACMDRDSAVKELQQKQTENYEQRIREQQEQLSLQQTIIDKLKSQLLLVNSTQDNNYGCVPLLEDSETRKNNLTLDQPQDKVISGIAREKLPKVRRQEVSSPRKETSARSLGSPLLHERGN

SEQ ID NO: 72629 - protein, 44 aa, Homo sapiens
MAEGELKDMEQFFDDLSDSFSGTEPEVHKTSVVGLFLRHMILAY

SEQ ID NO: 72630 - protein, 53 aa, Homo sapiens
MRRHEMVAKPPVMCSHFTQDFWPEQHIKDPFQKATLRRYKNCEHKNVHLKKDH

SEQ ID NO: 72631 - protein, 169 aa, Homo sapiens
MWREIPILQKPLIIQKQSAMPWDQDPEQSTGNYSEDEQNGKQKWREEGEAGRKREREKEEKNEKELQDEQENKRKRENEKQKQYPEKRLVSKSLMHTLWAKFKLNRCPTIQESLSLSFEFDMTHKQISQWFCKTRKKYNKEMSKRKHKKKHMRWRSLCCQGWSRTPALK

SEQ ID NO: 72632 - protein, 1114 aa, Homo sapiens
MSVRRELCSVMIFEVVEQAGAIILEDGQELDSWYVILNGTVEISHPDGKVENLFMGNSFGITPTLDKQYMHGIVRTKVDDCQFVCIAQQDYWRILNHVEKNTHKVEEEGEIVMVHEHRELDRSGTRKGHIVIKATPERLIMHLIEEHSIVDPTYIEDFLLTYRTFLESPLDVGIKLLEWFKIDSLRDKVTRIVLLWVNNHFNDFEGDPAMTRFLEEFEKNLEDTKMNGHLRLLNIACAAKAKWRQVVLQKASRESPLQFSLNGGSEKGFGIFVEGVEPGSKAADSGLKRGDQIMEVNGQNFENITFMKAVEILRNNTHLALTVKTNIFVFKELLFRTEQEKSGVPHIPKIAEKKSNRHSIQHVPGDIEQTSQEKGSKKVKANTVSGGRNKIRKILDKTRFSILPPKLFSDGGLSQSQDDSIVGTRHCRHSLAIMPIPGTLSSSSPDLLQPTTSMLDFSNPSDIPDQVIRVFKVDQQSCYIIISKDTTAKEVVFHAVHEFGLTGASDTYSLCEVSVTPEGVIKQRRLPDQFSKLADRIQLNGRYYLKNNMETETLCSDEDAQELVKESQLSMLQLSTIEVATQLSMRDFDLFRNIEPTEYIDDLFKLNSKTGNTHLKRFEDIVNQETFWVASEILTEANQLKRMKIIKHFIKIALHCRECKNFNSMFAIISGLNLASVARLRGTWEKLPSKYEKHLQDLQDIFDPSRNMAKYRNILSSQSMQPPIIPLFPVVKKDMTFLHEGNDSKVDGLVNFEKLRMISKEIRQVVRMTSANMDPAMMFRQRKKRWRSLGSLSQGSTNSNMLDVQGGAHKKRARRSSLLNAKKLYEDAQMARKVKQYLSSLDVETDEEKFQMMSLQWEPAYGTLTKNLSEKRSAKSSEMSPVPMRSAGQTTKAHLHQPHRVSQVLQVPAVNLHPIRKKGQTKDPALNTSLPQKVLGTTEEISGKKHTEDTISVASSLHSSPPASPQGSPHKVGSIISDHSSKISGQSCPGIGGAYLQKKILQITRSTAKRTDSTEKATEENRDRTSCENTTRKRMTSPFRRLRERMLSRERLVNSQKEDTDHNQATESCEKVKDVGSNIKDEKGSAIFNSNSQGNSNTLNCFYTRFKSKRRKTL

SEQ ID NO: 72633 - protein, 1473 aa, Homo sapiens
MASEVVCGLIFRLLLPICLAVACAFRYNGLSFVYLIYLLLIPLFSEPTKTTMQGHTGRLLKSLCFISLSFLLLHIIFHITLVSLEAQHRIAPGYNCSTWEKTFRQIGFESLKGADAGNGIRVFVPDIGMFIASLTIWLLCRNIVQKPVTDEAAQSNPEFENEELAEGEKIDSEEALIYEEDFNGGDGVEGELEESTKLKMFRRLASVASKLKEFIGNMITTAGKVVVTILLGSSGMMLPSLTSSVYFFVFLGLCTWWSWCRTFDPLLFSCLCVLLAIFTAGHLIGLYLYQFQFFQEAVPPNDYYARLFGIKSVIQTDCSSTWKIIVNPDLSWYHHANPILLLVMYYTLATLIRIWLQEPLVQDEGTKEEDKALACSPIQITAGRRRSLWYATHYPTDERKLLSMTQDDYKPSDGLLVTVNGNPVDYHTIHPSLPMENGPGKADLYSTPQYRWEPSDESSEKREEEEEEKEEFEEERSREEKRSIKVHAMVSVFQFIMKQSYICALIAMMAWSITYHSWLTFVLLIWSCTLWMIRNRRKYAMISSPFMVVYGNLLLILQYIWSFELPEIKKVPGFLEKKEPGELASKILFTITFWLLLRQHLTEQKALQEKEALLSEVKIGSQENEEKDEELQDIQVEGEPKEEEEEEAKEEKQERKKVEQEEAEEEDEQDIMKVLGNLVVAMFIKYWIYVCGGMFFFVSFEGKIVMYKIIYMVLFLFCVALYQVHYEWWRKILKYFWMSVVIYTMLVLIFIYTYQFENFPGLWQNMTGLKKEKLEDLGLKQFTVAELFTRIFIPTSFLLVCILHLHYFHDRFLELTDLKSIPSKEDNTIYSHAKVNGRVYLIINRLAHPEGSLPDLTMMHLTASLEKPEVRKLAEPGEEKLEGYSEKAQKGDLGKDSEESEEDGEEEEESEEEEETSDLRNKWHLVIDRLTVLFLKFLEYFHKLQVFMWWILELHIIKIVSSYIIWVSVKEVSLFNYVFLISWAFALPYAKLRRLASSVCTVWTCVIIVCKMLYQLQTIKPENFSVNCSLPNENQTNIPFNELNKSLLYSAPIDPTEWVGLRKSSPLLVYLRNNLLMLAILAFEVTIYRHQEYYRGRNNLTAPVSRTIFHDITRLHLDDGLINCAKYFINYFFYKFGLETCFLMSVNVIGQRMDFYAMIHACWLIAVLYRRRRKAIAEIWPKYCCFLACIITFQYFICIGIPPAPCRDYPWRFKGASFNDNIIKWLYFPDFIVRPNPVFLVYDFMLLLCASLQRQIFEDENKAAVRIMAGDNVEICMNLDAASFSQHNPVPDFIHCRSYLDMSKVIIFSYLFWFVLTIIFITGTTRISIFCMGYLVACFYFLLFGGDLLLKPIKSILRYWDWLIAYNVFVITMKNILSIGACGYIGTLVHNSCWLIQAFSLACTVKGYQMPAANSPCTLPSGEAGIIWDSICFAFLLLQRRVFMSYYFLHVVADIKASQILASRWLNFSRPQL

SEQ ID NO: 72634 - protein, 593 aa, Homo sapiens
MAAGGSGCTSSAGGGGRGVNPRRTGRSRFPLCGGRRDHKGLTHIFNPPPKRFESILEGLFGPALLKDLSLFKDCEPESISDWTFDENCLFCCLRRDKVKGHLVGLDEPASGAGQEALLKQEQAKIIRFERQAEEFLNAVFYRKDSPWVSDPNIPLVAREIMQRMIQQFAAEYTSKNSSTQDPSQPNSTKNQSLPKASPVTTSPTAATTQNPVLSKLLMADQDSPLDLTVRKSQSEPSEQDGVLDLSTKKSPCAGSTSLSHSPGCSSTQGNGRPGRPSQYRPDGLRSGDGVPPRSLQDGTREGFGHSTSLKVPLARSLQISEELLSRNQLSTAASLGPSGLQNHGQHLILSREASWAKPHYEFNLSRMKFRGNGALSNISDLPFLAENSAFPKMALQAKQDGKKDVSHSSPVDLKIPQVRGMDLSWESRTGDQYSYSSLVMGSQTESALSKKLRAILPKQSRKSMLDAGPDSWGSDAEQSTSGQPYPTSDQEGDPGSKQPRKKRGRYRQYNSEILEEAISVVMSGKMSVSKAQSIYGIPHSTLEYKVKERLGTLKNPPKKKMKLMRSEGPDVSVKIELDPQGEAAQSANESKNE

SEQ ID NO: 72635 - protein, 2967 aa, Homo sapiens
  MOD_RES (1)..(1): Any amino acid
XEIEKGGCGDPGIPAYGKRTGSSFLHGDTLTFECPAAFELVGERVITCQQNNQWSGNKPSCVFSCFFNFTASSGIILSPNYPEEYGNNMNCVWLIISEPGSRIHLIFNDFDVEPQFDFLAVKDDGISDITVLGTFSGNEVPSQLASSGHIVRLEFQSDHSTTGRGFNITYTTFGQNECHDPGIPINGRRFGDRFLLGSSVSFHCDDGFVKTQGSESITCILQDGNVVWSSTVPRCEAPCGGHLTASSGVILPPGWPGYYKDSLHCEWIIEAKPGHSIKITFDRFQTEVNYDTLEVRDGPASSSPLIGEYHGTQAPQFLISTGNFMYLLFTTDNSRSSIGFLIHYESVTLESDSCLDPGIPVNGHRHGGDFGIRSTVTFSCDPGYTLSDDEPLVCERNHQWNHALPSCDALCGGYIQGKSGTVLSPGFPDFYPNSLNCTWTIEVSHGKGVQMIFHTFHLESSHDYLLITEDGSFSEPVARLTGSVLPHTIKAGLFGNFTAQLRFISDFSISYEGFNITFSEYDLEPCDDPGVPAFSRRIGFHFGVGDSLTFSCFLGYRLEGATKLTCLGGGRRVWSAPLPRCVAECGASVKGNEGTLLSPNFPSNYDNNHECIYKIETEAGKGIHLRTRSFQLFEGDTLKVYDGKDSSSRPLGTFTKNELLGLILNSTSNHLWLEFNTNGSDTDQGFQLTYTSFDLVKCEDPGIPNYGYRIRDEGHFTDTVVLYSCNPGYAMHGSNTLTCLSGDRRVWDKPLPSCIAECGGQIHAATSGRILSPGYPAPYDNNLHCTWIIEADPGKTISLHFIVFDTEMAHDILKVWDGPVDSDILLKEWSGSALPEDIHSTFNSLTLQFDSDFFISKSGFSIQFSTSIAATCNDPGMPQNGTRYGDSREAGDTVTFQCDPGYQLQGQAKITCVQLNNRFFWQPDPPTCIAACGGNLTGPAGVILSPNYPQPYPPGKECDWRVKVNPDFVIALIFKSFNMEPSYDFLHIYEGEDSNSPLIGSYQGSQAPERIESSGNSLFLAFRSDASVGLSGFAIEFKEKPREACFDPGNIMNGTRVGTDFKLGSTITYQCDSGYKILDPSSITCVIGADGKPSWDQVLPSCNAPCGGQYTGSEGVVLSPNYPHNYTAGQICLYSITVPKEFVVFGQFAYFQTALNDLAELFDGTHAQARLLSSLSGSHSGETLPLATSNQILLRFSAKSGASARGFHFVYQAVPRTSDTQCSSVPEPRYGRRIGSEFSAGSIVRFECNPGYLLQGSTALHCQSVPNALAQWNDTIPSCVVPCSGNFTQRRGTILSPGYPEPYGNNLNCIWKIIVTEGSGIQIQVISFATEQNWDSLEIHDGGDVTAPRLGSFSGTTVPALLNSTSNQLYLHFQSDISVAAAGFHLEYKTVGLAACQEPALPSNSIKIGDRYMVNDVLSFQCEPGYTLQGRSHISCMPGTVRRWNYPSPLCIATCGGTLSTLGGVILSPGFPGSYPNNLDCTWRISLPIGYGAHIQFLNFSTEANHDFLEIQNGPYHTSPMIGQFSGTDLPAALLSTTHETLIHFYSDHSQNRQGFKLAYQAYELQNCPDPPPFQNGYMINSDYSVGQSVSFECYPGYILIGHPVLTCQHGINRNWNYPFPRCDAPCGYNVTSQNGTIYSPGFPDEYPILKDCIWLITVPPGHGVYINFTLLQTEAVNDYIAVWDGPDQNSPQLGVFSGNTALETAYSSTNQVLLKFHSDFSNGGFFVLNFHAFQLKKCQPPPAVPQAEMLTEDDDFEIGDFVKYQCHPGYTLVGTDILTCKLSSQLQFEGSLPTCEGSSGQSPLLVVLSGNHTEQSNFTSRSNQLYLRWSTDHATSKKGFKIRYAAPYCSLTHPLKNGGILNRTAGAVGSKVHYFCKPGYRMVGHSNATCRRNPLGMYQWDSLTPLCQAVSCGIPESPGNGSFTGNEFTLDSKVVYECHEGFKLESSQQATAVCQEDGLWSNKGKPPTCKPVACPSIEAQLSEHVIWRLVSGSLNEYGAQVLLSCSPGYYLEGWRLLRCQANGTWNIGDERPSCRVISCGSLSFPPNGNKIGTLTVYGATAIFTCNTGYTLVGSHVRECLANGLWSGSETRCLAGHCGSPDPIVNGHISGDGFSYRDTVVYQCNPGFRLVGTSVRICLQDHKWSGQTPVCVPITCGHPGNPAHGFTNGSEFNLNDVVNFTCNTGYLLQGVSRAQCRSNGQWSSPLPTCRVVNCSDPGFVENAIRHGQQNFPESFEYGMSILYHCKKGFYLLGSSALTCMANGLWDRSLPKCLAISCGHPGVPANAVLTGELFTYGAVVHYSCRGSESLIGNDTRVCQEDSHWSGALPHCTGNNPGFCGDPGTPAHGSRLGDDFKTKSLLRFSCEMGHQLRGSPERTCLLNGSWSGLQPVCEAVSCGNPGTPTNGMIVSSDGILFSSSVIYACWEGYKTSGLMTRHCTANGTWTGTAPDCTIISCGDPGTLANGIQFGTDFTFNKTVSYQCNPGYVMEAVTSATIRCTKDGRWNPSKPVCKAVLCPQPPPVQNGTVEGSDFRWGSSISYSCMDGYQLSHSAILSCEGRGVWKGEIPQCLPVFCGDPGIPAEGRLSGKSFTYKSEVFFQCKSPFILVGSSRRVCQADGTWSGIQPTCIDPAHNTCPDPGTPHFGIQNSSRGYEVGSTVFFRCRKGYHIQGSTTRTCLANLTWSGIQTECIPHACRQPETPAHADVRAIDLPTFGYTLVYTCHPGFFLAGGSEHRTCKADMKWTGKSPVCKIPSDVFFVNSLWKGYYEYLGKRQPATLTVDWFNATSSKVNATFSEASPVELKLTGIYKKEEAHLLLKAFQIKGQADIFVSKFENDNWGLDGYVSSGLERGGFTFQGDIHGKDFGKFKLERQDPLNPDQDSSSHYHGTSSGSVAAAILVPFFALILSGFAFYLYKHRTRPKVQYNGYAGHENSNGQASFENPMYDTNLKPTEAKAVRFDTTLNTVCTVV

SEQ ID NO: 72636 - protein, 133 aa, Homo sapiens
MKCVFVTVGTTSFDDLIACVSAPDSLQKIESLGYNRLILQIGRGTVVPEPFSTESFTLDVYRYKDSLKEDIQKADLVISHAGAGSCLETLEKGKPLVVVINEKLMNNHQLELAKQLHKEGHLFYCTCSSSLRH

SEQ ID NO: 72637 - protein, 122 aa, Homo sapiens
MFRKKKKKRPEISAPQNFQHRVHTSFDPKEGKFVGLPPQWQNILDTLRRPKPVVDPSRITRVQLQPMKTVVRGSAMPVDGYISGLLNDIQKLSVISSNTLRGRSPTSRRRAQSLGLLGDEHW

SEQ ID NO: 72638 - protein, 105 aa, Homo sapiens
NHISQEDCARSTPGYEGEGEGDKNISRKPGNVLKTLDPILITIIAMSALGVLLGAVCGVVLYCACWHNGMSERNLSALENYNFELVDGVKLKKDKLNTQSTYSEA

SEQ ID NO: 72639 - protein, 189 aa, Homo sapiens
  MOD_RES (1)..(1): Any amino acid
XTAKPKTSPSPEVSYTTPAPLETRGIPFIPMISPSPSQEELQTTLEETDQSTQEPFTTKIPRTTELAKTTQAPHRFYTTVRPRTSDKPHIRPVLNRTTTRPTRPKPSGMPSGNGVGTGVKQAPRPSGADRNVSVDSTHPTKKPGTRRPPLPPRPTHPRRKPLPPNNVTGKPGSAGIISSGPITTPPLRS

SEQ ID NO: 72640 - protein, 43 aa, Homo sapiens
MWDVAEELKAMLVFAEHRYYGESLPFGDNSFKDSRHLNFLTSE

SEQ ID NO: 72641 - protein, 208 aa, Homo sapiens
  MOD_RES (1)..(1): Any amino acid
XAEPDGDHNITELPQAVAGRGNMRAQQSAVRLTEIGPRMTLQLIKVQEGVGEGKVMFHSFVSKTEEELQAILEAKEKKLRLKAQRQAQQAQNVQRKQEQREAHRKKSLEGMKKARVGGSDEEASGIPSRTASLELDLFPEAKQKRLAKSPGRKRKRWEMDRGRGRLCDQKFPKTKDKSQGAQARRGPRGASRDGGRGRGRGRPGKRVA

SEQ ID NO: 72642 - protein, 597 aa, Homo sapiens
MVALCSLQHLGSSDPRALPTLPTATSGQRPAKRRRKSPAMAALTRDPQFQKLQQWYREHRSELNLRRLFDANKDRFNHFSLTLNTNHGHILVDYSKNLVTEDVMRMLVDLAKSRGVEAARERMFNGEKINYTEGRAVLHVALRNRSNTPILVDGKDVMPEVNKVLDKMKSFCQRVRSGDWKGYTGKTITDVINIGIGGSDLGPLMVTEALKPYSSGGPRVWYVSNIDGTHIAKTLAQLNPESSLFIIASKTFTTQETITNAETAKEWFLQAAKDPSAVAKHFVALSTNTTKVKEFGIDPQNMFEFWDWVGGRYSLWSAIGLSIALHVGFDNFEQLLSGAHWMDQHFRTTPLEKNAPVLLALLGIWYINCFGCETHAMLPYDQYLHRFAAYFQQGDMESNGKYITKSGTRVDHQTGPIVWGEPGTNGQHAFYQLIHQGTKMIPCDFLIPVQTQHPIRKGLHHKILLANFLAQTEALMRGKSTEEARKELQAAGKSPEDLERLLPHKVFEGNRPTNSIVFTKLTPFMLGALVAMYEHKIFVQGIIWDINSFDQWGVELGKQLAKKIEPELDGSAQVTSHDASTNGLINFIKQQREARVQ

SEQ ID NO: 72643 - protein, 2726 aa, Homo sapiens
MSEPGGGGGEDGSAGLEVSAVQNVADVSVLQKHLRKLVPLLLEDGGEAPAALEAALEEKSALEQMRKFLSDPQVHTVLVERSTLKEDVGDEGEEEKEFISYNINIDIHYGVKSNSLAFIKRTPVIDADKPVSSQLRVLTLSEDSPYETLHSFISNAVAPFFKSYIRESGKADRDGDKMAPSVEKKIAELEMGLLHLQQNIEIPEISLPIHPMITNVAKQCYERGEKPKVTDFGDKVEDPTFLNQLQSGVNRWIREIQKVTKLDRDPASGTALQEISFWLNLERALYRIQEKRESPEVLLTLDILKHGKRFHATVSFDTDTGLKQALETVNDYNPLMKDFPLNDLLSATELDKIRQALVAIFTHLRKIRNTKYPIQRALRLVEAISRDLSSQLLKVLGTRKLMHVAYEEFEKVMVACFEVFQTWDDEYEKLQVLLRDIVKRKREENLKMVWRINPAHRKLQARLDQMRKFRRQHEQLRAVIVRVLRPQVTAVAQQNQGEVPEPQDMKVAEVLFDAADANAIEEVNLAYENVKEVDGLDVSKEGTEAWEAAMKRYDERIDRVETRITARLRDQLGTAKNANEMFRIFSRFNALFVRPHIRGAIREYQTQLIQRVKDDIESLHDKFKVQYPQSQACKMSHVRDLPPVSGSIIWAKQIDRQLTAYMKRVEDVLGKGWENHVEGQKLKQDGDSFRMKLNTQEIFDDWARKVQQRNLGVSGRIFTIESTRVRGRTGNVLKLKVNFLPEIITLSKEVRNLKWLGFRVPLAIVNKAHQANQLYPFAISLIESVRTYERTCEKVEERNTISLLVAGLKKEVQALIAEGIALVWESYKLDPYVQRLAETVFNFQEKVDDLLIIEEKIDLEVRSLETCMYDHKTFSEILNRVQKAVDDLNLHSYSNLPIWVNKLDMEIERILGVRLQAGLRAWTQVLLGQAEDKAEVDMDTDAPQVSHKPGGEPKIKNVVHELRITNQVIYLNPPIEECRYKLYQEMFAWKMVVLSLPRIQSQRYQVGVHYELTEEEKFYRNALTRMPDGPVALEESYSAVMGIVSEVEQYVKVWLQYQCLWDMQAENIYNRLGEDLNKWQALLVQIRKARGTFDNAETKKEFGPVVIDYGKVQSKVNLKYDSWHKEVLSKFGQMLGSNMTEFHSQISKSRQELEQHSVDTASTSDAVTFITYVQSLKRKIKQFEKQVELYRNGQRLLEKQRFQFPPSWLYIDNIEGEWGAFNDIMRRKDSAIQQQVANLQMKIVQEDRAVESRTTDLLTDWEKTKPVTGNLRPEEALQALTIYEGKFGRLKDDREKCAKAKEALELTDTGLLSGSEERVQVALEELQDLKGVWSELSKVWEQIDQMKEQPWVSVQPRKLRQNLDALLNQLKSFPARLRQYASYEFVQRLLKGYMKINMLVIELKSEALKDRHWKQLMKRLHVNWVVSELTLGQIWDVDLQKNEAIVKDVLLVAQGEMALEEFLKQIREVWNTYELDLVNYQNKCRLIRGWDDLFNKVKEHINSVSAMKLSPYYKVFEEDALSWEDKLNRIMALFDVWIDVQRRWVYLEGIFTGSADIKHLLPVETQRFQSISTEFLALMKKVSKSPLVMDVLNIQGVQRSLERLADLLGKIQKALGEYLERERSSFPRFYFVGDEDLLEIIGNSKNVAKLQKHFKKMFAGVSSIILNEDNSVVLGISSREGEEVMFKTPVSITEHPKINEWLTLVEKEMRVTLAKLLAESVTEVEIFGKATSIDPNTYITWIDKYQAQLVVLSAQIAWSENVETALSSMGGGGDAAPLHSVLSNVEVTLNVLADSVLMEQPPLRRRKLEHLITELVHQRDVTRSLIKSKIDNAKSFEWLSQMRFYFDPKQTDVLQQLSIQMANAKFNYGFEYLGVQDKLVQTPLTDRCYLTMTQALEARLGGSPFGPAGTGKTESVKALGHQLGRFVLVFNCDETFDFQAMGRIFVGLCQVGAWGCFDEFNRLEERMLSAVSQQVQCIQEALREHSNPNYDKTSAPITCELLNKQVKVSPDMAIFITMNPGYAGRSNLPDNLKKLFRSLAMTKPDRQLIAQVMLYSQGFRTAEVLANKIVPFFKLCDEQLSSQSHYDFGLRALKSVLVSAGNVKRERIQKIKREKEERGEAVDEGEIAENLPEQEILIQSVCETMVPKLVAEDIPLLFSLLSDVFPGVQYHRGEMTALREELKKVCQEMYLTYGDGEEVGGMWVEKVLQLYQITQINHGLMMVGPSGSGKSMAWRVLLKALERLEGVEGVAHIIDPKAISKDHLYGTLDPNTREWTDGLFTHVLRKIIDSVRGELQKRQWIVFDGDVDPEWVENLNSVLDDNKLLTLPNGERLSLPPNVRIMFEVQDLKYATLATVSRCGMVWFSEDVLSTDMIFNNFLARLRSIPLDEGEDEAQRRRKGKEDEGEEAASPMLQIQRDAATIMQPYFTSNGLVTKALEHAFQLEHIMDLTRLRCLGSLFSMLHQACRNVAQYNANHPDFPMQIEQLERYIQRYLVYAILWSLSGDSRLKMRAELGEYIRRITTVPLPTAPNIPIIDYEVSISGEWSPWQAKVPQIEVETHKVAAPDVVVPTLDTVRHEALLYTWLAEHKPLVLCGPPGSGKTMTLFSALRALPDMEVVGLNFSSATTPELLLKTFDHYCEYRRTPNGVVLAPVQLGKWLVLFCDEINLPDMDKYGTQRVISFIRQMVEHGGFYRTSDQTWVKLERIQFVGACNPPTDPGRKPLSHR

SEQ ID NO: 72644 - protein, 81 aa, Homo sapiens
MPAKGRYFLNEGEEGPDQDALYEKYQLTSQHGPLLLTLLLVAATACVALIIIAFSQGDPSRHQAILGMAFLVLAVFAALSV

SEQ ID NO: 72645 - protein, 67 aa, Homo sapiens
MFAEAAKTTRPCGMAEFKEKPEAPTEQLDVACGQENLPVGAWPPGAAPAPFQFSVLPRRKVEHQLWK

SEQ ID NO: 72646 - protein, 1100 aa, Homo sapiens
MNNEITYYFPCQRWLAVEEDDGQLSRELLPVDESYVLPQSEEGRGGGDNNPLDNLALEQKDKSTTFSVTIKTGVKKNAGTDANVFITLFGTQDDTGMTLLKSSKTNSDKFERDSIEIFTVETLDLGDLWKVRLGHDNTGKAPGWFVDWVEVDAPSLGKCMTFPCGRWLAKNEDDGSIIRDLFHAELQTRLYTPFVPYEITLYTSDVFAAGTDANIFIIIYGCDAVCTQQKYLCTNKREQKQFFERKSASRFIVELEDVGEIIEKIRIGHNNTGMNPGWHCSHVDIRRLLPDKDGAETLTFPCDRWLATSEDDKKTIRELVPYDIFTEKYMKDGSLRQVYKEVEEPLDIVLYSVQIFTGNIPGAGTDAKVYITIYGDLGDTGERYLGKSENRTNKFERGTADTFIIEAADLGVIYKIKLRHDNSKWCADWYVEKVEIWNDTNEDEFLFLCGRWLSLKKEDGRLERLFYEKEYTGDRSSNCSSPADFWEIALSSKMADVDISTVTGPMADYVQEGPIIPYYVSVTTGKHKDAATDSRAFIFLIGEDDERSKRIWLDYPRGKRGFSRGSVEEFYVAGLDVGIIKKIEVLYEMTVWTGDVVGGGTDSNIFMTLYGINGSTEEMQLDKKKARFEREQNDTFIMEILDIAPFTKMRIRIDGLGSRPEWFLERILLKNMNTGDLTMFYYGDWLSQRKGKKTLVCEMCAVIDEEEMMEWTSYTVAVKTSDILGAGTDANVFIIIFGENGDSGTLALKQSANWNKFERNNTDTFNFPDMLSLGHLCKLRVWHDNKGIFPGWHLSYVDVKDNSRDETFHFQCDCWLSKSEGDGQTVRDFACANNKICDELEETTYEIVIETGNGGETRENVWLILEGRKNRSKEFLMENSSRQRAFRKGTTDTFEFDSIYLGDIASLCVGHLAREDRFIPKRELAWHVKTITITEMEYGNVYFFNCDCLIPLKRKRKYFKVFEVTKTTESFASKVQSLVPVKYEVIVTTGYEPGAGTDANVFVTIFGANGDTGKRELKQKMRNLFERGSTDRFFLETLELGELRKVRLEHDSSGYCSGWLVEKVEVTNTSTGVATIFNCGRWLDKKRGDGLTWRDLFPSV

SEQ ID NO: 72647 - protein, 158 aa, Homo sapiens
FPECGFYGMYDKILLFRHDPTSENILQLVKAASDIQEGDLIEVVLSASATFEDFQIRPHALFVHSYRAPAFCDHCGEMLWGLVRQGLKCEGCGLNYHKRCAFKIPNNCSGVRRRRLSNVSLTGVSTIRTSSAELSTSAPDEPLLRRGFTVLARMVSIS

SEQ ID NO: 72648 - protein, 304 aa, Homo sapiens
MAPLLLQLAVLGAALAAAALVLISIVAFTTATKMPALHRHEEEKFFLNAKGQKETLPSIWDSPTKQLSVVVPSYNEEKRLPVMMDEALSYLEKRQKRDPAFTYEVIVVDDGSKDQTSKVAFKYCQKYGSDKVRVITLVKNRGKGGAIRMGIFSSRGEKILMADADGATKFPDVEKLEKGLNDLQPWPRSYFRTLLMYGFHFLVWFLCVKGIRDTQCGFKLFTREAASRTFSSLHVERWAFDVELLYIAQFFKIPIAEIAVNWTEIEGSKLVPFWSWLQMGKDLLFIRLRYLTGAWRLEQTRKMN

SEQ ID NO: 72649 - protein, 163 aa, Homo sapiens
  MOD_RES (1)..(1): Any amino acid
XLDLHHGDGVEDAFSFTSKVMTVSLHKFSPGFFPGTGDVSDVGLGKGRYYSVNVPIQDGIQDEKYYQICERDKILLWCPGDLKLVASSDPPASASQSAGITGMSHCTQPFPSFLQMKCINFFFTAYGPDYVLEITPSCRPDRNEPHRIQQILNYIKGNLKHVV

SEQ ID NO: 72650 - protein, 323 aa, Homo sapiens [sequence omitted]

SEQ ID NO: 72651 - protein, 2058 aa, Homo sapiens
  MOD_RES (1)..(1): Any amino acid
XWMHAVCQNLNTEEEVENVADIGFDCSMCRPYMPASNVPSSDCCESSLVAQIVTKVKELDPPKTYTQDGVCLTESGMTQLQSLTVTVPRRKRSKPKLKLKIINQNSVAVLQTPPDIQSEHSRDGEMDDSREGELMDCDGKSESSPEREAVDDETKGVEGTDGVKKRKRKPYRPGIGGFMVRQRSRTGQGKTKRSVIRKDSSGSISEQLPCRDDGWSEQLPDTLVDESVSVTESTEKIKKRYRKRKNKLEETFPAYLQEAFFGKDLLDTSRQSKISLDNLSEDGAQLLYKTNMNTGFLDPSLDPLLSSSSAPTKSGTHGPADDPLADISEVLNTDDDILGIISDDLAKSVDHSDIGPVTDDPSSLPQPNVNQSSRPLSEEQLDGILSPELDKMVTDGKIFALHLGFLKDLRAILGKLYKIPELGGKDVEDLFTAVLSPANTQPTPLPQPPPPTQLLPIHNQDAFSRMPLMNGLIGSSPHLPHNSLPPGSGLGTFSAIAQSSYPDARDKNSAFNPMASDPNNSWTSSAPTVEGENDTMSNAQRSTLKWEKEEALGEMATVAPVLYTNINFPNLKEEFPDWTTRVKQIAKLWRKASSQERAPYVQKARDNRAALRINKVQMSNDSMKRQQQQDSIDPSSRIDSELFKDPLKQRESEHEQEWKFRQQMRQKSKQQAKIEATQKLEQVKNEQQQQQQQQFGSQHLLVQSGSDTPSSGIQSPLTPQPGNGNMSPAQSFHKELFTKQPPSTPTSTSSDDVFVKPQAPPPPPAPSRIPIQDSLSQAQTSQPPSPQVFSPGSSNSRPPSPMDPYAKMVGTPRPPPVGHSFSRRNSAAPVENCTPLSSVSRPLQMNETTANRPSPVRDLCSSSTTNNDPYAKPPDTPRPVMTDQFPKSLGLSRSPVVSEQTAKGPIAAGTSDHFTKPSPRADVFQRQRIPDSYARPLLTPAPLDSGPGPFKTPMQPPPSSQDPYGSVSQASRRLSVDPYERPALTPRPIDNFSHNQSNDPYSQPPLTPHPAVNESFAHPSRAFSQPGTISRPTSQDPYSQPPGTPRPVVDSYSQSSGTARSNTDPYSQPPGTPRPTTVDPYSQQPQTPRPSTQTDLFVTPVTNQRHSDPYAHPPGTPRPGISVPYSQPPATPRPRISEGFTRSSMTRPVLMPNQDPFLQAAQNRGPALPGPLVRPPDTCSQTPRPPGPGLSDTFSRVSPSAARDPYDQSPMTPRSQSDSFGTSQTAHDVADQPRPGSEGSFCASSNSPMHSQGQQFSGVSQLPGPVPTSGVTDTQNTVNMAQADTEKLRQRQKLREIILQQQQQKKIAGRQEKGSQDSPAVPHPGPLQHWQPENVNQAFTRPPPPYPGNIRSPVAPPLGPRYAVFPKDQRGPYPPDVASMGMRPHGFRFGFPGGSHGTMPSQERFLVPPQQIQGSGVSPQLRRSVSVDMPRPLNNSQMNNPVGLPQHFSPQSLPVQQHNILGQAYIELRHRAPDGRQRLPFSAPPGSVVEASSNLRHGNFIPRPDFPGPRHTDPMRRPPQGLPNQLPVHPDLEQVPPSQQEQGHSVHSSSMVMRTLNHPLGGEFSEAPLSTSVPSETTSDNLQITTQPSDGLEEKLDSDDPSVKELDVKDLEGVEVKDLDDEDLENLNLDTEDGKVVELDTLDNLETNDPNLDDLLRSGEFDIIAYTDPELDMGDKKSMFNEELDLPIDDKLDNQCVSVEPKKKEQENKTLVLSDKHSPQKKSTVTNEVKTEVLSPNSKVESKCETEKNDENKDNVDTPCSQASAHSDLNDGEKTSLHPCDPDLFEKRTNRETAGPSANVIQASTQLPAQDVINSCGITGSTPVLSSLLANEKSDNSDIRPSGSPPPPTLPASPSNHVSSLPPFIAPPGRVLDNAMNSNVTVVSRVNHVFSQGVQVNPGLIPGQSTVNHSLGTGKPATQTGPQTSQSGTSSMSGPQQLMIPQTLAQQNRERPLLLEEQPLLLQDLLDQERQEQQQQRQMQAMIRQRSEPFFPNIDFDAITDPIMKAKMVALKGINKVMAQNNLGMPPMVMSRFPFMGQVVTGTQNSEGQNLGPQAIPQ

SEQ ID NO: 72652 - protein, 320 aa, Homo sapiens
MAPEEDAGGEALGGSFWEAGNYRRTVQRVEDGHRLCGDLVSCFQERARIEKAYAQQLADWARKWRGTVEKGPQYGTLEKAWHAFFTAAERLSALHLEVREKLQGQDSERVRAWQRGAFHRPVLGGFRESRAAEDGFRKAQKPWLKRLKEVEASKKSYHAARKDEKTAQTRESHAKADSAVSQEQLRKLQERVERCAKEAEKTKAQYEQTLAELHRYTPRYMEDMEQAFETCQAAERQRLLFFKDMLLTLHQHLDLSSSEKFHELHRDLHQGIEAASDEEDLRWWRSTHGPGMAMNWPQFEALVLGHTEDNQPEREGWPEP

SEQ ID NO: 72653 - protein, 44 aa, Homo sapiens
MPSVTQRLRDPDINPCLSESDASTRCLDENNYDRERCSTYFLRY

SEQ ID NO: 72654 - protein, 269 aa, Homo sapiens
MEREMEDLPRPSISAEPGTVIPLGSHVTFVCRGPVGVQTFRLERDSRSTYNDTEDVSQASPSESEARFRIDSVREGNAGLYRCIYYKPPKWSEQSDYLELLVKESSGGPDSPDTEPGSSAGPTQRPSDNSHNEHAPASQGLKAEHLYILIGVSVVFLFCLLLLVLFCLHRQNQIKQGPPRSKDEEQKPQQRPDLAVDVLERTADKATVNGLPEKDRETDTSALAAGSSQEVTYAQLDHWALTQRTARAVSPQSTKPMAESITYAAVARH

SEQ ID NO: 72655 - protein, 149 aa, Homo sapiens
  MOD_RES (1)..(1): Any amino acid
XPARSALLPGPLELQPPRGLPSDYGRPLSFPPPRIRESIQEDLAEEAPCLQGGRASGLGEAGMSAWLRAIGLERYEEGLVHNGWDDLEFLRWGRGWPRGRSWGPQDPLAHLTSQPVLLHSDITEEDLEEAGVQDPAHKRLLLDTLQLSK

SEQ ID NO: 72656 - protein, 673 aa, Homo sapiens
  MOD_RES (1)..(1): Any amino acid
XNTEGSFQCVCPMGFQPNTAGSECEDVDECENHLACPGQECVNSPGSFQCRTCPSGHHLHRGRCTDVDECSSGAPPCGPHGHCTNTEGSFRCSCAPGYRAPSGRPGPCADVNECLEGDFCFPHGECLNTDGSFACTCAPGYRPGPRGASCLDVDECSEEDLCQSGICTNTDGSFECICPPGHRAGPDLASCLDVDECRERGPALCGSQRCENSPGSYRCVRDCDPGYHAGPEGTCDDVNECETLQGVCGAALCENVEGSFLCVCPNSPEEFDPMTGRCVPPRTSAGTFPGSQPQAPASPVLPARPPPPPLPRRPSTPRQGPVGSGRRECYFDTAAPDACDNILARNVTWQECCCTVGEGWGSGCRIQQCPGTETAEYQSLCPHGRGYLAPSGDLSLRRDVDECQLFRDQVCKSGVCVNTAPGYSCYCSNGYYYHTQRLECIDNDECADEEPACEGGRCVNTVGSYHCTCEPPLVLDGSQRRCVSNESQSLDDNLGVCWQEVGADLVCSHPRLDRQATYTECCCLYGEAWGMDCALCPAQDSDDFEALCNVLRPPAYSPPRPGGFGLPYEYGPDLGPPYQGLPYGPELYPPPALPYDPYPPPPGPFARREAPYGAPRFDMPDFEDDGGPYGESEAPAPPGPGTRWPYRSRDTRRSFPEPEEPPEGGSYAGSLAE

SEQ ID NO: 72657 - protein, 130 aa, Homo sapiens
  MOD_RES (1)..(1): Any amino acid
XPRRQDSEDHSSDMFNYEEYCTANAVTGPCRASFPRWYFDVERNSCNNFIYGGCRGNKNSYRSEEACMLRCFRQQENPPLPLGSKGKWPLTLLLPSACLLPSLTELSPAQLWFTLSFTVNIILAESHVSA

SEQ ID NO: 72658 - protein, 184 aa, Homo sapiens
MVFVNYGGGKYWYFKHASWNGLTVADLVFPWFVFIMGSSIFLSMTSILQRGCSKFRLLGKIAWRSFLLICIGIIIVNPNYCLGPLSWDKVRIPGVLQRLGVTYFVVAVLELLFAKPVPEHCASTGPSLLASSDPPALATQSAGITGEELPFSSRHHVQLAPVAAHPGAGRPVAGLDIPPASPWV

SEQ ID NO: 72659 - protein, 934 aa, Homo sapiens
  MOD_RES (1)..(1): Any amino acid
XKETPPTAHLILPEQHMSLAQQKADKNKINGEPRGGGAGGNSDSDNLDSTDCNSESSSGGKSQELNFVMDVNSSKYPSLLLHSQEEKTSTATSKTQTRLEGEVTPNSLSTSYKTVSLPLSSPNIKLNLTSPKRGQKREEGWKEVVRRSKKLSVPASVVSRIMGRGGCNITAIQDVTGAHIDVDKQKDKNGERMITIRGGTESTRYAVQLINALIQDPAKELEDLIPKNHIRTPASTKSIHANFSSGVGTTAASSKNAFPLGAPTLVTSQATTLSTFQPANKLNKNVPTNVRSSFPVSLPLAYPHPHFALLAAQTMQQIRHPRLPMAQFGGTFSPSPNTWGPFPVRPVNPGNTNSSPKHNNTSRLPNQNGTVLPSESAGLATASCPITVSSVVAASQQLCVTNTRTPSSVRKQLFACVPKTSPPATVISSVTSTCSSLPSVSSAPITSGQAPTTFLPASTSQAQLSSQKMESFSAVPPTKEKVSTQDQPMANLCTPSSTANSCSSSASNTPGAPETHPSSSPTPTSSNTQEEAQPSSVSDLSPMSMPFASNSEPAPLTLTSPRMVAADNQDTSNLPQLAVPAPRVSHRMQPRGSFYSMVPNATIHQDPQSIFVTNPVTLTPPQGPPAAVQLSSAVNIMNGSQMHINPANKSLPPTFGPATLFNHFSSLFDSSQVPANQGWGDGPLSSRVATDASFTVQSAFLGNSVLGHLENMHPDNSKAPGFRPPSQRVSTSPVATSAPPTLGQPKGVSASQDRKIPPPIGTERLARIRQGGSVAQAPAGTSFVAPVGHSGIWSFGVNAVSEGLSGWSQSVMGNHPMHQQLSDPSTFSQHQPMERDDSGMVAPSNIFHQPMASGFVDFSKGLPISMYGGTIIPSHPQLADVPGGPLFNGLHNPDPAWNPMIKVIQNSTECTDAQQIWPGTWAPHIGNMHLKYVN

SEQ ID NO: 72660 - protein, 95 aa, Homo sapiens
MIRGIGDPLVSVYARAYLCRVGMEVAPHLKETLNKNFFDFLLTFKQIHGDTVQNQLVVQGVELPSYLPLYPPAMDWIFQCISYHAPEALLTEMME

SEQ ID NO: 72661 - protein, 116 aa, Homo sapiens
MSQGSVTFRDVAIDFSQEEWKWLQPAQRDLYRCVMLENYGHLVSLGLSISKPDVVSLLEQGKEPWLGKREVKRDLFSVSESSGEIKDFSPKNVIYDDSSQYLIMERILSQGPVYSS

SEQ ID NO: 72662 - protein, 342 aa, Homo sapiens
  MOD_RES (1)..(1): Any amino acid
XNNSITEQITDVVKQPAFIAGIGGACWVILMGFSIWLYWRRKKRKGLSNYAVTFQRGDGGLMSNGSRPGLLNAGDPSYPWLADSWPATSLPVNNSNSGPNEIGNFGRGDVLPPVPGQGDKTATMLSDGAIYSSIDFTTKTSYNSSSQITQATPYATTQILHSNSIHELAVDLPDPQWKSSIQQKTDLMGFGYSLPDQNKGNNGGKGGKKKKNKNSSKPQKNNGSTWANVPLPPPPVQPLPGTELEHYAVEQQENGYDSDSWCPPLPVQTYLHQGLEDELEEDDDRVPTPPVRGVASSPAISFGQQSTATLTPSPREEMQPMLQAHLDELTRAYQFDIAKQTW

SEQ ID NO: 72663 - protein, 12 aa, Homo sapiens
MTDTVFSNSSNR

SEQ ID NO: 72664 - protein, 67 aa, Homo sapiens
MATGTGKHKLLSTGPTEPWSIREKLCLASSVMRSGDQNWLECSGAIWAHCSLLTSWAQGILLPQLPK

SEQ ID NO: 72665 - protein, 211 aa, Homo sapiens
MMAAAPIQQNGTHTGVPIDLDPPDSRKRPLEAPPEAGSTKRTNTGEDGQYFLKVLIPSYAAGSIIGKGGQTIVQLQKETGATIKLSKSKDFYPGTTERVCLIQGTVEALNAVHGFIAEKIREMPQNVAKTEPVSILQPQTTVNPDRIKQTLPSSPTTTKSSPSDPMTTSRANQVQYHPVIYTILFTGDCLQTGEKDNGGLRIYSFIHIYAP

SEQ ID NO: 72666 - protein, 145 aa, Homo sapiens
MSSKMVISEPGLNWDISPKNGLKTFFSRENYKDHSMAPSLKELRVLSNRRIGENLNASASSVENEPAVSSATQAKEKVKTTIGMVLLPKPRVPYPRFSRFSQREQRSYVDLLVKYAKIPANSKAVGINKNDYLQYLDMKKHVNEE

SEQ ID NO: 72667 - protein, 51 aa, Homo sapiens
MGGNHSHKPPVFDENEEVNFDHFQILRAIGKGSFGKDCQCRLFLENLSEES

SEQ ID NO: 72668 - protein, 10 aa, Homo sapiens
MSRKQNQKDS

SEQ ID NO: 72669 - protein, 288 aa, Homo sapiens
MLTINPAKRITADQALKHPWVCQRSTVASMMHRQETVECLRKFNARRKLKGAILTTMLVSRNFSVGRQSSAPASPAASAAGLAGQAAKSLLNKKSDGGVKPQSNNKNSLVSPAQEPAPLQTAMEPQTTVVHNATDGIKGSTESCNTTTEDEDLKVRKQEIIKITEQLIEAINNGDFEAYTKICDPGLTSFEPEALGNLVEGMDFHKFYFENLLSKNSKPIHTTILNPHVHVIGEDAACIAYIRLTQYIDGQGRPRTSQSEETRVWHRRDGKWLNVHYHCSGAPAAPLQ

SEQ ID NO: 72670 - protein, 163 aa, Homo sapiens
MGPFKHTVDDGLDVRKAAFECMYSLLESCLGQLDICEFLNHVEDGLKDHYDIRMLTFIMVARLATLCPAPVLQRVDRLIEPLRATCTAKEPNANSVAWNTQCEDMHALLLGRRLPQHQSQHLPYAPAEAAGLCGRLQWLQDLLPPCLLHFCRGGAADWRGRRP

SEQ ID NO: 72671 - protein, 421 aa, Homo sapiens
MKRTPTAEEREREAKKLRLLEELEDTWLPYLTPKDDEFYQQWQLKYPKLILREASSVSEELHKEVQEAFLTLHKHGCLFRDLVRIQGKDLLTPVSRILIGNPGCTYKYLNTRLFTVPWPVKGSNIKHTEAEIAAACETFLKLNDYLQIETIQALEELAAKEKANEDAVPLCMSADFPRVGMGSSYNGQDEVDIKSRAAYNVTLLNFMDPQKMPYLKEEPYFGMGKMAVSWHHDENLVDRSAVAVYSYSCEGPEEESEDDSHLEGRDPDIWHVGFKISWDIETPGLAIPLHQGDCYFMLDDLNATHQHCVLAGSQPRFSSTHRVAECSTGTLDYILQRCQLALQNVCDDVDNDDVSLKSFEPAVLKQGEEIHNEVEFEWLRQFWFQGNRYRKCTDWWCQPMAQLEALWKKMEGVNLLLVKIL

SEQ ID NO: 72672 - protein, 291 aa, Homo sapiens
MAVVIRLQGLPIVAGTMDIRHFFSGLTIPDGGVHIVGGELGEAFIVFATDEDARLGMMRTGGTIKGSKVTLLLSSKTEMQNMIELSRRRFETANLDIPPANASRSGPPPSSGMSSRVNLPTTVSNFNNPSPSVVTATTSVHESNKNIQTFSTASVGTAPPNMGASFGSPTFSSTVPSTASPMNTVPPPPIPPIPAMPSLPPMPSIPPIPVPPPVPTLPPVPPVPPIPPVPSVPPMTPLPPMSGMPPLNPPPVAPLPAGMNGSGAPMNLNNNLNPMFLGPLNPVNPIQMNSQ

SEQ ID NO: 72673 - protein, 125 aa, Homo sapiens
MGQPSLTWMLMVVVASWFITTAATDTSEARWCSECHSNATCTEDEAVTTCTCQEGFTGDGLTCVDLDECAIPGAHNCSANSSCVNTPGSFSCVCPEGFRLSPGLGCTDVDECAEPGLSHCHALAT

SEQ ID NO: 72674 - protein, 25 aa, Homo sapiens
MSERAADDVRGEPRRAAAAAGGAAA

SEQ ID NO: 72675 - protein, 28 aa, Homo sapiens
  MOD_RES (1)..(1): Any amino acid
XQMLCLERLGHWHLEGMGRTQRSPPTQA

SEQ ID NO: 72676 - protein, 1344 aa, Homo sapiens
MMEIQMDEGGGVVVYQDDYCSGSVMSERVSGLAGSIYREFERLIHCYDEEVVKELMPLVVNVLENLDSVLSENQEHEVELELLREDNEQLLTQYEREKALRRQAEEKFIEFEDALEQEKKELQIQVEHYEFQTRQLELKAKNYADQISRLEERESEMKKEYNALHQRHTEMIQTYVEHIERSKMQQVGGNSQTESSLPGRSPRQSWRKRKERPTSLNVFPLADGTVRAQIGGKLVPAGDHWHLSDLGQLQSSSSYQCPQDEMSESGQSSAAATPSTTGTKSNTPTSSVPSAAVTPLNESLQPLGDYGVGSKNSKRAREKRDSRNMEVQVTQEMRNVSIGMGSSDEWSDVQDIIDSTPELDMCPETRLDRTGSSPTQGIVNKAFGINTDSLYHELSTAGSEVIGDVDEGADLLGEFSVRDDFFGMGKEVGNLLLENSQLLETKNALNVVKNDLIAKVDQLSGEQEVLRGELEAAKQAKVKLENRIKELEEELKRVKSEAIIARREPKEEAEDVSSYLCTESDKIPMAQRRRFTRVEMARVLMERNQYKERLMELQEAVRWTEMIRASREHPSVQEKKKSTIWQFFSRLFSSSSSPPPAKRPYPSVNIHYKSPTTAGFSQRRNHAMCPISAGSRPLEFFPDDDCTSSARREQKREQYRQVREHVRNDDGRLQACGWSLPAKYKQLSPNGGQEDTRMKNVPVPVYCRPLVEKDPTMKLWCAAGVNLSGWRPNEDDAGNGVKPAPGRDPLTCDREGDGEPKSAHTSPEKKKAKELPEMDATSSRVWILTSTLTTSKVVIIDANQPGTVVDQFTVCNAHVLCISSIPAASDSDYPPGEMFLDSDVNPEDPGADGVLAGITLVGCATRCNVPRSNCSSRGDTPVLDKGQGEVATIANGKVNPSQSTEEATEATEVPDPGPSEPETATLRPGPLTEHVFTDPAPTPSSGPQPGSENGPEPDSSSTRPEPEPSGDPTGAGSSAAPTMWLGAQNGWLYVHSAVANWKKCLHSIKLKDSVLSLVHVKGRVLVALADGTLAIFHRGEDGQWDLSNYHLMDLGHPHHSIRCMAVVYDRVWCGYKNKVHVIQPKTMQIEKSFDAHPRRESQVRQLAWIGDGVWVSIRLDSTLRLYHAHTHQHLQDVDIEPYVSKMLGTGKLGFSFVRITALLVAGSRLWVGTGNGVVISIPLTETVVLHRGQLLGLRANKTSPTSGEGARPGGIIHVYGDDSSDRAASSFIPYCSMAQAQLCFHGHRDAVKFFVSVPGNVLATLNGSVLDSPAEGPGPAAPASEVEGQKLRNVLVLSGGEGYIDFRIGDGEDDETEEGAGDMSQVKPVLSKAERSHIIVWQVSYTPE

SEQ ID NO: 72677 - protein, 160 aa, Homo sapiens
MGLPQPGLWLKRLWVLLEVAVHVVVGKVLLILFPDRVKRNILAMGEKTGMTRNPHFSHDNWIPTFFSTQYFWFVLKVRWQRLEDTTELGGLAPNCPVVRLSGQRCNIWEFMQGNRPLVLNFGSCTPSFMFKFDQFKRLIEDFSSIADFLVIYIEEAHASG

SEQ ID NO: 72678 - protein, 53 aa, Homo sapiens
MSGRVGDLSPRQKEALAKPEASTCRSRRPCSGSMWSSESKRTLTTSLAGSLQR

SEQ ID NO: 72679 - protein, 186 aa, Homo sapiens
MVSAAGLSGDGKMRGVLLVLLGLLYSSTSCGVQKASVFYGPDPKEGLVSSMEFPWVVSLQDSQYTHLAFGCILSEFWVLSIASAIQNRKDIVVIVGISNMDPSKIAHTEYPVNTIIIHEDFDNNSMSNNIALLKTDTAMHFGNLVQSICFLGRMLHTPPVLQNCWVSGWNPTSATGNHMTMSVLRK

SEQ ID NO: 72680 - protein, 474 aa, Homo sapiens
MASTEGANNMPKQVEVRMHDSHLGSEEPKHRHLGLRLCDKLGKNLLLTLTVFGVILGAVCGGLLRLASPIHPDVVMLIAFPGDILMRMLKMLILPLIISSLITGLSGLDAKASGRLGTRAMVYYMSTTIIAAVLGVILVLAIHPGNPKLKKQLGPGKKNDEVSSLDAFLDLIRNLFPENLVQACFQQIQTVTKKVLVAPPPDEEANATSAVVSLLNETVTEVPEETKMVIKKGLEFKDGMNVLGLIGFFIAFGIAMGKMGDQAKLMVDFFNILNEIVMKLVIMIMWYSPLGIACLICGKIIAIKDLEVVARQLGMYMVTVIIGLIIHGGIFLPLIYFVVTRKNPFSFFAGIFQAWITALGTASSAGTLPVTFRCLEENLGIDKRVTRFVLPVGATINMDGTALYEAVAAIFIAQMNGVVLDGGQIVTVSLTATLASVGAASIPSAGLVTMLLILTAVGLPTEDISLLVAVDWLL

SEQ ID NO: 72681 - protein, 133 aa, Homo sapiens
MQAMDPAAADLYEEDGKDLDFYDFEPLPTLPEDEENVSLADILSLRDRGLSEQEAWAVCLECSLSMRSVAHAAIFQSLCITPDTLAFNTSGNVCFMEQLSDDPEGAFVPPEFDVTGNTFEQVFWNANLLHLTC

SEQ ID NO: 72682 - protein, 119 aa, Homo sapiens
MKEELAALFSELKQEQKKVDELIAKLVKNRTRIVNESDVFSWVIRREFQELRHPVDEEKARCLEGIGGHTRGLVASLDMQLEQAQGTRERLAQAECVLEQFGNEDHHEFIWKFHSMASR

SEQ ID NO: 72683 - protein, 85 aa, Homo sapiens
MITEHTSNDPYCFVEFYEHRDAAAALAAMNGRKILGKEVKVNWATTPSSQKKDTSNHFHVFVGDLSPEITTEDIKSAFAPFGKIS

SEQ ID NO: 72684 - protein, 118 aa, Homo sapiens
MEGGAYGAGKAGGAFDPYTLVRQPHTILRVVSWLFSIVVFGSIVNEGYLNSASEGEEFCIYNRNPNACSYGVAVGVLAFLTCLLYLALDVYFPQISSVKDRKKAVLSDIGVSAWEMHS

SEQ ID NO: 72685 - protein, 70 aa, Homo sapiens
METDLAEMPEKGGENCGRVELVAWKDEIPAPEGKTVGSGEVALGWLSPLSWGWMGFLSETEELGMGAPPF

SEQ ID NO: 72686 - protein, 79 aa, Homo sapiens
MPIPPPPPPPPGPPPPPTFHQANTEQPKLSRDEQRGRGALLQDICKGTKLKKSRKEAVVAMALEELPCSPREVSSKEEC

SEQ ID NO: 72687 - protein, 224 aa, Homo sapiens
MEDGPVFYGFKNIFITMFATFFFFKLLIKVFLALLTHFYIVKGNRKEAARIAEEIYGGISDCWADRSPLHEAAAQGRLLALKTLIAQGVNVNLVTINRVSSLHEACLGGHVACAKALLENGAHVNGVTVHGATPLFNACCSGSAACVNVLLEFGAKAQLEVHLASPIHEAVKRESRAVAQAAVQWHDFCSLQPLAPGFKRFSCLSLPSSWDYRSQRVHGDPAGK

SEQ ID NO: 72688 - protein, 233 aa, Homo sapiens
MGYTYKVIERILEIGAFRPHMSLGQLQSARGVACLGCKGTCSGFEPHSWRKICKSCKCSQEDHCLTSDLEDDRKIGRLLMDSKYSTLTARVKGGDGIRIYKRNRMIMTNPIATGKDPTFDTITYEWAPPGVTQKLGLQYMELIPKEKQPVTGTEGAFYRRRQLMHQLPIYDQDPSRCRGLLENELKLMEEFVKQYKSEALGVGEVALPGQGGLPKEEGKQQEKPEGAETTAAT

SEQ ID NO: 72689 - protein, 115 aa, Homo sapiens
MDSWTLCCVSLCILVAKHTDAGVIQSPRHEVTEMGQEVTLRCKPISGHDYLFWYRQTMMRGLELLIYFNNNVPIDDSGMPEDRFSAKMPNASFSTLKIQPSEPRDSAVYFCASSL

SEQ ID NO: 72690 - protein, 226 aa, Homo sapiens
MVKSSLQRILNSHCFAREKEGDKPSATIHASRTMPLLSLHSRGGSSSERVSLHCCSNPGPGPRWCSDAPHPPLKIPGGRGNSQRDHNLSANLFYSDDRLNVTEELTSNDKTRILNVQSRLTDAKRINWRTVLSGGSLYIEIPGGALPEGSKDSFAVLLEFAEEQLRADHVFICFHKNREDRAALLRTFSFLGFEIVRPGHPLVPKRPDACFMAYTFERESSGEEEE

SEQ ID NO: 72691 - protein, 75 aa, Homo sapiens
MDSDIKVLEDQFDEIIVDIATKRKQYPRKILECVIKTIKAKQEILKQYHPVVHPLDLKYDPDPGAKPGGLALGAV

SEQ ID NO: 72692 - protein, 374 aa, Homo sapiens
  MOD_RES (1)..(1): Any amino acid
XQQQQQTTTTSQVQVPQIQGQAQSPAQIKAVGKLTPEHLIKMQKQKLQMPPQPPPPQAQSAPPQPTAQVQVQTSQPPQQQSPQLTTVTAPRPGALLTGTTVANLQVARLLQAQGQMQTQAPQPAQVALAKPPVVSVPAAVVSSPGVTTLPMNVAGISVAIGQPQKAAGQTVVAQPVHMQQLLKLKQQAVQQQKAIQPQAAQGPAAVQQKITAQQITTPGAQQKVAYAAQPALKTQFLTTPISQAQKLAGAQQVQTQIQVAKLPQVVQQQTPVASIQQVASASQQASPQTVALTQATAAGQQVQMIPAVTATAQVVQQKLIQQQVVTTASAPLQTPGAPNPAQVPASSDSPSQQPKLQMRVPAVRLKTPTKPPCQ

SEQ ID NO: 72693 - protein, 189 aa, Homo sapiens
MNYSLHLAFVCLSLFTERMCIQGSQFNVEVGRSDKLSLPGFENLTAGYNKFLRPNFGGEPVQIALTLDIASISSISESNMDYTATIYLRQRWMDQRLVFEGNKSFTLDARLVEFLWVPDTYIVESKKSFLHEVTVGNRLIRLFSNGTVLYALRITTTVACNMDLSKYPMDTQTCKLQLESWGYDGNDVE

SEQ ID NO: 72694 - protein, 299 aa, Homo sapiens
MVVSAGPWSSEKAEMNILEINETLRPQLAEKKQQFRNLKEKCFLTQLAGFLANQQKKYKYEECKDLIKFMLRNERQFKEEKLAEQLKQAEELRQYKVLVHAQERELTQLREKLREGRDASRSLNEHLQALLTPDEPDKSQGQDLQEQLAEGCRLAQHLVQKLSPENDNDDDEDVQVEVAEKVQKSSAPREMQKAEEKEVPEDSLEECAITYSNSHGSYDSNQPHRKTKITFEEDKVDSTLIGSSSHVEWEDAVHIIPENESDDEEEEEKGPVSPRTSVGSSEKGGPRGNRSQAQQGAAG

SEQ ID NO: 72695 - protein, 232 aa, Homo sapiens
GPGAGPRGCREEPGPLRRREAAAEARKSHSPVKRPRKAQRLRVAYEGSDSEKGEGAEPLKVPVWEPQDWQQQLVNIRAMRNKKDAPVDHLGTEHCYDSSAPPKSKVKYIKQTSAILQQHYGGDIPASVAELVALPGVGPKMAHLAMAVAWGTVSGIAVDTHVHRIANRLRWTKKATKSPEETRAALEEWLPRELWHEINGLLVGFGQQTCLPVHPRCHACLNQALCPAAQGL

SEQ ID NO: 72696 - protein, 162 aa, Homo sapiens
MSSAAENGEAAPGKQNEEKTYKKTASSAIKGAIQLGIGYTVGNLTSKPERDVLMQDFYVVESVFLPSEGSNLTPAHHYPDFRFKTYAPLAFRYFRELFGIKPDDYLYSICSEPLIELSNPGASGSLFFVTSDDEFIIKTVQHKEAEFLQKLLPGYYMNLNQN

SEQ ID NO: 72697 - protein, 107 aa, Homo sapiens
MVSKFPVIVGHEATGIVESIGEGVTTVKPGDKVIPLFLPQCRECNACRNPDGNLCIRSDITGRGVLADGTTRFTCKGKPVHHFMNTSTFTEYTVVDESSVAKIDDAA

SEQ ID NO: 72698 - protein, 145 aa, Homo sapiens
MVDVPGHGKVMVDIAYGGAFYAFVTAEKLGLDICSAKTRDLVDAASAVTEAVKAQFKINHPDSEDLAFLYGTILTDGKDAYTKEPTTNICVFADEQVDRSPTGSGVTARIALQYHKGLLELNQMRAFKSSATGSVFTGKAVRELL

SEQ ID NO: 72699 - protein, 221 aa, Homo sapiens
INLSFAAKQRELHSHVTNAMVLVNVLQAIYVIDFFWNETWYLKTIDICHDHFGWYLGWGDCVWLPYLYTLQGLYLVYHPVQLSTPHAVGVLLLGLVGYYIFRVANHQKDLFRRTDGRCLIWGRKPKVIECSYTSADGQRHHSKLLVSGFWGVARHFNYVGDLMGSLAYCLACGGGHLLPYFYIIYMAILLTHRCLRDEHRCASKEFRVSSTAVLPAQTDFL

SEQ ID NO: 72700 - protein, 340 aa, Homo sapiens
MADEKPSNGVLVHMVKLLIKTFLDGIFDDLMENNVLNTDEIHLIGKCLKFVVSNAENLVDDITETAQIAGKIFREHLWNSKKQLSSDISSDGEREANMPGLNIRNKEFNYLHNRNGSELDLLGMDLLENLGYSVVIKENLTAQEMETALRQFAAHPEHQSSDSTFLVFMSHSILNGICGTKHWDQEPDVLHDDTIFEIFNNRNCQSLKDKPKVIIMQACRGNGAGIVWFTTDSGKASADTHGRLLQGNICNDAVTKAHVEKDFIAFKSSTPHNVSWRHETNGSVFISQIIYYFREYSWSHHLEEIFQKVQHSFETPNILTQLPTIERLSMTRYFYLFPGN

SEQ ID NO: 72701 - protein, 171 aa, Homo sapiens
MKQRQSALQWVICVSQPQKTSEMAANKSKGQSSLALHKVIMVGSGGVGKSALTLQFMYDEFVEDYEPTKADSYRKKVVLDGEEVQIDILDTAGQEDYAAIRDNYFRSGEGFLLVFSITEHESFTATAEFREQILRVKAEEDKIPLLVVGNKSDLEERRQVPVEEARSKAEE

SEQ ID NO: 72702 - protein, 548 aa, Homo sapiens
MEPGWRWELSPMHLLRLRRHTQDDDTLSPVLQLDTFKMAVHTPVPVAELLLRRLEASDGGLDSAELAAELGMEHQAVVGAVKSLQALGEVIEAELRSTKHWELTAEGEEIAREGSHEARVFRSIPPEGLAQSELMRLPSGKVGFSKAMSNKWIRVDKSAADGPRVFRVVDSMEDEVQRRLQLVRGGQAEKLGEKERSELRKRKLLAEVTLKTYWVSKGSAFSTSISKQETELSPEMISSGSWRDRPFKPYNFLAHGVLPDSGHLHPLLKVRSQFRQIFLEMGFTEMPTDNFIESSFWNFDALFQPQQHPARDQHDTFFLRDPAEALQLPMDYVQRVKRTHSQGGYGSQGYKYNWKLDEARKNLLRTHTTSASARALYRLAQKKPFTPVKYFSIDRVFRNETLDATHLAEFHQIEGVVADHGLTLGHLMGVLREFFTKLGITQLRFKPAYNPYTEPSMEVFSYHQGLKKWVEVGNSGVFRPEMLLPMGLPENVSVIAWGLSLERPTMIKYGINNIRELVGHKVNLQMVYDSPLCRLDAEPRPPPTQEAA

SEQ ID NO: 72703 - protein, 93 aa, Homo sapiens
MFGKRKKRVEISAPSNFEHRVHTGFDQHEQKFTGLPRQWQSLIEESARRPKPLVDPACITSIQPGAPKGEPHDVAPNGPSAGGLAIPQSSSSS

SEQ ID NO: 72704 - protein, 119 aa, Homo sapiens
  MOD_RES (1)..(1): Any amino acid
XSLAAIRDYSPGMRPEQKEALAKRLLAPELFGEVPAWPQELLWAVLPLLPHLPLENFLQLSPHQIQALEDSWPAAGLGPGHARHVLRSLVNQSVQDGEEQVRRWHMNFWVCCAHLEERC

SEQ ID NO: 72705 - protein, 78 aa, Homo sapiens
  MOD_RES (1)..(1): Any amino acid
XETRKVIEKLARFVAEGGPELEKVAMEDYKDNPAFAFLHDKNSREFLYYRKKVAEIRKEAQKSQAASQKEIRLLGVVS

SEQ ID NO: 72706 - protein, 154 aa, Homo sapiens
MPNPRPGKPSAPSLALGPSPGASPSWRAAPKASDLLGARGPGGTFQGRDLRGGAHASSSSLNPMPPSQLQVHPLESPAMISLTPPTTATGVFSLKARPGLPPGINVASLEWVSREPALLCTFPNPSAPRKDSTLSAVPQSSYPLLANGVCKWPG

SEQ ID NO: 72707 - protein, 91 aa, Homo sapiens
  MOD_RES (1)..(1): Any amino acid
XCFQGPFVQVDELMEIFRRCKIPNTVEEAVRIITGGAPELAVEGNGPVESNAVLTKAVKRPNEDSDEDEEKGAVVPPVHDIYRARQQKRIR

SEQ ID NO: 72708 - protein, 106 aa, Homo sapiens
MRMSVGLSLLLPLSGRTFLLLLSVVMAQSHWPSEPSEAVRDWENQLEASMHSVLSDLHEAVPTVVGIPDGTAVVGRSFRVTIPTDLIASSGDIIKVSAAGKEALPS

SEQ ID NO: 72709 - protein, 65 aa, Homo sapiens
  MOD_RES (1)..(1): Any amino acid
XSGDPELSCSCTLRTQSRFPLRMSRRGMVRKSRAWVLEKKERHRRQGREVRPDTQYTGRKRKPRF

SEQ ID NO: 72710 - protein, 373 aa, Homo sapiens
MDDLGSSEEEEDEESGMEEGDDAEDSQGESEEDRAGDRNSEDDGVVMTFSSVKVSEEVEKGRAVKNQIALWDQLLEGRIKLQKALLTTNQLPQPDVFPLFKDKGGPEFSSALKNSHKALKALLRSLVGLQEELLFQYPDTRYLVDGTKPNAGSEEISSEDDELVEEKKQQRRRVPAKRKLEMEDYPSFMAKRFADFTVYRNRTLQKWHDKTKLASGKLGKGFGAFERSILTQIDHILMDKERLLRRTQTKRSVYRVLGKPEPAAQPVPESLPGEPEILPQAPANAHLKDLDEEIFDDDDFYHQLLRELIERKTSSLDPNDQVAMGRQWLAIQKLRSKIHKKVDRKASKGRKLRTELYRSLFGQLHPPDEGHGD

SEQ ID NO: 72711 - protein, 605 aa, Homo sapiens
MSTERTSWTSLSTIQKIALGLGIPASATVAYILYRRYRESREERLTFVGEDDIEIEMRVPQEAVKLIIGRQGANIKQLRKQTGARIDVDTEDVGDERVLLISGFPVQVCKAKAAIHQILTENTPVSEQLSVPQRSVGRIIGRGGETIRSICKASGAKITCDKESEGTLLLSRLIKISGTQKEVAAAKHLILEKVSEDEELRKRIAHSAETRVPRKQPISVRREDMTEPGGAGEPALWKNTSSSMEPTAPLVTPPPKGGGDMAVVVSKEGSWEKPSDDSFQKSEAQAIPEMPMFEIPSPDFSFHADEYLEVYVSASEHPNHFWIQIVGSRSLQLDKLVNEMTQHYENSVPEDLTVHVGDIVAAPLPTNGSWYRARVLGTLENGNLDLYFVDFGDNGDCPLKDLRALRSDFLSLPFQAIECSLARIAPSGDQWEEEALDEFDRLTHCADWKPLVAKISSYVQTGISTWPKIYLYDTSNGKKLDIGLELVHKGYAIELPEDIEENRAVPDMLKDMATETDASLSTLLTETKKSSGEITHTLSCLSLSEAASMSGDDNLEDDYLLSLGFSLLSHLLCCMLPAMNSLKHAQPWNWCYQSSVGNLYSLEVP

SEQ ID NO: 72712 - protein, 46 aa, Homo sapiens
MAYGVPRKNTVKTILRGSCYNVVSHCHAGWNVVHLLGLSDPPISAS

SEQ ID NO: 72713 - protein, 139 aa, Homo sapiens
MAPPVRYCIPGERLCNLEEGSPGSGTYTRHGYIFSSLAGCLMKSSENGALPVVSVVRETESQLLPDVGAIVTCKVSSINSRFAKVHILYVGSMPLKNSFRGTIRKEDVRATEKDKVSRWFPSAGVRCSALRPTLKNSGK

SEQ ID NO: 72714 - protein, 22 aa, Homo sapiens
  MOD_RES (1)..(1): Any amino acid
XNSGGSNYKLTFGKGTLLTVNP

SEQ ID NO: 72715 - protein, 153 aa, Homo sapiens
MRVTVAPQTKPVFSTNELAHLSPPSAPASQRESGVGLRASCPTEWGQKVVRGAFRGALRAEKRPAATAQIEIIPCKICGDKSSGIHYGVITCEGCKGFFRRSQQSNATYSCPRQKNCLIDRTSRNRCQHCRLQKCLAVGMSRDAVKFGRMSKK

SEQ ID NO: 72716 - protein, 131 aa, Homo sapiens
MGPAVLGQGEEGQPEARACSGLLQPPKRPIVFKEKLTMKTDSLMEEKLECSLWCCLSDPSTPGRCCVLERRIVPWMQQESYSSSSPIWSVDSDEPNLTSVLERLEDTKDNSSVRKETKLFSLFLMNIIFRN

SEQ ID NO: 72717 - protein, 119 aa, Homo sapiens
MALSVLRLALLLLAVTFAGSARSGPGERGPPEKSGFGSQTGGGPCPAPGGLGDASLIPQFGLFSKYRTPNCSQYRLPGCPRHFNPVCGSDMSTYANECTLCMKIREGGHNIKIIRNGPC

SEQ ID NO: 72718 - protein, 142 aa, Homo sapiens
MQKSEGSGGTQLKNRATGNYDQRTSSSTQLKHRNAVQGSKSSLSTSSPESARKLHPRPSDKLNPKTINPGLRETKHPYTFVSKEGFRELLLVKGAPEKAIPLLPRLIPVLKAALVHSDDEVFERGLNALVQLSVVVGPSLND

SEQ ID NO: 72719 - protein, 217 aa, Homo sapiens
  MOD_RES (1)..(1): Any amino acid
XPVKLEFDVSDGATSKRAPPPRRLGERSGLKPPLRKAAVRQQKAPQEVEEDDGRSGAGEDPPMPASRGSYHLDWDKMDDPNFIPFGGDTKSGCSEAQPPESPETRLGQPAAEQLHAGPATEEPGPCLSQQLHSASAEDTPVVQLAAETPTAESKERALNSASTSLPTSCPGSEPVDYLEQFGTSSFKESALRKQSLYLKFDPLLRDSPGRPVPVATE

SEQ ID NO: 72720 - protein, 150 aa, Homo sapiens
MATPSAAFEALMNGVTSWDVPEDAVPCELLLIGEASFPVMVNDMGQVLIAASSYGRGRLVVVSHEDYLVEAQLTPFLLNAVGWLCSSPGAPIGVHPSLAPLAKILEGSGVDAKVEPEVKDSLGVYCIDAYNETMTEKLVKFMKCGGGLLI

SEQ ID NO: 72721 - protein, 1055 aa, Homo sapiens
MQPEEGTGWLLELLSEVQLQQYFLRLRDDLNVTRLSHFEYVKNEDLEKIGMGRPGQRRLWEAVKRRKALCKRKSWMSKVFSGKRLEAEFPPHHSQSTFRKTSPAPGGPAGEGPLQSLTCLIGEKDLRLLEKLGDGSFGVVRRGEWDAPSGKTVSVAVKCLKPDVLSQPEAMDDFIREVNAMHSLDHRNLIRLYGVVLTPPMKMVTELAPLGSLLDRLRKHQGHFLLGTLSRYAVQVAEGMGYLESKRFIHRDLAARNLLLATRDLVKIGDFGLMRALPQNDDHYVMQEHRKVPFAWCAPESLKTRTFSHASDTWMFGVTLWEMFTYGQEPWIGLNGSQILHKIDKEGERLPRPEDCPQDIYNVMVQCWAHKPEDRPTFVALRDFLLEAQPTDMRALQDFEEPDKLHIQMNDVITVIEGRAENYWWRGQNTRTLCVGPFPRNVVTSVAGLSAQDISQPLQNSFIHTGHGDSDPRHCWGFPDRIDELYLGNPMDPPDLLSVELSTSRPPQHLGGVKREPPPRPPQPAFFTQKPTYDPVSEDQDPLSSDFKRLGLRKPGLPRGLWLAKPSARVPGTKASRGSGAEVTLIDFGEEPVVPALRPCAPSLAQLAMDACSLLDETPPQSPTRALPRPLHPTPVVDWDARPLPPPPAYDDVAQDEDDFEICSINSTLVGAGVPAGPSQGQTNYAFVPEQARPPPPLEDNLFLPPQGGGKPPSSAQTAEIFQALQQECMRQLQAPAGSPAPSPSPGGDDKPQVPPRVPIPPRPTRPHVQLSPAPPGEEETSQWPGPASPPRVPPREPLSPQGSRTPSPLVPPGSSPLPPRLSSSPGKTMPTTQSFASDPKYATPQVIQAPGPRAGPCILPIVRDGKKVSSTHYYLLPERPSYLERYQRFLREAQSPEEPTPLPVPLLLPPPSTPAPAAPTATVRPMPQAALDPKANFSTNNSNPGARPPPPRATARLPQRGCPGDGPEAGRPADKIQMLQAMVHGVTTEECQAALQCHGWSVQRAAQYLKVEQLFGLGLRPRGECHKVLEMFDWNLEQAGCHLLGSWGPAHHKR

SEQ ID NO: 72722 - protein, 223 aa, Homo sapiens
MTVLIKRNTTIPTKQTQTFTTYSDNQPGVLIQVYEGERAMTKDNNLLGKFELTGIPPAPRGVPQIEVTFDIDANGILNVSAVDKSTGKENKITITNDKGRLSKEDIERMVQEAEKYKAEDEKQRDKVSSKNSLESYAFNMKATVEDEKLQGKINDEDKQKILDKCNEIINWLDKNQTAEKEEFEHQQKELEKVCNPIITKLYQSAGGMPGGMPGGFPGGGAPP

SEQ ID NO: 72723 - protein, 137 aa, Homo sapiens
MKMASSLAFLLLNFHVSLFLVQLLTPCSAQFSVLGPSGPILAMVGEDADLPCHLFPTMSAETMELRWVSSSLRQVVNVYADGKEVEDRQSAPYRGRTSILRDGITAGKAALRIHNVTASDSGKYLCYFQDGDFYEKA

SEQ ID NO: 72724 - protein, 19 aa, Homo sapiens
MPIRRTVNSTRETPPKSKL

SEQ ID NO: 72725 - protein, 91 aa, Homo sapiens
MVLEGNPEVGSPRTSDLQHRGNKGSCVLSSPGEDAQPGEEPIKYGELIVLGYNGCLASGDKGRRRSRLALSRRSHANGVKPDVMHHISTPL

SEQ ID NO: 72726 - protein, 840 aa, Homo sapiens
MGLPTLEFSDSYLDSPDFRERLQCHEIELERTNKFIKELIKDGSLLIGALRNLSMAVQKFSQSLQDFQFECIGDAETDDEISIAQSLKEFARLLIAVEEERRRLIQNANDVLIAPLEKFRKEQIGAAKADTQIDREHQNFYEASLEYVFKIQEVQEKKKFEFVEPLLSFLQGLFTFYHEGYELAQEFAPYKQQLQFNLQNTRNNFESTRQEVERLMQRMKSANQDYRPPSQWTMEGYLYVQEKRPLGFTWIKHYCTYDKGSKTFTMSVSEMKSSGKMNGLVTSSPEMFKLKSCIRRKTDSIDKRFCFDIEVVERHGIITLQAFSEANRKLWLEAMDGKEPIYTLPAIISKKEEMYLNEAGFNFVRKCIQAVETRGITILGLYRIGGVNSKVQKLMNTTFSPKSPPDIDIDIELWDNKTITSGLKNYLRCLAEPLMTYKLHKDFIIAVKSDDQNYRVEAVHALVHKLPEKNREMLDILIKHLVKVSLHSQQNLMTVSNLGVIFGPTLMRAQEETVAAMMNIKFQNIVVEILIEHYEKIFHTAPDPSIPLPQPQSRSGSRRTRAICLSTGSRKPRGRYTPCLAEPDSDSYSSSPDSTPMGSIESLSSHSSEQNSTTKSASCQPREKSGGIPWIATPSSSNGQKSLGLWTTSPESSSREDATKTDAESDCQSVASVTSPGDVSPPIDLVKKEPYGLSGLKRASASSLRSISAAEGNKSYSGSIQSLTSVGSKETPKASPNPDLPPKMCRRLRLDTASSNGYQRPGSVVAAKAQLFENVGSPKPVSSGRQAKAMYSCKAEHSHELSFPQGAIFSNVYPSVEPGWLKATYEGKTGLVPENYVVFL

SEQ ID NO: 72727 - protein, 246 aa, Homo sapiens
GQCLVWVQCSFPNCGKWRRLCGNIDPSVLPDNWSCDQNTDVQYNRCDIPEETWTGLESDVAYASYIPGSIIWAKQYGYPWWPGMIESDPDLGEYFLFTSHLDSLPSKYHVTFFGETVSRAWIPVNMLKNFQELSLELSVMERVNLFGFWSRFNGSNSNGERKDLQLSGLNSPGSCLEKKEKEEELEKEEGEKTALRKNLKLPRARPWQPAFQREKKLEQCQRTWAYQRVRGPAPHLRKKSPDTGNP

SEQ ID NO: 72728 - protein, 1178 aa, Homo sapiens
MSRETRRGALPRLRRGEQAAKMPGRCVGPSRSGRGVRRPWGKRRGAGTSRGRGARRRAKPSEWETRCVSAERPQGRQRPWGTRQAAETADAAGANEALGAPGTPGSIEAARDPGAVWVNGAVGEPEVVGLAGAVWVTGSGEEETEDRSPRGCERKGRPGSLGHESILHLWLKVQAMRAASGCGEGSRVELHPVPAGEGPVERGVPGRASWVETSRGGLTGPWVKEQARGIPRAPSGPTALGLGAAYERALGFCGQGQAGRVPPASVPGALASSSEMAPHLWRGEAVGVPETGEEIGYGFVSGPCEKEQTMGEPGTVGWTGAVGAPRAMEGELGCGGAAGLWGRGQSPQIPGALTHEAVCGATPGVWGRGQAVGVSDAVEEEPTSVGAAGVCYRRQAVEETDSVGMPGPWGTGYSVGVPCAAEEETRCGGDPGFRERGQPVWVETGSGGDPGSRGAAQTAESSCPGEQAAGSGGAPGLWGIQQATGVPRALGKDTGCVSVPGLWGAGQMVRVPQAVVVPGALGEELSHSGGLGLWDGQQALGGPPAEAVPGLGEETCSGNVLSPWERRQAVGEPESLGPPALGVPGSVDQEAGCGDVACQCGRRQAVGVSETVGIPRAADVPRQGCAAAGVLMAMGVPGSGKVPARVPAAVWASGPVCQEGSSRDILNLWERTRAARISVASGGPVAREELWSGGEESVASGGPVAQEELWSGGEESVASGGHVAREKLWSGGEDCGSGAFPGPWGRRQTIGVPVVPEGPGLGGETDSGGIPRPWGQRQRVRAPVATEVLLAPRVPGSVELEPGDGGFSGLSGRQQTAGMPGTVGLSAASGVPVAPRVPRPVQEETGSELWGERETVGGPADAKGPTRMEVPTSTRMPGPMAEKTGSGGVSGLLGGRQTTGVSMAVGLLGSVGEGTIFEHVSGLSGRRQTAGRPVAARGSMAVGVPTAPGLPGPMVGDTGSGDDGSGIWGRRLATEGPTAARVPGPVEGETGSEGVSGLWRRRHGGAIPEAGRVPLPLGVLAAVGAPMAGRAPAAVWVTGSSGAEADVGVSGLTVLRRQSTGGVGASEDETGGGNILGLAGGSQAVGTSHTCVPGARLWSCPRSLGEETAYENALGMSGTRTAVGVPSVSREEIGLGHFRDHLQPSGRRLAGGVSAVRVRGSNLGESYVGEARLRGAFQ

SEQ ID NO: 72729 - protein, 70 aa, Homo sapiens
MDSVMPSQEPPVDDKNEDADLPSEETDGIAYISSSRKHDSIKDDSEDLKPVIDGMDGIKISQGLGLQDFD

SEQ ID NO: 72730 - protein, 167 aa, Homo sapiens
MTMPVNGAHKDADLWSSHDKMLAQPLKDSDVEVYNIIKKESNRQRVGLELIASENFASRAVLEALGSCLNNKYSEGYPGQRYYGGTEFIDELETLCQKRALQAYKLDPQCWGVNVQPYSGSPANFAVYTALVEPHGRIMGLDLPDGGHLTHGFMTDKKKISATSIFF

SEQ ID NO: 72731 - protein, 145 aa, Homo sapiens
MAARVLRARGAAWAGGLLQRAAPCSLLPRLRTWTSSSNRSREDSWLKSLFVRKVDPRKDAHSNLLAKKETSNLYKLQFHNVKPECLEAYNKICSSLFAEHKDLTPAWFLGVPIMGFCPTHPVLGTSTACLTISIQSRGVAKDSRR

SEQ ID NO: 72732 - protein, 23 aa, Homo sapiens
MSSESKEQHNVSPRDSAEGNDSY

SEQ ID NO: 72733 - protein, 117 aa, Homo sapiens
MEFGLSWVFLVAILKGVQCEVQLVESGGGLVQPGGSLRLSCAASGFTFSSYWMHWVRQAPGKGLVWVSRINSDGSSTSYADSMKGQFTISRDNAKNTLYLQMNSLRAEDMAVYYCTR

SEQ ID NO: 72734 - protein, 64 aa, Homo sapiens
MMRWKKADQWLLQKCIGGVRGMWRFYSYLTGSAGEELVDFWILAENILSIDEMDLEVRDYYLSL

SEQ ID NO: 72735 - protein, 430 aa, Homo sapiens
MMSEGKPPDKKRPRRSLSISKNKKKASNSIISCFNNAPPAKLACPVCSKMVPRYDLNRHLDEMCANNDFVQVDPGQVGLINSNVSMVDLTSVTLEDVTPKKSPPPKTNLTPGQSDSAKREVKQKISPYFKSNDVVCKNQDELRNRSVKVICLGSLASKLSRKYVKAKKSIDKDEEFAGSSPQSSKSTVVKSLIDNSSEIEDEDQILENSSQKENVFKCDSLKEECIPEHMVRGSKIMEAESQKATRECEKSALTPGFSDNAIMLFSPDFTLRNTLKSTSEDSLVKQECIKEVVEKREACHCEEVKMTVASEAKIQLSDSEAKSHSSADDASAWSNIQEAPLQDDSCLNNDIPHSIPLEQGSSCNGPGQTTGHPYYLRSFLVVLKTVLENEDDMLLFDEQEKGIVTKFYQLSDLWTVPFKDRVWRKWKLSS

SEQ ID NO: 72736 - protein, 155 aa, Homo sapiens
MNEEYDVIVLGTGLTLYKRFKIPGSPPESMGRGRDWNVDLIPKFLMANGQLVKMLLYTEVTRYLDFKVTEGSFVYKGGKIYKVPSTEAEALASSLMGLFEKRRFRKFLVYVANFDEKDPRTFEGIDPKKTTMRDVYKKFDLGQDVIDFTGHALAL

SEQ ID NO: 72737 - protein, 172 aa, Homo sapiens
  MOD_RES (1)..(1): Any amino acid
XQVEQVLLAYSRCIQVRASCWAWACGQERGQVTGALLLSVVGGKMSEGINFSDNLGRCVVMVGMPFPNIRSAELQEKMAYLDQTLPRAPGQAPPGKALVENLCMKAVNQSIGRAIRHQKDFASVVLLDQRYARPPVLAKLPAWIRARVEVKATFGPAIAAVQKFHREKSASS

SEQ ID NO: 72738 - protein, 77 aa, Homo sapiens
HQHQEPAKPAVQAPWSTAEKGPLTISAQENVKVVYYRALYPFESRSHDEITIQPGDIVMGNGWMKAKLENPAGLEEN

SEQ ID NO: 72739 - protein, 169 aa, Homo sapiens
MWPDDLQNHTFLHTVYCQDGSPSVGLSEAYDEDQLFFFDFSQNTRVPRLPEFADWAQEQGDAPAILFDKEFCEWMIQQIGPKLDGKIPVSRGFPIAEVFTLKPLEFGKPNTLVCFVSNLFPPMLTVNWQHHSIPVEGFGPTFVSAVDGLSFQAFSYLNFTPEPSDIFSC

SEQ ID NO: 72740 - protein, 97 aa, Homo sapiens
PESEQGRRTSLEKFTRSVCCWRRVRMAAAFHPRGGFLPAVGKVAGGQAPHGPDAVLLTVPTAGPGPGPADPTGRRRRSTSADRVSLRGDLVTVKEKE

SEQ ID NO: 72741 - protein, 35 aa, Homo sapiens
  MOD_RES (1)..(1): Any amino acid
XDRDSYRRILMGSTLRKRKMYEEFLSKVSILVGIN

SEQ ID NO: 72742 - protein, 164 aa, Homo sapiens
MNMPVNKSPMINTCGGISSPYHEELWKLNFQHLSGERGHKSRPTFSITKEFILRFNQTQNSKEKEELLELARKIILRCKRKLGLKTLGSGRHVHLPAAWTEVIYLAQCKGEIQDESLNMLYASLDHASFDYDHLPALFFVAESVLYRLCCDASLKTYLYSVEIK

SEQ ID NO: 72743 - protein, 1575 aa, Homo sapiens
MMENLIRGRNPPQYQRSPCKEVRAALRKRPEEELQCLEMTTKRKIIGRLVPCRCFRGEEEIISVLDYSHCSLQQVPKEVFNFERTLEELYLDANQIEELPKQLFNCQALRKLSIPDNDLSNLPTTIASLVNLKELDISKNGVQEFPENIKCCKCLTIIEASVNPISKLPDGFTQLLNLTQLYLNDAFLEFLPANFGRLVKLRILELRENHLKTLPKSMHKLAQLERLDLGNNEFGELPEVLDQIQNLRELWMDNNALQVLPGSIGKLKMLVYLDMSKNRIETVDMDISGCEALEDLLLSSNMLQQLPDSIGLLKKLTTLKVDDNQLTMLPNTIGNLSLLEEFDCSCNELESLPSTIGYLHSLRTLAVDENFLPELPREIGSCKNVTVMSLRSNKLEFLPEEIGQMQKLRVLNLSDNRLKNLPFSFTKLKELAALWLSDNQSKALIPLQTEAHPETKQRVLTNYMFPQQPRGDEDFQSDSDSFNPTLWEEQRQQRMTVAFEFEDKKEDDENAGKVKDLSCQAPWERGQRGITLQPARLSGDCCTPWARCDQQIQDMPVPQNDPQLAWGCISGLQQERSMCTPLPVAAQSTTLPSLSGRQVEINLKRYPTPYPEDLKNMVKSVQNLVGKPSHGVRVENSNPTANTEQTVKEKYEHKWPVAPKEITVEDSFVHPANEMRIGELHPSLAETPLYPPKLVLLGKDKKESTDESEVDKTHCLNNSVSSGTYSDYSPSQASSGSSNTRVKVGSLQTTAKDAVHNSLWGNRIAPSFPQPLDSKPLLSQREAVPPGNIPQRPDRLPMSDTFTDNWTDGSHYDNTGFVAEETTAENANSNPLLSSKSRSTSSHGRRPLIRQDRIVGVPLELEQSTHRHTPETEVPPSNPWQNWTRTPSPFEDRTAFPSKLETTPTTSPLPERKEHIKESTEIPSPFSPGVPWEYHDSNPNRSLSNVFSQIHCRPESSKGVISISKSTERLSPLMKDIKSNKFKKSQSIDEIDIGTYKVYNIPLENYASGSDHLGSHERPDKMLGPEHGMSSMSRSQSVPMLDDEMLTYGSSKGPQQQKASMTKKVYQFDQSFNPQGSVEVKAEKRIPPPFQHNPEYVQQASKNIAKDLISPRAYRGYPPMEQMFSFSQPSVNEDAVVNAQFASQGARAGFLRRADSLVSATEMAMFRRVNEPHELPPTDRYGRPPYRGGLDRQSSVTVTESQFLKRNGRYEDEHPSYQEVKAQAGSFPVKNLTQRRPLSARSYSTESYGASQTRPVSARPTMAALLEKIPSDYNLGNYGDKPSDNSDLKTRPTPVKGEESCGKMPADWRQQLLRHIEARRLDRNAAYKHNTVNLGMLPYGGISAMHAGRSMTLNLQTKSKFDHQELPLQKTPSQQSNILDNGQEDVSPSGQWNPYPLGRRDVPPDTITKKAGSHIQTLMGSQSLQHRSREQQPYEGNINKVTIQQFQSPLPIQIPSSQATRGPQPGRCLIQTKGQRSMDGYPEQFCVRIEKNPGLGFSISGGISGQGNPFKPSDKGIFVTRVQPDGPASNLLQPGDKILQANGHSFVHMEHEKAVLLLKSFQNTVDLVIQRELTV

SEQ ID NO: 72744 - protein, 2718 aa, Homo sapiens
MADEEAEQERLSCGEGGCVAELQRLGERLQELELQLRESRVPAVEAATDYCQQLCQTLLEYAEKWKTSEDPLPLLEVYTVAIQSYVKARPYLTSECENVALVLERLALSCVELLLCLPVELSDKQWEQFQTLVQVAHEKLMENGSCELHFLATLAQETGVWKNPVLCTILSQEPLDKDKAFEGPILLDMRIKHLIKTNQLSQATALAKLCSDHPEIGIKGSFKQTYLVCLCTSSPNGKLIEEISEVDCKDALEMICNLESEGDEKSALVLCTAFLSRQLQQGDMYCAWELTLFWSKLQQRVEPSIQVYLERCRQLSLLTKTVYHIFFLIKVINSETEGAGLATCIELCVKALRLESTENTEVKISICKTISCLLPDDLEVKRACQLSEFLIEPTVDAYYAVEMLYNQPDQKYDEENLPIPNSLRCELLLVLKTQWPFDPEFWDWKTLKRQCLALMGEEASIVSSIDELNDSEVYEKVVDYQEESKETSMNGLSGGVGANSGLLKDIGDEKQKKREIKQLRERGFISARFRNWQAYMQYCVLCDKEFLGHRIVRHAQKHYKDGIYSCPICAKNFNSKETFVPHVTLHVKQSSKERLAAMKPLRRLGRPPKITTTNENQKTNTVAKQEQRPIKKNSLYSTDFIVFNDNDGSDDENDDKDKSYEPEVIPVQKPVPVNEFNCPVTFCKKGFKYFKNLIAHVKGHKDNEDAKRFLEMQSKKVICQYCRRHFVSVTHLNDHLQMHCGSKPYICIQMKCKAGFNSYAELLTHRKEHQVFRAKCMFPKCGRIFSEAYLLYDHEAQHYNTYTCKFTGCGKVYRSQGELEKHLDDHSTPPEKVLPPEAQLNSSGDSIQPSEVNQNTAENIEKERSMLPSENNIENSLLADRSDAWDKSKAESAVTKQDQISASELRQANGPLSNGLENPATTPLLQSSEVAVSIKVSLNQGIEDNFGKQENSTVEGSGEALVTDLHTPVEDTCNDLCHPGFQERKEQDCFNDAHVTQNSLVNSETLKIGDLTPQNLERQVNNLMTFSVQNQAAFQNNLPTSKFECGDNVKTSSNLYNLPLKTLESIAFVPPQSDLSNSLGTPSVPPKAPVQKFSCQVEGCTRTYNSSQSIGKHMKTAHPDQYAAFKMQRKSKKGQKANNLNTPNNGKFVYFLPSPVNSSNPFFTSQTKANGNPACSAQLQHVSPPIFPAHLASVSTPLLSSMESVINPNITSQDKNEQGGMLCSQMENLPSTALPAQMEDLTKTVLPLNIDSGSDPFLPLPAESSSMSLFPSPADSGTNSVFSQLENNTNHYSSQIEGNTNSSFLKGGNGENAVFPSQVNVANNFSSTNAQQSAPEKVKKDRGRGPNGKERKPKHNKRAKWPAIIRDGKFICSRCYRAFTNPRSLGGHLSKRSYCKPLDGAEIAQELLQSNGQPSLLASMILSTNAVNLQQPQQSTFNPEACFKDPSFLQLLAENRSPAFLPNTFPRSGVTNFNTSVSQEGSEIIKQALETAGIPSTFEGAEMLSHVSTGCVSDASQVNATVMPNPTVPPLLHTVCHPNTLLTNQNRTSNSKTSSIEECSSLPVFPTNDLLLKTVENGLCSSSFPNSGGPSQNFTSNSSRVSVISGPQNTRSSHLNKKGNSASKRRKKVAPPLIAPNASQNLVTSDLTTMGLIAKSVEIPTTNLHSNVIPTCEPQSLVENLTQKLNNVNNQLFMTDVKENFKTSLESHTVLAPLTLKTENGDSQMMALNSCTTSINSDLQISEDNVIQNFEKTLEIIKTAMNSQILEVKSGSQGAGETSQNAQINYNIQLPSVNTVQNNKLPDSSPFSSFISVMPTKSNIPQSEVSHKEDQIQEILEGLQKLKLENDLSTPASQCVLINTSVTLTPTPVKSTADITVIQPVSEMINIQFNDKVNKPFVCQNQGCNYSAMTKDALFKHYGKIHQYTPEMILEIKKNQLKFAPFKCVVPTCTKTFTRNSNLRAHCQLVHHFTTEEMVKLKIKRPYGRKSQSENVPASRSTQVKKQLAMTEENKKESQPALELRAETQNTHSNVAVIPEKQLVEKKSPDKTESSLQVITVTSEQCNTNALTNTQTKGRKIRRHKKEKEEKKRKKPVSQSLEFPTRYSPYRPYRCVHQGCFAAFTIQQNLILHYQAVHKSDLPAFSAEVEEESEAGKESEETETKQTLKEFRCQVSDCSRIFQAITGLIQHYMKLHEMTPEEIESMTASVDVGKFPCDQLECKSSFTTYLNYVVHLEADHGIGLRASKTEEDGVYKCDCEGCDRIYATRSNLLRHIFNKHNDKHKAHLIRPRRLTPGQENMSSKANQEKSKSKHRGTKHSRCGKEGIKMPKTKRKKKNNLENKNAKIVQIEENKPYSLKRGKHVYSIKARNDALSECTSRFVTQYPCMIKGCTSVVTSESNIIRHYKCHKLSKAFTSQHRNLLIVFKRCCNSQVKETSEQEGAKNDVKDSDTCVSESNDNSRTTATVSQKEVEKNEKDEMDELTELFITKLINEDSTSVETQANTSSNVSNDFQEDNLCQSERQKASNLKRVNKEKNVSQNKKRKVEKAEPASAAELSSVRKEEETAVAIQTIEEHPASFDWSSFKPMGFEVSFLKFLEESAVKQKKNTDKDHPNTGNKKGSHSNSRKNIDKTAVTSGNHVCPCKESETFVQFANPSQLQCSDNVKIVLDKNLKDCTELVLKQLQEMKPTVSLKKLEVHSNDPDMSVMKDISIGKATGRGQY

SEQ ID NO: 72745 - protein, 113 aa, Homo sapiens
MSFFPELYFNVDNGYLEGLVRGLKAGVLSQADYLNLVQCETLEDLKLHLQSTDYGNFLANEASPLTVSVIDDRLKEKMVVEFRHMRNHAYEPLASFLDFITGFFPGLHFRAGP

SEQ ID NO: 72746 - protein, 86 aa, Homo sapiens
  MOD_RES (1)..(1): Any amino acid
XSTDPVKAAQFEPPGRQMIAIRKRQLEETNNDYETADGGYMTLNPRAPTDDDKNIYLTLPPNDHVNMQLPEGCDLLREVIPGRLET

SEQ ID NO: 72747 - protein, 107 aa, Homo sapiens
MAASKVKQDMPPPGGYGPIDYKRNLPRRGLSENPWHGGRGVTVQAASLLRSRQCPLIAEWAAPGAVEEGVWGRAGPLSSASLHRLQHAGHRDWNPDLRALEHNEVEP

SEQ ID NO: 72748 - protein, 43 aa, Homo sapiens
MPGAEDDVVTPGTSEDRYKSGLTTLRKWMETHRQQLRKMVCQQ

SEQ ID NO: 72749 - protein, 132 aa, Homo sapiens
MPAALVENSQVICEVWASNLEEEMRKIREIVLSYSYIAMDTEFPGVVVRPIGEFRSSIDYQYQLLRCNVDLLKIIQLGLTFTNEKGEYPSGINTWQFNFKFNLTEDMYSQDSIDLLANSGLQFQKHEEEGID

SEQ ID NO: 72750 - protein, 57 aa, Homo sapiens
MSGFDDPGIFYSDSFGGDAQADEGQARKSQLQRRFKEFLRQYRVGTDRTGFTFKYSS

SEQ ID NO: 72751 - protein, 280 aa, Homo sapiens
MVQETSRTLTVRYQYPTMDELAEMLPPVLTHLSLKSIIGIGVGAGAYILSRFALNHPELVEGLVLINVDPCAKGWIDWAASKLSGLTTNVVDIILAHHFGQEELQANLDLIQTYRMHIAQDINQDNLQLFLNSYNGRRDLEIERPILGQNDNKSKTLKCSTLLVVGDNSPAVEAVVECNSRLNPINTTLLKMADCGGLPQVVQPGKLTEAFKYFLQGMGYIPSASMTRLARSRTHSTSSSLGSGESPFSRSVTSNQSDGTQESCESPDVLDRHQTMEVSC

SEQ ID NO: 72752 - protein, 115 aa, Homo sapiens
MSGMEATVTIPIWQNKPHGAARSVVRRIGTNLPLKPCARASFETLPNISDLCLRDVPPVPTLADIAWIAADEEETYARVRSDTRPLRHTWKPSPLIVMQRNASVPNLRGSEERLL

SEQ ID NO: 72753 - protein, 152 aa, Homo sapiens
MVATPKEGTQGSEKGRLGTVVQTSMSRSQVALLGLSLLLMLLLYVGLPGPPEQTSCLWGDPNVTVLAGLTPGNSPIFYREVLPLNQAHRVEVVLLHGKAFNSHTWEQLGTLQLLSQRGYRAVALDLPGFGNSAPSKEASTEAGRAALLERAL

SEQ ID NO: 72754 - protein, 958 aa, Homo sapiens
MGQLCWLPLLAPLLLLRPPGVQSAGPIRAFVVPHSHMDVGWVYTVQESMRAYAANVYTSVVEELARGQQRRFIAVEQEFFRLWWDGVASDQQKYQVRQLLEEGRLEFVIGGQVMHDEAVTHLDDQILQLTEGHGFLYETFGIRPQFSWHVDPFGASATTPTLFALAGFNAHLGSRIDYDLKAAMQEARGLQFVWRGSPSLSERQEIFTHIMDQYSYCTPSHIPFSNRSGFYWNGVAVFPKPPQDGVYPNMSEPVTPANINLYAELGVSVQYATLGDYFRALHALNVTWRVRDHHDFLPYSTEPFQAWTGFYTSRSSLKGLARRASALLYAGESMFTRYLWPAPRGHLDPTWALQQLQQLRWAVSEVQHHDAITGTESPKVRDMYATHLASGMLGMRKLMASIVLDELQPQAPMAASSDAGPAGHFASVYNPLAWTVTTIVTLTVGFPGVRVTDEAGHPVPSQIQNSTETPSAYDLLILTTIPGLSYRHYNIRPTAGAQEGTQEPAATVASTLQFGRRLRRRTSHAGRYLVPVANDCYIVLLDQDTNLMHSIWERQSNRTVRVTQEFLEYHVNGDVKQGPISDNYLFTPGKAAVPAWEAVEMEIVAGQLVTEIRQYFYRNMTAQNYTYAIRSRLTHVPQGHDGELLCHRIEQEYQAGPLELNREAVLRTSTNLNSQQVIYSDNNGYQMQRRPYVSYVNNSIARNYYPMVQSAFMEDGKSRLVLLSERAHGISSQGNGQVEVMLHRRLWNNFDWDLGYNLTLNDTSVVHPVLWLLLGSWSLTTALRQRSALALQHRPVVLFGDLAGTAPKLPGPQQQEAVTLPPNLHLQILSIPGWRYSSNHTEHSQNLRKGHRGEAQADLRRVLLRLYHLYEVGEDPVLSQPVTVNLEAVLQALGSVVAVEERSLTGTWDLSMLHRWSWRTGPGRHRGDTTSPSRPPGGPIITVHPKEIRTFFIHFQQQ

SEQ ID NO: 72755 - protein, 42 aa, Homo sapiens
MKNQNGTFKDWANANVSRQIEDTVLYGYYILGYMCRMYRFVT

SEQ ID NO: 72756 - protein, 84 aa, Homo sapiens
  MOD_RES (1)..(1): Any amino acid
XTPQISPSTLIGSLRTLELGSESQGASESQAPGEENLLGEAAGGQDMADSMLMQGSRGLTDQALLDVKNIAHQNKFGEDMPHPH

SEQ ID NO: 72757 - protein, 248 aa, Homo sapiens
MFRCGGLAAGALKQKLVPLVRTVCVRSPRQRNRLPGNLFQRWHVPLELQMTRQMASSGASGGKIDNSVLVLIVGLSTVGAGAYAYKTMKEDEKRYNERISGLGLTPEQKQKKAALSASEGEEVPQDKAPSHVPFLLIGGGTAAFAAARSIRARDPGARVLIVSEDPELPYMRPPLSKELWFSDDPNVTKTLRFKQWNGKERSIYFQPPSFYVSAQDLPHIENGGVAVLTGKKEVLQEVCLPLIGLEQR

SEQ ID NO: 72758 - protein, 164 aa, Homo sapiens
MQPPLDLKQILPFPLEPAPTLGLFSNYSTMDPVQKAVLSHTFGGPLLKTKRPVISCNICQIRFNSQSQAEAHYKGNRHARRVKGIEAAKTRGREPGVREPGDPAPPGSTPTNGDGVAPRPVSMENGLGPAPGSPEKQPGSPSPPSIPETGQGVTKGEGGTPAPA

SEQ ID NO: 72759 - protein, 41 aa, Homo sapiens
MSKGPGPGGSAASSAPPAATAQVLQAQPEKPQHYTAEERDQ

SEQ ID NO: 72760 - protein, 168 aa, Homo sapiens
  MOD_RES (1)..(1): Any amino acid
XYRGRDRLIRVLGYCCQLVGGVLVEQCPARSEVGTRLLVVSTQLSHCRTILRLFDDLAMFVYTKQYGLGAQEEDAFVRCVSVLGNLADQLYYPCEHVAWAADARVLHVDSSRWWTLSTTLWALSLLLGVARSLWMLLKLRQRLRSPTAPFTSMYQAARAGGQAEATTP

SEQ ID NO: 72761 - protein, 103 aa, Homo sapiens
MGGRGADAGSSGGTGPTEGYSPPAASTRAAARAKARGGGRGGRRNTTPSVPSLRGAAPRSFHPPAAMSERLRPSLQAVTVVGAAAAAAAASIARTGPAGRKAA

SEQ ID NO: 72762 - protein, 308 aa, Homo sapiens
MWRCGGRQGLCVLRRLSGGHAHHRAWRWNSNRACERALQYKLGDKIHGFTVNQVTSVPELFLTAVKLTHDDTGARYLHLAREDTNNLFSVQFRTTPMDSTGVPHILEHTVLCGSQKYPCRDPFFKMLNRSLSTFMNAFTASDYTLYPFSTQNPKDFQNLLSVYLDATFFPCLRELDFWQEGWRLEHENPSDPQTPLVFKGVVFNEMKGAFTDNERIFSQHLQNRLLPDHTYSVVSGGDPLCIPELTWEQLKQFHATHYHPSNARFFTYGNFPLEQHLKQIHEEALSKFQKIEPSTVVPAQTPWDKPIT

SEQ ID NO: 72763 - protein, 179 aa, Homo sapiens
MQIPKETKAEDEDIVLTPDGTREFLTFEVPLNDSGSAGLGVSVKGNRSKENHADLGIFVKSIINGGAASKDGRLRVNDQLIAVNGESLLGKTNQDAMETLRRSMSTEGNKRGMIQLIVARRISKCNELKSPGSPPGPELPIETALDDRERRISHSLYSGIEGLDESPSRNAALSRIMGT

SEQ ID NO: 72764 - protein, 119 aa, Homo sapiens
MMLKGITRLISRIHKAKHGDQHEGQHYNISPQDLETVFPHGLPPRFVMQVKTFSEACLMDWLILHIPDAHLWVKNCRDLLQSSYNKQRFDQPLEASTWLKNFKTTNERFLNQIKVQEKY

SEQ ID NO: 72765 - protein, 20 aa, Homo sapiens
MATTGTPTADRGDAAATDDP

SEQ ID NO: 72766 - protein, 1002 aa, Homo sapiens
MEAKVRPSRRSRAQRDRGRRREAARDARAQSPSSGDEPEPSPGKENAGLRGAPPRGAAPAPRTARPPRRRRRESSSQEEEVIDGFAIASFSTLEALEKDMALKPHERKEKWERRLIKKPRESETCPPAEPSENRRPLEAGSPGQDLEPACDGARKVPLQPSKQMKVTVSKGGDRDSDDDSVLEATSSRDPLSDSSAHAVSGRGYSCDSESGPDDKASVGSEKLFAPGTDKGPALEKSEAKAGPVPKVSGLERSRELSAESFLPTASPAPHAAPCPGPPPGSRANPLVKKEPPAPHRHTPQPPPPQPRGLLPTHVPASLGAFAGHSQAAANGLHGLSRSSSAPLGLGKHVSLSPHGPGPHLSTSHLALRSQAQHQLHAAMFAAPPTLPPPPALPASSLVLPGHPADASLAVSFSQPIMYCQPHSGILIGTWSQAPLLPAPLGPHVASGHPGLACRPRECQFDKYAPKLDSPYFRHSSVSFFPSFPPAIPGLPTLLPHPGPFGSLQGAFQPKTSSPIEVARRAGAVHTLLQKAPGVSDPYRAVVKKPGRWCAVHVQIAWQIYRHQQKIKEMQLDPHKLEVGAKLDLFGRPPAPGVFAGFHYPQDLARPLFPSTGAAHPASNPFGPSAHPGSFLPTGPLTDPFSRPSTFGGLGSLSSHAFGGLGSHALAPGGSIFAPKEGSSVHGLPSPHEAWNRLHRAPPSFPAPPPWPKSVDAERVSALTNHDREPDNGKEEQERDLLEKTRLLSRASPATPAGHPVSGLLLRAQSELGRSGAPAEREAEPRVKESRSPAKEEAAKMPARASPPHSKAAPGDVKVKEERGEDEASEPPAGGLHPAPLQLGLGRERLGAPGFAWEPFRGLELPRRAFPAAAPAPGSAALLEPPERPYRDREPHGYSPERLRGELERARAPHLPPAAPALDGALLPSLGALHFPRLSPAALHNGLLARTPPAAAALGAPPPLVTAAGPPTPPGPPRSRTTPLGGLGPGEARDYSPSRNPPEVEAR

SEQ ID NO: 72767 - protein, 294 aa, Homo sapiens
MDDKPNPEALSDSSERLFSFGVIADVQFADLEDGFNFQGTRRRYYRHSLLHLQGAIEDWNNESSMPCCVLQLGDIIDGYNAQYNASKKSLELVMDMFKRLKVPVHHTWGNHEFYNFSREYLTHSKLNTKFLEDQIVHHPETMPSEDYYAYHFVPFPKFRFILLDAYDLSVLGVDQSSPKYEQCMKILREHNPNTELNSPQGLSEPQFVQFNGGFSQEQLNWLNEVLTFSDTNQEKVVIAIFPFTRTPLTMCAWPGTTEMPWQSFGLMSVWCVSLLVTPMMVATLRILLVYTTST

SEQ ID NO: 72768 - protein, 158 aa, Homo sapiens
MTEKAPEPHVEEDDDDELDSKLNYKPPPQKSLKELQEMDKDDESLIKYKKTLLGDGPVVTDPKAPNVVVTRLTLVCESAPGPITMDLTGDLEALKKETIVLKEGSEYRVKIHFKVNRDIVSGLKYVQHTYRTGVKVDKATFMVGSYGPRPEEYEFLTP

SEQ ID NO: 72769 - protein, 82 aa, Homo sapiens
MDLQAAGAQAQGAAEPSRGPPLPSARGAPPSPEAGFATADHSSQERETEKAMDRLASPLCCLVAFSAQLNSNLLWKPCLELP

SEQ ID NO: 72770 - protein, 269 aa, Homo sapiens
ADSMLLALQLSMAENNKQHSGEFTVSLSDVLLTWKYLLHEKLNLPVENMDVTDHYEDVRKIYDDFLKNSNMLDLIDVYQKCRALTSNCENYNTVSPSQLLDFLSGKQYAVGDETDLSIPTSPTSKYNRDNEKVQLLARKIIFSYLNLLVNSKNDLAVAYILNIPDRGLGREAFTDLKHAAREKQMSIFLVATSFIRTIELGGKGYAPPPSDPLRTHVKGLSNFINFIDKLDEILGEIPNPRSPTQVNNSIKPLRERICVSMQEKKIKRV

SEQ ID NO: 72771 - protein, 718 aa, Homo sapiens
MSIKRRGMFEPYLKSFYIRSTDPTQIKILKLEVLTNLANETNIPTVLREFQTYIRSMDKDFVAATIQAIGRCATNIGRVRDTCLNGLVQLLSNRDELVVAESVVVIKKLLQMQPAQHGEIIKHLAKLTDNIQVPMARASILWLIGEYCEHVPRIAPDVLRKMAKSFTAEEDIVKLQVINLAAKLYLTNSKQTKLLTQYVLSLAKYDQNYDIRDRARFTRQLIVPSEQGGALSRHAKKLFLAPKPAPVLESSFKDRDHFQLGSLSHLLNAKATGYQELPDWPEEAPDPSVRNVEVPEWTKCSNREKRKEKEKPFYSDSEGESGPTESADSDPESESESDSKSSSESGSGESSSESDNEDQDEDEEKGRGSESEQSEEDGKRKTKKKVPERKGEASSSDEGSDSSSSSSESEMTSESEEEQLEPASWSRKTPPSSKSAPATKEISLLDLEDFTPPSVQPVSPPAIVSTSLAADLEGLTLTDSTLVPSLLSPVSGVGRQELLHRVAGEGLAVDYTFSRQPFSGDPHMVSVHIHFSNSSDTPIKGLHVGTPKLPAGISIQEFPEIESLAPGESATAVMGINFCDSTQAANFQLCTQTRQFYVSIQPPVGELMAPVFMSENEFKKEQGKLMGMNEITEKLMLPDTCRSDHIVVQKVTATANLGRVPCGTSDEYRFAGRTLTGGSLVLLTLDARPAGAAQLTVNSEKMVIGTMLVKDVIQALTQ

SEQ ID NO: 72772 - protein, 276 aa, Homo sapiens
  MOD_RES (1)..(1): Any amino acid
XRAEIQNAEDYNEIFQPKNSISRTPPRRSEPFPAPPEDDAATAKEAAKPSPAMDVQFPVPNLEVLPRPPVVASTPAPKAEPAIIPATRNEPIGLKASDFLPAVKIPQQAELVDEDAMSQIRKGHDTMCVVLTSRHKNLDTVRAVWTMGDIKGHTVPHCPTPDGALFAQTSVDSAVAINDLSVVVDLLNIVNQKASLWKLDLCTTVLPQIEKLLQSKYESYVQTGCTSLKLILQRFLPLITDMLAAPPSVGVDISREERLHKCRLCYKQLKSISGLV

SEQ ID NO: 72773 - protein, 357 aa, Homo sapiens
MVGTALLASLWHHVAPVAGQLHSVAFLALAFVLALACCASNVTFLPFLSHLPPRFLRSFFLGQGLSALLPCVLALVQGVGRLECPPAPINGTPGPPLDFLERFPASTFFWALTALLVASAAAFQGLLLLLPPPPSVPTGELGSGLQVGAPGAEEEVEESSPLQEPPSQAAGTTPGPDPKAYQLLSARSACLLGLLAATNALTNGVLPAVQSFSCLPYGRLAYHLAVVLGSAANPLACFLAMGVLCRSLAGLGGLSLLGVFCGGYLMALAVLSPCPPLVGTSAGVVLVVLSWVLCLGVFSYVKVAASSLLHGGGRPALLAAGVAIQVGSLLGAVAMFPPTSIYHVFHSRKDCADPCDS

SEQ ID NO: 72774 - protein, 99 aa, Homo sapiens
MPVPPPPAPPPPPTFALANTEKPTLNKTEQAGRNALLSDISKGKKLKKTVTNDRSAPILDKPKGAGAGGGGGGFGGGGGFGGGGGGGGGGSFGGGGPPG

SEQ ID NO: 72775 - protein, 184 aa, Homo sapiens
MEEDEFIGEKTFQRYCAEFIKHSQQIGDSWEWRPSKDCSDGYMCKIHFQIKNGSVMSHLGASTHGQTCLPMEEAFELPLDDCEVIETAAASEVIKYEYHVLYSCSYQVPVLYFRASFLDGRPLTLKDIWEGVHECYKMRLLQGPWDTITQQEHPILGQPFFVLHPCKTNEFMTPVLKNSQKINK

SEQ ID NO: 72776 - protein, 593 aa, Homo sapiens
MMEELHSLDPRRQELLEARFTGVGVSKGPLNSESSNQSLCSVGSLSDKEVETPEKKQNDQRNRKRKAEPYETSQGKGTPRGHKISDYFERRVEQPLYGLDGSAAKEATEEQSALPTLMSVMLAKPRLDTEQLAQRGAGLCFTFVSSDLTIEKISALENSKNSDLEKKEGRIDDLLRANCDLRRQIDEQQKMLEKYKERLNRCVTMSKKLLIEKSKQEKMACRDKSMQDRLRLGHFTTVRHGASFTEQWTDGYAFQNLIKQQERINSQREEIERQRKMLAKRKPPAMGQAPPATNEQKQRKSKTNGAENETLTLAEYHEQEEIFKLRLGHLKKEEAEIQAELERLERVRNLHIRELKRIHNEDNSQFKDHPTLNDRYLLLHLLGRGGFSEVYKAFDLTEQRYVAVKIHQLNKNWRDEKKENYHKHACREYRIHKELDHPRIVKLYDYFSLDTDSFCTVLEYCEGNDLDFYLKQHKLMSEKEARSIIMQIVNALKYLNEIKPPIIHYDLKPGNILLVNGTACGEIKITDFGLSKIMDDDSYNSVDGMELTSQGAGTYWYLPPECFVVGKEPPKISNKVDVWSVGVIFYQCLYGRK

SEQ ID NO: 72777 - protein, 573 aa, Homo sapiens
MCDLCKPPPQESTKSCMDCSASYCNECFKIHHPWGTIKAQHEYVGPTTNFRPKILMCPEHETERINMYCELCRRPVCHLCKLGGNHANHRVTTMSSAYKTLKEKLSKDIDYLIGKESQVKSQISELNLLMKETECNGERAKEEAITHFEKLFEVLEERKSSVLKAIDSSKKLRLDKFQTQMEEYQGLLENNGLVGYAQEVLKETDQSCFVQTAKQLHLRIQKATESLKSFRPAAQTSFEDYVVNTSKQTELLGELSFFSSGIDVPEINEEQSKVYNNALINWHHPEKDKADSYVLEYRKINRDDEMSWNEIEVCGTSKIIQDLENSSTYAFRVRAYKGSICSPCSRELILHTPPAPVFSFLFDEKCGYNNEHLLLNLKRDRVESRAGFNLLLAAERIQVGYYTSLDYIIGDTGITKGKHFWAFRVEPYSYLVKVGVASSDKLQEWLRSPRDAVSPRYEQDSGHDSGSEDACFDSSQPFTLVTIGMQKFFIPKSPTSSNEPENRVLPMPTSIGIFLDCDKGKVDFYDMDQMKCLYERQVDCSHTLYPAFALMGSGGIQLEEPITAKYLEYQEDM

SEQ ID NO: 72778 - protein, 139 aa, Homo sapiens
MKMEEMSLSGLDNSKLEAIAQEIYADLVEDSCLGFCFEVHRAVKCGYFFLDDTDPDSMKDFEIVDQPGLDIFGQVFNQWKSKECVCPNCSRSIAASRFAPHLEKCLGMGRNSSRIANRRIANSNNMNKSESDQEDNDDI

SEQ ID NO: 72779 - protein, 99 aa, Homo sapiens
MSSKMVISEPGLNWDISPKNGLKTFFSRENYKDHSMAPSLKELRVLSNRRIGENLNASASSVENEPAVSSATQAKEKVKTTIGMVLLPKPRVPYPRFSR

SEQ ID NO: 72780 - protein, 687 aa, Homo sapiens
MNPREEKVKIITEEFIENDEDADMGRQNKNSKVRRQPRKKQPPTAVPKEMVSEKSHLGNPQEPVQEEPKTRLLSMTVRRGPRSLPPIPSTSRTGFAEFSMRGRMREKLQAARSKAESALLQEIPTPRPRRLRSPSKKELETEFGTEPGKEVERTQQEVDSQSYSRVKFHDSARKIKPKPQVPPGFPSAEEAYNFFTFNFDPEPEGSEEKPKARHRAGTNQEEEEGEEEEPPAQGGGKEMDEEELLNGDDAEDFLLGLDHVADDFVAVRPADYESIHDRLQMEREMLFIPSRQTVPTYKKLPENVQPRFLEDEGLYTGVRPEVARTNQNIMENRLLMQDPERRWFGDDGRILALPNPIKPFPSRPPVLTQEQSIKAELETLYKKAVKYVHSSQHVIRSGDPPGNFQLDIDISGLIFTHHPCFSREHVLAAKLAQLYDQYLARHQRNKAKFLTDKLQALRNAVQTGLDPEKPHQSLDTIQKTINEYKSEIRQTRKFRDAEQEKDRTLLKTIIKVWKEMKSLREFQRFTNTPLKLVLRKEKADQKADEEAYEAEIQAEISELLEEHTEEYAQKMEEYRTSLQQWKAWRKVQRAKKKKRKQAAEEHPGDEIAEPYPEEDLVKPSPPEPTDRAVIEQEVRERAAQSRRRPWEPTLVPELSLAGSVTPNDQCPSHGSQSIAPESAASASLRTC

SEQ ID NO: 72781 - protein, 74 aa, Homo sapiens
MASADKNGGSVSSVSSSRLQSRKPPNLSITIPPPEKETQAPGEQDSMLPERKNPAYLKSVSLQEPRSRWQESSE

SEQ ID NO: 72782 - protein, 160 aa, Homo sapiens
MKIAVLFCFFLLIIFQTDFGKNEEIPRKQRRKIYHRRLRKSSTSHKHRSNRQLGIQQTTVFTPVARLPIVNFDYSMEEKFESFSSFPGVESSYNVLPGKKGHCLVKGITMYNKAVWSPEPCTTCLCSDGRVLCDETMCHPQRCPQTVIPEGECCPVCSAT

SEQ ID NO: 72783 - protein, 1198 aa, Homo sapiens
MVILQQGDHVWMDLRLGQEFDVPIGAVVKLCDSGQVQVVDDEDNEHWISPQNATHIKPMHPTSVHGVEDMIRLGDLNEAGILRNLLIRYRDHLIYTYTGSILVAVNPYQLLSIYSPEHIRQYTNKKIGEMPPHIFAIADNCYFNMKRNSRDQCCIISGESGAGKTESTKLILQFLAAISGQHSWIEQQVLEATPILEAFGNAKTIRNDNSSRFGKYIDIHFNKRGAIEGAKIEQYLLEKSRVCRQALDERNYHVFYCMLEGMSEDQKKKLGLGQASDYNYLAMGNCITCEGRVDSQEYANIRSAMKVLMFTDTENWEISKLLAAILHLGNLQYEARTFENLDACEVLFSPSLATAASLLEVNPPDLMSCLTSRTLITRGETVSTPLSREQALDVRDAFVKGIYGRLFVWIVDKINAAIYKPPSQDVKNSRRSIGLLDIFGFENFAVNSFEQLCINFANEHLQQFFVRHVFKLEQEEYDLESIDWLHIEFTDNQDALDMIANKPMNIISLIDEESKFPKGTDTTMLHKLNSQHKLNANYIPPKNNHETQFGINHFAGIVYYETQGFLEKNRDTLHGDIIQLVHSSRNKFIKQIFQADVAMGAETRKRSPTLSSQFKRSLELLMRTLGACQPFFVRCIKPNEFKKPMLFDRHLCVRQLRYSGMMETIRIRRAGYPIRYSFVEFVERYRVLLPGVKPAYKQGDLRGTCQRMAEAVLGTHDDWQIGKTKIFLKDHHDMLLEVERDKAITDRVILLQKVIRGFKDRSNFLKLKNAATLIQRHWRGHNCRKNYGLMRLGFLRLQALHRSRKLHQQYRLARQRIIQFQARCRAYLVRKAFRHRLWAVLTVQAYARGMIARRLHQRLRAEYLWRLEAEKMRLAEEEKLRKEMSAKKAKEEAERKHQERLAQLAREDAERELKEKEAARRKKELLEQMERARHEPVNHSDMVDKMFGFLGTSGGLPGQEGQAPSGFEDLERGRREMVEEDLDAALPLPDEDEEDLSEYKFAKFAATYFQGTTTHSYTRRPLKQPLLYHDDEGDQLAALAVWITILRFMGDLPEPKYHTAMSDGSEKIPVMTKIYETLGKKTYKRELQALQGEGEVLQAQLPEGQKKSSVRHKLVHLTLKKKSKLTEEVTKRLHDGESTVQGNSMLEDRPTSNLEKLHFIIGNGILRTPGPESLLVAEWCLCQPSKRLSRPGFGFAAS

SEQ ID NO: 72784 - protein, 126 aa, Homo sapiens
  MOD_RES (1)..(1): Any amino acid
XNRLGANSLLDLVVFGRACALSIEESCRPGDKVPPIKPNAGEESVMNLDKLRFADGSIRTSELRLSMQKSNKKRDGVSGLRCGLMSTITPSPSRGNRRSPLRSTGGSTPCPMWTLALGRSLWNIDP

SEQ ID NO: 72785 - protein, 205 aa, Homo sapiens
MKLNVDGLLVYFPYDYIYPEQFSYMRELKRTLDAKGHGVLEMPSGTGKTVSLLALIMAYQRAYPLEVTKLIYCSRTVPEIEKVIEELRKLLNFYEKQEGEKLPFLGLALSSRKNLCIHPEVTPLRFGKDVDGKCHSLTASYVRAQYQHDTSLPHCRFYEEFDAHGREVPLPAGIYNLDDLKALGRRQGWCPYFLARYSTTSASTP

SEQ ID NO: 72786 - protein, 1391 aa, Homo sapiens
  MOD_RES (1)..(1): Any amino acid
XWKSDPKAKSVQSSNSTTENNNGLGNWRNVSGQDRIGPGSGFSNFNPNSNPSAWPALVQEGTSRKGALETDNSNSSAQVSTVGQTSREQQSKMENAGVNFVVSGREQAQIHNTDGPKNGNTNSLNLSSPNPMENKGMPFGMGLGNTSRSTDAPSQSTGDRKTGSVGSWGAARGPSGTDTVSGQSNSGNNGNNGKEREDSWKGASVQKSTGSKNDSWDNNNRSTGGSWNFGPQDSNDNKWGEGNKMTSGVSQGEWKQPTGSDELKIGEWSGPNQPNSSTGAWDNQKGHPLPENQGNAQAPCWGRSSSSTGSEVGGQSTGSNHKAGSSDSHNSGRRSYRPTHPDCQAVLQTLLSRTDLDPRVLSNTGWGQTQIKQDTVWDIEEVPRPEGKSDKGTEGWESAATQTKNSGGWGDAPSQSNQMKSGWGELSASTEWKDPKNTGGWNDYKNNNSSNWGGGRPDEKTPSSWNENPSKDQGWGGGRQPNQGWSSGKNGWGEEVDQTKNSNWESSASKPVSGWGEGGQNEIGTWGNGGNASLASKGGWEDCKRSPAWNETGRQPNSWNKQHQQQQPPQQPPPPQPEASGSWGGPPPPPPGNVRPSNSSWSSGPQPATPKDEEPSGWEEPSPQSISRKMDIDDGTSAWGDPNSYNYKNVNLWDKNSQGGPAPREPNLPTPMTSKSASVWSKSTPPAPDNGTSAWGEPNESSPGWGEMDDTGASTTGWGNTPANAPNAMKPNSKSMQDGWGESDGPVTGARHPSWEEEEDGGVWNTTGSQGSASSHNSASWGQGGKKQMKCSLKGGNNDSWMNPLAKQFSNMGLLSQTEDNPSSKMDLSVGSLSDKKFDVDKRAMNLGDFNDIMRKDRSGFRPPNSKDMGTTDSGPYFEKGGSHGLFGNSTAQSRGLHTPVQPLNSSPSLRAQVPPQFISPQVSASMLKQFPNSGLSPGLFNVGPQLSPQQIAMLSQLPQIPQFQLACQLLLQQQQQQQLLQNQRKISQAVRQQQEQQLARMVSALQQQQQQQQRQPGMKHSPSHPVGPKPHLDNMVPNALNVGLPDLQTKGPIPGYGSGFSSGGMDYGMVGGKEAGTESRFKQWTSMMEGLPSVATQEANMHKNGAIVAPGKTRGGSPYNQFDIIPGDTLGGHTGPAGDSWLPAKSPPTNKIGSKSSNASWPPEFQPGVPWKGIQNIDPESDPYVTPGSVLGGTATSPIVDTDHQLLRDNTTGSNSSLNTSLPSPGAWPYSASDNSFTNVHSTSAKFPDYKSTWSPDPIGHNPTHLSNKMWKNHISSRNTTPLPRPPPGLTNPKPSSPWSSTAPRSVRGWGTQDSRLASASTWSDGGSVRPSYWLVLHNLTPQIDGSTLRTICMQHGPLLTFHLNLTQGTALIRYSTKQEAAKAQTALHM

SEQ ID NO: 72787 - protein, 86 aa, Homo sapiens
MSEEQFGGDGAAAAATAAVGGSAGEQEGAMVAATQGAAAAAGSGAGTGGGTASGGTEGGSAESEGAKIDASKNEEDEGSWIKKNIN

SEQ ID NO: 72788 - protein, 224 aa, Homo sapiens
MDLRVGQRPPVEPPPEPTLLALQRPQRLHHHLFLAGLQQQRSVEPMRLSMDTPMPELQVGPQEQELRQLLHKDKSKRSAVASSVVKQKLAEVILKKQQAALERTVHPNSPGIPYRTLEPLETEGATRSMLSSFLPPVPSLPSDPPEHFPLRKTVSEPNLKLRYKPKKSLERRKNPLLRKESAPPSLRRRPAETLGDSSPSSSSTPASGCSSPNDSEHGPNPILG

SEQ ID NO: 72789 - protein, 103 aa, Homo sapiens
MAGPFSRLLSARPGLRLLALAGAGSLAAGFLLRPEPVRAASERRRLYPPSAEYPDLRKHNNCMASHLTPAVYARLCDKTTPTGWTLDQCIQTGVDNPGHPFIK

SEQ ID NO: 72790 - protein, 182 aa, Homo sapiens
VKIQGQNKEMLAAACQMFLGKTEAEIAHIALETLEGHQRAIMAHMTVEEIYKDRQKFSEQVFKVASSDLVNMGISVVSYTLKDIHDDQDYLHSLGKARTAQVQKDARIGEAEAKRDAGIREAKAKQEKVSAQYLSEIEMAKAQRDYELKKAAYDIEVNTRRAQADLAYQLQVAKTKQQIEEQ

SEQ ID NO: 72791 - protein, 128 aa, Homo sapiens
MDSFDLALLQEWDLESLCVYEPDRNALRRKERERRNQETQQDDGTFNSSYSLFSEPYKTNKGDELSNRIQNTLGNYDEMKDFLTDRSNQSHLVGVPKPGVPQTPVNKIDEHFVADSRAQNQPSSICST

SEQ ID NO: 72792 - protein, 978 aa, Homo sapiens
  MOD_RES (1)..(1): Any amino acid
XPTQHFNEERYSPAPRSMKGLSGSRTQPPLCSGHTCGLAPPEDCEHLHHGPDARPPYLLSPADSCPGGRHRCSPRSSVHSECVMMPVVLGDHVSSSTFPRMHYSSHYDTRDDCAVAHAGAKINRIPANLLDQFEKQLPLHRDGFHTLQYQRTSAAAEQRSESPGRIRHLVHSVQKLFTKSHSLEGSSKSNANGTKADGRADDHHHAHHAKHSKRSKSKERKPEGKPRPGMSSWWSSDDNLDSDSTYRTPSVLNRHHLGPVAHCYPDALQSPFGDLSLKTSKSNNDVKCSACEGLALTPDAKYLKRSSWSTLTVSQAKEAYRKSSLNLDKPLLHQDAKPALRPCHYLQVPQDEWGGYPTGGKDEEIPCRRMRSGSYIKAMGDEESGESDSSPKTSPKSAILPEPLLKSIGQRPLGEHQTQTYLQAASDVPVGHSLDPAANYNSPKFRSRNQSYMRAVSTLSQASCVSQVSEAEINGQFESVCESVFSEVESQAMDALDLPGCFRTRSHSYLRAIQAGYSQDDECIPMMTPSDITSTIRSTAAVSYTNYKKTPPPVPPRTTSKPLISVTAQSSTESTQDAYQDSRAQRMSPWPQDSRGLYNSTDSLDSNKAMNLALETAAAQRHLPESQSSSVRTSDKAILVSKAEELLKSRCSSIGIQVETATDSDTESRGLREYHSVGVQVEDEKRHGRFKRSNSVTAAVQADLELEGFPGHITTEDKGLQFGSSFQRHSEPSTPTQYSAVRTVRTQGLFSYREDYRTQVDTSTLPPPDPWLEPAIDTVETGRMSPCRRDGSWFLKLLHAETKRMEGWCKEMEREAEENDLSEEILGKIRSAVGSAQLLMSQKFQQFYWLCQQNMDPSAMPRPTSQDLAGYWDMLQLSIEDVSMKFDELQRLRLNDWKMMESPERKEERKVPPPIPKKPPKGKFPITREKSLDLPDRQRQEARRRLMAAKRAASFRQNSASERADSIEIYIPEAQTRL

SEQ ID NO: 72793 - protein, 88 aa, Homo sapiens
MPDSPVDVKTQSRLTPPTMPPPPTTQGAPRTSSFTPTTLTNGTSHSPTALNGAPSPPNGFSNGPSSSSSSSLANQQLPPACGARQLSK

SEQ ID NO: 72794 - protein, 79 aa, Homo sapiens
MRLVHTQEPGEWLELLLEPGSLYILRGSARYDFSHEILRDEESFFGERRIPRGRRISVICRSLPEGMGPGESGQPPPAC

SEQ ID NO: 72795 - protein, 224 aa, Homo sapiens
  MOD_RES (1)..(1): Any amino acid
XNLLKDCEAEVRAAAAHKVKELGENLPIEDRETIIMNQILPYIKELVSDTNQHVKSALASVIMGLSTILGKENTIEHLLPLFLAQLKDECPDVRLNIISNLDCVNEVIGIRQLSQSLLPAIVELAEDAKWRVRLAIIEYMPLLAGQLALSEACGQEITTKQMLPIVLKMAGDQVANVRFNVAKSLQKIGPILDTNALQGEVKPVLQKLGQDEDMDVKYFAQEAI

SEQ ID NO: 72796 - protein, 151 aa, Homo sapiens
  MOD_RES (1)..(1): Any amino acid
XQAPTPEIKAAWVNEIRKVLTSQLQACREASQHRALEQSQSLPLPAPTSTSPSRGNSRNIKKLEERKTDPLSLEGYVSSAPLTKPPEKGKDDTVTSSASESSALSRKRFTLQGFANLKGQKGWSKTSHSLEAPEDDGGWSSAEEQINSSDA

SEQ ID NO: 72797 - protein, 307 aa, Homo sapiens
MAGSADSYTSRPSDSDVSLEEDREAIRQEREQQAAIQLERAKSKPVAFAVKTNVSYCGALDEDVPVPSTAISFDAKDFLHIKEKYNNDWWIGRLVKEGCEIGFIPSPLRLENIRIQQEQKRGRFHGGKSSGNSSSSLGEMVSGTFRATPTSTAKQKQKVEMFDVILDENQLEDACEHLGEYLEAYWRATHTTSSTPMTPLLGRNLGSTALSPYPTAISGLQSQRMRHSNHSTENSPIERRSLMTSDENYHNERARKSRNRLSSSSQHSRDHYPLVEEDYPDSYQDTYKPHRNRGSPGGYSHDSRHRL

SEQ ID NO: 72798 - protein, 98 aa, Homo sapiens
  MOD_RES (1)..(1): Any amino acid
XLDSHPFLAFTLLVFIVMSAVPVGFFLLIVVLTTLAALLGVIILEGLVISVGGFSLLCILCGLGFVSLAMSGMMIASYVVVSSLISCWFSPRSLSYLP

SEQ ID NO: 72799 - protein, 102 aa, Homo sapiens
GTQPTCHDFNQFTAATETISLLVGFSAGQVQYLDLIKKDTSKLFNEEDRCCRIIHGDCSVLGQLGLRGDTSKRPYPRAGTALGFCLILSGPEEVFHKYSQNE

SEQ ID NO: 72800 - protein, 106 aa, Homo sapiens
MAAGFGRCCRVLRSISRFHWRSQHTKANRQREPGLGFSFEFTEQQKEFQATARKFAREEIIPVAAEYDKTGEYPVPLIRRAWELGLMNTHIPENCGLLCNRTWSRL

SEQ ID NO: 72801 - protein, 88 aa, Homo sapiens
MKMLPGVGVFGTGSSARVLVPLLRAEGFTVEALWGKTEEEAKQLAEEMNIAFYTSRTDDILLHQDVDLVLGRMWFARRQQHRWMPSGW

SEQ ID NO: 72802 - protein, 154 aa, Homo sapiens
MENDNTVLLNPPLFALDKDAPLRYAGEICGFRLHGSGVPFEAVILDKATGEGLIRAKEPVDCEAQKEHTFTIQAYDCGEGPDGANTKKSHKATVHVRVNDVNEFAPVFVERLYRAAVTEGKLYDRILRVEAIDGDCSPQYSQICYYEILTPNTP

SEQ ID NO: 72803 - protein, 508 aa, Homo sapiens
MKKFEEDLLLLEDQNSKLSKERKLLEDRLAEFSSQAAEEEEKVKSLNKLRLKYEATIADMEDRLRKEEKGRQELEKLKRRLDGESSELQEQMVEQQQRAEELRAQLGRKEEELQAALARAEDEGGARAQLLKSLREAQAALAEAQEDLESERVARTKAEKQRRDLGEELEALRGELEDTLDSTNAQQELRSKREQEVTELKKTLEEETRIHEAAVQELRQRHGQALGELAEQLEQARRGKGAWEKTRLALEAEVSELRAELSSLQTARQEGEQRRRRLELQLQEVQGRAGDGERARAEAAEKLQRAQAELENVSGALNEAESKTIRLSKELSSTEAQLHDAQELLQEETRAKLALGSRVRAMEAEAAGLREQLEEEAAARERAGRELQTAQAQLSEWRRRQEEEAGALEAGEEARRRAAREAEALTQRLAEKTETVDRLERGRRRLQQELDDATMDLEQQRQLVSTLEKKQRKFDQLLAEEKAAVLRAVEERERPRQRAGSVRLGPCH

SEQ ID NO: 72804 - protein, 528 aa, Homo sapiens
VQMKTIQLKLENIRSIFENQQAGFRNLADKHVRPIQFVVPTPENLVTSGTPFFSSKQGKKTWRQNQSNLKIEVVPDCQEKRSSGPSSSLDNGNSLDVLKNHVLNELIQTERVYVRELYTVLLGYRAEMDNPEMFDLMPPLLRNKKDILFGNMAEIYEFHNDIFLSSLENCAHAPERVGPCFLERKDDFQMYAKYCQNKPRSETIWRKYSECAFFQECQRKLKHRLRLDSYLLKPVQRITKYQLLLKELLKYSKDCEGSALLKKALDAMLDLLKSVNDSMHQIAINGYIGNLNELGKMIMQGGFSVWIGHKKGATKMKDLARFKPMQRHLFLYEKAIVFCKRRVESGEGSDRYPSYSFKHCWKMDEVGITEYVKGDNRKFEIWYGEKEEVYIVQASNVDVKMTWLKEIRNILLKQQELLTVKKRKQQDQLTERDKFQISLQQNDEKQQGAFISTEETELEHTSTVVEVCEAIASVQAEANTVWTEASQSAEISEEPAEWSSNYFYPTYDENEEENRPLMRPVSEMALLY

SEQ ID NO: 72805 - protein, 90 aa, Homo sapiens
MSRSGTDPQQRQQASEADAAAATFRANDHQHIRYNPLQDEWVLVSAHRMKRPWQGQVEPQLLKTVPRHDPLNPLCPGAIRANGEPILVGR

SEQ ID NO: 72806 - protein, 1026 aa, Homo sapiens
MARHGPPWSRLDAQQERDVRELVRGVAGLQDEADPNFQLALNFAWSNFRFHRFLDVNSHKIEKTIEGIYEKFVIHSDLSKAASWKRLTEEFLNAPLPSIKEIKTDAHYSILSLLLCLSDSPSNSSYVETPRNKEVEKKDDFDWGKYLMEDEEMDIGPYMDTPNWSEESEEENDQQPLSREDSGIQVDRTPLEEQDQNRKLDPCISWKDEPDDRSWLEHHVVHQYWTARPSHFPHSLHLHSNLAAVWDQHLYSSDPLYVPDDRVLVTETQVIRETLWLLSGVKKLFIFQLIDGKVTVRNNIIVTHLTHSCLRSVLEQIAAYGQVVFRLQEFIDEVMGHSSESMLPGSGSVPKKSTEAPFRTYQAFMWALYKYFISFKEELAEIEKCIINNDTTITLAIVVDKLAPRLSQLKVLHKVFSTGVAEVPPDTRNVVRASHLLNTLYKAILEYDNVGEASEQTVSLLFSLWVETVRPYLQTVDEWIVHGHLWDGAREFIIQRNKNVPVNHRDFWYATYTLYSVSEKTENEEKMSDNASASSGSDQGPSSRQHTMVSFLKPVLKQIIMAGKSMQLLKNLQCAESTTCQAGARDAERKSLYTLFLESVQSRLRHGEDSTPQVLTEQQATKENLMKMQSIAESHLELDDVHDPLLAINFARMYLEQSDFHEKFAGGDVCVDRSSESVTCQTFELTLRSCLYPHIDKQYLDCCGNLMQTLKKDYRLVEYLQAMRNFFLMEGGDTMYDFYTSIFDKIREKETWQNVSFLNVQLQEAVGQRYPEDSSRLSISFENVDTAKKKLPVHILDGLTLSYKVPWPVDIVISLECQKIYNQVFLLLLQIKWAKYSLDVLLFGELVSTAEKPRLKEGLIHEQDTVAQFGPQKEPVRQQIHRMFLLRVKLMHFVNSLHNYIMTRILHSTGLEFQHQVEEAKDLDQLIKIHYRYLSTIHDRCLLREKVSFVKEAIMKVLNLALMFADGWQAGLGTWRMESIEKMESDFKNCHMFLVTILNKAVCRGSFPHCLALLPMLERIGTVLAH

SEQ ID NO: 72807 - protein, 195 aa, Homo sapiens
  MOD_RES (1)..(1): Any amino acid
XEAARRPRLGLSRRRPRPAGGPSGGRPWFLLGGDERERLWAELLRTVSPELILDHEVPSLPAFPGQEPRCGPEPTEVFTVGPKTFSWTPFPPDLWGPGRSYRLLHGAGGHLESPARSLPQRPAPDPCRAPRVEQQPSVEGAAALRSCPMCQKEFAPRSKNSSGMRRHRSPKLAANNNNNKRKGRARWLTPVIPAL

SEQ ID NO: 72808 - protein, 312 aa, Homo sapiens
MGTLRDLQYALQEKIEELRQRDALIDELELELDQKDELIQKLQNELDKYRSVIRPATQQAQKQSASTLQGEPRTKRQAISAEPTAFDIQDLSHVTLPFYPKSPQSKDLIKEAILDNDFMKNLELSQIQEIVDCMYPVEYGKDSCIIKEGDVGSLVYVMEDGKVEVTKEGVKLCTMGPGKVFGELAILYNCTRTATVKTLVNVKLWAIDRQCFQTIMMRTGLIKHTEYMEFLKSVPTFQSLPEEILSKLADVLEETHYENGEYIIRQGARGDTFFIISKGTVNVTREDSPSEDPVFLRTLGKGDWFGEKALQG

SEQ ID NO: 72809 - protein, 60 aa, Homo sapiens
MSVILLTPDELTNSSETRLSLEDLFRKDFVLHDPEARWINDTDVVYKSENGHVIKLNIET

SEQ ID NO: 72810 - protein, 160 aa, Homo sapiens
MQIFVKTLTGKTITLEVEPSDTIENVKAKIQDKEGIPPDQQRLIFAGKQLEDGRTLSDYNIQKESTLHLVLRLRGGMQIFVKTLTGKTITLEVEPSDTIENVKAKIQDKEGIPPDQQRLIFAGKQLEDGRTLSDYNIQKESTLHLVLRLRGGMQIFVKTL

SEQ ID NO: 72811 - protein, 131 aa, Homo sapiens
  MOD_RES (1)..(1): Any amino acid
XATLQQLEPVTGQVSVLVMCHTRELAFQISKEYERFSKYMPNVKVAVFFGGLSIKKDEEVLKKNCPHIVVGTPGRILALARNKSLNLKHIKHFILDECDKMLEQLDMRRDVQEIFRMTPHEKQVMMFSATL

SEQ ID NO: 72812 - protein, 157 aa, Homo sapiens
MSVQVAAPGSAGLGPERLSPEELVRQTRQVVQGLEALRAEHHGLAGHLAEALAGQGPAAGLEMLEEKQQVVSHSLEAIELGLGEAQVLLALSAHVGALEAEKQRLRSQARRLAQENVWLREELEETQRRLRASEESVAQLEEEKRHLEFLGQLRQYD

SEQ ID NO: 72813 - protein, 286 aa, Homo sapiens
MLELQYHNEDLEKDKTSQNCLGRGMEQVAKKLGVAHEEIQRLTDELQVKEKEQCKLDSALKKAQLEIDKLKENLVKLKENDAADLQKAKEQNQRLDEEILALRNRVRSLDSEKKVLGEMVERLKGEVCESQENKQLGNHSPGKTVGGEQREQHPSSGEKLKYNQQGEVQQLHQNLHRLQILCNSAENELRYERGQNLDLKQHNSLLQEENIKIKIELKHAQQKLLDSTKMCSSLTAEYKHCQQKIKELELEVLKHTQSIKSQNNLQEKLVQEKSKVADAEEKRSSS

SEQ ID NO: 72814 - protein, 98 aa, Homo sapiens
MTSRKKVLLKVIILGDSGVGKTSLMNQYVNKKFSNQYKATIGADFLTKEAINVEQAFQTIARNALKQETEVELYNEFPEPIKLDKNDRAKASAESCSC

SEQ ID NO: 72815 - protein, 220 aa, Homo sapiens
MKNQIEQLGKKYNINPVSMDICKQEEKLGFLVAKQDLVISLLPYVLHPLVAKACITNKVNMVTASYITPALKELEKSVEDAGITIIGELGLDPGLDHMLAMETIDKAKEVGATIESYISYCGGLPAPEHSNNPLRYKFSWSPVGVLMNVMQSATYLLDGKVVNVAGGISFLDAVTSMDFFPGLNLEGYPNRDSTKYAEIYGISSAHTLLRGTLRYKGLEC

SEQ ID NO: 72816 - protein, 115 aa, Homo sapiens
MAGRPLRIGDQLVLEEDYDETYIPSEQEILEFAREIGIDPIKEPELMWLAREGIVAPLPGEWKPCQDITGDIYYFNFANGQSMWDHPCDEHYRSLVIQERAKLSTSGAIKKKKKK

SEQ ID NO: 72817 - protein, 171 aa, Homo sapiens
KVQWPLHILFTPAVLEKYNVVFKYLLSVRRVQAELQHCWALQMQRKHLKSNQTDAIKWRLRNHMAFLVDNLQYYLQVDVLESQFSQLLHQINSTRDFESIRLAHDHFLSNLLAQSFILLKPGFSRQSSLLFKILSSVRNHQINSDLAQLLLRLDYNKYYTQAGGTLGSFGM

SEQ ID NO: 72818 - protein, 92 aa, Homo sapiens
  MOD_RES (1)..(1): Any amino acid
XGGNSSPSAKDIKKILDSVISELNGKNIEDVIAQGIGKLASVPAGGAVAVSAAPGSAAPAAGSAPAAAEEKKDEKKEESEESDDDMGFGLFD

SEQ ID NO: 72819 - protein, 170 aa, Homo sapiens
MCAARLAAAAAAAQSVYAFSARPLAGGEPVSLGSLRGKVLLIENVASLCGTTVRDYTQMNELQRRLGPRGLVVLGFPCNQFGHQLPFSPVGERQERRDSEFPQVRPAWWWVRAQLHALREVRGERCGGAPSLRLPAGGPASSQRRRHRAYDRPQAHHLVSGVSQRCCLEL

SEQ ID NO: 72820 - protein, 75 aa, Homo sapiens
SVNNGITWHVIAQHQPKDFTQAQRVSYNVPLEARMKGVLLRWWQPRHNGTGHDQWALDHVEVVLEKRLWDHEETQ

SEQ ID NO: 72821 - protein, 485 aa, Homo sapiens
MTSSRLWFSLLLAAAFAGRATALWPWPQNFQTSDQRYVLYPNNFQFQYDVSSAAQPGCSVLDEAFQRYRDLLFGSGSWPRPYLTGKRHTLEKNVLVVSVVTPGCNQLPTLESVENYTLTINDDQCLLLSETVWGALRGLETFSQLVWKSAEGTFFINKTEIEDFPRFPHRGLLLDTSRHYLPLSSILDTLDVMAYNKLNVFHWHLVDDPSFPYESFTFPELMRKGSYNPVTHIYTAQDVKEVIEYARLRGIRVLAEFDTPGHTLSWGPGIPGLLTPCYSGSEPSGTFGPVNPSLNNTYEFMSTFFLEVSSVFPDFYLHLGGDEVDFTCWKSNPEIQDFMRKKGFGEDFKQLESFYIQTLLDIVSSYGKGYVVWQEVFDNKVKIQPDTIIQVWREDIPVNYMKELELVTKAGFRALLSAPWYLNRISYGPDWKDFYIVEPLAFEGTPEQKALVIGGEACMWGEYVDNTNLVPRLWPEREQAVQRAF

SEQ ID NO: 72822 - protein, 638 aa, Homo sapiens
MAEAAAAAGGTGLGAGASYGSAADRDRDPDPDRAGRRLRVLSGHLLGRPREALSTNECKARRAASAATAAPTATPAAQESGTIPKKRQEVMKWNGWGYNDSKFIFNKKGQIELTGKRYPLSGMGLPTFKEWIQNTLGVNVEHKTTSKASLNPSDTPPSVVNEDFLHDLKETNISYSQEADDRVFRAHGHCLHEIFLLREGMFERIPDIVLWPTCHDDVVKIVNLACKYNLCIIPIGGGTSVSYGLMCPADETRTIISLDTSQMNRILWVDENNLTAHVEAGITGQELERQLKESGYCTGHEPDSLEFSTVGGWVSTRASGMKKNIYGNIEDLVVHIKMVTPRGIIEKSCQGPRMSTGPDIHHFIMGSEGTLGVITEATIKIRPVPEYQKYGSVAFPNFEQGVACLREIAKQRCAPASIRLMDNKQFQFGHALKPQVSSIFTSFLDGLKKFYITKFKGFDPNQLSVATLLFEGDREKVLQHEKQVYDIAAKFGGLAAGEDNGQRGYLLTYVIAYIRDLALEYYVLGESFETSAPWDRVVDLCRNVKERITRECKEKGVQFAPFSTCRVTQTYDAGACIYFYFAFNYRGISDPLTVFEQTEAAAREEILANGGSLSHHHGESRPVARLECSGMVSAHCNL

SEQ ID NO: 72823 - protein, 9 aa, Homo sapiens
MGARLCNYL

SEQ ID NO: 72824 - protein, 153 aa, Homo sapiens
  MOD_RES (1)..(1): Any amino acid
XETQFVNQFTTQTVVLTRSDKSVNKEEDDKNAQGRKRHVKPTSGNAFTINFQPPSTEYSLISTRFTPTPATIKKLLSTTNNISRSSLKLITAQMDNSVKPISHQISDIEHVDRSLSTNLSLAICKYPCGKSRECVAPNICKCKPGYIGSNCQT

SEQ ID NO: 72825 - protein, 94 aa, Homo sapiens
MAKVTRKLKGSSKVMEQSNPSTEQLISSTKGKNKMKKSCQPRARKGGKVKKIQRVIKRLLHGSSRKKSSSTSTEIPQKVKRVKRAKNRPLAKIE

SEQ ID NO: 72826 - protein, 340 aa, Homo sapiens
MAAIYGGVEGGGTRSEVLLVSEDGKILAEADGLSTNHWLIGTDKCVERINEMVNRAKRKAGVDPLVPLRSLGLSLSGGDQEDAGRILIEELRDRFPYLSESYLITTDAAGSIATATPDGGVVLISGTGSNCRLINPDGSESGCGGWGHMMGDEGSAYWIAHQAVKIVFDSIDNLEAAPHDIGYVKQAMFHYFQVPDRLGILTHLYRDFDKCRFAGFCRKIAEGAQQGDPLSRYIFRKAGEMLGRHIVAVLPEIDPGKIGLPILCVGSVWKSWELLKEGFLLALTQGREIQAQNFFSSFTLMKLRHSSALGGASLGARHIGHLLPMDYSANAIAFYSYTFS

SEQ ID NO: 72827 - protein, 61 aa, Homo sapiens
MSCQKAVLELNIGSQLGPKSPERTEGVTAFEDYGTGLLENQLSVGDFVKIQKAFELLTMHL

SEQ ID NO: 72828 - protein, 173 aa, Homo sapiens
KLEKLGMSSDLVSRLPTIYRNAHDIKNKSSAPSRVPPLFVPQGTSERKDSSGSVSPNTLSQEEGDQICLYHIRKSCSFQAFVQKNLVYGTTKKVCRRPKYVSPQDVTTMQTCNTKFPGPKSIPDYWDSSALPDPGFQAKRTDAEAERREGRGRAAAVPRHQRHFCGRHLPAEL

SEQ ID NO: 72829 - protein, 393 aa, Homo sapiens
MACLHETRTPSPSFGGFVSTLSEASMRKLDPDTSDCTPEKDLTPTHVLQLHEQDAGGPGGAAGSPESRASRVRADEVRLQCQSGSGFLEGLFGCLRPVWTMIGKAYSTEHKQQQEDLWEVPFEEILDLQWVGSGAQGAVFLGRFHGEEVAVKKVRDLKETDIKHLRKLKHPNIITFKGVCTQAPCYCILMEFCAQGQLYEVLRAGRPVTPSLLVDWSMGIAGGMNYLHLHKIIHRDLKSPNMLITYDDVVKISDFGTSKELSDKSTKMSFAGTVAWMAPEVIRNEPVSEKVDIWSFGVVLWELLTGEIPYKDVDSSAIIWGVGSNSLHLPVPSSCPDGFKILLRQCWNSKPRNRPSFRQILLHLDIASADVLSTPQETYFKSQVCCGQSGGKK

SEQ ID NO: 72830 - protein, 277 aa, Homo sapiens
MFDGPFQPFYDPSTQRCLRDILDGFFPSELQRLYPNGVPFKVSDLRNQVYLEDGLDPFPGEGRVVGRQLMHKALDRVEEHPGSRMTAEKFLNRLPKFVIRQGEVIDIRGPIRDTLQNCCPLPARIQEIVVETPTLAAERERSQESPNTPAPPLSMLRIKSENGEQAFLLMMQPDNTIGDVRALLAQARVMDASAFEIFSTFPPTLYQDDTLTLQAAGLVPKAALLLRARRAPKSSLKFSPGPCPGPGPGPSPGPGPGPSPGPGPGPSPCPGPSPSPQ

SEQ ID NO: 72831 - protein, 44 aa, Homo sapiens
  MOD_RES (1)..(1): Any amino acid
XATSQYFDFAQGGGPQYSTLLEDGTLVWLFPAAVTAPMTAAGPH

SEQ ID NO: 72832 - protein, 173 aa, Homo sapiens
MAAQRIRAANSNGLPRCKSEGTLIDLSEGFSETSFNDIKVPSPSALLVDNPTPFGNAKEVIAIKDYCPTNFTTLKFSKGDHLYVLDTSGGEWWYAHNTTEMGYIPSSYVQPLNYRNSTLSDSGMIDNLPDSPDEVAKELELLGGWTDDKKVPGRMYSNNPFWNGVQTNPFLNG

SEQ ID NO: 72833 - protein, 134 aa, Homo sapiens
MRMTMEEMKNEAETTSMVSMPLYAVMYPVFNELERVNLSAAQTLRAAFIKAEKENPGLTQDIIMKILEKKSVEVNFTESLLRMAADDVEEYMIERPEPEFQDLNEKARALKQILSKIPDEINDRVRFLQTIKDI

SEQ ID NO: 72834 - protein, 201 aa, Homo sapiens
MRPLQIVPSRLISQLYCGLKPPASTRNQICLKMARPSSSMADFRKFFAKAKHIVIISGAGVSAESGVPTFRGAGGYWRKWQAQDLATPLAFAHNPSRVWEFYHYRREVMGSKEPNAGHRAIAECETRLGKQGRRVVVITQNIDELHRKAGTKNLLEIHVLQNLELKMPASQLRNFPGGHFLCGVPSSHVCPPGGCQGRASG

SEQ ID NO: 72835 - protein, 115 aa, Homo sapiens
  MOD_RES (1)..(1): Any amino acid
XGVTEYEDGGAPAGDGEAGPQQAEDHPQNPPEDPNQDPPEDDSTCQCQACGPHQAAGPDLGSSNDGCPQLFQERSVIVENSSGSTSASELLKPMKKRKRREYQSPSEEESEPEAM

SEQ ID NO: 72836 - protein, 461 aa, Homo sapiens
MTEITAEGNASTTTTVIDSKNGSVPKSPGKVLKRTVTEDIVTTFSSPAAWLLVIALIITWSAVAIVMFDLVDYKNFSASSIAKIGSDPLKLVRDAMEETTDWIYGFFSLLSDIISSEDEEDDDGDEDTDKGEIDEPPLRKKEIHKDKTEKQEKPERKIQTKVTHKEKEKGKEKVREKEKPEKKATHKEKIEKKEKPETKTLAKEQKKAKTAEKSEEKTKKEVKGGKQEKVKQTAAKVKEVQKTPSKPKEKEDKEKAAVSKHEQKDQYAFCRYMIDIFVHGDLKPGQSPAIPPPLPTEQASRPTPASPALEEKEGEKKKAEKKVTSETKKKAEKEDIKKKSEKETAIDVEKKEPGKASETKQGTVKIAAQAAAKKDEKKEDSKKTKKPAEVEQPKGKKQEKKEKHVEPAKSPKKEHSVPSDKQVKAKTERAKEEIGAVSIKKAVPGKKEEKTTKTVEQGKKK

SEQ ID NO: 72837 - protein, 503 aa, Homo sapiens
MSWESGAGPGLGSQGMDLVWSAWYGKCVKGKGSLPLSAHGIVVAWLSRAEWDQVTVYLFCDDHKLQRYALNRITVWRSRSGNELPLAVASTADLIRCKLLDVTGGLGTDELRLLYGMALVRFVNLISERKTKFAKVPLKCLAQEVNIPDWIVDLRHELTHKKMPHINDCRRGCYFVLDWLQKTYWCRQLENSLRETWELEEFREGIEEEDQEEDKNIVVDDITEQKPEPQDDGKSTESDVKADGDSKGSEEVDSHCKKALSHKELYERARELLVSYEEEQFTVLEKFRYLPKAIKAWNNPSPRVECVLAELKGVTCENRDGVSPCCPGWFQVLGFKRLSCLGLPKCWDHREAVLDAFLDDGFLVPTFEQLAALQIEYEENVDLNDVLVPKPFSQFWQPLLRGLHSQNFTQALLERMLSELPALGISGIRPTYILRWTVELIVANTKTGRNARRFSAGQWEARRGWRLFNCSASLDWPRMVESCLGSPCWASPQLLRIAVLGGS

SEQ ID NO: 72838 - protein, 230 aa, Homo sapiens
MVLADLGRKITSALRSLSNATIINEEVLNAMLKEVCTALLEADVNIKLVKQLRENVKSAIDLEEMASGLNKRKMIQHAVFKELVKLVDPGVKAWTPTKGKQNVIMFVGLQGSGKTTTCSKLAYYYQRKGWKTCLICADTFRAGAFDQLKQNATKARIPFYGSYTEMDPVIIASEGVEKFKNENFEIIIVDTSGRHKQEDSLFEEMLQVANAISRCHKKSDYFHWYRGTYR

SEQ ID NO: 72839 - protein, 68 aa, Homo sapiens
MSDILRELLCVSEKAANIARACRQQEALFQLLIEEKKEGEKNKKFAVDFKTLADVLVQEVIKQNMENK

SEQ ID NO: 72840 - protein, 423 aa, Homo sapiens
MDQKLSKLVEELTTSGEPRLNPEKMKELKKICKSSEEQLSRAYRLLIAQLTQEHAEIRLSAFQIVEELFVRSHQFRMLVVSNFQEFLELTLGTDPAQPLPPPREAAQRLRQATTRAVEGWNEKFGEAYKKLALGYHFLRHNKKVDFQDTNARSLAERKREEEKQKHLDKIYQERASQAEREMQEMSGEIESCLTEVESCFRLLVPFDFDPNPETESLGMASGMSDALRSSCAGQVGPCRSGTPDPRDGEQPCCSRDLPASAGHPRAGGGAQPSQTATGDPSDEDEDSDLEEFVRSHGLGSHKYTLDVELCSEGLKVQENEDNLALIHAARDTLKLIRNKFLPAVCSWIQRFTRVGTHGGCLKRAIDLKAELELVLRKYKELDIEPEGGERRRETAAIAGAFEVLLLGMLFRDADRSPGGCGGR

SEQ ID NO: 72841 - protein, 84 aa, Homo sapiens
MNISGSSCGSPNSADTSSDFKDLWTKLKECHDREVQGLQVKVTKLKQERILDAQRLEEFFTKNQQLREQQKVLHETIKVLEDRL

SEQ ID NO: 72842 - protein, 227 aa, Homo sapiens
  MOD_RES (1)..(1): Any amino acid
XSSTREEMEELKKRMKEAPQTCKLPGQPTIEGYLYTQEKWALGISWVKYYCQYEKETKTLTMTPMEQKPGAKQGPLDLTLKYCVRRKTESIDKRFCFDIETNERPGTITLQALSEANRRLWMEAMDGKEPIYHSPITKQQEMELNEVGFKFVRKCINIIETKGIKTEGLYRTVGSNIQVQKLLNAFFGNNFTLIILIGSTLCVTKKCDWKRKETLLKCGRIVEKSIF

SEQ ID NO: 72843 - protein, 368 aa, Homo sapiens
MSDIEEVVEEYEEEEQEEAAVEEQEEAAEEDAEAEAETEETRAEEDEEEEEAKEAEDGPMEESKPKPRSFMPNLVPPKIPDGERVDFDDIHRKRMEKDLNELQALIEAHFENRKKEEEELVSLKDRIERRRAERAEQQRIRNEREKERQNRLAEERARREEEENRRKAEDEARKKKALSNMMHFGGYIQKQAQTERKSGKRQTEREKKKKILAERRKVLAIDHLNEDQLREKAKELWQSIYNLEAEKFDLQEKFKQQKYEVGRHAVPAQHLHLTLLLVHWVRSMFSETGSTITRKSPRPAGRLKSPGAGNRAWPPSPKICSSLAPASGLHSPSSRALLGTPGSSCLEMGSWPRWEPPLLPAPTPTPHQ

SEQ ID NO: 72844 - protein, 91 aa, Homo sapiens
MAGIFYFALFSCLFGICDAVTGSRVYPANEVTLLDSRSVQGELGWIASPLEGGWEEVSIMDEKNTPIRTYQVCNVMEPSQNNWLRTDWITR

SEQ ID NO: 72845 - protein, 645 aa, Homo sapiens
LTNKAPEKPLHEVPSGNSLLSSETILRTNKRGERRRRRCQVAFSYLPQNDDELELKVGDIIEVVGEVEEGWWEGVLNGKTGMFPSNFIKELSGESDELGISQDEQLSKSRPEGLPPASLLPFPAHGAKGKTTFEGTILYRAAPGKTEGHRRYYSLRETTGSESDGGDSSSTKSEGANGTVATAAIQPKKVKGVGFGDIFKDKPIKLRPRSIEVENDFLPVEKTIGKKLPATTATPDSSKTEMDSRTKSKDYCKVIFPYEAQNDDELTIKEGDIVTLINKDCIDVGWWEGELNGRRGVFPDNFVKLLPPDFEKEGNRPKKPPPPSAPVIKQGAGTTERKHEIKKIPPERPEMLPNRTEEKERPEREPKLDLQKPSVPAIPPKKPRPPKTNSLSRPGALPPRRPERPVGPLTHTRGDSPKIDLAGSSLSGILDKDLSDRSNDIDLEGFDSVVSSTEKLSHPTTSRPKATGRRPPSQSLTSSSLSSPDIFDSPSPEEDKEEHISLAHRGVDASKKTSKTVTISQVSDNKASLPPKPGTMAAGGGGPAPLSSAAPSPLSSSLGTAGHRANSPSLFGTEGKPKMEPAASSQAAVEELRTQVRELRSIIETMKDQQKREIKQLLSELDEEKKIRLRLQMEVNDIKKALQSK

SEQ ID NO: 72846 - protein, 586 aa, Homo sapiens
MLGTDRCVVEEWLSEFKALPDTQITSYAATLHRKKTLVPALYKVIQDSNNELLEPVCHQLFELYRSSEVRLKRFTLQFLPELMWVYLRLTVSRDRQSNGCIEALLLGIYNLEIADKDGNNKVLSFTIPSLSKPSIYHEPSTIGSMALTEGALCQHDLIRVVYSDLHPQRETFTAQNRFEVLSFLMLCYNSAIVYMPASSYQSLCRMGSRVCVSGFPRQHEKHWKELCGRIVLDPEFMVQLLTGVYYAMYNGQWDLGQEVLDDIIYRAQLELFSQPLLVANAMKNSLPFDAPDSTQEGQKVLKVEVTPTVPRISRTAITTASIRRHRWRREDGFDFSNEADSSIPGSPIQHGSTDLGIKRVQEGEVLVRRTPEHGSPEPNSATATTEGAEGVNGGEESVNLNDADEGFSSGASLSSQPIGTKPSSSSQRGSLRKVATGRSAKDKETASAIKSSESPRDSVVRKQYVQQPTDLSVDSVELTPMKKHLSLPAGQVVPKINSLSLIRTASASSSKSFDYVNGSQASTSIGVGTEGGTNLAANNANRYSTVSLQEDRLGQAGEGKELLSPGAPLTKQSRSPSFNMQLISQV

SEQ ID NO: 72847 - protein, 152 aa, Homo sapiens
MSGQTLTDRIAAAQYSVTGSAVARAVCKATTHEVMGPKKKHLDYLIQATNETNVNIPQMADTLFERATNSSWVVVFKALVTTHHLMVHGNERFIQYLASRNTLFNLSNFLDKSGSHGYDMSTFIRRYSRYLNEKAFSYRQMAFDFARVKKGA

SEQ ID NO: 72848 - protein, 374 aa, Homo sapiens
MDFNMKKLASDAGIFFTRAVQFTEEKFGQAEKTELDAHFENLLARADSTKNWTEKILRQTEVLLQPNPSARVEEFLYEKLDRKVPSRVTNGELLAQYMADAASELGPTTPYGKTLIKVAEAEKQLGAAERDFIHTASISFLTPLRNFLEGDWKTISKERRLLQNRRLDLDACKARLKKAKAAEAKATLWNDEVDKAEQELRVAQTEFDRQAEVTRLLLEGISSTHVNHLRCLHEFVKSQTTYYAQCYRHMLDLQKQLGRFPGTFVGTTEPASPPLSSTSPTTAAATMPVVPSVASLAPPGEASLCLEEVAPPASGTRKARVLYDYEAADSSELALLADELITVYSLPGMDPDWLIGERGNKKGKVPVTYLELLS

SEQ ID NO: 72849 - protein, 96 aa, Homo sapiens
MSTDTGVSLPSYEEDQGSKLIRKAKEAPFVPVGIAGFAAIVAYGLYKLKSRGNTKMSIHLIHMRVAAQGFVVGAMTVAFFFFRYGLFHVSGILGKT

SEQ ID NO: 72850 - protein, 169 aa, Homo sapiens
MQIFVKTLTGKTITLEVEPSDTIENVKAKIQDKEGIPPDQQRLIFAGKQLEDGRTLSDYNIQKESTLHLVLRLRGGMQIFVKTLTGKTITLEVEPSDTIENVKAKIQDKEGIPPDQQRLIFAGKQLEDGRTLSDYNIQKESTLHLVLRLRGGMQIFVKTLTGKTITLEV

SEQ ID NO: 72851 - protein, 72 aa, Homo sapiens
  MOD_RES (1)..(1): Any amino acid
XSSSVLEFMSMKSYPDVSVDISMLSSLVSFRACHLSRDAVLKSDRNLVSYYHGVCFVNLQISVLKLMLVSCA

SEQ ID NO: 72852 - protein, 286 aa, Homo sapiens
KRPQHLPGHPGWYRKLCPRLDDPAWTPGPSLLSLQMRVTPKLMALTWDGFPLHYSERHGWGYLVPGRRDNLAKLPTGTTLESAGVVCPYRAIESLYRKHCLEQGKQQLMPQEAGLAEEFLLTDNSAIWQTVEELDYLEVEAEAKMENLRAAVPGQPLALTARGGPKDTQPSYHHGNGPYNDVDIPGCWFFKLPHKDGNSCNVGSPFAKDFLPKMEDGTLQAGPGGASGPRALEINKMISFWRNAHKRISSQMVVWLPRSALPRAVIRYRLSDEGEWLVRELNLPVD

SEQ ID NO: 72853 - protein, 189 aa, Homo sapiens
MAFIAKSFYDLSAISLDGEKVDFNTFRGRAVLIENVASLGTTTRDFTQLNELQCRFPRRLVVLGFPCNQFGHQENCQNEEILNSLKYVRPGGGYQPTFTLVQKCEVNGQNEHPVFAYLKDKLPYPYDDPFSLMTDPKLIIWSPVRRSDVAWNFEKFLIGPEGEPFRRYSRTFPTINIEPDIKRLLKVAI

SEQ ID NO: 72854 - protein, 1150 aa, Homo sapiens
MADANSPPKPLSKPRTPRRSKSDGEAKRSRDPPASASQVTGIRAEPSPSPRITRKSTRQTTITSHFAKGPAKRKPQEESERAKSDESIKEEDKDQDEKRRRVTSRERVARPLPAEEPERAKSGTRTEKEEERDEKEEKRLRSQTKEPTPKQKLKEEPDREARAGVQADEDEDGDEKVKDEKKHRSQPKDLAAKRRPEEKEPEKVNPQISDEKDEDEKEEKRRKTTPKEPTEKKMARAKTVMNSKTHPPKCIQCGQYLDDPDLKYGQHPPDAVDEPQMLTNEKLSIFDANESGFESYEALPQHKLTCFSVYCKHGHLCPIDTGLIEKNIELFFSGSAKPIYDDDPSLEGGVNGKNLGPINEWWITGFDGGEKALIGFSTSFAEYILMDPSPEYAPIFGLMQEKIYISKIVVEFLQSNSDSTYEDLINKIETTVPPSGLNLNRFTEDSLLRHAQFVVEQVESYDEAGDSDEQPIFLTPCMRDLIKLAGVTLGQRRAQARRQTIRHSTREKDRGPTKATTTKLVYQIFDTFFAEQIEKDDREDKENAFKRRRCGVCEVCQQPECGKCKACKDMVKFGGSGRSKQACQERRCPNMAMKEADDDEEVDDNIPEMPSPKKMHQGKKKKQNKNRISWVGEAVKTDGKKSYYKKVCIDAETLEVGDCVSVIPDDSSKPLYLARVTALWEDSSNGQMFHAHWFCAGTDTVLGATSDPLELFLVDECEDMQLSYIHSKVKVIYKAPSENWAMEGGMDPESLLEGDDGKTYFYQLWYDQDYARFESPPKTQPTEDNKFKFCVSCARLAEMRQKEIPRVLEQLEDLDSRVLYYSATKNGILYRVGDGVYLPPEAFTFNIKLSSPVKRPRKEPVDEDLYPEHYRKYSDYIKGSNLDAPEPYRIGRIKEIFCPKKSNGRPNETDIKIRVNKFYRPENTHKSTPASYHADINLLYWSDEEAVVDFKAVQGRCTVEYGEDLPECVQVYSMGGPNRFYFLEAYNAKSKSFEDPPNHARSPGNKGKGKGKGKGKPKSQACEPSEPEIEIKLPKLRTLDVFSGCGGLSEGFHQAGISDTLWAIEMWDPAAQAFRLNNPGSTVFTEDCNILLKLVMAGETTNSRGQRLPQKGDVEMLCGGPPCQGFSGMNRFNSRTYSKFKNSLVVSFLR

SEQ ID NO: 72855 - protein, 190 aa, Homo sapiens
MAPSVPAAEPEYPKGIRAVLLGPPGAGKGTQVSDEMVVELIEKNLETPLCKNGFLLDGFPRTVRQAEMLDDLMEKRKEKLDSVIEFSIPDSLLIRRITGRLIHPKSGRSYHEEFNPPKEPMKDDITGEPLIRRSDDNEKALKIRLQAYHTQTTPLIEYYRKRGIHSAIDASQTPDVVFASILAAFSKATS

SEQ ID NO: 72856 - protein, 308 aa, Homo sapiens
MCLLLSSAVFGVKYNLLAHTTLTLESAEDSFKTHNLSINGNEESSFWLPLYGNMCCRLVAQPACMAEDAFAGFLNQQQMVEGLISWRRLYCVLRGGKLYCFYSPEEIEAKVEPALVVPINKSLVLFEDSLEGIQLAISQSFKETRIRAMDKDAKKRIHNFSVINPVPGQAITQIFAVDNREDLQKWMEAFWQHFFDLSQWKHCCEELMKIEIMSPRKPPLFLTKEATSVYHDMSIDSPMKLESLTDIIQKKIEETNGQFLIGQHEESLPPPWATLFDGNHQMVIQKKNNSNQLHNLQKLPATSKFLFT

SEQ ID NO: 72857 - protein, 126 aa, Homo sapiens
  MOD_RES (1)..(1): Any amino acid
XAWMGTHPKYLEMMELDIGDATQVYVAFLVYLDLMESKSWHEVNCVGLPELQLICLVGTEIEGEGLQTVVPTPITASLSHNRRNNPYIFIKDINKKQLSPSCESDPNPLTSSLIQVRGFHYCRSAL

SEQ ID NO: 72858 - protein, 95 aa, Homo sapiens
MAERKNAKALACSSLQERANVNLDVPLQVDFPTPKTELVQKFHVQYLGMLPVDKPVGMDILNSAIENLMTSSNKEDWLSVNMNVADATVTVISEK

SEQ ID NO: 72859 - protein, 96 aa, Homo sapiens
  MOD_RES (1)..(1): Any amino acid
XSEEESGEDTGPQDAQEYGNYQPGSLCGYCSFCNRCTECESCHCDEENMGEHCDQCQGPGRHAGNAGTLTQSLDCDAGVPPPAFQPLSTSYIYFSE

SEQ ID NO: 72860 - protein, 123 aa, Homo sapiens
MGRPTQWPSLLLLLLLPGPPPVAGLEDAAFPHLGESLQPLPRACPLRCSCPRVDTVDCDGLDLRVFPDNITRAAQHLSLQNNQLQELPYNELSRLSGLRTLNLHNNLISSEEQSHLQGAPRSP

SEQ ID NO: 72861 - protein, 544 aa, Homo sapiens
MVSNPVHGLPFLPGTSFKDSTKTAFHRSQTLSYRNGYAIVRRPTVGIGGDRLQFNQLSQAELDELASKAPVLTYGQPKQAPPADFIPAHVAFDKKVFLESQGIELNPPEKMALDPYTELRKQPLRKYVTPSDFDQLKQFLTFDKQVLRFYAIWDDTDSMYGECRTYIIHYYLMDDTVEIREVHERNDGRDPFPLLMNRQRVPKVLVENAKNFPQCVLEISDQEVLEWYTAKDFIVGKSLTILGRTFFIYDCDPFTRRYYKEKFGITDLPRIDVSKREPPPVKQELPPYNGFGLVEDSAQNCFALIPKAPKKDVIKMLVNDNKVLRYLAVLESPIPEDKDRRFVFSYFLATDMISIFEPPVRNSGIIGGKYLGRTKVVKPYSTVDNPVYYGPSDFFIGAVIEVFGHRFIILDTDEYVLKYMESNAAQYSPEALASIQNHVRKREAPAPEAESKQTEKDPGVQELEALIDTIQKQLKDHSCKDNIREAFQIYDKEASGYVDRDMFFKICESLNVPVDDSLVKELIRMCSHGEGKINYYNFVRAFSN

SEQ ID NO: 72862 - protein, 363 aa, Homo sapiens
MAPNGTASSFCLDSTACKITITVVLAVLILITVAGNVVVCLAVGLNRRLRNLTNCFIVSLAITDLLLGLLVLPFSAIYQLSCKWSFGKVFCNIYTSLDVMLCTASILNLFMISLDRYCAVMDPLRYPVLVTPVRVAISLVLIWVISITLSFLSIHLGWNSRNETSKGNHTTSKCKVQVNEVYGLVDGLVTFYLPLLIMCITYYRIFKVARDQAKRINHISSWKAATIREHKATVTLAAVMGAFIICWFPYFTAFVYRGLRGDDAINEVLEAIVLWLGYANSALNPILYAALNRDFRTGYQQLFCCRLANRNSHKTSLRSNASQLSRTQSREPRQQEEKPLKLQVWSGTEVTAPQGATDREFGE

SEQ ID NO: 72863 - protein, 96 aa, Homo sapiens
MSALTRLASFARVGGRLFRSGCARTAGDGGVRQASNMDHRYTGDSALLWPSYKSSPEAEMLLPSSGAQLPMGISNPSQYNISRMCWRQYMDFLFQW

SEQ ID NO: 72864 - protein, 121 aa, Homo sapiens
  MOD_RES (1)..(1): Any amino acid
XKITRLSQSSNREHLVPCEDVLLTKPEGIMQIPRNSHRTTMGCQWRLVAPLNHIIQLNIINFPMKPTTFVCHGHLRVYEGFGPGKKLIAHLHGSKKEFILISSAAYLTVHFKTDESERKRF

SEQ ID NO: 72865 - protein, 98 aa, Homo sapiens
MHYMYRPRSRSPRICHRFISRYRSRSRSRSPYRIRNPFRGSPKCFRSVSPERMSRRSVRSSDRKKALEDVVQRSGHGTEFNKQKHLEAADKGHSPAQK

SEQ ID NO: 72866 - protein, 1308 aa, Homo sapiens
MSRSRASIHRGSIPAMSYAPFRDVRGPSMHRTQYVHSPYDRPGWNPRFCIISGNQLLMLDEDEIHPLLIRDRRSESSRNKLLRRTVSVPVEGRPHGEHEYHLGRSRRKSVPGGKQYSMEGAPAAPFRPSQGFLSRRLKSSIKRTKSQPKLDRTSSFRQILPRFRSADHDRARLMQSFKESHSHESLLSPSSAAEALELNLDEDSIIKPVHSSILGQEFCFEVTTSSGTKCFACRSAAERDKWIENLQRAVKPNKDNSRRVDNVLKLWIIEARELPPKKRYYCELCLDDMLYARTTSKPRSASGDTVFWGEHFEFNNLPAVRALRLHLYRDSDKKRKKDKAGYVGLVTVPVATLAGRHFTEQWYPVTLPTGSGGSGGMGSGGGGGSGGGSGGKGKGGCPAVRLKARYQTMSILPMELYKEFAEYVTNHYRMLCAVLEPALNVKGKEEVASALVHILQSTGKAKDFLSDMAMSEVDRFMEREHLIFRENTLATKAIEEYMRLIGQKYLKDAIGEFIRALYESEENCEVDPIKCTASSLAEHQANLRMCCELALCKVVNSHCVFPRELKEVFASWRLRCAERGREDIADRLISASLFLRFLCPAIMSPSLFGLMQEYPDEQTSRTLTLIAKVIQNLANFSKFTSKEDFLGFMNEFLELEWGSMQQFLYEISNLDTLTNSSSFEGYIDLGRELSTLHALLWEVLPQLSKEALLKLGPLPRLLNDISTALRNPNIQRQPSRQSERPRPQPVVLRGPSAEMQGYMMRDLNSSIDLQSFMARGLNSSMDMARLPSPTKEKPPPPPPGGGKDLFYVSRPPLARSSPAYCTSSSDITEPEQKMLSVNKSVSMLDLQGDGPGGRLNSSSVSNLAAVGDLLHSSQASLTAALGLRPAPAGRLSQGSGSSITAAGMRLSQMGVTTDGVPAQQLRIPLSFQNPLFHMAADGPGPPGGHGGGGGHGPPSSHHHHHHHHHHRGGEPPGDTFAPFHGYSKSEDLSSGVPKPPAASILHSHSYSDEFGPSGTDFTRRQLSLQDNLQHMLSPPQITIGPQRPAPSGPGGGSGGGSGGGGGGQPPPLQRGKSQQLTVSAAQKPRPSSGNLLQSPEPSYGPARPRQQSLSKEGSIGGSGGSGGGGGGGLKPSITKQHSQTPSTLNPTMPASERTVAWVSNMPHLSADIESAHIEREEYKLKEYSKSMDESRLDRVKEYEEEIHSLKERLHMSNRKLEEYERRLLSQEEQTSKILMQYQARLEQSEKRLRQQQAEKDSQIKSIIGRLMLVEEELRRDHPAMAEPLPEPKKRLLDAQRGSFPPWVQQTRV

SEQ ID NO: 72867 - protein, 258 aa, Homo sapiens
MRSFNQVSSAPGGASKGGGEEPGKLPEPAEEESQVLRGTGHCKWFNVRMGFGFISMINREGSPLDIPVDVFVHQSKLFMEGFRSLKEGEPVEFTFKKSSKGLESIRVTGPGGSPCLGSERRPKGKTLQKRKPKGDRCYNCGGLDHHAKECSLPPQPKKCHYCQSIMHMVANCPHKNVAQPPASSQGRQEAESQPCTSTLPREVGGGHGCTSPPFPQEARAEISERSGRSPQEASSTKSSIAPEEQSKKGPSVQKRKKT

SEQ ID NO: 72868 - protein, 49 aa, Homo sapiens
MCELYSKRDTLGLRKKHIGGTLSPRSGQSCPETDGTAKYKFSIPPRQHC

SEQ ID NO: 72869 - protein, 151 aa, Homo sapiens
  MOD_RES (1)..(1): Any amino acid
XTHKEKEKGKEKVREKEKPEKKATHKEKIEKKEKPETKTLAKEQKKAKTAEKSEEKTKKEVKGGKQEKVKQTAAKVKEVQKTPSKPKEKEDKEKAAVSKHEQKGFPGPGIRNSSYYCQYIKGQINAWNDLRTSLLPIPYLSCGKMCSNFNN

SEQ ID NO: 72870 - protein, 217 aa, Homo sapiens
MKGQQKTAETEEGTVQIQEGAVATGEDPTSVAIASIQSAATFPDPNVKYVFRTENGGQVMYRVIQVSEGQLDGQTEGTGAISGYPATQSMTQAVIQGQFFVMMSPQEVLQGGSQRSIAPRTHPYSPKSEAPRTTRDEKRRAQHNEVERRRRDKINNWIVQLSKIIPDCSMESTKSGQSKGGILSKACDYIQELRQSNHRLSEELQGLDQLQLDNDVL

SEQ ID NO: 72871 - protein, 527 aa, Homo sapiens
MGNWVVNHWFSVLFLVVWLGLNVFLFVDAFLKYEKADKYYYTRKILGFCSRTLRKQLDHNLTFHKLVAYMICLHTAIHIIAHLFNFDCYSRSRQATDGSLASILSSLSHDEKKGGSWLNPIQSRNTTVEYVTFTSIAGLTGVIMTIALILMVTSATEFIRRSYFEVFWYTHHLFIFYILGLGIHGIGGIVRGQTEESMNESHPRKCAESFEMWDDRDSHCRRPKFEGHPPESWKWILAPVILYICERILRFYRSQQKVVITKVVMHPSKVLELQMNKRGFSMEVGQYIFVNCPSISLLEWHPFTLTSAPEEDFFSIHIRAAGDWTENLIRAFEQQYSPIPRIEVDGPFGTASEDVFQYEVAVLVGAGIGVTPFASILKSIWYKFQCADHNLKTKKIYFYWICRETGAFSWFNNLLTSLEQEMEELGKVGFLNYRLFLTGWDSNIVGHAALNFDKATDIVTGLKQKTSFGRPMWDNEFSTIATSHPKSVVGVFLCGPRTLAKSLRKCCHRYSSLDPRKVQFYFNKENF

SEQ ID NO: 72872 - protein, 953 aa, Homo sapiens
MPTLVVGTPPTCLGDTPQPCHKNSQRQGPFSHGAPGRAADWKAVAKPRLCAPAAEDDVAALRWPGPSQQPDPPWAAPHVVGSDDLKEPGPWGKACSLPMWSTGPEARDGDSSVSSGRLSCSSGGHDVCVSWKERPPQVLGPQQRPRKSDARLEQLRDKIRAQAWQQGSCASLGTSAPSSASRLHKASTLMLRRKGQEAKNPPPAPECSGFSILSAAERRVEAKASHGQGRELSRVSQHQVPVLREKPKRVKSSSCKREKTPKLPSPRRAAKDKHKDEDSELVGVYAWRKGQALVRSLLGPPPVLRRHHSKDPSRDPALTVDLGDSEKVIAAKCSPVCAQLPDATSAYSDQQVSGNTPSLASFDQPATIQTAMAILQDLRQQIQAGLELAQARKGGQELGPSKRRLQDVAGRGCCRDPNAQSSFSKSPWAMTERKHSSLERARSVHTWEPWSSSTARESCPQRAWGAQGQDRSFQRPESPHERLGHFSQRPWSALAGQACSPQRAWGAQRQGPSSQRPGSPPEKRSPFPQQPWSAVATQPCPRRAWTACETWEDPGPRLRNPLERPSPPAQRPWSSSGVQRAGPQGKGRGIGSPVSAAKHALPRPTGSFPQNPLGKEKDTLRPCPRSRGLLGPSHSSESLREFMRQKAQARRRQALEEKASALRTRELRSRRLQEVYRQQREAVLGRAVPVVSRTTPGIVTFVPSSAQSGGLEASGSLESPVLEWSKVTSGMVLGGQEAPGSFCLCLNRAWNHAETLDPPGMGGPQDGRDAPVLLSASPSLGSLELQDLTTRYLPRGMCIYLDPKEAEHLGTSSSLHLRHKQAQLQALETTAKVLKQRVDSLTAKLQGAEALDTVRDPAVGLLRSCPHSLPAAPTLATPTLATPACPGALGPNWGRGAPGEWVSMQPQPLLPPTYFLDGETLSWGPSWEQQQSVSPRAHCESKPRGVSQAPLLL

SEQ ID NO: 72873 - protein, 526 aa, Homo sapiens
MAFANLRKVLISDSLDPCCRKILQDGGLQVVEKQNLSKEELIAELQDCEGLIVRSATKVTADVINAAEKLQVVGRAGTGVDNVDLEAATRKGILVMNTPNGNSLSAAELTCGMIMCLARQIPQATASMKDGKWERKKFMGTELNGKTLGILGLGRIGREVATRMQSFGMKTIGYDPIISPEVSASFGVQQLPLEEIWPLCDFITVHTPLLPSTTGLLNDNTFAQCKKGVRVVNCARGGIVDEGALLRALQSGQCAGAALDVFTEEPPRDRALVDHENVISCPHLGASTKEAQSRCGEEIAVQFVDMVKGKSLTGVVNAQALTSAFSPHTKPWIGLAEALGTLMRAWAGSPKGTIQVITQGTSLKNAGNCLSPAVIVGLLKEASKQADVNLVNAKLLVTTSHSPAAPGEQGFGECLLAVALAGAPYQAVGLVQGTTPVLQGLNGAVFRPEVPLRRDLPLLLFRTQTSDPAMLPTMIGLLAEAGVRLLSYQTSLVSDGETWHVMGISSLLPSLEAWKQHVTEAFQFHF

SEQ ID NO: 72874 - protein, 396 aa, Homo sapiens
MLSLEEVAPVLQQTLLQDNLLGRVHFDQFKEALILILSRTLSNEEHFQEPDCSLEAQPKYVRGGKRYGRRSLPEFQESVEEFPEVTVIEPLDEEARPSHIPAGDCSEHWKTQRSEEYEAEGQLRFWNPDDLNASQSGSSPPQDWIEEKLQEVCEDLGITRDGHLNRKKLVSICEQYGLQNVDGEMLEEVFHNLDPDGTMSVEDFFYGLFKNGKSLTPSASTPYRQLKRHLSMQSFDESGRRTTTSSAMTSTIGFRVFSCLDDGMGHASVERILDTWQEEGIENSQEILKALDFSLDGNINLTELTLALENELLVTKNSIHQAALASFKAEIRHLLERVDQVVREKEKLRSDLDKAEKLKSLMASEVDDHHAAIERRNEYNLRKLDEEYKERIAALK

SEQ ID NO: 72875 - protein, 247 aa, Homo sapiens
MAADTPGKPSASPMAGAPASASRTPDKPRSAAEHRKVGSRPGVRGATGGREGRGTQPVPDPQSSKPVMEKRRRARINESLAQLKTLILDALRKESSRHSKLEKADILEMTVRHLRSLRRVQVTAALSADPAVLGKYRAGFHECLAEVNRFLAGCEGVPADVRSRLLGHLAACLRQLGPSRRPASLSPAAPAEAPAPEVYAGRPLLPSLGGPFPLLAPPLLPGLTRALPAAPRAGPQGPGGPWRPWLR

SEQ ID NO: 72876 - protein, 60 aa, Homo sapiens
  MOD_RES (1)..(1): Any amino acid
XLSQKWQVINQRSLLCGEDEAADENPESQEMLEEQLRFAVFQRRVLTTVVLPQQMETMKK

SEQ ID NO: 72877 - protein, 107 aa, Homo sapiens
IDQANYFLNFPCKVGTTPVSSPSQTPRPQPGPIPPHTQVRNQVYSWLLRLRPPSQGYLSSRSPQEMLRASGLTQKWVQREISNFEYLMQLNTIAGRTYNDLSQYPVV

SEQ ID NO: 72878 - protein, 129 aa, Homo sapiens
  MOD_RES (1)..(1): Any amino acid
XFSGVLHQCHILASEMVHFIHQMQYYITFEVLECSWDELWNKVQQAQDLDHIIAAHEVFLDTIISRCLLDSDSRALLNQLRAVFDQIIELQNAQDAIYRAALEELQRRLQFEEKKKQREIEVEMCLYCV

SEQ ID NO: 72879 - protein, 45 aa, Homo sapiens
MKGLGTDEDSLIEIICSRTNQELQEINRVYKEMYKTDLEKDIISD

SEQ ID NO: 72880 - protein, 965 aa, Homo sapiens
MNISKSEITKETSLKPSRRSLPCLAQSYAYSKSLSQSTSLFQSTESESQAPTSITLISTDKAEQVNTEENKNDSVLRCSFADLSDFCLALGKDKDYTDESEHATYDRSRLINDFVIKDKSEFKTKLSKNDMNYIASSGPLFKDGKKRIDYILVYRKTNIQYDKRNTFEKNLRAEGLMLEKEPAIASPDIMFIKIHIPWDTLCKYAERLNIRMPFRKKCYYTDGRSKSMGRMQTYFRRIKNWMAQNPMVLDKSAFPDLEESDCYTGPFSRARIHHFIINNKDTFFSNATRSRIVYHMLERTKYENGISKVGIRKLINNGSYIAAFPPHEGAYKSSQPIKTHGPQNNRHLLYERWARWGMWYKHQPLDLIRLYFGEKIGLYFAWLGWYTGMLIPAAIVGLCVFFYGLFTMNNSQVSQEICKATEVFMCPLCDKNCSLQRLNDSCIYAKVTYLFDNGGTVFFAIFMAIWATVFLEFWKRRRSILTYTWDLIEWEEEEETLRPQFEAKYYKMEIVNPITGKPEPHQPSSDKVTRLLVSVSGIFFMISLVITAVFGVVVYRLVVMEQFASFKWNFIKQYWQFATSAAAVCINFIIIMLLNLAYEKIAYLLTNLEYPRTESEWENSFALKMFLFQFVNLNSSIFYIAFFLGRFVGHPGKYNKLFDRWRLEECHPSGCLIDLCLQMGVIMFLKQIWNNFMELGYPLIQNWWSRHKIKRGIHDASIPQWENDWNLQPMNLHGLMDEYLEMVLQFGFTTIFVAAFPLAPLLALLNNIIEIRLDAYKFVTQWRRPLPARATDIGIWLGILEGIGILAVITNAFVIAITSDYIPRFVYEYKYGPCANHVEPSENCLKGYVNNSLSFFDLSELGMGKSGYCRYRDYRGPPWSSKPYEFTLQYWHILAARLAFIIVFEHLVFGIKSFIAYLIPDVPKGLHDRIRREKYLVQEMMYEAELEHLQQQRRKSGQPVHHEWP

SEQ ID NO: 72881 - protein, 202 aa, Homo sapiens
MLPCASCLPGSLLLWALLLLLLGSASPQDSEEPDSYTECTDGYEWDPDSQHCRDVNECLTIPEACKGEMKCINHYGGYLCLPRSAAVINDLHGEGPPPPVPPAQHPNPCPPGYEPDDQDSCVDVDECAQALHDCRPSQDCHNLPGSYQCTCPDGYRKIGPECVDIDECRYRYCQHRCVNLPGSFRCQCEPGFQLGPNNRSCV

SEQ ID NO: 72882 - protein, 131 aa, Homo sapiens
  MOD_RES (1)..(1): Any amino acid
XFGVACHLGVLTDLPCVGVAKKLLQVDGLENNALHKEKIRLLQTRGDSFPLLGDSGTVLGMADICSREHIRKSLGLPGPPTPRSPKAQRPVACPKGDSGESSGGAPSPQRQADRTTPGGRRSTAQHQVGQR

SEQ ID NO: 72883 - protein, 106 aa, Homo sapiens
MKARRPNRDPFLLVFASGAQGEYAGLATIRAYLNQKGEGHRTVCLIPKSAHGTNPASAHMAGMKIQPVEVDKYGNIDAVHLKAMVLVFSLADGRGRDGECWWGSGT

SEQ ID NO: 72884 - protein, 271 aa, Homo sapiens
MSSYLGQGPELLWLRFSSRSPRRSPSSARWQSCLLLSQTYSLVESAFACLLLSPPPRLTQVRWSRYSPEFKDPLIDKEYYRKPVEELTEEEKYVRELKKTQLIKAAPAGKTSSVFEDPVISKFTNMMMIGGNKVLARSLMIQTLEAVKRKQFEKYHAASAEEQATIERNPYTIFHQALKNCEPMIGLVPILKGGRFYQVPVPLPDRRRRFLAMKWMITECRDKKHQRTLMPEKLSHKLLEAFHNQGPVIKRKHDLHKMAEANRALAHYRWW

SEQ ID NO: 72885 - protein, 106 aa, Homo sapiens
MHPEPLLNSTQSAPHHFPDSFQATPFCFNQSLIPGSPSNSSILSGSLDYSYSPVQLPSYAPENYNSPASLDTRTCGYPPEDHSYQHLSSHAQYSCFSSATTSICYC

SEQ ID NO: 72886 - protein, 100 aa, Homo sapiens
  MOD_RES (1)..(1): Any amino acid
XNDDWLGCWGHHMKSPSFRSIREHQKLNHFPGSFQIGRKDRLWRNLSRMQSRFGKKEFSFFPQSFILPQDAKLLRKAWESSSRQKWIVKPVFAFHEEPWQ

SEQ ID NO: 72887 - protein, 61 aa, Homo sapiens
MEGVLYKWTNYLTGWQPRWFVLDNGILSYYDSQDDVCKGSKGSIKMAVCEIKGDNFGGDHP

SEQ ID NO: 72888 - protein, 122 aa, Homo sapiens
MFQIDQATKQCSKMTLTQPWDPLDIPQNSTFEDQYSIGGPQEQITVQEWSDRKSARSYETWIGIYTVKDCYPVQETFTINYSVILSTRFFDIQLGIKDPSVFTPPSTCQMAQLEKMSEDCSW

SEQ ID NO: 72889 - protein, 320 aa, Homo sapiens [sequence omitted]

SEQ ID NO: 72890 - protein, 88 aa, Homo sapiens
MSLTSWFLVSSGGTRHRLPREMIFVGRDDCELMLQSRSVDKQHAVINYDASTDEHLVKDLGSLNGTFVNDVRIPEQTYITLKLEDKLR

SEQ ID NO: 72891 - protein, 175 aa, Homo sapiens
MMLSLNNLQNIIYNPVIPFVGTIPDQLDPGTLIVIRGHVPSDADRFQVDLQNGSSMKPRADVAFHFNPRFKRAGCIVCNTLINEKWGREEITYDTPFKREKSFEIVIMVLKDKFQVPKSGTPQLRLPFAARLNTPMGPGRTVVVKGEVNANAKSFNVDLLAGKSKDIALHLNPRL

SEQ ID NO: 72892 - protein, 94 aa, Homo sapiens
MDHLHRGELVAAILRNRRRRQLSLKQADFKDIFKKSTSGSLVEEEDQHMKLSLGGSEMGLSSHLQSSKAGPTRIFTSNTHSSVVLQGFDQLRLE

SEQ ID NO: 72893 - protein, 91 aa, Homo sapiens
MAGAENWPGQQLELDEDEASCCRWGAQHAGARELAALYSPGKRLQEWCSVILCFSLIAHNLVHLLLLARWEDTPLVILGVGFHPTLPGAPH

SEQ ID NO: 72894 - protein, 277 aa, Homo sapiens
MDKFWWHAAWGLCLVPLSLAQIDLNITCRFAGVFHVEKNGRYSISRTEAADLCKAFNSTLPTMAQMEKALSIGFETCRYGFIEGHVVIPRIHPNSICAANNTGVYILTSNTSQYDTYCFNASAPPEEDCTSVTDLPNAFDGPITITIVNRDGTRYVQKGEYRTNPEDIYPSNPTDDDVSSGSSSERSSTSGGYIFYTFSTVHPIPDEDSPWITDSTDRIPATTASAHTSHPMQGRTTPSPEDSSWTDFFNPISHPMGRGHQAGRRMDMDSSHSITLQ

SEQ ID NO: 72895 - protein, 27 aa, Homo sapiens
MVKLSIVLTPQFLSHDQGQLTKELQQH

SEQ ID NO: 72896 - protein, 283 aa, Homo sapiens
MADLSLADALTEPSPDIEGEIKRDFIATLEAEAFDDVVGETVGKTDYIPLLDVDEKTGNSESKKKPCSETSQIEDTPSSKPTLLANGGHGVEGSDTTGSPTEFLEEKMAYQEYPNSQNWPEDTNFCFQPEQVVDPIQTGMSPCNTAVVPQGWSVEALNSPHSESFVSPEAVAEPPQPTAVPLELAKEIEMASEERPPAQALEIMMGLKTTDMAPSKETEMALAKDMALATKTEVALAKDMESPTKLDVTLAKDMQPSMESDMALVKDMELPTEKEVALVKDVR

SEQ ID NO: 72897 - protein, 274 aa, Homo sapiens
MARHGLPLLPLLSLLVGAWLKLGNGQATSMVQLQGGRFLMGTNSPDSRDGDGPVREATVKPFAIDIFPVTNKDFRYIRDFVREKKYRTEAEMFGWSFVFEDFVSDELRNKATQPMKSVLWWLPVEKAFWRQPAGPGSGIRERLEHPVLHVSWNDARAYCAWRGKRLPTEEEWEFAARGGLKGQVYPWGNWFQPNRTNLWQGKFPKGDKAEDGFHGVSPVNAFPAQNNYGLYDLLGNVWEWTASPYQAAEQDMRVLRGASWIDTADGSANHRARV

SEQ ID NO: 72898 - protein, 31 aa, Homo sapiens
  MOD_RES (1)..(1): Any amino acid
XAGMILPKMPDFNCKEGTDTLTSCTLGSFQN

SEQ ID NO: 72899 - protein, 561 aa, Homo sapiens
MLSEQGLLSDCGNNYFQMTSCILSGSIQTTPQSKSNDYLTLNAGSQQERDQAKLTCPSEVSGTILQEREFEANKLQGMQQSDLFKAEYVLIVDSEGEDEAASRKVEQGPPGGIGTAAVRPKSLAISSSLVSDVVRPKTQGTDLKTSSHPEMLHGMAPQQKHGQLTSSPTTSEQLACKPPAFSFVSPTNPNTPPDPVNLEGASVLEEFHTRRLDVGGAVVEESATYFQTTAHSTPFSASKGTSSTLLFPHSTQLSGSNLPSSTAADPKPGLTSEVLKKTTLTSHVLSHGESPRTSSSPPSSSASLKSNSASYIPVRIVTHSLSPSPKPFTSSFHGSSSTICSQMSSSGNLSKSGVKSPVPSRLALLTAILKSNPSHQRPFSPASCPTFSLNSPASSTLTLDQKEKQTPPTPKKSLSSCSLRAGSPDQGELQVSELTQQSFHLPVFTKSTPLSQAPSLSPTKQASSSLASMNVERTPSPTLKSNTMLSLLQTSTSSSVGLPPVPPSSSLSSLKSKQDGDLRGPENPRNIHTYPSTLASSALSSLSPPINQRATFSSSEKCFHP

SEQ ID NO: 72900 - protein, 694 aa, Homo sapiens
MKEESSQRRFSSCTGVLPVLFPPRIDGRKLVRNASFGGYNELSPSLPGFERGKEDISQNKDESSLSMSKSKSESKLYNGSEKDSSTSSKLTKKESLKVQKKNYREEKKRATKELLSTITDPSVIVMADWLKIRGTLKSWTKLWCVLKPGVLLIYKTQKNGQWVGTVLLNACEIIERPSKKDGFCFKLFHPLEQSIWAVKGPKGEAVGSITQPLPSSYLIIRATSESDGRCWMDALELALKCSSLLKRTMIREGKEHDLSVSSDSTHVTFYGLLRANNLHSGDNFQLNDSEIERQHFKDQDMYSDKSDKENDQEHDESDNEVMGKSEESDTDTSERQDDSYIEPEPVEPLKETTYTEQSHEELGEAGEASQTETVSEENKSLIWTLLKQVRPGMDLSKVVLPTFILEPRSFLDKLSDYYYHADFLSEAALEENPYFRLKKVVKWYLSGFYKKPKGLKKPYNPILGETFRCLWIHPRTNSKTFYIAEQVSHHPPISAFYVSNRKDGFCLSGSILAKSKFYGNSLSAILEGEARLTFLNRGEDYVMTMPYAHCKGILYGTMTLELGGTVNITCQKTGYSAILEFKLKPFLGSSDCVNQISGKLKLGKEVLATLEGHWDSEVFITDKKTDNSEVFWNPTPDIKQWRLIRHTVKFEEQGDFESEKLWQRVTRAINAKDQTEATQEKYVLEEAQRQAARD

SEQ ID NO: 72901 - protein, 1101 aa, Homo sapiens
  MOD_RES (1)..(1): Any amino acid
XGRCAPEMHLIQTGKGEAIRIRSILRSLVPTEDLVGIISIPLKLPSLNKDGSVSEPDMAANFCPDHKAPMVLFLDRVYGIKDQTFLLHLLEVGFLPDLRASASLDTVSLSTTEAALALNRYICSAVLPLLTRCAPLFAGTEHCTSLIDSTLQTIYRLSKGRSLTKAQRDTIEECLLAICNHLRPSMLQQLLRRLVFDVPQLNEYCKMPLKLLTNHYEQCWKYYCLPSGWGSYGLAVEEELHLTEKLFWGIFDSLSHKKYDPDLFRMALPCLSAIAGALPPDYLDTRITATLEKQISVDADGNFDPKPINTMNFSLPEKLEYIVTKYAEHSHDKWACDKSQSGWKYGISLDENVKTHPLIRPFKTLTEKEKEIYRWPARESLKTMLAVGWTVERTKEGEALVQQRENEKLRSVSQANQGNSYSPAPLDLSNVVLSRELQGMVEVVAENYHNIWAKKKKLELESKGGGSHPLLVPYDTLTAKEKFKDREKAQDLFKFLQVNGIIVSRGMKDMELDASSMEKRFAYKFLKKILKYVDSAQEFIAHLEAIVSSGKTEKSPRDQEIKFFAKVLLPLVDQYFTSHCLYFLSSPLKPLSSSGYASHKEKEMVAGLFCKLAALVRHRISLFGSDSTTMVSCLHILAQTLDTRTVMKSGSELVKAGLRAFFENAAEDLEKTSENLKLGKFTHSRTQIKGVSQNINYTTVALLPILTSIFEHVTQHQFGMDLLLGDVQISCYHILCSLYSLGTGKNIYVERQRPALGECLASLAAAIPVAFLEPTLNRYNPLSVFNTKTPRERSILGMPDTVEDMCPDIPQLEGLMKEINDLAESGARYTEMPHVIEVILPMLCNYLSYWWERGPENLPPSTGPCCTKVTSEHLSLILGNILKIINNNLGIDEASWMKRIAVYAQPIISKARPDLLRSHFIPTLEKLKKKAVKTVQEEEQLKADGKGDTQEAELLILDEFAVLCRDLYAFYPMLIRYVDNNRSNWLKSPDADSDQLFRMVAEVFILWCKSHNFKREEQNFVIQNEINNLAFLTGDSKSKMSKAMQVKVQVKCMTCLFCPSIRGAGLWPPLHCDHHGGGREWIFPPGGPPGLLQGRQLPVKE

SEQ ID NO: 72902 - protein, 78 aa, Homo sapiens
MAPSRFRTQLEVSLSPMFSFSPAPTSWVSAPTIRLRSPRDRLSRRPESASRRGSTRSGRTSSRNGSCCLSFPVMLPWR

SEQ ID NO: 72903 - protein, 235 aa, Homo sapiens
MPEAPPLLLAAVLLGLVLLVVLLLLLRHWGWGLCLIGWNEFILQPIHNLLMGDTKEQRILNHVLQHAEPGNAQSVLEAIDTYCEQKEWAMNVGDKKGKIVDAVIQEHQPSVLLELGAYCGYSAVRMARLLSPGARLITIEINPDCAAITQRMVDFAGVKDKVTLVVGASQDIIPQLKKKYDVDTLDMVFLDHWKDRYLPDTLLLEVSPNQDGIRASCCPEPIQSASASPKSQAFQ

SEQ ID NO: 72904 - protein, 111 aa, Homo sapiens
  MOD_RES (1)..(1): Any amino acid
XCGMFAPQTFVMHSHRSPDKRTCHWGFESAKWHCYLHVNQKYLGTPEEKKLKIILEEMKEKFSMRSGKRNQSKTDAPSGMELQSWYPVIKQEGDHVSQTHSFLHPRCINLK

SEQ ID NO: 72905 - protein, 187 aa, Homo sapiens
MEDERSFSDICGGRLALQRRYYSPSCREFCLSCPRLSLRSLTAVTCTVWLAAYGLFTLCENSMILSAAIFITLLGLLGYLHFVKIDQETLLIIDSLGIQMTSSYASGKESTTFIEMGKVKDIVINEAIYMKVIYYLCILLKDPVEPHGISQVVPVFQSAKPRLDCLIEVYRSCQEILAHQKATSTSP

SEQ ID NO: 72906 - protein, 47 aa, Homo sapiens
MGGCAGSRRRFSDSEGRALEERGGLLAAGPLQQLLLCGDAECRPRHP

SEQ ID NO: 72907 - protein, 160 aa, Homo sapiens
MSFVRVNRCGPRVGVRKTPKVKKKKTSVKQEWDNTVTDLTVHRATPEDLVRRHEIHKSKNRALVHWELQEKALKRKWRKQKPETLNLEKRRLSIMKEILSDQYQMQDVLEKSDHLIAAAKELFPRRRTGFPNVTVAPDSSQGPIVVNQDPITQSIFNESV

SEQ ID NO: 72908 - protein, 79 aa, Homo sapiens
MAAYQQEEQMQLPRADAIRSRLIDTFSLIEHLQGLSQAVPRHTIRELLDPSRQKKLVLGDQHQLVRFSIKPQRIEQISH

SEQ ID NO: 72909 - protein, 844 aa, Homo sapiens
MFPTGFSSPSPSAAAAAQEVRSATDGNTSTTPPTSAKKRKLNSSSSSSSNSSNEREDFDSTSSSSSTPPLQPRDSASPSTSSFCLGVSVAASSHVPIQKKLRFEDTLEFVGFDAKMAEESSSSSSSSSPTAATSQQQQLKNKSILISSVASVHHANGLAKSSTTVSSFANSKPGSAKKLVIKNFKDKPKLPENYTDETWQKLKEAVEAIQNSTSIKYNLEELYQAVENLCSYKISANLYKQLRQICEDHIKAQIHQFREDSLDSVLFLKKIDRCWQNHCRQMIMIRSIFLFLDRTYVLQNSMLPSIWDMGLELFRAHIISDQKVQNKTIDGILLLIERERNGEAIDRSLLRSLLSMLSDLQIYQDSFEQRFLEETNRLYAAEGQKLMQEREVPEYLHHVNKRLEEEADRLITYLDQTTQKSLIATVEKQLLGEHLTAILQKGLNNLLDENRIQDLSLLYQLFSRVRGGVQVLLQQWIEYIKAFGSTIVINPEKDKTMVQELLDFKDKVDHIIDICFLKNEKFINAMKEAFETFINKRPNKPAELIAKYVDSKLRAGNKEATDEELEKMLDKIMIIFRFIYGKDVFEAFYKKDLAKRLLVGKSASVDAEKSMLSKLKHECGAAFTSKLEGMFKDMELSKDIMIQFKQYMQNQNVPGNIELTVNILTMGYWPTYVPMEVHLPPEMVKLQEIFKTFYLGKHSGRKLQWQSTLGHCVLKAEFKEGKKELQVSLFQTLVLLMFNEGEEFSLEEIKQATGIEDGELRRTLQSLACGKARVLAKNPKGKDIEDGDKFICNDDFKHKLFRIKINQIQMKETPADLKKRIESLIDRDYMERDKENPNQYNYIA

SEQ ID NO: 72910 - protein, 132 aa, Homo sapiens
  MOD_RES (1)..(1): Any amino acid
XEIQQAGERLRSRTLTRTSQETADVKASVLLGSRGLDISHISQRLESLSAATTFEPLEPVKDTDIQGFLKNEKDNALLSAIEESRKRTFGMAEEYHRESMLVEWEQVKQRILHTLLASGEDALDFTQESEVA

SEQ ID NO: 72911 - protein, 133 aa, Homo sapiens
MDRLGPFSNDPSDKPPCRGCSSYLMEPYIKCAECGPPPFFLCLQCFTRGFEYKKHQSDHTYEIMDVANQMCTKTKEECEKHYMKHFINNPLFASTLLNLKQAEEAKTADTAIPFHSTDDPPRPTFDSLLSRDM

SEQ ID NO: 72912 - protein, 94 aa, Homo sapiens
  MOD_RES (1)..(1): Any amino acid
XIQMVKELHITKPKTPPKDGFVIADVQLVTSNSPEEKQSPLSAFRSSSSLRKKNNSGEKALPPWRSSDKHPTDIIRFNYLDNRDPMETVQQGCP

SEQ ID NO: 72913 - protein, 15 aa, Homo sapiens
MCNILKTEGVTVRRP

SEQ ID NO: 72914 - protein, 648 aa, Homo sapiens
MAACEGRRSGALGSSQSDFLTPPVGGAPWAVATTVVMYPPPPPPPHRDFISVTLSFGENYDNSKSWRRRSCWRKWKQLSRLQRNMILFLLAFLLFCGLLFYINLADHWKALAFRLEEEQKMRPEIAGLKPANPPVLPAPQKADTDPENLPEISSQKTQRHIQRGPPHLQIRPPSQDLKDGTQEEATKRQEAPVDPRPEGDPQRTVISWRGAVIEPEQGTELPSRRAEVPTKPPLPPARTQGTPVHLNYRQKGVIDVFLHAWKGYRKFAWGHDELKPVSRSFSEWFGLGLTLIDALDTMWILGLRKEFEEARKWVSKKLHFEKDVDVNLFESTIRILGGLLSAYHLSGDSLFLRKAEDFGNRLMPAFRTPSKIPYSDVNIGTGVAHPPRWTSDSTVAEVTSIQLEFRELSRLTGDKKFQEAVEKVTQHIHGLSGKKDGLVPMFINTHSGLFTHLGVFTLGARADSYYEYLLKQWIQGGKQETQLLEDYVEAIEGVRTHLLRHSEPSKLTFVGELAHGRFSAKMDHLVCFLPGTLALGVYHGLPASHMELAQELMETCYQMNRQMETGLSPEIVHFNLYPQPGRRDVEVKAQPAAARDRGEPVLPVPRHRGPQIPGLGLGDSAELQPIHTGPLGWLFFHQQCPGSSEARA

SEQ ID NO: 72915 - protein, 264 aa, Homo sapiens
MEKARPLWANSLQFVFACISYAVGLGNVWRFPYLCQMYGGGVASVVVSFFLSMYYNVINAWAFWYLFHSFQDPLPWSVCPLNGNHTGYDEECEKASSTQYFWYRKTLNISPSLQENGGVQWEPALCLLLAWLVVYLCILRGTESTGKVVYFTASLPYCVLIIYLIRGLTLHGATNGLMYMFTPKIEQLANPKAWINAATQIFFSLGLGFGSLIAFASYNEPSNNCQKHAIIVSLINSFTSIFASIVTFSIYGFKATFNYENCLK

SEQ ID NO: 72916 - protein, 330 aa, Homo sapiens; identical to SEQ ID NO: 9917

SEQ ID NO: 72917 - protein, 86 aa, Homo sapiens
MGLHLRPYRVGLLPDGLLFLLLLLMLLADPALPAGRHPPVVLVEMGFHHIGQAGLELLTASDPLTSASQSAGITGMSPCALPRSPW

SEQ ID NO: 72918 - protein, 119 aa, Homo sapiens
MESCGQESSSALSCPTVSVPPAAPAALEEVEKEGAGAATGPGPQPGLYSYIRDDLFTSEIFKLELQNVPRHASFSDVRRFLGRFGLQPHKTKLFGQPPCAFVTFRSAAERDKALRVLHG

SEQ ID NO: 72919 - protein, 255 aa, Homo sapiens
MAPAGCCCCCCFWGGAVAAAGAARRVLLLLLLGVLSAGLRPGALATEHYSPLSLLKQELQHRQQQEAPAGGGGCSPQSGDWGDQYSAECGESSFLNFHDSDCEPKGSSPCDSLLSLNTEKILSQAKSIAEQKRFPFATDNDSTNEELAIAYVLIGSGLYDEAIRHFSTMLQILSPLGRINEAVNDLTKAIQLQPSARLYRHRGTLYFISENEVESCAVIRQEPRNQRLLKAEEKSDFEELWRPSMLKLLNPSKKL

SEQ ID NO: 72920 - protein, 88 aa, Homo sapiens
MAGVPPPAWLPPCSLISDCCASNQRDSVGVGPSEPAPVSPVKHDSNSNSANFQDVEDMPDRCALEESESPGEPRHHSWIAKVCPCKVS

SEQ ID NO: 72921 - protein, 2512 aa, Homo sapiens
MARFGDEMPARYGGGGSGAAAGVVVGSGGGRGAGGSRQGGQPGAQRMYKQSMAQRARTMALYNPIPVRQNCLTVNRSLFLFSEDNVVRKYAKKITEWPPFEYMILATIIANCIVLALEQHLPDDDKTPMSERLDDTEPYFIGIFCFEAGIKIIALGFAFHKGSYLRNGWNVMDFVVVLTGILATVGTEFDLRTLRAVRVLRPLKLVSGIPSLQVVLKSIMKAMIPLLQIGLLLFFAILIFAIIGLEFYMGKFHTTCFEEGTDDIQGESPAPCGTEEPARTCPNGTKCQPYWEGPNNGITQFDNILFAVLTVFQCITMEGWTDLLYNSNDASGNTWNWLYFIPLIIIGSFFMLNLVLGVLSGEFAKERERVENRRAFLKLRRQQQIERELNGYMEWISKAEEVILAEDETDGEQRHPFDGALRRTTIKKSKTDLLNPEEAEDQLADIASVGSPFARASIKSAKLENSTFFHKKERRMRFYIRRMVKTQAFYWTVLSLVALNTLCVAIVHYNQPEWLSDFLYYAEFIFLGLFMSEMFIKMYGLGTRPYFHSSFNCFDCGVIIGSIFEVIWAVIKPGTSFGISVLRALRLLRIFKVTKYWASLRNLVVSLLNSMKSIISLLFLLFLFIVVFALLGMQLFGGQFNFDEGTPPTNFDTFPAAIMTVFQILTGEDWNEVMYDGIKSQGGVQGGMVFSIYFIVLTLFGNYTLLNVFLAIAVDNLANAQELTKVEADEQEEEEAANQKLALQKAKEVAEVSPLSAANMSIAVKEQQKNQKPAKSVWEQRTSEMRKQNLLASREALYNEMDPDERWKAAYTRHLRPDMKTHLDRPLVVDPQENRNNNTNKSRAAEPTVDQRLGQQRAEDFLRKQARYHDRARDPSGSAGLDARRPWAGSQEAELSREGPYGRESDHHAREGSLEQPGFWEGEAERGKAGDPHRRHVHRQGGSRESRSGSPRTGADGEHRRHRAHRRPGEEGPEDKAERRARHREGSRPARGGEGEGEGPDGGERRRRHRHGAPATYEGDARREDKERRHRRRKENQGSGVPVSGPNLSTTRPIQQDLGRQDPPLAEDIDNMKNNKLATAESAAPHGSLGHAGLPQSPAKMGNSTDPGPMLAIPAMATNPQNAASRRTPNNPGNPSNPGPPKTPENSLIVTNPSGTQTNSAKTARKPDHTTVDIPPACPPPLNHTVVQVNKNANPDPLPKKEEEKKEEEEDDRGEDGPKPMPPYSSMFILSTTNPLRRLCHYILNLRYFEMCILMVIAMSSIALAAEDPVQPNAPRNNVLRYFDYVFTGVFTFEMVIKMIDLGLVLHQGAYFRDLWNILDFIVVSGALVAFAFTGNSKGKDINTIKSLRVLRVLRPLKTIKRLPKLKAVFDCVVNSLKNVFNILIVYMLFMFIFAVVAVQLFKGKFFHCTDESKEFEKDCRGKYLLYEKNEVKARDREWKKYEFHYDNVLWALLTLFTVSTGEGWPQVLKHSVDATFENQGPSPGYRMEMSIFYVVYFVVFPFFFVNIFVALIIITFQEQGDKMMEEYSLEKNERACIDFAISAKPLTRHMPQNKQSFQYRMWQFVVSPPFEYTIMAMIALNTIVLMMKFYGASVAYENALRVFNIVFTSLFSLECVLKVMAFGILNYFRDAWNIFDFVTVLGSITDILVTEFGNPNNFINLSFLRLFRAARLIKLLRQGYTIRILLWTFVQSFKALPYVCLLIAMLFFIYAIIGMQVFGNIGIDVEDEDSDEDEFQITEHNNFRTFFQALMLLFRSATGEAWHNIMLSCLSGKPCDKNSGILTRECGNEFAYFYFVSFIFLCSFLMLNLFVAVIMDNFEYLTRDSSILGPHHLDEYVRVWAEYDPAAWGRMPYLDMYQMLRHMSPPLGLGKKCPARVAYKRLLRMDLPVADDNTVHFNSTLMALIRTALDIKIAKGGADKQQMDAELRKEMMAIWPNLSQKTLDLLVTPHKSTDLTVGKIYAAMMIMEYYRQSKAKKLQAMREEQDRTPLMFQRMEPPSPTQEGGPGQNALPSTQLDPGGALMAHESGLKESPSWVTQRAQEMFQKTGTWSPEQGPPTDMPNSQPNSQSVEMREMGRDGYSDSEHYLPMEGQGRAASMPRLPAENQRRRGRPRGNNLSTISDTSPMKRSASVLGPKARRLDDYSLERVPPEENQRHHQRRRDRSHRASERSLGRYTDVDTGLGTDLSMTTQSGDLPSKERDQERGRPKDRKHRQHHHHHHHHHHPPPPDKDRYAQERPDHGRARARDQRWSRSPSEGREHMAHRQGSSSVSGSPAPSTSGTSTPRRGRRQLPQTPSTPRPHVSYSPVIRKAGGSGPPQQQQQQQQQQQQQAVARPGRAATSGPRRYPGPTAEPLAGDRPPTGGHSSGRSPRMERRVPGPARSESPRACRHGGARWPASGPHVSEGPPGPRHHGYYRGSDYDEADGPGSGGGEEAMAGAYDAPPPVRHASSGATGRSPRTPRASGPACASPSRHGRRLPNGYYPAHGLARPRGPGSRKGLHEPYSESDDDWC

SEQ ID NO: 72922 - protein, 162 aa, Homo sapiens
MDMGNPGTLSPTKPGSQYYQYSSNNPRRRPLHSSAMEVQTKKVRKVPPGLPSSVYAPSASTADYNRDSPGYPSSKPATSTFPSSFFMQDGHHSSDPWSSSSGMNQPGYAGMLGNSSHIPQSSSYCSLHPHERLSYPSHSSADINSSLPPMSTFHRSGTNHYS

SEQ ID NO: 72923 - protein, 107 aa, Homo sapiens
MGKKRTKGKTVPIDDSSETLEPVCRHIRKGLEQGNLKKALVNVEWNICQDCKTDNKVKDKAEEETEEKPSVWLCLKCGHQGCGRNSQEQHALKHYLTPRSEPHCLVL

SEQ ID NO: 72924 - protein, 756 aa, Homo sapiens
MPLRPGSLVPEGAGFPKMAADVSVTHRPPLSPKSGAEVEAGDAAERRAPEEELPPLDPEEIRKRLEHTERQFRNRRKILIRGLPGDVTNQEVHDLLSDYELKYCFVDKYKGTAFVTLLNGEQAEAAINAFHQSRLRERELSVQLQPTDALLCVANLPPSLTQQQFEELVRPFGSLERCFLVYSERTGQSKGYGFAEYMKKDSAARAKSDLLGKPLGPRTLYVHWTDAGQLTPALLHSRCLCVDRLPPGFNDVDALCRALSAVHSPTFCQLACGQDGQLKGFAVLEYETAEMAEEAQQQADGLSLGGSHLRVSFCAPGPPGRSMLAALIAAQATALNRGKGLLPEPNILQLLNNLGPSASLQLLLNPLLHGSAGGKQGLLGAPPAMPLLNGPALSTALLQLALQTQGQKKPGILGDSPLGALQPGAQPANPLLGELPAGGGLPPELPPRRGKPPPLLPSVLGPAGGDREALGLGPPAAQLTPPPAPVGLRGSGLRGLQKDSGPLPTPPGVSLLGEPPKDYRIPLNPYLNLHSLLPASNLAGKEARGWGGAGRSRRPAEGPPTNPPAPGGGSSSSKAFQLKSRLLSPLSSARLPPEPGLSDSYSFDYPSDMGPRRLFSHPREPALGPHGPSRHKMSPPPSGFGERSSGGSGGGPLSHFYSGSPTSYFTSGLQAGLKQSHLSKAIGSSPLGSGEGLLGLSPGPNGHSHLLKTPLGGQKRSFAHLLPSPEPSPEGSYVGQHSQGLGGHYADSYLKRKRIF

SEQ ID NO: 72925 - protein, 1743 aa, Homo sapiens
MHLLQAPASHEDLDAPHGGPSLAPPSTTTSSRDTPGPAGPAGRQPGRAGPDRTKGLAWSPGPSVQVSVAPAGLGGALSTVTIQAQQCLEGMWSVSRVNSFLPPACLAEAAVAAVAVADTVRECPPVAGPDGLSKAWGRGGVCTSALVTPTPGSVGGSTGPSAAASFFIRAMQKLSLASKRKKPHPPPPPATRGTSTYPTDFSGVLQLWPPPAPPCLLRAASKTKDNPGSIGKVKVMLRIWPAQGAQRSAEAMSFLKVDPRKKQVILYDPAAGPPGSAGPRRAATAAVPKMFAFDAVFPQDSEQAEVCSGTVADVLQSVVSGADGCIFSFGHMSLGKSYTMIGKDSSPQSLGIVPCAISWLFRLIEERRERTGTRFSVRVSAVEVCGRDQSLRDLLAEVAPGSLQDTQSPGVYLREDPVCGAQLQNQSELRAPTAEKAAFYLDAALAARSTSRAGCGEDARRSSHMLFTLHVYQYRMEKCGRGGMSGGRSRLHLIDLGSCEAAAGRAGEAAGGPLCLSLSALGSVILALVNGAKHVPYRDHRLTMLLRESLATAGCRTTMIAHVSDAPAQHAETLSTVQLAARIHRLRRKKAKYASSSSGGESSCEEGRARRPPHLRPFHPRTVALDPDRTPPCLPGDPDYSSSSEQSCDTVIYVGPGGAALSDRELTDNEGPPDFVPIIPALSRHRPSKGPRDADHFRCSTFAELQERLECMDGNEGPSGGPGGTDGAQASPARGGRKPSPPEAASPRKAVGTPMAASTPRGSSGPDTHQGTPEPCKAIVWGDQREDSSAWPELLVPEKAAVSGGRRPLPSPAPPPPQLLEACRAPEEPGGGGTDGVARTPPVGMSGQVAGSPMLPGATCPRLAAGSRCPERGLLTTTVTLQRPVELNGEDELVFTVVEELSLGALAGAGRPTSLASFDSDCSLRALASGSRPVSIISSINDEFDAYTSQAPEGGPLEGAAWAGSSHGSSISSWLSEVSVCTADSRDPTPQPRFSPDSLAGLDPGGPPALDGSLGDGSSGFLGPDRPDSPGPTWGPCPGEVAAVAPSRPGREPQAGPSRWASAAQTIHSSLPRKPRTASATTRVGCARLGQSPPGRGGLFEDPWLLRVGECDTQAASAGRAPSPTLGSPRLPEAQVMLACAQRVVDGCEVAARAARRPEAVARIPPLRRGATTLGVTTPAVSWGDAPTEVVACSGSLKASPTSKKGLAPKAGFLPRPSGAAPPAPPTRKSSLEQRSSPASAPPHAVNPARVGAAAVLRGEEEPRPSSRADHSVPRATSSLKARASKVEAAHRLAGHASLERYEGLAHSSSKGREAPGRPPRAVPKLGVPPSSPTHGPAPACRSGAAKAVGAPKPPVGGGKGRGLVAGGSRALGPSVKLSTASVTGRSPGGPVAGPRAAPRAGPSVGAKAGRGTVMGTKQALRAAHSRVHELSASGAPGRGGSSWGSADSDSGHDSGVNVGEERPPTGPALPSPYSKVTAPRRPQRYSSGHGSDNSSVLSGELPPAMGRTALFHHSGGSSGYESLRRDSEATGSASSAPDSMSESGAASPGARTRSLKSPKKRATGLQRRRLIPAPLPDTTALGRKPSLPGQWVDLPPPLAGSLKEPFEIKVYEIDDVERLQRPRPTPREAPTQGLACVSTRLRLAERRQQRLREVQAKHKHLCEELAETQGRLMLEPGRWLEQFEVDPELEPESAEYLAALERATAALEQCVNLCKAHVMMVTCFDISVAASAAIPGPQEVDV

SEQ ID NO: 72926 - protein, 721 aa, Homo sapiens
MEGGLADGEPDRTSLLGDSKDVLGPSTVVANSDESQLLTPGKMSQRQGKEAYPTPTKDLHQPSLSPASPHSQGFERGKEDISQNKDESSLSMSKSKSESKLYNGSEKDSSTSSKLTKKESLKVQKKNYREEKKRATKELLSTITDPSVIVMADWLKIRGTLKSWTKLWCVLKPGVLLIYKTQKNGQWVGTVLLNACEIIERPSKKDGFCFKLFHPLEQSIWAVKGPKGEAVGSITQPLPSSYLIIRATSESDGRCWMDALELALKCSSLLKRTMIREGKEHDLSVSSDSTHVTFYGLLRANNLHSGDNFQLNDSEIERQHFKDQDMYSDKSDKENDQEHDESDNEVMGKSEESDTDTSERQDDSYIEPEPVEPLKETTYTEQSHEELGEAGEASQTETVSEENKSLIWTLLKQVRPGMDLSKVVLPTFILEPRSFLDKLSDYYYHADFLSEAALEENPYFRLKKVVKWYLSGFYKKPKGLKKPYNPILGETFRCLWIHPRTNSKTFYIAEQVSHHPPISAFYVSNRKDGFCLSGSILAKSKFYGNSLSAILEGEARLTFLNRGEDYVMTMPYAHCKGILYGTMTLELGGTVNITCQKTGYSAILEFKLKPFLGSSDCVNQISGKLKLGKEVLATLEGHWDSEVFITDKKTDNSEVFWNPTPDIKQWRLIRHTVKFEEQGDFESEKLWQRVTRAINAKDQTEATQEKYVLEEAQRQAARDRK

SEQ ID NO: 72927 - protein, 186 aa, Homo sapiens
MTPNSMTENGLTAWDKPKHCPDREHDWKLVGMSEACLHRKSHSERRSTLKNEQSSPHLIQTTWTSSIFHLDHDDVNDQSVSSAQTFQTEEKKCKGYIPSYLDKDELCVVCGDKATGYHYRCITCEGCKGFFRRTIQKNLHPSYSCKYEGKCVIDKVTRNQCQECRFKKCIYVGMATDCHTFIKKWP

SEQ ID NO: 72928 - protein, 51 aa, Homo sapiens
MEERGDSEPTPGCSGLGPGGVRGFGDGGGAPSWAPEDAWMGTHPKAKAGMK

SEQ ID NO: 72929 - protein, 176 aa, Homo sapiens
MAGLTAAAPRPGVLLLLLSILHPSRPGGVPGAIPGGVPGGVFYPGAGLGALGGGALGPGGKPLKPVPGGLAGAGLGAGLGAFPAVTFPGALVPGGVADAAAAYKAAKAGAGLGGVPGVGGLGVSAGAVVPQPGAGVKPGKVPGVGGAFAGIPGVGPFGGPQPGVPLGYPIKAPKLP

SEQ ID NO: 72930 - protein, 89 aa, Homo sapiens
MVFSNNDEGLINKKLPKELLLRMLFSLLLNFTWSNPECTKYVHSIGLDSFCNVNIFLLGYSNFVPMCTDFQGLEHLSPGWKQLAKNRSF

SEQ ID NO: 72931 - protein, 200 aa, Homo sapiens
LPNWETMWCSRKVRDLWWQGIPPSVRGKVWSLAIGNELNITHELFDICLARAKERWRSLSTGGSEVENEDAGFSAADREASLELIKLDISRTFPNLCIFQQVLIFVDFRVGLQKSFQKRKERESTKLQQLWSWCLGGPYHDMLHSILGAYTCYRPDVGYVQGMSFIAAVLILNLDTADAFIAFSNLLNKPCQMAFFRVDH

SEQ ID NO: 72932 - protein, 221 aa, Homo sapiens
MPSLRTRREEAEMELSVPGPSPWTPAAQARVRDAPAVTHPGSAACGTPCCSDTELEAICPHYQQPDCDTRTEDKEFLHKEDIHEDLESQAEISENYAGDVSQVPELGDLCDDVSERDWGVPEGRRLPQSLSQEGDFTPAAMGLLRGPLGEKDLDCNGFDSRFSLSPNLMACQEIPTEERPHPYDMGGQSFQHSVDLTGHEGVPTAESPLICNECGKTFQGN

SEQ ID NO: 72933 - protein, 721 aa, Homo sapiens
LAAPGLEVALTDLQSSRNNVRHHTEEITVDHLLVRRGQAFNLTLYFRNRSFQPGLDNIIFVVETGPLPDLALGTRAVFSLARHHSPSPWIAWLETNGATSTEVSLCAPPTAAVGRYLLKIHIDSFQGSVTAYQLGEFILLFNPWCPEDAVYLDSEPQRQEYVMNDYGFIYQGSKNWIRPCPWNYGQFEDKIIDICLKLLDKSLHFQTDPATDCALRGSPVYVSRVVCAMINSNDDNGVLNGNWSENYTDGANPAEWTGSVAILKQWNATGCQPVRYGQCWVFAAVMCTVMRCLGIPTRVITNFDSGHDTDGNLIIDEYYDNTGRILGNKKKDTIWNFHVWNECWMARKDLPPAYGGWQVLDATPQEMSNGVYCCGPASVRAIKEGEVDLNYDTPFVFSMVNADCMSWLVQGGKEQKLHQDTSSVGNFISTKSIQSDERDDITENYKYEEGSLQERQVFLKALQKLKARSFHGSQRGAELQPSRPTSLSQDSPRSLHTPSLRPSDVVQVSLKFKLLDPPNMGQDICFVLLALNMSSQFKDLKVNLSAQSLLHDGSPLSPFWQDTAFITLSPKEAKTYPCKISYSQYSQYLSTDKLIRISALGEEKSSPEKILVNKIITLSYPSITINVLGAAVVNQPLSIQVIFSNPLSEQVEDCVLTVEGSGLFKKQQKVFLGVLKPQHQASIILETVPFKSGQRQIQANMRSNKFKDIKGYRNVYVDFAL

SEQ ID NO: 72934 - protein, 257 aa, Homo sapiens
ALESTKASELDLEKGLEMRKWVLSGILASEETYLSHLEALLLPMKPLKAAATTSQPVLTSQQIETIFFKVPELYEIHKEFYDGLFPRVQQWSHQQRVGDLFQKLNLRARSNKDAKDPTTKNSLETLLYKPVDRVTRSTLVLHDLLKHTPASHPDHPLLQDALRISQNFLSSINEEITPRRQSMTVKKGEHRQLLKDSFMVELVEGARKLRHVFLFTDLLLCTKLKKQSGGKTQQYDCKWYIPLTDLSFQMVDELEAV

SEQ ID NO: 72935 - protein, 130 aa, Homo sapiens
MSNVSGILETAGVPLVSANWPQPSPPPAVPAGPQMDHMGNSSQGAPWLFLTSALARGVSGIFVWTALVLTCHQIYLHLRSYTVPQEQRYIIRLLLIVPIYAFDSWLSLLLLGDHQYYVYFDSVRDCYEAS

SEQ ID NO: 72936 - protein, 970 aa, Homo sapiens
IRKRHCFGTEVHNLDAKVDSGKTVKLNSPLEKINSFSPQKPPGHCSRCCCSTKQGNSQESSNTIKKDHTGKSKIPKIYFGTRTHKQIAQITRELRRTAYSGVPMTILSSRDHTCVHPEVVGNFNRNEKCMELLDGKNGKSCYFYHGVHKISDQHTLQTFQGMCKAWDIEELVSLGKKLKACPYYTARELIQDADIIFCPYNYLLDAQIRESMDLNLKEQVVILDEAHNIEDCARESASYSVTEVQLRFARDELDSMVNNNIRKKDHEPLRAVCCSLINWLEANAEYLVERDYESACKIWSGNEMLLTLHKMGITTATFPILQGHFSAVLQKEEKISPIYGKEEAREVPVISASTQIMLKGLFMVLDYLFRQNSRFADDYKIAIQQTYSWTNQIDISDKNGLLVLPKNKKRSRQKTAVHVLNFWCLNPAVAFSDINGKVQTIVLTSGTLSPMKSFSSELGVTFTIQLEANHIIKNSQVWVGTIGSGPKGRNLCATFQNTETFEFQDEVGALLLSVCQTVSQGILCFLPSYKLLEKLKERWLSTGLWHNLELVKTVIVEPQGGEKTNFDELLQVYYDAIKYKGEKDGALLVAVCRGKVSEGLDFSDDNARAVITIGIPFPNVKDLQVELKRQYNDHHSKLRGLLPGRQWYEIQAYRALNQALGRCIRHRNDWGALILVDDRFRNNPSRYISDDPVFLEEAGKAEKIVISRSTSPTFNKQTKRVSWSSFNSLGQYFTGKIPKATPELGSSENSASSPPRFKTEKMESKTVLPFTDKCESSNLTVNTSFGSCPQSETIISSLKIDATLTRKNHSEHPLCSEEALDPDIELSLVSEEDKQSTSNRDFETEAEDESIYFTPELYDPEDTDEEKNDLAETDRGNRLANNSDCILAKDLFEIRTIKEVDSAREVKAEDCIDTKLNGILHIEESKIDDIDGNVKTTWINELELGKTHEIEIKNFKPSPSKNKGMFPGFK

SEQ ID NO: 72937 - protein, 309 aa, Homo sapiens
MKRLVCVLLVCSSAVAQLHKDPTLDHHWHLWKKTYGKQYKEKNEEAVRRLIWEKNLKFVMLHNLEHSMGMHSYDLGMNHLGDMTSEEVMSLMSSLRVPSQWQRNITYKSNPNRILPDSVDWREKGCVTEVKYQGSCGACWAFSAVGALEAQLKLKTGKLVSLSAQNLVDCSTEKYGNKGCNGGFMTTAFQYIIDNKGIDSDASYPYKAMDQKCQYDSKYRAATCSKYTELPYGREDVLKEAVANKGPVSVGVDARHPSFFLYRSAGATTLVKKDIFGWQEIKEIIVGLLAFPLTQKSRGSLLFITNQEI

SEQ ID NO: 72938 - protein, 854 aa, Homo sapiens
MKKMSRNVLLQMEEEEDDDDGDIVLENLGQTIVPDLGSLESQHDFRTPEFEEFNGKPDSLFFNDGQRRIDFVLVYEDESRKETNKKGTNEKQRRKRQAYESNLICHGLQLEATRSVLDDKLVFVKVHAPWEVLCTYAEIMHIKLPLKPNDLKNRSSAFGTLNWFTKVLSVDESIIKPEQEFFTAPFEKNRMNDFYIVDRDAFFNPATRSRIVYFILSRVKYQVINNVSKFGINRLVNSGIYKAAFPLHDCKFRRQSEDPSCPNERYLLYREWAHPRSIYKKQPLDLIRKYYGEKIGIYFAWLGYYTQMLLLAAVVGVACFLYGYLNQDNCTWSKEVCHPDIGGKIIMCPQCDRLCPFWKLNITCESSKKLCIFDSFGTLVFAVFMGVWVTLFLEFWKRRQAELEYEWDTVELQQEEQARPEYEARCTHVVINEITQEEERIPFTAWGKCIRITLCASAVFFWILLIIASVIGIIVYRLSVFIVFSAKLPKNINGTDPIQKYLTPQTATSITASIISFIIIMILNTIYEKVAIMITNFELPRTQTDYENSLTMKMFLFQFVNYYSSCFYIAFFKGKFVGYPGDPVYWLGKYRNEECDPGGCLLELTTQLTIIMGGKAIWNNIQEVLLPWIMNLIGRFHRVSGSEKITPRWEQDYHLQPMGKLGLFYEYLEMIIQFGFVTLFVASFPLAPLLALVNNILEIRVDAWKLTTQFRRLVPEKAQDIGAWQPIMQGIAILAVVTNAMIIAFTSDMIPRLVYYWSFSVPPYGDHTSYTMEGYINNTLSIFKVADFKNKSKGNPYSDLGNHTTCRYRDFRYPPGHPQEYKHNIYYWHVIAAKLAFIIVMEPRRECHCSSLHS

SEQ ID NO: 72939 - protein, 71 aa, Homo sapiens
MASRIGLRMQLMREQAQQEEQRERMQQQAVMHYMQQQQQQQQQQLGGPPTPAINTPVHFQSPPPVPGEVLK

SEQ ID NO: 72940 - protein, 1000 aa, Homo sapiens
MADKVRRQRPRRRVCWALVAVLLADLLALSDTLAVMSVDLGSESMKVAIVKPGVPMEIVLNKESRRKTPVIVTLKENERFFGDSAASMAIKNPKATLRYFQHLLGKQADNPHVALYQARFPEHELTFDPQRQTVHFQISSQLQFSPEEVLGMVLNYSRSLAEDFAEQPIKDAVITVPVFFNQAERRAVLQAARMAGLKVLQLINDNTATALSYGVFRRKDINTTAQNIMFYDMGSGSTVCTIVTYQMVKTKEAGMQPQLQIRGVGFDRTLGGLEMELRLRERLAGLFNEQRKGQRAKDVRENPRAMAKLLREANRLKTVLSANADHMAQIEGLMDDVDFKAKVTRVEFEELCADLFERVPGPVQQALQSAEMSLDEIEQVILVGGATRVPRVQEVLLKAVGKEELGKNINADEAAAMGAVYQAAALSKAFKVKPFVVRDAVVYPILVEFTREVEEEPGIHSLKHNKRVLFSRMGPYPQRKVITFNRYSHDFNFHINYGDLGFLGPEDLRVFGSQNLTTVKLKGVGDSFKKYPDYESKGIKAHFNLDESGVLSLDRVESVFETLVEDSAEEESTLTKLGNTISSLFGGGTTPDAKENGTDTVQEEEESPAEGSKDEPGEQVELKEEAEAPVEDGSQPPPPEPKGDATPEGEKATEKENGDKSEAQKPSEKAEAGPEGVAPAPEGEKKQKPARKRRMVEEIGVELVVLDLPDLPEDKLAQSVQKLQDLTLRDLEKQEREKAANSLEAFIFETQDKLYQPEYQEVSTEEQREEISGKLSAASTWLEDEGVGATTVMLKEKLAELRKLCQGLFFRVEERKKWPERLSALDNLLNHSSMFLKGARLIPEMDQIFTEVEMTTLEKVINETWAWKNATLAEQAKLPATEKPVLLSKDIEAKMMALDREVQYLLNKAKFTKPRPRPKDKNGTRAEPPLNASASDQGEKVIPPAGQTEDAEPISEPEKVETAGSEPGDTEPLELGGPGAEPEQKEQSTGQKRPLKNDEL

SEQ ID NO: 72941 - protein, 49 aa, Homo sapiens
MTDSKYFTTNKKGEIFELKAELNNEKKEKRKEAVKKVIAAMTVGKDVST

SEQ ID NO: 72942 - protein, 89 aa, Homo sapiens
MTLKASEGESGGSMHTALSDLYLEHLLQKRSRPELPLSNCLCPLNPAADVSSEGAFRAAGIATPALCLIKGQRLQNKGQTWSPGLYRIH

SEQ ID NO: 72943 - protein, 178 aa, Homo sapiens
MGGQVSASNSFSRLHCRNANEDWMSALCPRLWDVPLHHLSIPGSHDTMTYCLNKKSPISHEESRLLQLLNKALPCITRPVVLKWSVTQALDVTEQLDAGVRYLDLRIAHMLEGSEKNLHFVHMVYTTALVEDTLTEISEWLERHPREVVILACRNFEGLSEDLHEYLVACIKNIFGDM

SEQ ID NO: 72944 - protein, 183 aa, Homo sapiens
MGTPKEKNEAISKKIPEFEVENSPLSDVAKNTESSAFGGSLPAKKSDPFQKEQDHLVEEVARAVLSDSPQLSEGKEIKLEELIDSLGSNPFLTRNQIPRTPENLITEIRSSWRKAIEMEENRTKEPIQMDAEHREVLPESLPVLHNQREFSMADFLLETTVSDFGQSHLTEEKVISDCECVPQ

SEQ ID NO: 72945 - protein, 127 aa, Homo sapiens
IQEFVPALETLSKNLDMKEKSENKMEEKLLQLSSKVENFINTQKQETQLSKVKHMENKLSKKMEQMEKQIWGELETMQNEYQSGFKSIHDSLSSLQQIQKTKMDLEKYKVQKDLKKLQRKIVELQEV

SEQ ID NO: 72946 - protein, 96 aa, Homo sapiens
MAASSRAQVLSLYRAMLRESKRFSAYNYRTYAVRRIRDAFRENKNVKDPVEIQTLVNKAKRDLGVIRRQVAEQGTAARRKSGNSSRSLGKPCTSWP

SEQ ID NO: 72947 - protein, 23 aa, Homo sapiens
MAELNTHVNVKEKIYAVRSVVPN

SEQ ID NO: 72948 - protein, 154 aa, Homo sapiens
MGVMPEIAQAVEEMDWLLPTDIQAESIPLILGGGDVLMAAETGSGKTGAFSIPVIQIVYETLKDQQEGKKGKTTIKTGASVLNKWQMNPYDRGSAFAIGSDGLCCQSREVKEWHGCRATKGLMKGKHYYEVSCHDQGLCRVGWSTMQASLDLEK

SEQ ID NO: 72949 - protein, 155 aa, Homo sapiens
METESGNQEKDTGDLKDSSLLKTKRKHKKKHKERHKMGEEVIPLRVLSKSEWMDLKKEYLALQKASMASLKKTISQIKSESEMETDSGVPQNTGMKNEKTANREECRTQEKVNATGPQFVSGVIVKIISTEPLPGRKQVRDTLAAISEVLYVDLL

SEQ ID NO: 72950 - protein, 144 aa, Homo sapiens
MALSRVCWARSAVWGSAVTPGHFVTRRLQLGRSGLAWGAPRSSKLHLSPKADVKNLMSYVVTKTKAINGKYHRFLGRHFPRFYVLYTIFMKGLQMLWADAKKARRIKTNMWKHNIKFHQLPYREMEHLRQKALSRAMLLTSYLP

SEQ ID NO: 72951 - protein, 13 aa, Homo sapiens
MLPLLQLGGKDNS

SEQ ID NO: 72952 - protein, 306 aa, Homo sapiens
LIMLNRYFSKRRPMANGLAAAGSPVFLCALSPLGQLLQDRYGWRGGFLILGGLLLNCCVCAALMRPLVVTAQPGSGPPRPSRRLLDLSVFRDRGFVLYAVAASVMVLGLFVPPVFVVSYAKDLGVPDTKAAFLLTILGFIDIFARPAAGFVAGLGKVRPYSVYLFSFSMFFNGLADLAGSTAGDYGGLVVFCIFFGISYGMVGALQFEVLMAIVGTHKFSSAIGLVLLMEAVAVLVGPPSGGVLLSPRLEGSGTITAPCSLNLPNSSHPPASASRVAETTDVSHCTWPVSFSSLPPKCLSRNHPFC

SEQ ID NO: 72953 - protein, 27 aa, Homo sapiens
HESLVNDFLLRVCDRVRGLNDTVAPGT

SEQ ID NO: 72954 - protein, 167 aa, Homo sapiens
  MOD_RES (1)..(1): Any amino acid
XPSHIVRLKPSCSTDSSFTRTPVPTVSLASRELPVSSWQVTEPSSKNLWEQICKEYEAEQPPFPEGYKVKQEPVITVAPVEEMLFHGFSAEHYFPVSHFTMISRTPCPQDKSETINPKTCSPKEYLETFIFPVLLPGMASLLHQAKKEKCFEIDCSPWHLSTPCQLS

SEQ ID NO: 72955 - protein, 180 aa, Homo sapiens
MVAGESGLGKSTLVHSLFLTDLYKDRKLLSAEERISQTVEILKHTVDIEEKGVKLKLTIVDTPGFGDAVNNTECWKPITDYVDQQFEQYFRDESGLNRKNIQDNRVHCCLYFISPFGHGLRPVDVGFMKALHEKVNIVPLIAKADCLVPSEIRKLKERIREEIDKFGIHVYQFPECDSDE

SEQ ID NO: 72956 - protein, 92 aa, Homo sapiens
MLSEEEKEELKAELVQLEDEITTLRQVLSAKERHLVEIKQKLGMNLMNELKQNFSKSWHDMQTTTAYKKTHETLSHAGQKATAAFSNVGTAI

SEQ ID NO: 72957 - protein, 168 aa, Homo sapiens
  MOD_RES (1)..(1): Any amino acid
XDRWPAPVPGKTLHLPIMGVVMKVDTNISVILPTVHEVDIFRCFCPVFLHSQMLWELVLLGEPLVVMAPSPSESSETVLALVNCISPLKYFSDFRPYFTIHDSEFKEYTTRTQAPPSVILGVTNPFFAKTLQHWPHIIRIGDLKPTGEIPKQVKVKKLKNLKTLDSKP

SEQ ID NO: 72958 - protein, 509 aa, Homo sapiens
MVGALCGCWFRLGGARPLIPLGPTVVQTSMSRSQVALLGLSLLLMLLLYVGLPGPPEQTSCLWGDPNVTVLAGLTPGNSPIFYREVLPLNQAHRVEVVLLHGKAFNSHTWEQLGTLQLLSQRGYRAVALDLPGAAVAFFEETARQLGLGCQKVEVAPGYVVTVLTWPGTNPTLSSILLNSHTDVVPVFKEHWSHDPFEAFKDSEGYIYARGAQDMKCVSIQYLEAVRRLKVEGHRFPRTIHMTFVPDEEVGGHQGMELFVQRPEFHALRAGFALDEGIANPTDAFTVFYSERSPWWVRVTSTGRPGHASRFMEDTAAEKLHKVVNSILAFREKEWQRLQSNPHLKEGSVTSVNLTKLEGGVAYNVIPATMSASFDFRVAPDVDFKAFEEQLQSWCQAAGEGVTLEFAQKWMHPQVTPTDDSNPWWAAFSRVCKDMNLTLEPEIMPAATDNRYIRAVGVPALGFSPMNRTPVLLHDHDERLHEAVFLRGVDIYTRLLPALASVPALPSDS

SEQ ID NO: 72959 - protein, 93 aa, Homo sapiens
MLLIVVSVCTATGAWNWLIDPETQKVSFFTSLWNHPFFTISCITLIGLFFAGIHKRVVAPSIIAARCRTVLAEYNMSCDDTGKLILKPRPHVQ

SEQ ID NO: 72960 - protein, 108 aa, Homo sapiens
  MOD_RES (1)..(1): Any amino acid
XLVYHDFFRDPLNWSKTEEAFPGGPLGALRAMCKRTDPVPVTIALDSLSWLLLRLPCTTLCQVLHAVSHQDSCPDSVVLHPSGLQPGSPRGALCRVPALLRSSYTPGI

SEQ ID NO: 72961 - protein, 193 aa, Homo sapiens
ALIRLIEDGRGCEVIQEIKSFSQEGRTTKQEPMLFALAICSQCSDISTKQAAFKAVSEVCRIPTHLFTFIQFKKDLKESMKCGMWGRALRKAIADWYNEKGGMALALAVTKYKQRNGWSHKDLLRLSHLKPSSEVKLEKTATQKGGFTFQFCGLKPRLAIVTKYITKGWKEVHELYKEKALSVETEKLLKYLE

SEQ ID NO: 72962 - protein, 129 aa, Homo sapiens
KFTCHLCDRSFTEKWALNNHMKLHTGEKPFKCTWPTCHYSFLTASAMKDHYRTHTGEKSFLCDLCGFAGGTRHALTKHRRQHTGEKPFKCDECNFASTTQSHLTRHKRVHTGEKPYRCPWCDYSAYDWV

SEQ ID NO: 72963 - protein, 15 aa, Homo sapiens
MERPYTFKDFLLRPR

SEQ ID NO: 72964 - protein, 167 aa, Homo sapiens
MISYIVLLSILLWPLVVYHELIQRMYTRLEPLLMQLDYSMKAEANALHHKHDKRKRQGKNAPPGGDEPLAETESESEAELAGFSPVVDVKKTALALAITDSELSDEEASILESGGFSVSRATTPQLTDVSEDLDQQSLPSEPEETLSRDLGEGEEGELAPPEDLLGR

SEQ ID NO: 72965 - protein, 114 aa, Homo sapiens
MGFEEGETHLIFPKKASVEQLQKIRDLIAIERSSRLDGSNKSHKVKSSQQPAASTQLPTTPSSNPSGLNQHTRNRQGQSSDPPSASTVAADSAILEVLQSNIQHVLVYENPALQ

SEQ ID NO: 72966 - protein, 63 aa, Homo sapiens
MTPNSMTENGLTAWDKPKHCPDREHDWKLVGMSEACLHRKSHSERRSTLKNEQSSPHLIQTTW

SEQ ID NO: 72967 - protein, 103 aa, Homo sapiens
MSRSPLNPSQLRSVGSQDALAPLPPPAPQNPSTHSWDPLCGSLPWGLSCLLALQHVLVMASLLCVSHLLLLCSLSPGGLSYSPSQLLASSFFSCGCLLSRLHP

SEQ ID NO: 72968 - protein, 227 aa, Homo sapiens
MDGRLRNPDQSLTEDVVAFAASVAHLYSNLTKPLLDVAVTSYTLLRAARSRGAGTAWPSAIAGLVVFLTANVLRAFSPKFGELVAEEARRKGELRYMHSRVVANSEEIAFYGGHEVELALLQRSYQDLASQINLILLERLWYVMLEQFLMKYVWSASGLLMVAVPIITATGYSESGETQGSKRIQARGLSPIPLGAELTRAQLSQPAAHFCCRGHRGPAASLDAFRG

SEQ ID NO: 72969 - protein, 212 aa, Homo sapiens
MTFLIVTVAWAAHTRLFQVVGKTDDTLALLNLACMMTITFLPYTFSLMVTFPDVPLGIFLFCVCVIAIGVVQALIVGYAFHFPHLLSPQIQRSAHRALYRRHVLGIVLQGPALCFAAAIFSLFFVPLSYLLMVTVILLPYVSKVTGWCRDRLLGHREPSAHPVEVFSFDLHEPLSKERVEAFSDGVYAIVATLLILDICEDNVPDPKDVKER

SEQ ID NO: 72970 - protein, 143 aa, Homo sapiens
MAAAFRPSNRVLLQALQILVYPGVGGSGSVSCRCPLGAKRYLLTDNVVKLKEFQQKKVAVACNLSGTKETYFRNLKKKLTQNKLILKGELITLLHLCESRDHVELAKNVIYRCFASIDRDEKPRCEVHQRYLCSCFCNLLQTE

SEQ ID NO: 72971 - protein, 14 aa, Homo sapiens
MTLAAKLEDFELTL

SEQ ID NO: 72972 - protein, 232 aa, Homo sapiens
MATAGGGSGADPGSRGLLRLLSFCVLLAGLFLDFEPDPLPLCPDVSFFPQPQPPTPQSKGTGLCRGNSVERKIYIPLNKTAPCVRLLNATHQIGCQSSISGDTGVIHVVEKEEDLQWVLTDGPNPPYMVLLESKHFTRDLMEKLKGRTSRIAGLAVSLTKPSPASGFSPSVQCPNDGFGVYSNSYGPEFAHCREIQWNSLGNGLAYEDFSFPIFLLEDENETKVIKQCYQDH

SEQ ID NO: 72973 - protein, 96 aa, Homo sapiens
MIPMRESPPTRPCSTPTSKNRETVPKARGGPSQETRTGLCHGTAQTKAFGSGQTVVLLQPHAAVRAWIWNKWKSAGAETLEVHPCEQEGSAEPASL

SEQ ID NO: 72974 - protein, 163 aa, Homo sapiens
MTPSLSLSEPTCNRDKGLDQKTSIIDFQRLLAHEEETQKRRAKESGMAFTQLTFRDVAIEFSQDEWKCLNSTQRTLYRDVMLENYRNLVSLDLSRNCVIKELAPQQEGNPGEVFHTVTLEQHEKHDIEEFCFREIKKKIHDFDCQWRDDERNCNKVTTAPKEN

SEQ ID NO: 72975 - protein, 290 aa, Homo sapiens; identical to SEQ ID NO: 43868

SEQ ID NO: 72976 - protein, 241 aa, Homo sapiens
CGECRGSSVDPRSTFVLSNLAEVVERVLTFLPAKALLRVACVCRLWRECVRRVLRTHRSVTWISAGLAEAGHLEGHCLVRVVAEELENVRILPHTVLYMADSETFISLEECRGHKRARKRTSMETALALEKLFPKQCQVLGIVTPGIVGLLDNPELRVVLVFGYNCCKVGASNYLQQVVSTFSDMNIILAGGQVDNLSSLTSEKNPLDIDASGVVGLSFSGHRIQSATVLLNEDVSDEKTA

SEQ ID NO: 72977 - protein, 112 aa, Homo sapiens
MRVSASPTKEIQVKKYKCGLIKPCPANYFAFKICSGAANVVGPTMCFEDRMIMSPVKNNVGRGLNIALVNGTTGAVLGQKAFDMYSGDVMHLVKFLKEIPGGALVLVASYDD

SEQ ID NO: 72978 - protein, 98 aa, Homo sapiens
MLREEATKKSKEKEPGMALPQMESYSAAQAGVQWHDLGSLQHSSLVLKLFSCISLPGTLDFQGCGYRVLFGGVEMPEPCTEGFIQGCDVGELQEPGVC

SEQ ID NO: 72979 - protein, 124 aa, Homo sapiens
  MOD_RES (1)..(1): Any amino acid
XVEAHLTPHPLALYLNLEEAMPIELLSKVLEVLDPDRKLEDTWAYCQDTRKGMKEPTKLLKKHSTQVYLGPSKKTSVSNAGQWLYEEKPHKMDLLHENGPRPGLHENVCKAVSDFCKWVTTFVS

SEQ ID NO: 72980 - protein, 55 aa, Homo sapiens
MALKRINKELSDLARDPPAQCSAGPVGDDMFHWQATIMGPQNSFLSWVDKQLYAG

SEQ ID NO: 72981 - protein, 289 aa, Homo sapiens
  MOD_RES (1)..(1): Any amino acid
XYSTSAKVVYGDTDSVMCRFGVSSVAEAMALGREAADWVSGHFPSPIRLEFEKVYFPYLLISKKRYAGLLFSSRPDAHDRMDCKGLEAVRRDNCPLVANLVTASLRRLLIDRDPEGAVAHAQDVISDLLCNRIDISQLVITKELTRAASDYAGKQAHVELAERSCAGMRKRDPGSAPSLGDRVPYVIISAAKGVAAYMKSEDPLFVLEHSLPIDTQYYLEQQLAKPLLRIFEPILGEGRAEAVLLRGDHTRCKTVLTGKVGGLLAFAKRRNCCIGCRTVLSHQGAVCEF

SEQ ID NO: 72982 - protein, 102 aa, Homo sapiens
TLLAARGAGPAPAWGPEAFTPDWESREVSTGTTIMAVQFDGGVVLGADSRTTTGSYIANRVTDKLTPIHDRIFCCRSGSAADTQAVADAVTYQLGFHSSQPL

SEQ ID NO: 72983 - protein, 88 aa, Homo sapiens
MGRKVTVATCALNQWALDFEGNLQRILKSIEIAKNRGARYRLGPELEICGYGCWDHYYESDTLLHSFQVLAALVESPVTQDIICDVGM

SEQ ID NO: 72984 - protein, 383 aa, Homo sapiens
MADIDNKEQSELDQDLDDVEEVEEEETGEETKLKARQLTVQMMQNPQILAALQERLDGLVETPTGYIESLPRVVKRRVNALKNLQVKCAQIEAKFYEEVHDLERKYAVLYQPLFDKRFEIINAIYEPTEEECEWKPDEEDEISEELKEKAKIEDEKKDEEKEDPKGIPEFWLTVFKNVDLLSDMVQEHDEPILKHLKDIKVKFSDAGQPMSFVLEFHFEPNEYFTNEVLTKTYRMRSEPDDSDPFSFDGPEIMGCTGCQIDWKKGKNVTLKTIKKKQKHKGRGTVRTVTKTVSNDSFFNFFAPPEVPESGDLDDDAEAILAADFEIGHFLRERIIPRSVLYFTGEAIEDDDDDYDEEGEEADEGYQLFEEVKSCSKLFQRWLQ

SEQ ID NO: 72985 - protein, 166 aa, Homo sapiens
HEAWSSSGSSPIQYLKRQTRSSPVLQHKISETLESRHHKIKTGSPGSEVVTLQQFLEESNKLTSVQIKSSSQENLLDEVMKSLSVSSDFLGKDKPVSCGLASVISTAEGTTRRTSIHDFLTKDSRLPISVDSPPAAADSNTTAASNVDKVQESRNSKSRSREQQSS

SEQ ID NO: 72986 - protein, 45 aa, Homo sapiens
MAAARLLPVPAGPQAKLTFEDVAVLLSQDEWDRLCPAQRGLYRNV

SEQ ID NO: 72987 - protein, 86 aa, Homo sapiens
MSGPVPSRARVYTDVNTHRPREYWDYESHVVEWGNQDDYQLVRKLGRGKYSEVFEAINITNNEKVVVKILKVSTRDNFRGIWNIDF

SEQ ID NO: 72988 - protein, 1244 aa, Homo sapiens
MSRRKQAKPRSLKDPNCKLEDKTEDGEALDCKKRPEDGEELEDEAVHSCDSCLQVFESLSDITEHKINQCQLTDGVDVEDDPTCSWPASSPSSKDQTSPSHGEGCDFGEEEGGPGLPYPCQFCDKSFSRLSYLKHHEQSHSDKLPFKCTYCSRLFKHKRSRDRHIKLHTGDKKYHCSECDAAFSRSDHLKIHLKTHTSNKPYKCAICRRGFLSSSSLHGHMQVHERNKDGSQSGSRMEDWKMKDTQKCSQCEEGFDFPEDLQKHIAECHPECSPNEDRAALQCVYCHELFVEETSLMNHMEQVHSGEKKNSCSICSESFHTVEELYSHMDSHQQPESCNHSNSPSLVTVGYTSVSSTTPDSNLSVDSSTMVEAAPPIPKSRGRKRAAQQTPDMTGPSSKQAKVTYSCIYCNKQLFSSLAVLQIHLKTMHLDKPEQAHICQYCLEVLPSLYNLNEHLKQVHEAQDPGLIVSAMPAIVYQCNFCSEVVNDLNTLQEHIRCSHGFANPAAKDSNAFFCPHCYMGFLTDSSLEEHIRQVHCDLSGSRFGSPVLGTPKEPVVEVYSCSYCTNSPIFNSVLKLNKHIKENHKNIPLALNYIHNGKKSRALSPLSPVAIEQTSLKMMQAVGGAPARPTGEYICNQCGAKYTSLDSFQTHLKTHLDTVLPKLTCPQCNKEFPNQESLLKHVTIHFMITSTYYICESCDKQFTSVDDLQKHLLDMHTFVFFRCTLCQEVFDSKVSIQLHLAVKHSNEKKVYRCTSCNWDFRNETDLQLHVKHNHLENQGKVHKCIFCGESFGTEVELQCHITTHSKKYNCKFCSKAFHAIILLEKHLREKHCVFETKTPNCGTNGASEQVQKEEVELQTLLTNSQESHNSHDGSEEDVDTSEPMYGCDICGAAYTMETLLQNHQLRDHNIRPGESAIVKKKAELIKGNYKCNVCSRTFFSENGLREHMQTHLGPVKHYMCPICGERFPSLLTLTEHKVTHSKSLDTGNCRICKMPLQSEEEFLEHCQMHPDLRNSLTGFRCVVCMQTVTSTLELKIHGTFHMQKTGNGSAVQTTGRGQHVQKLYKCASCLKEFRSKQDLVKLDINGLPYGLCAGCVNLSKSASPGINVPPGTNRPGLGQNENLSAIEGKGKVGGLKTRCSSCNVKFESESELQNHIQTIHRELVPDSNSTQLKTPQVSPMPRISPSQSDEDIVFSMTEETSAHANTTEIWNLSIASPRRPINASSVRWFSTMNGIFRFMLQIT

SEQ ID NO: 72989 - protein, 436 aa, Homo sapiens
MLYAKPPPTINGIKGLQRKERLKPAHIHLQQLTCFSITCSSTMSYSCCLPSLGCRTSCSSRPCVPPSCHGYTLPGACNIPANVSNCNWFCEGSFNGSEKETMQFLNDRLASYLEKVRQLERDNAELEKLIQERSQQQEPLLCPSYQSYFKTIEELQQKILCAKAENARLVVNIDNAKLASDDFRSKYQTEQSLRLLVESDINSIRRILDELTLCKSDLESQVESLREELICLKKNHEEEVNTLRSQLGDRLNVEVDTAPTVDLNQVLNETRSQYEALVETNRREVEQWFATQTEELNKQVVSSSEQLQSCQAEIIELRRTVNALEIELQAQHNLRDSLENTLTESEARYSSQLSQVQSLITNVESQLAEIRCDLERQNQEYQVLLDVRARLECEINTYRSLLESEDCKLPCNPCATTNASGNSCGPCGTSQKGCCN

SEQ ID NO: 72990 - protein, 314 aa, Homo sapiens
MWRQEEELREQEKKIRKQEEKMWRQEERLREQEGKMREQEEKMRRQEKRLREQEKELREQEKELREQKKLREQEEQMQEQEEKMWEQEEKMREQEEKMWRQEERLWEQEKQMREQEQKMRDQEERMWEQDERLREKEERMREQEKMWEQVEKMREEKKMQEQEKKTRDQEEKMQEEERIREREKKMREEEETMREQEEKMQKQEENMWEQEEKEWQQQRLPEQKEKLWEQEKMQEQEEKIWEQEEKIRDQEEMWGQEKKMWRQEKMREQEDVGAGGDAREGGEDTRSEREDAGEAARARGAVLRALPPSLQSSL

SEQ ID NO: 72991 - protein, 112 aa, Homo sapiens
MGSSGLGKAATLDELLCTCIEMFDDNGELDNSYLPRIVLLMHRWYLSSTELAEKLLCMYRNATGESCNEFRLKICYFMRYWILKFPAEFNLDLGLIRMTEEFREVASQLGYE

SEQ ID NO: 72992 - protein, 438 aa, Homo sapiens
MSLTVVSMACVGFFLLQGAWPLMGGQDKPFLSARPSTVVPRGGHVALQCHYRRGFNNFMLYKEDRSHVPIFHGRIFQESFIMGPVTPAHAGTYRCRGSRPHSLTGWSAPSNPLVIMVTGNHRKPSLLAHPGPLLKSGETVILQCWSDVMFEHFFLHREGISEDPSHLVGQIHDGVSKANFSIGPLMPVLAGTYRCYGSVPHSPYQLSAPSDPLDIVITGLYEKPSLSAQPGPTVQAGENVTLSCSSWSSYDIYHLSREGEAHERRLRAVPKVNRTFQADFPLGPATHGGTYRCFGSFRALPCVWSNSSDPLLVSVTGICRHLHVLIGTSVVIFLFILLLFFLLYRWCSNKKNAAVMDQEPAGDRTVNRQDSDEQDPQEVTYAQLDHCVFIQRKISRPSQRPKTPLTDTSVYTELPNAEPRSKVVSCPRAPQSGLEGVF

SEQ ID NO: 72993 - protein, 651 aa, Homo sapiens
MIATVDLKVNEYEKNQKWLEILNKIENKTYTKLKNGHVFRKQALMSEERTLLYDGLVYWKTATGRFKDILALLLTDVLLFLQEKDQKYIFAAVDQKPSVISLQKLIAREVANEERGMFLISASSAGPEMYEIHTNSKEERNNWMRRIQQAVESCPEEKGGRTSESDEDKRKAEARVAKIQQCQEILTNQDQQICAYLEEKLHIYAELGELSGFEDVHLEPHLLIKPDPGEPPQAASLLAAALKEALVTGGREGRGCSDVDPGIQGVVTDLAVSDAGEKVECRNFPGSSQSEIIQAIQNLTRLLYSLQAALTIQDSHIEIHRLVLQQQEGLSLGHSILRGGPLQDQKSRDADRQHEELANVHQLQHQLQQEQRRWLRRCEQQQRAQATRESWLQERERECQSQEELLLRSRGELDLQLQEYQHSLERLREGQRLVEREQARMRAQQSLLGHWKHGRQRSLPAVLLPGGPEVMELNRSESLCHENSFFINEALVQMSFNTFNKLNPSVIHQDATYPTTQSHSDLVRTSEHQVDLKVDPSQPSNVSHKLWTAAGSGHQILPFHESSKDSCKNGSSMTKCSCTLTSPPGLWTGTTSTLKDLDTSHTESPTPHDSNSHRPQLQAFITEAKLNLPTRTMTRQDGETGDGAKENIVYL

SEQ ID NO: 72994 - protein, 203 aa, Homo sapiens
  MOD_RES (1)..(1): Any amino acid
XALCVAPRHVDRSDFFTSFYDKLKLQEEVKDLRAVEEAFVPVIKLCFDGIEIDILFARLALQTIPEDLDLRDDSLLKNLDIRCIRSLNGCRVTDEILHLVPNIDNFRLTLRAIKLWAKRHNIYSNILGFLGGVSWAMLVARTCQLYPNAIASTLVHKFFLVFSKWEWPNPVLLKQPEECNLNLPVWDPRVSVLFFPLPIHTVQ

SEQ ID NO: 72995 - protein, 96 aa, Homo sapiens
  MOD_RES (1)..(1): Any amino acid
XHLMGKKSTGESSSVSERGSLKQQLREYIRWEEAARNLLGLIEAKENRNHQPPQPKALGNQQPSWDSEDSSNFKDVGSKGKDSLLQVLNVKEGTPS

SEQ ID NO: 72996 - protein, 245 aa, Homo sapiens
PHVRDCIRSYTEDWAIVIRKYHKLGTGFNPNTLDKQKERQKGLPKQVFESDEAPDGNSYQDDQDDLKRRSMSIDDTPRGSWACSIFDLKNSLPDALLPNLLDRTPNEEIDRQNDDQRKSNRHKELFALHPSPDEEEPIERLSVPDIPKEHFGQRLLVKCLSLKFEIEIEPIFASLALYDVKEKKKISENFYFDLNSEQMKGLLRPHVPPAAITTLARSAIFSITYPSQDVFLVIKFSGLGFHYYA

SEQ ID NO: 72997 - protein, 32 aa, Homo sapiens
MMDLKEEKPRARELRISRGFDLASFNPHGIST

SEQ ID NO: 72998 - protein, 109 aa, Homo sapiens
MMLRVLVGAVLPAMLLAAPPPINKLALFPDKSAWCEAKNITQIVGHSGCEAKSIQNRACLGQCFSYSVPNTFPQSTESLVHCDSCMPAQSMWEIVTLECPGHEEVPRVD

SEQ ID NO: 72999 - protein, 473 aa, Homo sapiens
MWDQRLVRLALLQHLRAFYGIKVKGVRGQCDRRRHETAATEIGGKIFGVPFNALPHSAVPEYGHIPSFLVDACTSLEDHIHTEGLFRKSGSVIRLKALKNKVDHGEGCLSSAPPCDIAGLLKQFFRELPEPILPADLHEALLKAQQLGTEEKNKATLLLSCLLADHTVHVLRYFFNFLRNVSLRSSENKMDSSNLAVIFAPNLLQTSEGHEKMSSNTEKKLRLQAAVVQTLIDYASDIGRVPDFILEKIPAMLGIDGLCATPSLEGFEEGEYETPGEYKRKRRQSVGDFVSGALNKFKPNRTPSITPQEERIAQLSESPVILTPNAKRTLPVDSSHGFSSKKRKSIKHNFNFELLPSNLFNSSSTPVSGVPRRSKRIAGKKVCRVESGKAGCFSPKISHKEKVRRSLRLKFNLGKNGREVNGCSGVNRYESVGWRLANQQSLKNRIESVKTGLLFSPDVDEKLPKKGTFTYYC

SEQ ID NO: 73000 - protein, 155 aa, Homo sapiens
MGNLLKVLTCTDLEQGPNFFLDFENAQPTESEKEIYNQVNVVLKDAEGILEDLQSYRGAGHEIREAIQHPADEKLQEKAWGAVVPLVGKLKKFYEFSQRLEAALRGLLGALTSTPYSPTQHLEREQALAKQFAEILHFTLRFDELKVELSIGPDC

SEQ ID NO: 73001 - protein, 62 aa, Homo sapiens
MATLKIRNSNFYTVAVTSLSSQIQYMNTVVSTYVTTNVSLIPPRSEQLVNFTGKAEMGGPFS

SEQ ID NO: 73002 - protein, 270 aa, Homo sapiens
MGKLVALVLLGVGLSLVGEMFLAFRERVNASREVEPVEPENCHLIEELESGSEDIDILPSGLAFISSGLKYPGMPNFAPDEPGKIFLMDLNEQNPRAQALEISGGFDKELFNPHGISIFIDKDNTVYLYVVNHPHMKSTVEIFKFEEQQRSLVYLKTIKHELLKSVNDIVVLGPEQFYATRDHYFTNSLLSFFEMILDLRWTYVLFYSPREVKVVAKGFCSANGITVSADQKYVYVADVAAKNIHIMEKHDNWDLTQLKETFWQDAILIL

SEQ ID NO: 73003 - protein, 138 aa, Homo sapiens
MGDTSEDASIHRLEGTDLDCQVGGLICKSKSAASEQHVFKAPAPRPSLLGLDLLASLKRREREEKDDGEDKKKSKVSSYKDWEESKDDQKDAEEEGGDQAGQNIRKDRHYRSARVETPSHPGGVSEEFWERSRQRERE

SEQ ID NO: 73004 - protein, 101 aa, Homo sapiens
MMLPYPSALGDQYWEEILLPKNGENVETMKKLTQNHKAKGLPSNDTDCPQKKEGKAQIVVPVTFRDVTVIFTEAEWKRLSPEQRNLYKEVMLENYRNLLSL

SEQ ID NO: 73005 - protein, 50 aa, Homo sapiens
MKGEAGHMLHNEKSKQEGHIWGSMRRTAFILGSGLLSFVAFWNSVTWWIL

SEQ ID NO: 73006 - protein, 162 aa, Homo sapiens
CRCLGISLEELRTQILSPNTQDVLIFKLYQRAKHVYSEAARVLQFKKICEEAPENMVQLLGELMNQSHMSCRDMYECSCPELDQLVDICRKFGAQGSRLTGAGWGGCTVSMVPADKLPSFLANVHKAYYQRSDGSLAPEKQSLFATKPGGALEIPASSCILR

SEQ ID NO: 73007 - protein, 380 aa, Homo sapiens
IRKRHCFGTEVHNLDAKVDSGKTVKLNSPLEKINSFSPQKPPGHCSRCCCSTKQGNSQESSNTIKKDHTGKSKIPKIYFGTRTHKQIAQITRELRRTAYSGVPMTILSSRDHTCVHPEVVGNFNRNEKCMELLDGKNGKSCYFYHGVHKISDQHTLQTFQGMCKAWDIEELVSLGKKLKACPYYTARELIQDADIIFCPYNYLLDAQIRESMDLNLKEQVVILDEAHNIEDCARESASYSVTEVQLRFARDELDSMVNNNIRKKDHEPLRAVCCSLINWLEANAEYLVERDYESACKIWSGNEMLLTLHKMGITTATFPILQGHFSAVLQKEEKISPIYGKEEAREVPVISASTQIMLKGLFMVLDYLFRQNSRDEISLC

SEQ ID NO: 73008 - protein, 269 aa, Homo sapiens
  MOD_RES (1)..(1): Any amino acid
XQTIKDQLEQRTRILQANIRWQQEELHKIQEQLCLVQDSNVQMFLQQPAVSLSFSSTQRPEAQQQLQQRSAAVTQPQLGAGPQLPGQISSAQVTSQHLLRESSVISTQGPKPMRSSQLMQSSGRSGSSLVSPFSSATAALPPSLNLTTPASTSQDASQCQPSPDFSHDRQLRLLLSQPIQPMMPGSCDARQPSEVSRTGRQVKYAQSQTVFQNPDAHPANSSSAPMPVLLMGQAVLHPSFPASQPSPLQPAQARQQPPQHYLQVLGHTL

SEQ ID NO: 73009 - protein, 184 aa, Homo sapiens
MQHQFSMPTVPPPEELLDCETLIDQYLRDPNLQKRYPLALNRIAAQEVPIEIKPVNPSPLSQLQRMEPKQMFWVRARGYIGEGDMKMHCCVAAYISDYAFLGTALLPHQWQHKVHFMVSLDHSMWFHAPFRADHWMLYECESPWAGGSRGLVHGRLWRQDGVLAVTCAQEGVIRVKPQVSESKL

SEQ ID NO: 73010 - protein, 113 aa, Homo sapiens
  MOD_RES (1)..(1): Any amino acid
XSAPPGYNIAVKPDQIQYTELSNAKIAYKQNKANTAQEQQYGSHEENLPADLEALQREIRMAQERLDLAVQAYSHQNNPHGPREKKAKVGSKAGSNKSTASSKSGDGKTSVWI

SEQ ID NO: 73011 - protein, 255 aa, Homo sapiens
MGNSALRAHVETAQKTGVFQLKDRGLTEFPADLQKLTSNLRTIDLSNNKIESLPPLLIGKFTLLKSLSLNNNKLTVLPDEICNLKKLETLSLNNNHLRELPSTFGQLSALKTLSLSGNQLGALPPQLCSLRHLDVMDLSKNQIRSIPDSVGELQVIELNLNQNQISQISVKISCCPRLKILRLEENCLELSMLPQSILSDSQICLLAVEGNLFEIKKLRELEGYDKIWTLCESSELNHRISSGFRHPKSNLERLK

SEQ ID NO: 73012 - protein, 678 aa, Homo sapiens [sequence omitted]

SEQ ID NO: 73013 - protein, 74 aa, Homo sapiens
MNPESSIFIEDYLKYFQDQVSRENLLQLLTDDEAWNGFVAAAELPRDEADELRKALNKLASHMVMKDKNRHDKD

SEQ ID NO: 73014 - protein, 137 aa, Homo sapiens
  MOD_RES (1)..(1): Any amino acid
XSSGSIAIRKKQQEVVGFLEANKIDFKELDIAGDEDNRRWMRENVPGEKKPQNGIPLPPQIFNEEQYCGDFDSFFSAKEENIIYSFLGLAPPPDSKEEEGETATEETEEIAMEGAEGEAEEEEETAEGEEPGEDEDS

SEQ ID NO: 73015 - protein, 129 aa, Homo sapiens
MGHPPVSPSAPAPAGTTAIPGLIPDLVAGTPSWPLPQGPAGLSLPAPLPRASSSSPASSVLPAAAAAATGRSPGTRSPWVWAVPAAPPPPTWCNLMWMAWSPARGMLSNGGACSSPWSSTLEARRSGWA

SEQ ID NO: 73016 - protein, 108 aa, Homo sapiens
MGRLETADKQSVHIVENEIQASIDQIFSRLERLEILSSKEPPNKRQNARLRVDQLKYDVQHLQTALRNFQHRRHAREQQERQREELLSRTFTTNVSQARGEGRPALDR

SEQ ID NO: 73017 - protein, 154 aa, Homo sapiens
MEDEGKISRITARFLEQPPRTSHPVVKFSCTDCEPMVIDKLPFDKYELEPSPLTQFILERKSPQTCWQVYVSNSAKYSELGHPFGYLKASTALNCVNLFVMPYNYPVLLPLLDDLFKVHKAKPTLKWRQSFESYLKTMPPYYLGPLKKAVRMMG

SEQ ID NO: 73018 - protein, 135 aa, Homo sapiens
MSKNTVSSARFRKVDVDEYDENKFVDEEDGGDGQAGPDEGEVDSCLRQGNMTAALQAALKNPPINTKSQAVKDRAGSIVLKVLISFKANDIEKAVQSLDKNGVDLLMKYIYKGFESPSDNSSAMLLQWHEKVPLV

SEQ ID NO: 73019 - protein, 463 aa, Homo sapiens
  MOD_RES (1)..(1): Any amino acid
XKIKELRQGLDTDAESVNLDDYNIHVIASVFKQWLRDLPNPLMTFELYEEFLRAMGLQERKETIRGVYSVIDQLSRTHLNTLERLIFHLVRIALQEDTNRMSANALAIVFAPCILRCPDTTDPLQSVQDISKTTTCVELIVVEQMNKYKARLKDISSLEFAENKAKTRLSLIRRSMKPVLIAVRFMNITRNSVSGKGRIRRGNYPGPSSPVVVRLPSVSDVSEETLTSEAAMETDITEQQQAAMQQEERVLTEQIENLQKEKEELTFEMLVLEPRASDDETLESEASIGTADSSENLNMESEYAISEKSERSLALSSLKTAGKSEPSSKLRKQLKKQQDSLDVVDSSVSSLCLSNTASSHGTRKLFQIYSKSPFYRAASGNEALGMEGPLGQTKFLEDKPQFISRGTFNPEKGKQKLKNVKNSPQKTKETPEGTVMSGRRKTVDPDCTSNQQLALFGNNEFMV

SEQ ID NO: 73020 - protein, 119 aa, Homo sapiens
MVTLFNHGGASRPFSKVAVPFYIPASSVWDPSVTQVTRNVPPGLDEYNPFSDSRTPPPGGVKMPNVPNTQPAIMKPTEEHPAYTQIAKEHALAQAELLKRQEELERKAAELDRREREMQ

SEQ ID NO: 73021 - protein, 114 aa, Homo sapiens
MTTETGPDSEVKKAQEEAPQQPEAAAAVTTPVTPAGHGHPEANSNEKHPSQQDTRPAEQSLDMEEKDYSEADGLSERTTPSKAQKSPQKIAKKYKSAICRVTLLDASEYECEVE

SEQ ID NO: 73022 - protein, 221 aa, Homo sapiens
MGCCGCSGGCGSGCGGLGSGCGGCGSGCGGRGSGCGGCGSGCGGCGSGCGGCGSGCGGCGGCGSGCCVPVCCCKPMCCCVPACSCSSCGKGGCGSCGGSKRGCVSCGVSKGACGSCGGSKGGCGSCGGSKGGCGSCGGSKGGCGSYGCSQCSCCKPCCCSSGCGSSCCQSSCCKPYCCQSSCCKPCSCFSGCGSSCCQSSCYKPCCCQSSCCVPVCCQCKI

SEQ ID NO: 73023 - protein, 62 aa, Homo sapiens
MLTRKIKLWDINAHITCRLCSGYLIDATTVTECLHTFCRSCLVKYLEENNTCPTCRIVIHQS

SEQ ID NO: 73024 - protein, 230 aa, Homo sapiens
MAAPPGEYFSVGSQVSCRTCQEQRLQGEVVAFDYQSKMLALKCPSSSGKPNHADILLINLQYVSEVEIINDRTETPPPLASLNVSKLASKARTEKEEKLSQAYAISAGVSLEGQQLFQTIHKTIKDCKWQEKNIVVMEEVVITPPYQVENCKGKEGSALSHVRKIRQSLALSPTLECSGAISAHCNLRLPGSSDSPASASRVPGTTGVCHHTRLEMGFHHVGQAGLELLT

SEQ ID NO: 73025 - protein, 47 aa, Homo sapiens
  MOD_RES (1)..(1): Any amino acid
XDLSQNSNEMSMIESLSNDDTSLCEFQEMQTNGDVSSSPCLLLCLST

SEQ ID NO: 73026 - protein, 64 aa, Homo sapiens
NGTGDSNDFWRIEVVNRKFGNRIKVLRSRIRFIHLVTGCVLGSSGKVLPKCAKHQPGCATAQFS

SEQ ID NO: 73027 - protein, 277 aa, Homo sapiens
VPARGEPQQDCCVKTELLGEETPMAADEGSAEKQAGEAHMAADGETNGSCENSDASSHANAAKHTQDSARVNPQDGTNTLTRIAENGVSERDSEAAKQNHVTADDFVQTSVIGSNGYILNKPALQAQPLRTTSTLASSLPGHAAKTLPGGAGKGRTPSAFPQTPAAPPATLGEGSADTEDRKLPAPGADVKVHRARKTMPKSVVGLHAASKDPREVREARDHKEPKEEINKNISDFGRQQLLPPFPSLHQSLPQNQCYMATTKSQTGKEDPATVSAL

SEQ ID NO: 73028 - protein, 232 aa, Homo sapiens
VWVGTIGSGPKGRNLCATFQNTETFEFQDEVGALLLSVCQTVSQGILCFLPSYKLLEKLKERWLSTGLWHNLELVKTVIVEPQGGEKTNFDELLQVYYDAIKYKGEKDGALLVAVCRGKVSEGLDFSDDNARAVITIGIPFPNVKDLQVELKRQYNDHHSKLRGLLPGRQWYEIQAYRALNQALGRCIRHRNDWGALILVDDRFRNNPSRYISETGLTLLPRLECSDVIIVH

SEQ ID NO: 73029 - protein, 540 aa, Homo sapiens
MDGYVIGPARRIVTEVAVGVKRGSDELLSGSVLSSPNSNMSSMVVTANGNDSKKFKGEDKMDGAPSRVLHIRKLPGEVTETEVIALGLPFGKVTNILMLKGKNQAFLELATEEAAITMVNYYSAVTPHLRNQPIYIQYSNHKELKTDNTLNQRAQAVLQAVTAVQTANTPLSGTTVSESAVTPAQSPVLRIIIDNMYYPVTLDVLHQIFSKFGAVLKIITFTKNNQFQALLQYGDPVNAQQAKLALDGQNIYNACCTLRIDFSKLVNLNVKYNNDKSRDYTRPDLPSGDGQPALDPAIAAAFAKETSLLAVPGALSPLAIPNAAAAAAAAAAGRVGMPGVSAGGNTVLLVSNLNEEMVTPQSLFTLFGVYGDVQRVKILYNKKDSALIQMADGNQSQLAMNHLNGQKMYGKIIRVTLSKHQTVQLPREGLDDQGLTKDFGNSPLHRFKKPGSKNFQNIFPPSATLHLSNIPPSVAEEDLRTLFANTGGTVKAFKFFQRDHKMALLQMATVEEAIQALIDLHNYNLGENHHLRVSFSKSTI

SEQ ID NO: 73030 - protein, 183 aa, Homo sapiens
MRYKSSDRPAHKVSMLLLCHALAIAVVQIVIFSESWAFAKNINFYNVRPPLDPTPFPNSFKCFTCENAGDNYNCNRWAEDKWCPQNTQYCLTVHHFTSHGRSTSITKKCASRSECHFVGCHHSRDSEHTECRSCCEGMICNVELPTNHTNAVFAVMHAQRTSGSSAPTLYLPVLAWVFVLPLL

SEQ ID NO: 73031 - protein, 920 aa, Homo sapiens
MASTRCKLARYLEDLEDVDLKKFKMHLEDYPPQKGCIPLPRGQTEKADHVDLATLMIDFNGEEKAWAMAVWIFAAINRRDLYEKAKRDEPKWGSDNARVSNPTVICQEDSIEEEWMGLLEYLSRISICKMKKDYRKKYRKYVRSRFQCIEDRNARLGESVSLNKRYTRLRLIKEHRSQQEREQELLAIGKTKTCESPVSPIKMELLFDPDDEHSEPVHTVVFQGAAGIGKTILARKMMLDWASGTLYQDRFDYLFYIHCREVSLVTQRSLGDLIMSCCPDPNPPIHKIVRKPSRILFLMDGFDELQGAFDEHIGPLCTDWQKAERGDILLSSLIRKKLLPEASLLITTRPVALEKLQHLLDHPRHVEILGFSEAKRKEYFFKYFSDEAQARAAFSLIQENEVLFTMCFIPLVCWIVCTGLKQQMESGKSLAQTSKTTTAVYVFFLSSLLQPRGGSQEHGLCAHLWGLCSLAADGIWNQKILFEESDLRNHGLQKADVSAFLRMNLFQKEVDCEKFYSFIHMTFQEFFAAMYYLLEEEKEGRTNVPGSRLKLPSRDVTVLLENYGKFEKGYLIFVVRFLFGLVNQERTSYLEKKLSCKISQQIRLELLKWIEVKAKAKKLQIQPSQLELFYCLYEMQEEDFVQRAMDYFPKIEINLSTRMDHMVSSFCIENCHRVESLSLGFLHNMPKEEEEEEKEGRHLDMVQCVLPSSSHAACSHGLGRCGLSHECCFDISLVLSSNQKLVELDLSDNALGDFGIRLLCVGLKHLLCNLKKLWLVNSGLTSVCCSALSSVLSTNQNLTHLYLRGNTLGDKGIKLLCEGLLHPDCKLQVLELDNCNLTSHCCWDLSTLLTSSQSLRKLSLGNNDLGDLGVMMFCEVLKQQSCLLQNLGLSEMYFNYETKSALETLQEEKPELTVVFEPSW

SEQ ID NO: 73032 - protein, 547 aa, Homo sapiens
MQFPSPPAARSSPAPQAASSSEAAAPATGQPGPSCPVPGTSRRGRPGTPPAGRVEEEEEEEEEDVDKDPHPTQNTCLRCRHFSLRERKREPRRTMGGCEVREFLLQFGFFLPLLTAWPGDCSHVSNNQVVLLDTTTVLGELGWKTYPLNGWDAITEMDEHNRPIHTYQVCNVMEPNQNNWLRTNWISRDAAQKIYVEMKFTLRDCNSIPWVLGTCKETFNLFYMESDESHGIKFKPNQYTKIDTIAADESFTQMDLGDRILKLNTEIREVGPIERKGFYLAFQDIGACIALVSVRVFYKKCPFTVRNLAMFPDTIPRVDSSSLVEVRGSCVKSAEERDTPKLYCGADGDWLVPLGRCICSTGYEEIEGSCHACRPGFYKAFAGNTKCSKCPPHSLTYMEATSVCQCEKGYFRAEKDPPSMACTRPPSAPRNVVFNINETALILEWSPPSDTGGRKDLTYSVICKKCGLDTSQCEDCGGGLRFIPRHTGLINNSVIVLDFVSHVNYTFEIEAMNGVSELSFSPKPFTAITVTTDQDGKFHCCSLKTDP

SEQ ID NO: 73033 - protein, 138 aa, Homo sapiens
  MOD_RES (1)..(1): Any amino acid
XRFTEYETQVKVMSQRHMIDGRWCDCKLPNSKQSQDEPLRSRKVFVGRCTEDMTEDELREFFSQYGDVMDVFIPKPFRAFAFVTFADDQIAQSLCGEDLIIKGISVHISNAEPKHNSNRQLERSGRFGGNPVQYEAFI

SEQ ID NO: 73034 - protein, 256 aa, Homo sapiens
MAAPVPWACCAVLAAAAAVVYAQRHSPQEAPHVQYERLGSDVTLPCGTANWDAAVTWRVNGTDLAPDLLNGSQLVLHGLELGHSGLYACFHRDSWHLRHQVLLHVGLPPREPVLSCRSNTYPKGFYCSWHLPTPTYIPNTFNVTVLHGSKIMVCEKDPALKNRCHIRYMHLFSTIKYKVSISVSNALGHNATAITFDEFTIVKPDPPENVVARPVPSNPRRLEVTWQTPSTWPDPESFPLKFFLRYRPLILDQWQH

SEQ ID NO: 73035 - protein, 155 aa, Homo sapiens
MSEGESQTVLSSGSDPKVESSSSAPGLTSVSPPVTSTTSAASPEEEEESEDESEILEESPCGRWQKRREEVNQRNVPGIDSAYLAMDTEEGVEVVWNEVQFSERKNYKLQEEKVRAVFDNLIQLEHLNIVKFHKYWADIKENKARVIFITEYMSS

SEQ ID NO: 73036 - protein, 194 aa, Homo sapiens
MSAFDTNPFADPVDVNPFQTNAATTVPVTQLPGSSQPAVLQPSVEPTQPTPQAVVSAAQAGLLRQQEELDRKAAELERKERELQNTVANLHVRQNNWPPLPSWCPVKPCFYQDFSTEIPADYQRICKMLYYLWMLHSVTLFLNLLACLAWFSGNSSKGVDFGLSILWFLIFTPCAFLCWYRPIYKAFRSDNSFS

SEQ ID NO: 73037 - protein, 336 aa, Homo sapiens
  MOD_RES (1)..(1): Any amino acid
XAILEHEEQDEEEDEVPDDETVNQMIARHEEEFDLFMRMDLDRRREEARNPKRKPRLMEEDELPSWIIKDDAEVERLTCEEEEEKMFGRGSRHRKEVDYSDSLTEKQWLKTLKAIEEGTLEEIEEEVRQKKSSRKRKRDSDAGSSTPTTSTRSRDKDDESKKQKKRGRPPAEKLSPNPPNLTKKMKKIVDAVIKYKDSSSGRQLSEVFIQLPSRKELPEYYELIRKPVDFKKIKIYEDSIVLQSVFTSVRQKIEKEDDSEGEESEEEEEGEEEGSESESRSVKVKIKLGRKEKAQDRLKGGRRRPSRGSRAKPVVSDDDSEEEQEEDRSGSGSEED

SEQ ID NO: 73038 - protein, 874 aa, Homo sapiens
MRGSGPRGAGRRRPPSGGGDTPITPASLAGCYSAPRRAPLWTCLLLCAALRTLLASPSNEVNLLDSRTVMGDLGWIAFPKNGWEEIGEVDENYAPIHTYQVCKVMEQNQNNWLLTSWISNEGASRIFIELKFTLRDCNSLPGGLGTCKETFNMYYFESDDQNGRNIKENQYIKIDTIAADESFTELDLGDRVMKLNTEVRDVGPLSKKGFYLAFQDVGACIALVSVRVYYKKCPSVVRHLAVFPDTITGADSSQLLEVSGSCVNHSVTDEPPKMHCSAEGEWLVPIGKCMCKAGYEEKNGTCQAPSPVTNVKKGKIAKNSISLSWQEPDRPNGIILEYEIKYFEKDQETSYTIIKSKETTITAEGLKPASVYVFQIRARTAAGYGVFSRRFEFETTPVSVAASSDQSQIPVIAVSVTVGVILLAVVIGVLLSGSCCECGCGRASSLCAVAHPSLIWRCGYSKAKQDPEEEKMHFHNGHIKLPGVRTYIDPHTYEDPNQAVHEFAKEIEASCITIERVIGAGEFGEVCSGRLKLPGKRELPVAIKTLKVGYTEKQRRDFLGEASIMGQFDHPNIIHLEGVVTKSKPVMIVTEYMENGSLDTFLKKNDGQFTVIQLVGMLRGISAGMKYLSDMGYVHRDLAARNILINSNLVCKVSDFGLSRVLEDDPEAAYTTRGGKIPIRWTAPEAIAFRKFTSASDVWSYGIVMWEVVSYGERPYWEMTNQDVIKAVEEGYRLPSPMDCPAALYQLMLDCWQKERNSRPKFDEIVNMLDKLIRNPSSLKTLVNASCRVSNLLAEHSPLGSGAYRSVGEWLEAIKMGRYTEIFMENGYSSMDAVAQVTLEDLRRLGVTLVGHQKKIMNSLQEMKVQLVNGMVPL

SEQ ID NO: 73039 - protein, 713 aa, Homo sapiens
MGSPLRFDGRVVLVTGAGAGLGRAYALAFAERGALVVVNDLGGDFKGVGKGSLAADKVVEEIRRRGGKAVANYDSVEEGEKVVKTALDAFGRIDVVVNNAGILRDRSFARISDEDWDIIHRVHLRGSFQVTRAAWEHMKKQKYGRIIMTSSASGIYGNFGQANYSAAKLGLLGLANSLAIEGRKSNIHCNTIAPNAGSRMTQTVMPEDLVEALKPEYVAPLVLWLCHESCEENGGLFEVGAGWIGKLRWERTLGAIVRQKNHPMTPEAVKANWKKICDFENASKPQSIQESTGSIIEVLSKIDSEGGVSANHTSRATSTATSGFAGAIGQKLPPFSYAYTELEAIMYALGVGASIKDPKDLKFIYEGSSDFSCLPTFGVIIGQKSMMGGGLAEIPGLSINFAKVLHGEQYLELYKPLPRAGKLKCEAVVADVLDKGSGVVIIMDGFGGKRTSDKVKVAVAIPNRPPDAVLTDTTSLNQAALYRLSGDWNPLHIDPNFASLAGFDKPILHGLCTFGFSARRVLQQFADNDVSRFKAIKARFAKPVYPGQTLQTEMWKEGNRIHFQTKVQETGDIVISNAYVDLAPTSGTSAKTPSEGGKLQSTFVFEEIGRRLKDIGPEVVKKVNAVFEWHITKGGNIGAKWTIDLKSGSGKVYQGPAKGAADTTIILSDEDFMEVVLGKLDPQKAFFSGRLKARGNIMLSQKLQMILKDYAKL

SEQ ID NO: 73040 - protein, 196 aa, Homo sapiens
  MOD_RES (1)..(1): Any amino acid
XGSWFPSAPGLSTTVLLNNNQIKRIPSGAFEDLENLKYLYLYKNEIQSIDRQAFKGLASLEQLYLHFNQIETLDPDSFQHLPKLERLFLHNNRITHLVPGTFNHLESMKRLRLDSNTLHCDCEILWLADLLKTYAESGNAQAAAICEYPRRIQGRSVATITPEELNCERPRITSEPQDADVTSGNTVYFTCRAEGN

SEQ ID NO: 73041 - protein, 291 aa, Homo sapiens
MDENSLEFDMVGIDAAIANAFRRILLAEVPTMAVEKVLVYNNTSIVQDEILAHRLGLIPIHADPRLFEYRNQGDEEGTEIDTLQFRLQVRCTRNPHAAKDSSDPNELYVNHKVYTRHMTWIPLGNQADLFPEGTIRPVHDDILIAQLRPGQEIDLLMHCVKGIGKDHAKFSPVATASYRLLPDITLLEPVEGEAAEELSRCFSPGVIEVQEVQGKKVARVANPRLDTFSREIFRNEKLKKVVRLARVRDHYIFSVESTGVLPPDVLVSEAIKVLMGKCRRFLDELDAVQMD

SEQ ID NO: 73042 - protein, 96 aa, Homo sapiens
MRDRWDYVDSIDVPDSYNGPRLQFPLTCTDIDLLLEAFKEQQILHAHYVLEVLFETKKVLKQMPNFTHIQTSPSKEVTICGDLHGKLDDLFLIFYK

SEQ ID NO: 73043 - protein, 212 aa, Homo sapiens
  MOD_RES (1)..(1): Any amino acid
XCRNWRAAVDLCGRLLTAHGQGYGKSGLLTSHTTDSLQLWFVRLALLVKLGLFQNAEMEFEPFGNLDQPDLYYEYYPHVYPGRRGSMVPFSMRILHAELQQYLGNPQESLDRLHKVKTVCSKILANLEQGLAEDGGMSSVTQEGRQASIRLWRSRLGRVMYSMANCLLLMKDYVLAVEAYHSVIKYYPEQEPQLLSGIGRISLQRVPSPRAE

SEQ ID NO: 73044 - protein, 175 aa, Homo sapiens
MCASRDDWRCARSMHEFSAKDIDGHMVNLDKYRGFVCIVTNVASQCGKTEVNYTQLVDLHARYAECGLRILAFPCNQFGKQEPGSNEEIKEFAAGYNVKFDMFSKICVNGDDAHPLWKWMKIQPKGKGILGKTAWGLWGAAGDAHVHVLLFQCHQVELHQVPHRQERLRGEALRT

SEQ ID NO: 73045 - protein, 210 aa, Homo sapiens
MVVTPRRAAVAIAGCWILSFVVGLTPMFGWNNLSAVERAWAANGSMGEPVIKCEFEKVISMEYMVYFNFFVWVLPPLLLMVLIYLEVFYLIRKQLNKKVSASSGDPQKYYGKELKIAKSLALILFLFALSWLPLHILNCITLFCPSCHKPSILTYIAIFLTHGNSAMNPIVYAFRIQKFRVTFLKIWNDHFRCQPAPPIDEDLPEERPDD

SEQ ID NO: 73046 - protein, 238 aa, Homo sapiens
  MOD_RES (1)..(1): Any amino acid
XAANCIMEVSAWSAAVGGRRLWNFVATLANGMSLQPPLEEVSCGQAESSEKPNAEDMTSKDYYFDSYAHFGIHEEMLKDEVRTLTYRNSMFHNRHLFKDKVVLDVGSGTGILCMFAAKAGARKVIGIECSSISDYAVKIVKANKLDHVVTIIKGKVEEVELPVEKVDIIISEWMGYCLFYESMLNTVLYARDKWLAPDGLIFPDRATLYVTAIEDRQYKDYKIHWWENVYGFDMSCIK

SEQ ID NO: 73047 - protein, 2223 aa, Homo sapiens
MIDLSFLTEEEQEAIMKVLQRDAALKRAEEERVRHLPEKIKDDQQLKNMSGQWFYEAKAKRHRDKIHGADIIRASMRKKRPQIAAEQSKDRENGAKESWVNNVNKDAFLPPELAGVVEEPEEDAAPASPSSSVVNPASSVIDMSQENTRKPNVSPEKQRKNPFNSSKLPEGHSSQQTKNEQSKNGRTGLFQTSKEDELSESKEKSTVADTSIQKLEKSKQTLPGLSNGSQIKAPIPKARKMIYKSTDLNKDDNQSFPRQRTDSLKARGAPRGILKRNSSSSSTDSETLRYNHNFEPKSKIVSPGLTIHERISEKEHSLEDNSSPNSLEPLKHVRFSAVKDELPQSPGLIHGREVGEFSVLESDRLKNGMEDAGDTEEFQSDPKPSQYRKPSLFHQSTSSPYVSKSETHQPMTSGSFPINGLHSHSEVLTARPQSMENSPTINEPKDKSSELTRLESVLPRSPADELSHCVEPEPSQVPGGSSRDRQQGKPPPLPALKAKTSSRSGPYATEIKKSTDDSIFKVLDWFNRSSYSDDNKSFLQHPRGIESKEKTDSKSQVAVDLVTDDTTLRENGSKTLSPSKIELKPVRSDSPFQAEGDMLVSESCQDNNVNIKSKFMNLSQKGTPKEGPGILQPFESYGTPSQGSKNMDYSQDSKSPGKGNGASPSNSNYSYSVLKESDAENQVPCNTNNIGNLGEEEPKFHAHEENRGHSEVNFDSSTVVKEPGLKDNMNAERKSKVGNTYILKASLEPENIKSTPGVANNGSPWKKPEVQFQQEAGEVPKNQVQREKYKRVSDRISFWEGEKAGAKITHEKPTSSCSQEQPSAKAYQPVKKSQGVSSMDSLSTDQSEYNQAIPKRVVLDEDDQASQLSNSYSSNKSKETKPQIAGPSRYYLSAEQSDKVSLFQNKKNEPIKRSQVADSLPSRRNITLPALQPPSNVGSERHAPLEKDRPLVRESNANFKVMSLKERMDEPNAEQVYNPSQFENLRKFWDLEANSNSKDNDKNITTTSQKNSAPFNRQKHKEFSDIKLSGKNTHEAEVLLSPKKVMAREEMEKLNSKGILQVLPDEITFPLSPLRKYTYQLPGNESSKENVEKNTEGIVTPVFKEEKDYSEQEIQESIIKTNVLSKDCKDTFNDSLQKLLSETSTPAIQPSGGKVHGKQVLEPSVSENRTWPQKTDFADTEEEVKGPEKIINEHVDKTVVHPKVKRNSLTASLDKLLKEATGTSPSPLQAKLAPVITGTNSKLEEGRFFGKGIEQSHNTSADKREILAPFPVRDETFGNTALLKKAESGECQLSTQNLIQMAAEDSHPLDPTSQLSRKGSFGDVASPPQDMLFPQDAHLVPQARVHPSQTEISETVEKVILPPRPVLNDVSAALQKLCGEVWLSYPAGREVGPGEVNPEFPEAVQPVCSPLNPPGVISPWATMDTIVPDRKDFYSSNVVPDKTHEVGSYLAAQMSPSDQTLSSFASIVAQYGKGLPQEVEEIVRETIVQPKSEFLEFSAGLEKLLKEETETFPSKYESDTGNLSPSKLIGSTEEPRRATSECHPEELKETVEKAEAPLITESAFDAGFEKLLKEITEAPPYQPQVSVREETHEKESSQSEQTRFLGTVPHFYRAASQTSEMKDKSNGLESQVNQCDKMLGGDALVTDLLVDFCGSRSGVEIPRTPQLYVAHEIGTIKTVTPPEDRDSESGVAGGQGTLQEPGFGEASEAISVSRNRQPIPLLMNKENSTKTSKVELTLASPYMKQEKEEEKEGFSESDFSDGNTSSNAESWRNPSSSEEEPSPVLKTLERSAARKMPSKSLEDISSDSSNQAKVDNQPEELVRSAEDVSTVPTQPDNPFSHPDKLKRMSKSVPAFLQDESDDRETDTASESSYQLSRHKKSPSSLTNLSSSSGMTSLSSVSGSVMSVYSGDFGNLEVKGNIQFAIEYVESLKELHVFVAQCKDLAAADVKKQRSDPYVKAYLLPDKGKMGKKKTLVVKKTLNPVYNEILRYKIEKQILKTQKLNLSIWHRDTFKRNSFLGEVELDLETWDWDNKQNKQLRWYPLKRKTAPVALEAENRGEMKLALQYVPEPVPGKKLPTTGEVHIWVKECLDLPLLRGSHLNSFVKCTILPDTSRKSRQKTRAVGKTTNPIFNHTMVYDGFRPEDLMEACVELTVWDHYKLTNQFLGGLRIGFGTGKSYGTEVDWMDSTSEEVALWEKMVNSPNTWIEATLPLRMLLIAKISK

SEQ ID NO: 73048 - protein, 495 aa, Homo sapiens
MDLPVGPGAAGPSNVPAFLTKLWTLVSDPDTDALICWSPSGNSFHVFDQGQFAKEVLPKYFKHNNMASFVRQLNMYGFRKVVHIEQGGLVKPERDDTEFQHPCFLRGQEQLLENIKRKVTSVSTLKSEDIKIRQDSVTKLLTDVQLMKGKQECMDSKLLAMKHENEALWREVASLRQKHAQQQKVVNKLIQFLISLVQSNRILGVKRKIPLMLNDSGSAHSMPKYSRQFSLEHVHGSGPYSAPSPAYSSSSLYAPDAVASSGPIISDITELAPASPMASPGGSIDERPLSSSPLVRVKEEPPSPPQSPRVEEASPGRPSSVDTLLSPTALIDSILRESEPAPASVTALTDARGHTDTEGRPPSPPPTSTPEKCLSVACLDNLARTPQMSRVARLFPCPSSSPHGQVQPGNELSDHLDAMDSNLDNLQTMLSSHGFSVDTSALLDIQELLSPQEPPRPPEAENSSPDSAGALHSAAAVPAGPRLRGHREQRPAGAV

SEQ ID NO: 73049 - protein, 333 aa, Homo sapiens
MSAPPFYRALSSVVALGANIICNKIPGLAPRQRAICQSRPDAIIVIGEGAQMGINECQYQFRFGRWNCSALGEKTVFGQELRVGSREAAFTYAITAAGVAHAVTAACSQGNLSNCGCDREKQGYYNQAEGWKWGGCSADVRYGIDFSRRFVDAREIKKNARRLMNLHNNEAGRKVLEDRMQLECKCHGVSGSCTTKTCWTTLPKFREVGHLLKEKYNAAVQVEVVRASRLRQPTFLRIKQLRSYQKPMETDLVYIEKSPNYCEEDAATGSVGTQGRLCNRTSPGADGCDTMCCGRGYNTHQYTKVWQCNCKFHWCCFVKCNTCSERTEVFTCK

SEQ ID NO: 73050 - protein, 108 aa, Homo sapiens
  MOD_RES (1)..(1): Any amino acid
XMHHCASLYAYYLVLKNGVLAYIGNFRLLAELSSPFVNQRPKAVVTGNMDLFSSLTLHLSTLSLQSPANNQFLAFEVKEYSALDELQKEFETAGLKKLFSEFVLALVK

SEQ ID NO: 73051 - protein, 1020 aa, Homo sapiens
MAELPTTETPGDATLCSGRFTISTLLSSDEPSPPAAYDSSHPSHLTHSSTFCMRTFGYNTIDVVPTYEHYANSTQPGEPRKVRPTLADLHSFLKEGRHLHALAFDSRPSHEMTDGLVEGEAGTSSEKNPEEPVRFGWVKGVMIRCMLNIWGVILYLRLPWITAQAGIVLTWIIILLSVTVTSITGLSISAISTNGKVKSGGTYFLISRSLGPELGGSIGLIFAFANAVGVAMHTVGFAETVRDLLQEYGAPIVDPINDIRIIAVVSVTVLLAISLAGMEWESKAQVLFFLVIMVSFANYLVGTLIPPSEDKASKGFFSYRADIFVQNLVPDWRGPDGTFFGMFSIFFPSATGILAGANISGDLKDPAIAIPKGTLMAIFWTTISYLAISATIGSCVVRDASGVLNDTVTPGWGACEGLACSYGWNFTECTQQHSCHYGLINYYQTMSMVSGFAPLITAGIFGATLSSALACLVSAAKVFQCLCEDQLYPLIGFFGKGYGKNKEPVRGYLLAYAIAVAFIIIAELNTIAPIISNFFLCSYALINFSCFHASITNSPGWRPSFQYYNKWAALFGAIISVVIMFLLTWWAALIAIGVVLFLLLYVIYKKPEVNWGSSVQAGSYNLALSYSVGLNEVEDHIKNYRPQCLVLTGPPNFRPALVDFVGTFTRNLSLMICGHVLIGPHKQRMPELQLIANGHTKWLNKRKIKAFYSDVIAEDLRRGVQILMQAAGLGRMKPNILVVGFKKNWQSAHPATVEDYIGILHDAFDFNYGVCVMRMREGLNVSKMMQAHINPVFDPAEDGKEASARVDPKALVKEEQATTIFQSEQGKKTIDIYWLFDDGGLTLLIPYLLGRKRRWSKCKIRVFVGGQINRMDQERKAIISLLSKFRLGFHEVHILPDINQNPRAEHTKRFEDMIAPFRLNDGFKDEATVNEMRRDCPWKISDEEITKNRVKSLRQVRLNEIVLDYSRDAALIVITLPIGRKGKCPSSLYMAWLETLSQDLRPPVILIRGNQENVLTFYCQ

SEQ ID NO: 73052 - protein, 907 aa, Homo sapiens
  MOD_RES (1)..(1): Any amino acid
XFAPVICKRTCLKGQCRDSCQQGSNMTLIGENGHSTDTLTGSGFRVADKPEEKSLCFRLVSPEHQCQHPLTTRLTRQLCCCSVGKAWGARCQRCPTDGTAAFKEICPAGKGYHILTSHQTLTIQGESDFSLFLHPDGPPKPQQLPESPSQAPPPEDTEEERGVTTDSPVSEERSVQQSHPTATTTPARPYPELISRPSPPTMRWFLPDLPPSRSAVEIAPTQVTETDECRLNQNICGHGECVPGPPDYSCHCNPGYRSHPQHRYCVDVNECEAEPCGPGRGICMNTGGSYNCHCNRGYRLHVGAGGRSCVDLNECAKPHLCGDGGFCINFPGHYKCNCYPGYRLKASRPPVCEDIDECRDPSSCPDGKCENKPGSFKCIACQPGYRSQGGGACRDVNECAEGSPCSPGWCENLPGSFRCTCAQGYAPAPDGRSCLDVDECEAGDVCDNGICSNTPGSFQCQCLSGYHLSRDRSHCEDIDECDFPAACIGGDCINTNGSYRCLCPQGHRLVGGRKCQDIDECSQDPSLCLPHGACKNLQGSYVCVCDEGFTPTQDQHGCEEVEQPHHKKECYLNFDDTVFCDSVLATNVTQQECCCSLGAGWGDHCEIYPCPVYSSAEFHSLCPDGKGYTQDNNIVNYGIPAHRDIDECMLFGSEICKEGKCVNTQPGYECYCKQGFYYDGNLLECVDVDECLDESNCRNGVCENTRGGYRCACTPPAEYSPAQRQCLSPEEMERAPERRDVCWSQRGEDGMCAGPLAGPALTFDDCCCRQGRGWGAQCRPCPPRGAGSHCPTSQSESNSFWDTSPLLLGKPPRDEDSSEEDSDECRCVSGRCVPRPGGAVCECPGGFQLDASRARCVDIDECRELNQRGLLCKSERCVNTSGSFRCVCKAGFARSRPHGACVPQRRR

SEQ ID NO: 73053 - protein, 74 aa, Homo sapiens
  MOD_RES (1)..(1): Any amino acid
XVSLCQGPGYPNSRKVVINNSVFSVRFFRTTAVCKDDLVTVKTPAFAESVTEGDVRWEKAFDCLFSCWRHSCRR

SEQ ID NO: 73054 - protein, 141 aa, Homo sapiens
MDFWLWPLYFLPEMESCCVAQDGLELVALSDPPGSASQSAGITVSGALRILPEVKVEGELGGSVTIKCPLPEMHVRIYLCREMAGSGTCGTVVSTTNFIKAEYKGRVTLKQYPRKNLFLVEVTQLTESDSGVYACGAGMNT

SEQ ID NO: 73055 - protein, 352 aa, Homo sapiens
MACLLETPIRMSVLSRHEKCCNWKQQAESQSHCFRSCSKDATVIPHLMALLSRSRYTQEYICQIFSHCCKGPDHQTILFNHGAVQNIAHLLTSLSYKVRMQALKCFSVLAFENPQVSMTLVNVLVDGELLPQIFVKMLQRDKPIEMQLTSAKCLTYMCRAGAIRTDDNCIVLKTLPCLVRMCSKERLLEERVEGAETLAYLIEPDVELQRIASITDHLIAMLADYFKYPSSVSAITDIKRLDHDLKHAHELRQAAFKLYASLGANDEDIRKKIIETENMMDRIVTGLSESSVKVRLAAVRCLHSLSRSVQQLRTSFQDHAVWKPLMKVLQNAPDEILVVASSMLCNLLLEFS

SEQ ID NO: 73056 - protein, 193 aa, Homo sapiens
MTAEDSTAAMSSDSAAGSSAKVPEGVAGAPNEAALLALMERTGYSMVQENGQRKYGGPPPGWEGPHPQRGCEVFVGKIPRDVYEDELVPVFEAVGRIYELRLMMDFDGKNRGYAFVMYCHKHEAKRAVRELNNYEIRPGRLLGVCCSVDNCRLFIGGIPKMKKREEILEEIAKVTEGVLDVIVYASAADKMKN

SEQ ID NO: 73057 - protein, 734 aa, Homo sapiens
  MOD_RES (1)..(1): Any amino acid
XEDENALSIFETNCHSGSPKKQSSSAAIHKPYLHFTMSPYHQPTSYRPRLLLSGERGSGQTSHLAPALLHTLERFSVHRLDLPALYSVSAKTPEESCAQIFREARRTVPSIVYMPHIGDWWEAVSETVRATFLTLLQDIPSFSPIFLLSTSETMYSELPEEVKCIFRIQYEEVLYIQRPIEEDRRKFFQELILNQASMAPPRRKHAALCAMEVLPLALPSPPRQLSESEKSRMEDQEENTLRELRLFLRDVTKRLATDKRFNIFSKPVSDYLEVIKEPMDLSTVITKIDKHNYLTAKDFLKDIDLICSNALEYNPDKDPGDKIIRHRACTLKDTAHAIIAAELDPEFNKLCEEIKEARIKRGLSVTSEQINPHSTGARKTETRVEEAFRHKQRNPMDVWHNSANKCAFRVRRKSRRRSQWGKGIIKKRKVNNLKKDEEDTKFADYENHTEDRKLLENGEFEVSTDCHEENGEETGDLSMTNDESSCDIMDLDQGQRLNNGAGTKENFASTEEESSNESLLVNSSSSLNPEQTSRKETFLKGNCLNGEASTDSFEGIPVLECQNGKLEVVSFCDSGDKCSSEQKILLEDQSKEKPETSTENHGDDLEKLEALECSNNEKLEPGSDVEVKDAELDKEGASKVKKYRKLILEQAKTTSLELVPEEPSEPVPPLIVDRERLKKLLDLLVDKSNNLAVDQLERLYSLLSQCIYRHRKDYDKSQLVEEMERTVHMFETFL

SEQ ID NO: 73058 - protein, 131 aa, Homo sapiens
MRVMAPRTLILLLSGALALTETWAGSHSMRYFYTAVSRPGRGEPHFIAVGYVDDTQFVRFDSDAASPRGEPRAPWVEQEGPEYWDRETQKYKRQAQTDRVSLRNLRGYYNQSEAEDVWLRRGARRAPPPRV

SEQ ID NO: 73059 - protein, 90 aa, Homo sapiens
MADTQYILPNDIGVSSLDCREAFRLLSPTERLYAYHLSRAAWYGGLAVLLQTSPEAPYIYALLSRLFRAQDPDQLRQHALAEGLTEEEYQ

SEQ ID NO: 73060 - protein, 73 aa, Homo sapiens
EATSQSYSRCLELMLTHVARHGPMCHLMVASHNEESVRQATKRMWELGIPLDGTVCFGQLLGMCDHVSLALGM

SEQ ID NO: 73061 - protein, 129 aa, Homo sapiens
MNAAASSYPMASLYVGDLHSDVTEAMLYEKFSPAGPVLSIRVCRDMITRRSLGYAYVNFQQPADAERALDTMNFDVIKGKPIRIMWSQRDPSLRKSGVGNVFIKNLDKSIDNKALYDTFSAFGNILSCK

SEQ ID NO: 73062 - protein, 42 aa, Homo sapiens
MSGELSNRFQGRLFVSSRREGVRLAQSPAGEEAGRDQPGVSV

SEQ ID NO: 73063 - protein, 82 aa, Homo sapiens
  MOD_RES (1)..(1): Any amino acid
XAYQSLRLEYLQIPPVSRAYTTACVLTTAAVQLELITPFQLYFNPELIFKHFQIWRLITNFLFFGPVGFNFLFNMIFLSRTG

SEQ ID NO: 73064 - protein, 296 aa, Homo sapiens
MWSLHIVLMRCSFRLTKSLATGPWSLILILFSVQYVYGSGKKYIGPCGGRDCSVCHCVPEKGSRGPPGPPGPQGPIGPLGAPGPIGLSGEKGMRGDRGPPGAAGDKGDKGPTGVPGFPGLDGIPGHPGPPGPRGKPGMSGHNGSRGDPGFPGGRGALGPGGPLGHPGEKGEKGNSVFILGAVKGIQGDRGDPGLPGLPGSWGAGGPAGPTGYPGEPGLVGPPGQPGRPGLKGNPGVGVKGQMGDPGEVGQQGSPGPTLLVEPPDFCLYKGEKGIKGIPGMVGLPGPPGRKGESGIG

SEQ ID NO: 73065 - protein, 57 aa, Homo sapiens
MVMSRQSQSQAFAMAATVNLELDPIFLKALGFLHSKSKDSAEKLKALLDESLARGID

SEQ ID NO: 73066 - protein, 146 aa, Homo sapiens
  MOD_RES (1)..(1): Any amino acid
XFSLETCRIMIAMLDRDHTGKMGFNAFKELWAALNAWKENFMTVDQDGSGTVEHHELRQAIGLMGYRLSPQTLTTIVKRYSKNGRIFFDDYVACCVKLRALTDFFRKRDHLQQGSANFIYDDCGGMNVINFEHLDTERPESVCKSD

SEQ ID NO: 73067 - protein, 258 aa, Homo sapiens
MTLAAYKEKMKELPLVSLFCSCFLADPLNKSSYKYEGWCGRQCRRKDESQRKDSADWRERRAQADTVDLNWCVISDMEVIELNKCTSGQSFEVILKPPSFDGVPEFNASLPRRRDPSLEEIQKKLEAAEERRKYQEAELLKHLAEKREHEREVIQKAIEENNNFIKMAKEKLAQKMESNKENREAHLAAMLERLQEKVRGPWLERSFLGHAVFLLQQVCGDLLIISGRKQPQAKIRIFFLGRIFREFRRMIREVRGKK

SEQ ID NO: 73068 - protein, 154 aa, Homo sapiens
MKWLAVSEESRRDLDGHTRFAGVCIRERALISLSFGGAIGLMFLMLGCALPIYNKYWPLFVLFFYILSPIPYCIARRLVDDTDAMSNACKELAIFLTTGIVVSAFGLPIVFARAHLIEWGACALVLTGNTVIFATILGFFLVFGSNDDFSWQQW

SEQ ID NO: 73069 - protein, 121 aa, Homo sapiens
MAPKVFRQYWDIPDGTDCHRKAYSTTSIASVAGLTAAAYRVTLNPPGTFLEGVAKVGQYTFTAAAVGAVFGLTTCISAHVREKPDDPLNYFLGGCAGGLTLGARKTGFHRVSQDGLDLLTS

SEQ ID NO: 73070 - protein, 39 aa, Homo sapiens
MLAIGLSLCDHLSQDVFCLHESKFEEERMVAGWLTNYSQ

SEQ ID NO: 73071 - protein, 782 aa, Homo sapiens
MTTEKSLVTEAENSQHQQKEEGEEAINSGQQEPQQEESCQTAAEGDNWCEQKLKASNGDTPTHEDLTKNKERTSESRGLSRLFSSFLKRPKSQVSEEEGKEVESDKEKGEGGQKEIEFGTSLDEEIILKAPIAAPEPELKTDPSLDLHSLSSAETQPAQEELREDPDFEIKEGEGLEECSKIEVKEESPQSKAETELKASQKPIRKHRNMHCKVSLLDDTVYECVVEKHAKGQDLLKRVCEHLNLLEEDYFGLAIWDNATSKTWLDSAKEIKKQVRGVPWNFTFNVKFYPPDPAQLTEDITRYYLCLQLRQDIVAGRLPCSFATLALLGSYTIQSELGDYDPELHGVDYVSDFKLAPNQTKELEEKVMELHKSYRSMTPAQADLEFLENAKKLSMYGVDLHKAKDLEGVDIILGVCSSGLLVYKDKLRINRFPWPKVLKISYKRSSFFIKIRPGEQEQYESTIGFKLPSYRAAKKLWKVCVEHHTFFRLTSTDTIPKSKFLALGSKFRYSGRTQAQTRQASALIDRPAPHFERTASKRASRSLDGAAAVDSADRSPRPTSAPAITQGQVAEGGVLDASAKKTVVPKAQKETVKAEVKKEDEPPEQAEPEPTEAWKVEKTHIEVTVPTSNGDQTQKLAEKTEDLIRMRKKKRERLDGENIYIRHSNLMLEDLDKSQEEIKKHHASISELKKNFMESVPEPRPSEWDKRLSTHSPFRTLNINGQIPTGEGVKKTSVLPSERKSPSYFLPDTYHLGVCKEPVLNFQTDQRRLAQLRELRAKFFLS

SEQ ID NO: 73072 - protein, 242 aa, Homo sapiens
MSQQNTSGDCLFDGVNELMKTLQFAVHIPTFVLGLLLNLLAIHGFSTFLKNRWPDYAATSIYMINLAVFDLLLVLSLPFKMVLSQVQSPFPSLCTLVECLYFVSMYGSVFTICFISMDRFLAIRYPLLVSHLRSPRKIFGICCTIWVLVWTGSIPIYSFHGKVEKYMCFHNMSDDTWSAKVFFPLEVFGFLLPMGIMGFCCSRSIHILLGRRDHTQDWVQQKACIYSIAASLAVFVVSFLPV

SEQ ID NO: 73073 - protein, 98 aa, Homo sapiens
MARYEEVSVSGFEEFHRAVEQHNAEPVVREGLKHISEGCVFIYCQVGEKPYWKDPNNDFRKNLKVTAVPTLLKYGTPQKLVESECLQANLVEMLFSED

SEQ ID NO: 73074 - protein, 266 aa, Homo sapiens
MRTWNSGGTKCCHICKLPGRVMGIRVLRLSLVVILVLLLVAGALTALLPSVKEDKMLMLRREIKSQGKSTMDSFTLIMQTYNRTDLLLKLLNHYQAVPNLHKVIVVWNNIGEKAPDELWNSLGPHPIPVIFKQQTANRMRNRLQVFPELETNAVLMVDDDTLISTPDLVFAFSVWQQFPDQIVGFVPRKHVSTSSGIYSYGSFEMQAPGSGNGDQYSMVLIGASFFNSKYLELFQRQPAAVHALIDDTQNCDDIAMNFIIAKHIGK

SEQ ID NO: 73075 - protein, 195 aa, Homo sapiens
MVQPSGGPAADQDVLGEESPLGKPAMLHLPSEQGAPETLQRCLEENQELRDAIRQSNQILRERCEELLHFQASQREEKEFLMCKFQEARKLVERLGLEKLDLKRQKEQALREVEHLKRCQQQMAEDKASVKAQVTSLLGELQESQSRLEAATKECQALEGRARAASEQARQLESEREALQQQHSVQVDQLRMQGQ

SEQ ID NO: 73076 - protein, 246 aa, Homo sapiens
  MOD_RES (1)..(1): Any amino acid
XMMTLGRLRGFEGKLTAQGKLLGQDTFWVTEPEAGGLLSSRGRERRVFLFEQIIIFSEALGGGVRGGTQPGYVYKNSIKVSCLGLEGNLQGDPCRFALTSRGPEGGIQRYVLQAADPAISQAWIKHVAQILESQRDFLNALQSPIEYQRRESQTNSLGRPRGPGVGSPGRIQLGDQAQGSTHTPINGSLPSLLLSPKGEVARALLPLDKQALGDIPQAPHDSPPVSPTPKTPPCQARLAKLDEDEL

SEQ ID NO: 73077 - protein, 81 aa, Homo sapiens
MWLKVGGLLRGTGGQLGQTVGWPCGALGPGPHRWGPCGGSWAQKFYQDGPGRGLGEEDIRRAREARPRKTPRPQTLSPFPS

SEQ ID NO: 73078 - protein, 469 aa, Homo sapiens
  MOD_RES (1)..(1): Any amino acid
XFTSADTGNSLSAFPSYTGAGISTEGSSDFSWGYGELDQNATEKVQTMFTAIDELLYEQKLSVHTKSLQEECQQWTASFPHLRILGRQIITPSEGYRLYPRSPSAVSASYETTLSQERDSTIFGIRGKKLHFSSSYAHKASSIAKSSSFCSMERDEEDSIIVSEGIIEEYLAFDHIDIEEGFHGKKSEAATEKQKLGYPPIAPFYCMKEDVLAYVFDSVWCKVVSCMEQLTRSHWEGFASDDESNVAVTRPDSESSCVLSELHPLVLPRVPQSKMSLCQASRHQPNVNDLLVHGMPLQPRNLSLMDKLLDLDDKLLMRPGSSTILSTRNWPNRAVEFSTSSLSYTVQSTRRRNPPPRTLHPISTSHSCAETPRSVEEILRGARVPVAPDSLSSPSPTPLSRNNLLPPIGTAEVEHVSTVGPQRQMKPHGDSSRAQSAVVDEPNYQQPQERLLLPDFFPRPNTTQSFLVE

SEQ ID NO: 73079 - protein, 180 aa, Homo sapiens
  MOD_RES (1)..(1): Any amino acid
XKGEFPGEKSKRLRYHDEADQSALQRMTRLRVTWSMQEDGLLVLCRIASNVLNTKVKGPFVTWQVVRDILHATFEESLDKTSHSVGRRARYIVKNPQAYLNYKVCLAEVYQDKALVGDFMNRRGDYDDPKCVWQDLCQVRPVDKERLPFPPRRPQVCANEFKEFVEKLKEKFSSALRNSN

SEQ ID NO: 73080 - protein, 148 aa, Homo sapiens
MEFFPLDLGQLRGRGEARPDWAGRWGGAGAGGPLGRGLVRRPRSRRGPGRGSPGPQSRGGGDGRRESGRREGGWRGRREEGERPPCGEGGERMESARRRWGPACGPGAAEKTPSLRRGSRGSHYDERSHLHDTFTQMTHALQELAAAQ

SEQ ID NO: 73081 - protein, 131 aa, Homo sapiens
MAGAQTLLTFRDVAIEFSLEEWKCLDLAQQNLYRDVMLENYRNLFSVGLTVCKPGLITCLEQRKEPWNVKRQEAADGHPAMSSHFTQDLLPEQGIQDAFPKRILRGYGNCGLDNLYLRKDWESLDECKLQK

SEQ ID NO: 73082 - protein, 100 aa, Homo sapiens
MAMQMQLEANADTSVEEESFGPQPISRLEQCGINANDVKKLEEAGFHTVEAVAYAPKKELINIKGISEAKADKILVELRLDLSQKCLENSELGRPRSVIR

SEQ ID NO: 73083 - protein, 285 aa, Homo sapiens
MMEAIKKKMQMLKLDKENALDRAEQAEAEQKQAEERSKQLEDELAAMQKKLKGTEDELDKYSEALKDAQEKLELAEKKAADAEAEVASLNRRIQLVEEELDRAQERLATALQKLEEAEKAADESERGMKVIENRALKDEEKMELQEIQLKEAKHIAEEADRKYEEVARKLVIIEGDLERTEERAELAESRCREMDEQIRLMDQNLKCLSAAEEKYSQKEDKYEEEIKILTDKLKEAETRAEFAERSVAKLEKTIDDLEDKLKCTKEEHLCTQRMLDQTLLDLNEM

SEQ ID NO: 73084 - protein, 186 aa, Homo sapiens
MPSATSHSGSGSKSSGPPPPSGSSGSEAAAGAGAAAPASQHPATGTGAVQTEAMKQILGVIDKKLRNLEKKKGKLDDYQERMNKGERLNQDQLDAVSKYQEVTNNLEFAKELQRSFMALSQDIQKTIKKTARREQLMREEAEQKRLKTVLELQYVLDKLGDDEVRTDLKQGLNGVPILSEEELSLL

SEQ ID NO: 73085 - protein, 175 aa, Homo sapiens
MIQSQEKPDRVLVRVRDLTIQKADEVVWVRARVHTSRAKGKQCFLVLRQQQFNVQALVAVGDHASKQMVKFAANINKESIVDVEGVVRKVNQKIGSCTQQDVELHVQKIYVISLAEPRLPLQLDDAVRPEAEGEEEGRATVNQDTRLDNRVIDLRTSTSQAVFRLQSGICHLFRE

SEQ ID NO: 73086 - protein, 129 aa, Homo sapiens
MAEQEPTAEQLAQIAAENEEDEHSVNYKPPAQKSIQEIQELDKDDESLRKYKEALLGRVAVSAVDKTDYMVGSYGPRAEEYEFLTPVEEAPKGMLARGSYSIKSRFTDDDKTDHLSWEWNLTIKKDWKD

SEQ ID NO: 73087 - protein, 147 aa, Homo sapiens
  MOD_RES (1)..(1): Any amino acid
XGTYTLYLIIGDATLKNPILWNVADVVIKFPEEEAPSTVLSQNLFTPKQEIQHLFREPEKRPPTVVSNTFTALILSPLLLLFALWIRIGANVSNFTFAPSTIIFHLGHAEQHISSRRKMEILKTECQEKESRTIHSMRRKMEKKNFI

SEQ ID NO: 73088 - protein, 226 aa, Homo sapiens
MQCKTNGDCRVEECALGQDLCRTTIVRLWEEGEELELVEKSCTHSEKTNRTLSYRTGLKITSLTEVVCGLDLCNQGNSGRAVTYSRSRYLECISCGSSDMSCERGRHQSLQCRSPEEQCLDVVTHWIQEGEEGRPKDDRHLRGCGYLPGCPGSNGFHNNDTFHFLKCCNTTKCNEGPILELENLPQNGRQCYSCKGNSTHGCSSEETFLIDCRGPMNQCLVATGTH

SEQ ID NO: 73089 - protein, 66 aa, Homo sapiens
MVMEKPSPLLVGREFVRQYYTLLNQAPDMLHRQSLALLSRLECSGAIWTDCNVHLPSLSDSSAPAS

SEQ ID NO: 73090 - protein, 31 aa, Homo sapiens
MRKALTDFIQEEFQHLKTQAEQLHNHLQPGR

SEQ ID NO: 73091 - protein, 282 aa, Homo sapiens
  MOD_RES (1)..(1): Any amino acid
XYQGTKRWLEDNLDHTDSSLLQDNVAFVLCLDTVGRGSSLHLHVSKPPREGTLQHAFLRELETVAAHQFPEVRFSMVHKRINLAEDVLAWEHERFAIRRLPAFTLSHLESHRDGQRSSIMDVRSRVDSKTLTRNTRIIAEALTRVIYNLTEKGTPPDMPVFTEQMIQQEQLDSVMDWLTNQPRAAQLVDKDSTFLSTLEHHLSRYLKDVKQHHVKADKRDPEFVFYDQLKQVMNAYRVKPAVFDLLLAVGIAAYLGMAYVAVQHFSLLYKTVQRLLVKAKTQ

SEQ ID NO: 73092 - protein, 67 aa, Homo sapiens
VIFTSDNGIPFPSGRTNLYWPGTAEPLLVSSPEHPKRWGQVSEAYVSLLEEKNEAQRGEVSCSGLHS

SEQ ID NO: 73093 - protein, 194 aa, Homo sapiens
  MOD_RES (1)..(1): Any amino acid
XATNATAVRCCKLPLHAFLDNVGWFVRKLSGLLILLVLFAIGYFLQRIICPSPRRYPRGQARPGQRPGPPGGAGPLGGAGPPDDDDDSPALLRDEAAAGSQDSLLDSGGGGRGRGGGGRSDPSCASEHEMRVVSPVFLQLPSYEEVKYLPTYEESMRLQQLSPGEVVLPVSVLGRPRGGVAAEPDGGEGRYPLI

SEQ ID NO: 73094 - protein, 247 aa, Homo sapiens
  MOD_RES (1)..(1): Any amino acid
XGCAERRPLQPRTEAAAAPAGRAMPSEYTYVKLRSDCSRPSLQWYTRAQSKMRRPSLLLKDILKCTLLVFGVWILYILKLNYTTEECDMKKMHYVDPDHVKRAQKYAQQVLQKECRPKFAKTSMALLFEHRYSVDLLPFVQKAPKDSEAESKYDPPFGFRKFSSKVQTLLELLPEHDLPEHLKAKTCRRCVVIGSGGILHGLELGHTLNQFDVVIRTQCTALGQCGSRNSEGHRKLFTVPAHKGLNV

SEQ ID NO: 73095 - protein, 61 aa, Homo sapiens
MNWELLLWLLVLCALLLLLVQLLRFLRADGDLTLLWAEWQGRRPEWELTDMVVWVTGASSG

SEQ ID NO: 73096 - protein, 279 aa, Homo sapiens
  MOD_RES (1)..(1): Any amino acid
XQQDGGGGASSGGGVTPLVEYEDVSSQSEQGLLLGGASAATAATAAGGTGGSGGSPASSSGTQRRGEGSERRPRRDRRSSSGRSKERHREHRRRDGQRGGSEASKSRSRHSHSGEERAEVAKSGSSSSSGGRRKSASATSSSSSSRKDRDSKAHRSRTKSSKEPPSAYKEPPKAYREDKTEPKAYRRRRSLSPLGGRDDSPVSHRASQSLRSRKSPSPAGGGSSPYSRRLPRSPSPYSRRRSPSYSRHSSYERGGDVSPSPYSSSSWRRSRSPYSPVLR

SEQ ID NO: 73097 - protein, 148 aa, Homo sapiens
MAQETNHSQVPMLCSTGCGFYGNPRTNGMCSVCYKEHLQRQNSSNGRISPPATSVSSLSESLPVQCTDGSVPEAQSALDSTSSSMQPSPVSNQSLLSESVASSQLDSTSVDKAVPETEDVQGFECRCGNVYCGVHRYSDVHNCSYNYK

SEQ ID NO: 73098 - protein, 129 aa, Homo sapiens
MAPEVVEAFSEEASIYDKRCDLWSLGVILYILLSGYPPFVGRCGSDCGWDRGEACPACQNMLFESIQEGKYEFPDKDWAHISCAAKDLISKLLVRDAKQRLSAAQVLQHPWVQGCAPENTLPTPMVLQR

SEQ ID NO: 73099 - protein, 123 aa, Homo sapiens
MEALGKLKQFDAYPKTLEDFRVKTCGGATVTIVSGLLMLLLFLSELQYYLTTEVHPELYVDKSRGDKLKINIDVLFPHMPCAYLSIDAMDVAGEQQLDVEHNLFKQRLDKDGIPVSSEAERHD

SEQ ID NO: 73100 - protein, 129 aa, Homo sapiens
MDDKKKKRSPKPCLAQPAQAPGTLRRVPVPTSHSGSLALGLPHLPSPKQRAKFKRVGKEKCRPVLAGGGSGSAGTPLQHSFLTEVTDVYEMEGGLLNLLNDFHSGRLQAFGEASPAALQPGCVWGGGGR

SEQ ID NO: 73101 - protein, 52 aa, Homo sapiens
METPAAAAPAGSLFPSFLLLACGTLVAALLGAAHRLGLFYQLLHKGRWAWRQ

SEQ ID NO: 73102 - protein, 300 aa, Homo sapiens
MEEPGMDTEAETVATEAPARPVNCLEAEAAAGAAAEDSGAARGSLQPAPAQPPGDPAAQASVSNGEDAGGGAGRELVDLKIIWNKTKHDVKFPLDSTGSELKQKIHSITGLPPAMQKVMYKGLVPEDKTLREIKVTSGAKIMVVGSTINDVLAVNTPKDAAQQDAKAEENKKEPLCRQKQHRKVLDKGKPEDVMPSVKGAQERLPTVPLSGMYNKSGGKVRLTFKLEQDQLWIGTKERTEKLPMGSIKNVVSEPIEGHEDYHMMAFQLGPTEASYYWVYWVPTQYVDAIKDTVLGKWQYF

SEQ ID NO: 73103 - protein, 130 aa, Homo sapiens
  MOD_RES (1)..(1): Any amino acid
XWLVETQVKARRRKRGAQKGSGSPTHSLSQKSTRLSGAAPAHSAADPWEKEHHRLSVRMGSHAHPLRRSRREAAFRSPYSSTEPLCSPSESDSDLEPVGAGIQHLQKLSQELDEAIMAEESGDIVSLIHD

SEQ ID NO: 73104 - protein, 162 aa, Homo sapiens
MSWMFLRDLLSGVNKYSTGTGWIWLAVVFVFRLLVYMVAAEHVWKDEQKEFECNSRQPGCKNVCFDDFFPISQVRLWALQLIMVSTPSLLVVLHVAYHEGREKRHRKKLYVSPGTMDGGLWYAYLISLIVKTGFEIGFLVLFYKLYDGFSVPYLIKCDLKPC

SEQ ID NO: 73105 - protein, 199 aa, Homo sapiens
  MOD_RES (1)..(1): Any amino acid
XGAHLNPAVTLGLLLSCQISIFRALMYIIAQCVGAIVATAILSGITSSLTGNSLGRNDLADGVNSGQGLGIEIIGTLQLVLCVLATTDRRRRDLGGSAPLAIGLSVALGHLLAIDYTGCGINPARSFGSAVITHNFSNHWIFWVGPFIGGALAVLIYDFILAPRSSDLTDRVKVWTSGQVEEYDLDADDINSRVEMKPK

SEQ ID NO: 73106 - protein, 147 aa, Homo sapiens
MSSGKTCCIAGKLGYSQCMETEVIESLGIIIYKALDYGLKENEERELSPPLEQLIDHMANTVEADGSNDEGYEAAEEGLGDEDEKRKISAIRSYRDVMKLCAAHLPTESDAPNHYQAVCRALFAETMELHTFLTKIKSAKENLKKIQ

SEQ ID NO: 73107 - protein, 165 aa, Homo sapiens
MGVEGPAVSRPVIYSILYSDATGRRGMDKNIGEQLNKAYEAFRQACMDRDSAVKELQQKTENYEQRIREQQEQLSLQQTIIDKLKSQLLLVNSTQDNNYGCVPLLEDSETRKNNLTLDQPQDKVISGIAREKLPKVRRQEVSSPRKETSARSLGSPLLHERGNIE

SEQ ID NO: 73108 - protein, 108 aa, Homo sapiens
MTTIPRKGSSHLPGSLHTCKLKLQEDRRQQEKSVIAQPIFVFEKGEQTFKRPAEDTLYEAAEPECNGFPTKRVRSSSFTFHITDSQSQGVRKNNVFMTSALVQSSVDI

SEQ ID NO: 73109 - protein, 308 aa, Homo sapiens
MHLCAISLDRYVAIQNPIHHSRFNSRTKAFLKIIAVWTISVGISMPIPVFGLQDDSKVFKEGSCLLADDNFVLIGSFVSFFIPLTIMVITYFLTIKSLQKEATLCVSDLGTRAKLASFSFLPQSSLSSEKLFQRSIHREPGSYTGRRTMQSISNEQKACKVLGIVFFLFVVMWCPFFITNIMAVICKESCNEDVIGALLNVFVWIGYLSSAVNPLVYTLFNKTYRSAFSRYIQCQYKENKKPLQLILVNTIPALAYKSSQLQMGQKKNSKQDAKTTDNDCSMVALGKQHSEEASKDNSDGVNEKVSCV

SEQ ID NO: 73110 - protein, 168 aa, Homo sapiens
MFSQQQQQQLQQQQQQLQQLQQQQLQQQQLQQQQLLQLQQLLQQSPPQAPLPMAVSRGLPPQQPQQPLLNLQGTNSASLLNGSMLQRALLLQQLQGLDQFAMPPATYDTAGLTMPTATLGNLRGYGMASPGLAAPSLTPPQLATPNLQQFFPQATRQSLLGPPPVGVP

SEQ ID NO: 73111 - protein, 230 aa, Homo sapiens
MATVMAATAAERAVLEEEFRWLLHDEVHAVLKQLQDILKEASLRFTLPGSGTEGPAKQENFILGSCGTDQVKGVLTLQGDALSQADVNLKMPRNNQLLHFAFREDKQWKLQQIQDARNHVSQAIYLLTSRDQSYQFKTGAEPTPPLPAADGRSDAAADQSPKPAHHPRHPHPPRDRRQRPHADVRPCPAVRPAGQRLHQPQQALPHGVPAACPAAQLHQELPPSWGRGAA

SEQ ID NO: 73112 - protein, 163 aa, Homo sapiens [sequence omitted]

SEQ ID NO: 73113 - protein, 250 aa, Homo sapiens
MVSFRLSNKTASPSIKLLVDDPIVVNPGEAITLVCVTTGGEPAPSLTWVRSFGTLPEKTVLNGGTLTIPAITSDDAGTYSCIANNNVGNPAKKSTNIIVRALKKGRFWITPDPYHKDDNIQIGREVKISCQVEAVPSEELTFSWFKNGRPLRSSERMVITQTDPDVSPGTTNLDIIDLKFTDFGTYTCVASLKGGGISDISIDVNISSSTGNTIGDKRNILTSSKTLPLESTHLTTDRCGFSIEWKLYKV

SEQ ID NO: 73114 - protein, 192 aa, Homo sapiens
MRIAVICFCLLGITCAIPVKQADSGSSEEKQLYNKYPDAVATWLNPDPSQKQNLLAPQNAVSSEETNDFKQETLPSKSNESHDHMDDMDDEDDDDHVDSQDSIDSNDSDDVDDTDDSHQSDESHHSDESDELVTDFPTDLPATEVFTPVVPTVDTYDGRGDSVVYGLRSKSKKFRRPDIQVNPLTDTPDGSD

SEQ ID NO: 73115 - protein, 1640 aa, Homo sapiens
MLSRLSGLANVVLHELSGDDDTDQNMRAPLDPELHQESDMEFNNTTQEDVQERLAYAEQLVVELKDIIRQKDVQLQQKDEALQEERKAADNKIKKLKLHAKAKLTSLNKYIEEMKAQGGTVLPTEPQSEEQLSKHDKSSTEEEMEIEKIKHKLQEKEELISTLQAQLTQAQAEQPAQSSTEMEEFVMMKQQLQEKEEFISTLQAQLSQTQAEQAAQKLRVLQRKLEEHEESLVGRAQVVDLLQQELTAAEQRNQILSQQLQQMEAEHNTLRNTVETEREESKILLEKMELEVAERKLSFHNLQEEMHHLLEQFEQAGQAQAELESRYSALEQKHKAEMEEKTSHILSLQKTGQELQSACDALKDQNSKLLQDKNEQAVQSAQTIQQLEDQLQQKSKEISQFLNRLPLQQHETASQTSFPDVYNEGTQAVTEENIASLQKRVVELENEKGALLLSSIELEELKAENEKLSSQITLLEAQNRTGEADREVSEISIVDIANKRSSSAEESGQDVLENTFSQKHKELSVLLLEMKEAQEEIAFLKLQLQGKRAEEADHEVLDQKEMKQMEGEGIAPIKMKVFLEDTGQDFPLMPNEESSLPAVEKEQASTEHQSRTSEEISLNDAGVELKSTKQDGDKSLSAVPDIGQCHQDELERLKSQILELELNFHKAQEIYEKNLDEKAKEISNLNQLIEEFKKNADNNSSAFTALSEERDQLLSQVKELSMVTELRAQVKQLEMNLAEAERQRRLDYESQTAHDNLLTEQIHSLSIEAKSKDVKIEVLQNELDDVQLQFSEQSTLIRSLQSQLQNKESEVLEGAERVRHISSKVEELSQALSQKELEITKMDQLLLEKKRDVETLQQTIEEKDQQVTEISFSMTEKMVQLNEEKFSLGVEIKTLKEQLNLLSRAEEAKKEQVEEDNEVSSGLKQNYDEMSPAGQISKEELQHEFDLLKKENEQRKRKLQAALINRKELLQRVSRLEEELANLKDESKKEIPLSETERGEVEEDKENKEYSEKCVTSKCQEIEIYLKQTISEKEVELQHIRKDLEEKLAAEEQFQALVKQMNQTLQDKTNQIDLLQAEISENQAIIQKLITSNTDASDGDSVALVKETVVISPPCTGSSEHWKPELEEKILALEKEKEQLQKKLQEALTSRKAILKKAQEKERHLREELKQQKDDYNRLQEQFDEQSKENENIGDQLRQLQIQVRESIDGKLPSTDQQESCSSTPGLEEPLFKATEQHHTQPVLESNLCPDWPSHSEDASALQGGTSVAQIKAQLKEIEAEKVELELKVSSTTSELTKKSEEVFQLQEQINKQGLEIESLKTVSHEAEVHAESLQQKLESSQLQIAGLEHLRELQPKLDELQKLISKKEEDVSYLSGQLSEKEAALTKIQTEIIEQEDLIKALHTQLEMQAKEHDERIKQLQVELCEMKQKPEEIGEESRAKQQIQRKLQAALISRKEALKENKSLQEELSLARGTIERLTKSLADVESQVSAQNKEKDTVLGRLALLQEERDKLITEMDRSLLENQSLSSSCESLKLALEGLTEDKEKLVKEIESLKSSKIAESTEWQEKHKELQKEYEILLQSYENVSNEAERIQHVVEAVRQEKQELYGKLRSTEANKKETEKQLQEAEQEMEEMKE

SEQ ID NO: 73116 - protein, 772 aa, Homo sapiens
  MOD_RES (1)..(1): Any amino acid
XGVPVIKWKKDGIHLALGMDERKQQLSNGSLLIQNILHSRHHKPDEGLYQCEASLGDSGSIISRTAKVAVAGPLRFLSQTESVTAFMGDTVLLKCEVIGEPMPTIHWQKNQQDLTPIPGDSRVVVLPSGALQISRLQPGDIGIYRCSARNPASSRTGNEAEVRILSDPGLHRQLYFLQRPSNVVAIEGKDAVLECCVSGYPPPSFTWLRGEEVIQLRSKKYSLLGGSNLLISNVTDDDSGMYTCVVTYKNENISASAELTVLVPPWFLNHPSNLYAYESMDIEFECTVSGKPVPTVNWMKNGDVVIPSDYFQIVGGSNLRILGVVKSDEGFYQCVAENEAGNAQTSAQLIVPKPAIPSSSVLPSAPRDVVPVLVSSRFVRLSWRPPAEAKGNIQTFTVFFSREGDNRERALNTTQPGSLQLTVGNLKPEAMYTFRVVAYNEWGPGESSQPIKVATQPELQVPGPVENLQAVSTSPTSILITWEPPAYANGPVQGYRLFCTEVSTGKEQNIEVDGLSYKLEGLKKFTEYSLRFLAYNRYGPGVSTDDITVVTLSDVPSAPPQNVSLEVVNSRSIKVSWLPPPSGTQNGFITGYKIRHRKTTRRGEMETLEPNNLWYLFTGLEKGSQYSFQVSAMTVNGTGPPSNWYTAETPENDLDESQVPDQPSSLHVRPQTNCIIMSWTPPLNPNIVVRGYIIGYGVGSPYAETVRVDSKQRYYSIERLESSSHYVISLKAFNNAGEGVPLYESATTRSITVRRHNISKLHSNRPQTKHNV

SEQ ID NO: 73117 - protein, 438 aa, Homo sapiens
DNDCGDHSDEPIEECMSSAHLCDNFTEFSCKTNYRCIPKWAVCNGVDDCRDNSDEQGCEERTCHPVGDFRCKNHHCIPLRWQCDGQNDCGDNSDEENCAPRECTESEFRCVNQQCIPSRWICDHYNDCGDNSDERDCEMRTCHPEYFQCTSGHCVHSELKCDGSADCLDASDEADCPTRFPDGAYCQATMFECKNHVCIPPYWKCDGDDDCGDGSDEELHLCLDVPCNSPNRFRCDNNRCIYSHEVCNGVDDCGDGTDETEEHCRKPTPKPCTEYEYKCGNGHCIPHDNVCDDADDCGDWSDELGCNKGKERTCAENICEQNCTQLNEGGFICSCTAGFETNVFDRTSCLDINECEQFGTCPQHCRNTKGSYECVCADGFTSMSDRPGKRCAAEALLCCYCLTMSEFENIISHLRGSQSIFKMRNISKLLIMIGIPRT

SEQ ID NO: 73118 - protein, 91 aa, Homo sapiens
MPDVPQSWPSCLCHGLISFLGFLLLLVTFPISGWFALKIVPTYERMIVFRLGRIRTPQGPGMVLLLPFIDSFQRVDLRTRAFNVPPCKLAS

SEQ ID NO: 73119 - protein, 66 aa, Homo sapiens
MTSATSPIILKWDPKSLEIRTLTVERLLEPLVTQVTTLVNTSNKGPSGKKKGRSKKAHVLAASVEQ

SEQ ID NO: 73120 - protein, 84 aa, Homo sapiens
MASVVLALRTRTAVTSLLSPTPATALAVRYASKKSGGSSKNLGGKSSGRRQGIKKMEGHYVHAGNIIATQRHFRWHPGAHWRWK

SEQ ID NO: 73121 - protein, 780 aa, Homo sapiens
MVCGCSALLPLPNPRPTMPATPNFLANPSSSSRWIPLQPMPVAWAFVQKTSALLWLLLLGTSLSPAWGQAKIPLETVKLWADTFGGDLYNTVTKYSGSLLLQKKYKDVESSLKIEEVDGLELVRKFSEDMENMLRRKVEAVQNLVEAAEEADLNHEFNESLVFDYYNSVLINERDEKGNFVELGAEFLLESNAHFSNLPVNTSISSVQLPTNVYNKDPDILNGVYMSEALNAVFVENFQRDPTLTWQYFGSATGFFRIYPGILVQADRDNREHFKLLVEELMVKGVGVVDQALREAFQILKQFQEAKQGSLCNQAIMLISDGAVEDYEPVFEKYNWPDCKISTLADTQENVMEYLHVLSRPMVINHDHDIIWTEAYMDSKLLSSQAQSLTLLTTVAMPVFSKKNETRSHGILLGVVGSDVALRELMKLAPRYKLGVHGYAFLNTNNGYILSHPDLRPLYREGKKLKPKPNYNSVDLSEVEWEDQAESKRVLFLTNDYFFTDISDTPFSLGVVLSRGHGEYILLGNTSVEEGLHDLLHPDLALAGDWIYCITDIDPDHRKLSQLEAMIRFLTRKDPDLECDEELVREVLFDAVVTAPMEAYWTALALNMSEESEHVVDMAFLGTRAGLLRSSLFVGSEKVSDRKFLTPEDEASVFTLDRFPLWYRQASEHPAGSFVFNLRWAEGPESAGEPMVVTASTAVAVTVDKRTAIAAAAGVQMKLEFLQRKFWAATRQCSTVDGPCTQSCEDSDLDCFVIDNNGFILISKRSREPGIKLRKKPIQT

SEQ ID NO: 73122 - protein, 1340 aa, Homo sapiens
MADRTAPRCQLRLEWVYGYRGHQCRNNLYYTAGKEVVYFVAGVGVVYNTREHSQKFFLGHNDDIISLALHPDKTLVATGQVGKEPYICIWDSYNVQTVSLLKDVHTHGVACLAFDSDGQRLASVGLDAKNTVCIWDWRKGKLLASATGHSDRIFDISWDPYQPNRVVSCGVKHIKFWTLCGNALTAKRGIFGKTGDLQTILCLACAKEDITYSGALNGDIYVWKGLNLVRTIQGAHSAGIFSMYACEEGFATGGRDGCIRLWDTDFKPITKIDLRETEQGYKGLSIRSVCWKADRLLAGTQDSEIFEVIVRERDKPMLILQGHCEGELWALALHPKKPLAVTGSDDRSVRLWSLADHALIARCNMEEAVRSVAFSPDGSQLALGMKDGSFIVLRVRDMTEVVHIKDRKEVIHEMKFSPDGSYLAVGSNDGPVDVYAVAQRYKKIGECSKSLSFITHIDWSLDSKYLQTNDGAGERLFYRMPSGKPLTSKEEIKGIPWASWTCVKGPEVSGIWPKYTEVTDINSVDANYNSSVLVSGDDFGLVKLFKFPCLKRGAKFRKYVGHSAHVTNVRWSHDFQWVLSTGGADHSVFQWRFIPEGVSNGMLETAPQEGGADSYSEESDSDLSDVPELDSDIEQEAQINYDRQVYKEDLPQLKQQSKEKNHAVPFLKREKAPEDSLKLQFIHGYRGYDCRNNLFYTQAGEVVYHIAAVAVVYNRQQHSQRLYLGHDDDILSLTIHPVKDYVATGQVGRDAAIHVWDTQTLKCLSLLKGQHQRGVCALDFSADGKCLVSVGLDDFHSIVFWDWKKGEKIATTRGHKDKIFVVKCNPHHVDKLVTVGIKHIKFWQQAGGGFTSKRGTFGSVGKLETMMCVSYGRMEDLVFSGAATGDIFIWKDILLLKTVKAHDGPVFAMYALDKGFVTGGKDGIVELWDDMFERCLKTYAIKRSALSTSSKGLLLEDNPSIRAITLGHGHILVGTKNGEILEIDKSGPMTLLVQGHMEGEVWGLAAHPLLPICATVSDDKTLRIWELSAQHRMLAVRKLKKGGRCCAFSPDGKALAVGLNDGSFLVVNADTVEDMVSFHHRKEMISDIKFSKDTGKYLAVASHDNFVDIYNVLTSKRVGICKGASSYITHIDWDSRGKLLQVNSGAREQLFFEAPRGKRHIIRPSEIEKIEWDTWTCVLGPTCEGIWPAHSDITDVNAASLTKDCSLLATGDDFGFVKLFSYPVKGQHARFKKYVGHSAHVTNVRWLHNDSVLLTVGGADTALMIWTREFVGTQESKLVDSEESDTDVEEDGGYDSDVAREKAIDYTTKIYAVSIREMEGTKPHQQLKEVSVEERQGIVK

SEQ ID NO: 73123 - protein, 74 aa, Homo sapiens
EAKNINKSLSALGNVISALAEGTKTHVPYRDSKMTRILQDSLGGNCRTTIVICCSPSVFNEAETKSTLMFGQRV

SEQ ID NO: 73124 - protein, 46 aa, Homo sapiens
MGCGNSTATSAGAGQETMEEYMLAYHLKLSIWCPVKQRRFGKIRRK

SEQ ID NO: 73125 - protein, 98 aa, Homo sapiens
MITLNNQDQPVPFNSSHPDEYKIAALVFYSCIFIIGLFVNITALWVFSCTTKKRTTVTIYMMNVALVDLIFIMTLPFRMFYYAKDEWPFGEYFCQILG

SEQ ID NO: 73126 - protein, 119 aa, Homo sapiens
QKNFKRISYAKTKTRAEVRGGGRKPWPQKGTGRARHGSIRSPLWRGGGVAHGPRGPTSYYYMLPMKVRALGLKVALTVKLAQDDLHIMDSLELPTGDPQYLTELAHYRRWGDSVLLVDL

SEQ ID NO: 73127 - protein, 147 aa, Homo sapiens
MMCEVMPTINEDTPMSQRGSQSSGSDSDSHFEQLMVNMLDERDRLLDTLRETQESLSLAQQRLQDVIYDRDSLQRQLNSALPQEFAALTKELNACREQLLEKEEEISELKAERNNTRLLLEHLECLVSRHERSLRMTVVKRQAQSPS

SEQ ID NO: 73128 - protein, 188 aa, Homo sapiens
MAAIRKKLVIVGDGACGKTCLLIVFSKDQFPEVYVPTVFENYIADIEVDGKQVELALWDTAGQEDYDRLRPLSYPDTDVILMCFSIDSPDSLENIPEKWTPEVKHFCPNVPIILVGNKKDLRQDEHTRRELAKMKQEPVRSEEGRDMANRISAFGYLECSAKTKEGVREVFEMATRAGLQVRKNKRRR

SEQ ID NO: 73129 - protein, 96 aa, Homo sapiens
MMMVRRGLLAWISRVVVLLVLLCCAISVLYMLACTPKGDEEQLALPRANSPTGKEGYQAVLQEWEEQHRNYVSSLKRQIAQLKEELQERSEQLRNG

SEQ ID NO: 73130 - protein, 58 aa, Homo sapiens
  MOD_RES (1)..(1): Any amino acid
XSLVCLGVIILLSAFSGPGVRGGPMPKLADRKLCADQECSRSGRLLWRSGCSPGLFPQ

SEQ ID NO: 73131 - protein, 144 aa, Homo sapiens
MDELKKEVSMDDHKLSLDELHRKYGTDLSRGLTSARAAEILARDGPNALTPPPTTPEWIKFCRQLFGGFSMLLWIGAILCFLAYSIQAATEEEPQNDNLYLGVVLSAVVIITGCFSYYQEAKSSKIMESFKNMVPQQALVIRNG

SEQ ID NO: 73132 - protein, 958 aa, Homo sapiens
MLFRARGPVRGRGWGRPAEAPRRGRSPPWSPAWICCWALAGCQAAWAGDLPSSSSRPLPPCQEKDYHFEYTECDSSGSRWRVAIPNSAVDCSGLPDPVRGKECTFSCASGEYLEMKNQVCSKCGEGTYSLGSGIKFDEWDELPAGFSNIATFMDTVVGPSDSRPDGCNNSSWIPRGNYIESNRDDCTVSLIYAVHLKKSGYVFFEYQYVDNNIFFEFFIQNDQCQEMDTTTDKWVKLTDNGEWGSHSVMLKSGTNILYWRTTGILMGSKAVKPVLVKNITIEGVAYTSECFPCKPGTFSNKPGSFNCQVCPRNTYSEKGAKECIRCKDDSQFSEEGSSECTERPPCTTKDYFQIHTPCDEEGKTQIMYKWIEPKICREDLTDAIRLPPSGEKKDCPPCNPGFYNNGSSSCHPCPPGTFSDGTKECRPCPAGTEPALGFEYKWWNVLPGNMKTSCFNVGNSKCDGMNGWEVAGDHIQSGAGGSDNDYLILNLHIPGFKPPTSMTGATGSELGRITFVFETLCSADCVLYFMVDINRKSTNVVESWGGTKEKQAYTHIIFKNATFTFTWAFQRTNQGQDATTLRKKPTSARNVHLTPTCPYIRSMAKRLVFHAGLGVKTISNLSSVGSLMNGPSFTSKGTKYFHFFNISLCGHEGKKMALCTNNITDFTVKEIVAGSDDYTNLVGAFVCQSTIIPSESKGFRAALSSQSIILADTFIGVTVETTLKNINIKEDMFPVPTSQIPDVHFFYKSSTATTSCINGRSTAVKMRCNPTKSGAGVISVPSKCPAGTCDGCTFYFLWESAEACPLCTEHDFHEIEGACKRGFQETLYVWNEPKWCIKGISLPEKKLATCETVDFWLKVGAGVGAFTAVLLVALTCYFWKKNQKLEYKYSKLVMTTNSKECELPAADSCAIMEGEDNEEEVVYSNKQSLLGKLKSLATKEKEDHFESVQLKTSRSPNI

SEQ ID NO: 73133 - protein, 1603 aa, Homo sapiens
IKTSKRCCCGQFTNQHIPPLPSATPSKNEEENKQVETQPEKWSVAKHTQSYPTDSYGVLEFQGGGYSNKAMYIRVSYDTKPDSLLHLMVKDWQLELPKLLISVHGGLQNFEMQPKLKQVFGKGLIKAAMTTGAWIFTGGVSTGVISHVGDALKDHSSKSRGRVCAIGIAPWGIVENKEDLVGKDVTRVYQTMSNPLSKLSVLNNSHTHFILADNGTLGKYGAEVKLRRLLEKHISLQKINTRLGQGVPLVGLVVEGGPNVVSIVLEYLQEEPPIPVVICDGSGRASDILSFAHKYCEEGGIINESLREQLLVTIQKTFNYNKAQSHQLFAIIMECMKKKELVTVFRMGSEGQQDIEMAILTALLKGTNVSAPDQLSLALAWNRVDIARSQIFVFGPHWPPLGSLAPPTDSKATEKEKKPPMATTKGGRGKGKGKKKGKVKEEVEEETDPRKIELLNWVNALEQAMLDALVLDRVDFVKLLIENGVNMQHFLTIPRLEELYNTRLGPPNTLHLLVRDVKKSNLPPDYHISLIDIGLVLEYLMGGAYRCNYTRKNFRTLYNNLFGPKRPKALKLLGMEDDEPPAKGKKKKKKKKEEEIDIDVDDPAVSRFQYPFHELMVWAVLMKRQKMAVFLWQRGEESMAKALVACKLYKAMAHESSESDLVDDISQDLDNNSKDFGQLALELLDQSYKHDEQIAMKLLTYELKNWSNSTCLKLAVAAKHRDFIAHTCSQMLLTDMWMGRLRMRKNPGLKVIMGILLPPTILFLEFRTYDDFSYQTSKENEDGKEKEEENTDANADAGSRKGDEENEHKKQRSIPIGTKICEFYNAPIVKFWFYTISYLGYLLLFNYVILVRMDGWPSLQEWIVISYIVSLALEKIREILMSEPGKLSQKIKVWLQEYWNITDLVAISTFMIGAILRLQNQPYMGYGRVIYCVDIIFWYIRVLDIFGVNKYLGPYVMMIGKMMIDMLYFVVIMLVVLMSFGVARQAILHPEEKPSWKLARNIFYMPYWMIYGEVFADQIDLYAMEINPPCGENLYDEEGKRLPPCIPGAWLTPALMACYLLVANILLVNLLIAVFNNTFFEVKSISNQVWKFQRYQLIMTFHDRPVLPPPMIILSHIYIIIMRLSGRCRKKREGDQEERDRGLKLFLSDEELKRLHEFEEQCVQEHFREKEDEQQSSSDERIRVTSERVENMSMRLEEINERETFMKTSLQTVDLRLAQLEELSNRMVNALENLAGIDRSDLIQARSRASSECEATYLLRQSSINSADGYSLYRYHFNGEELLFEDTSLSTSPGTGVRKKTCSFRIKEEKDVKTHLVPECQNSLHLSLGTSTSATPDGSHLAVDDLKNAEESKLGPDIGISKEDDERQTDSKKEETISPSLNKTDVIHGQDKSDVQNTQLTVETTNIEGTISYPLEETKITRYFPDETINACKTMKSRSFVYSRGRKLVGGVNQDVEYSSITDQQLTTEWQCQVQKITRSHSTDIPYIVSEAAVQAEHKEQFADMQDEHHVAEAIPRIPRLSLTITDRNGMENLLSVKPDQTLGFPSLRSKSLHGHPRNVKSIQGKLDRSGHASSVSSLVIVSGMTAEEKKVKKEKASTETEC

SEQ ID NO: 73134 - protein, 54 aa, Homo sapiens
  MOD_RES (1)..(1): Any amino acid
XVARPSASSASTVPGYSEDGGALRGEVIPEHEFATGPVCLDDENEFPPVSIRNP

SEQ ID NO: 73135 - protein, 1062 aa, Homo sapiens
MDLYSTPAAALDRFVARRLQPRKEFVEKARRALGALAAALRERGGRLGAAAPRVLKTVKGGSSGRGTALKGGCDSELVIFLDCFKSYVDQRARRAEILSEMRASLESWWQNPVPGLRLTFPEQSVPGALQFRLTSVDLEDWMDVSLVPAFNVLGQAGSGVKPKPQVYSTLLNSGCQGGEHAACFTELRRNFVNIRPAKLKNLILLVKHWYHQVCLQGLWKETLPPVYALELLTIFAWEQGCKKDAFSLAEGLRTVLGLIQQHQHLCVFWTVNYGFEDPAVGQFLQRQLKRPRPVILDPADPTWDLGNGAAWHWDLLAQEAASCYDHPCFLRGMGDPVQSWKGPGLPRAGCSGLGHPIQLDPNQKTPENSKSLNAVYPRAGSKPPSCPAPGPTGAASIVPSVPGMALDLSQIPTKELDRFIQDHLKPSPQFQEQGGSFGRGTDLRDGCDVELIIFLNCFTDYKDQGPRRAEILDEMRAQLESWWQDQVPSLSLQFPEQNVPEALQFQLVSTALKSWTDVSLLPAFDAVGQLSSGTKPNPQVYSRLLTSGCQEGEHKACFAELRRNFMNIRPVKLKNLILLVKHWYRQVAAQNKGKGPAPASLPPAYALELLTIFAWEQGCRQDCFNMAQGFRTVLGLVQQHQQLCVYWTVNYSTEDPAMRMHLLGQLRKPRPLVLDPADPTWNVGHGSWELLAQEAAALGMQACFLSRDGTSVQPWDVMPALLYQTPAGDLDKFISEFLQPNRQFLAQVNKAVDTICSFLKENCFRNSPIKVIKVVKGGSSAKGTALRGRSDADLVVFLSCFSQFTEQGNKRAEIISEIRAQLEACQQERQFEVKFEVSKWENPRVLSFSLTSQTMLDQSVDFDVLPAFDALGQLVSGSRPSSQVYVDLIHSYSNAGEYSTCFTELQRDFIISRPTKLKSLIRLVKHWYQQCTKISKGRGSLPPQHGLELLTVYAWEQGGKDSQFNMAEGFRTVLELVTQYRQLCIYWTINYNAKDKTVGDFLKQQLQKPRPIILDPADPTGNLGHNARWDLLAKEAAACTSALCCMGRNGIPIQPWPVKAAV

SEQ ID NO: 73136 - protein, 187 aa, Homo sapiens
MAQFDTEYQRLEASYSDSPPGEEDLLVHVAEGSKSPWHHIENLDLFFSRVYNLHQKNGFTCMLIGEIFELMQFLFVVAFTTFLVSCVDYDILFANKMVNHSLHPTEPVKVTLPDAFLPAQVCSARIQENGSLITILVIAGVFWIHRLIKFIYNICCYWEIHSFYLHALRIPMSALPYCTWQEVQARI

SEQ ID NO: 73137 - protein, 1367 aa, Homo sapiens
MGNSDSQYTLQGSKNHSNTITGAKQIPCSLKIRGIHAKEEKSLHGWGHGSNGAGYKSRSLARSCLSHFKSNQPYASRLGGPTCKVSRGVAYSTHRTNAPGKDFQGISAAFSTENGFHSVGHELADNHITSRDCNGHLLNCYGRNESIASTPPGEDRKSPRVLIKTLGKLDGCLRVEFHNGGNPSKVPAEDCSEPVQLLRYSPTLASETSPVPEARRGSSADSLPSHRPSPTDSRLRSSKGSSLSSESSWYDSPWGNAGELSEAEGSFLAPGMPDPSLHASFPPGDAKKPFNQSSSLSSLRELYKDANLGSLSPSGIRLSDEYMGTHASLSNRVSFASDIDVPSRVAHGDPIQYSSFTLPCRKPKAFVEDTAKKDSLKARMRRISDWTGSLSRKKRKLQEPRSKEGSDYFDSRSDGLNTDVQGSSQASAFLWSGGSTQILSQRSESTHAIGSDPLRQNIYENFMRELEMSRTNTENIETSTETAESSSESLSSLEQLDLLFEKEQGVVRKAGWLFFKPLVTVQKERKLELVARRKWKQYWVTLKGCTLLFYETYGKNSMDQSSAPRCALFAEDSIVQSVPEHPKKENVFCLSNSFGDVYLFQATSQTDLENWVTAVHSACASLFAKKHGKEDTLRLLKNQTKNLLQKIDMDSKMKKMAELQLSVVSDPKNRKAIENQIQQWEQNLEKFHMDLFRMRCYLASLQGGELPNPKSLLAAASRPSKLALGRLGILSVSSFHALVCSRDDSALRKRTLSLTQRGRNKKGIFSSLKGLDTLARKGKEKRPSITQVDELLHIYGSTVDGVPRDNAWEIQTYVHFQDNHGVTVGIKPEHRVEDILTLACKMRQLEPSHYGLQLRKLVDDNVEYCIPAPYEYMQQQVYDEIEVFPLNVYDVQLTKTGSVCDFGFAVTAQVDERQHLSRIFISDVLPDGLAYGEGLRKGNEIMTLNGEAVSDLDLKQMEALFSEKSVGLTLIARPPDTKATLCTSWSDSDLFSRDQKSLLPPPNQSQLLEEFLDNFKKNTANDFSNVPDITTGLKRSQTDGTLDQVSHREKMEQTFRSAEQITALCRSFNDSQANGMEGPRENQDPPPRSLARHLSDADRLRKVIQELVDTEKSYVKDLSCLFELYLEPLQNETFLTQDEMESLFGSLPEMLEFQKVFLETLEDGISASSDFNTLETPSQFRKLLFSLGGSFLYYADHFKLYSGFCANHIKVQKVLERAKTDKAFKAFLDARNPTKQHSSTLESYLIKPVQRVLKYPLLLKELVSLTDQESEEHYHLTEALKAMEKVASHINEMQKIYEDYGTVFDQLVAEQSGTEKEVTELSMGELLMHSTVSWLNPFLSLGKARKDLELTVFVFKRAVILVYKENC

SEQ ID NO: 73138 - protein, 51 aa, Homo sapiens
MDVEKLEKMRDHERKEETFTPMPSPYYMELTKLLLNHASDNIPKADEIRTL

SEQ ID NO: 73139 - protein, 122 aa, Homo sapiens
MAAAAARVVLSSAARRRLWGFSESLLIRGAAGRSLYFGENRLRSTQAATQVVLNVPETRVTCLESGLRVASEDSGLSTCTVGLWIDAGSRYENEKNNGTAHFLEHMAFKARHQEEIPVRSGT

SEQ ID NO: 73140 - protein, 191 aa, Homo sapiens
  MOD_RES (1)..(1): Any amino acid
XLRAITRPLGLSLPLTVRRLGTRAYALRPPREEVWVSGSRNARRTKCERLIFGTLYPAYSSYKAVKTKNVKEYVKWMMYWIVFAFFTTAETLTDIVLSWFPFYFELKIAFVIWLLSPYTKGSSVLYRKFVHPTLSNKEKEIDEYITQARDKSYETMMRVGKRGLNLAANAAVTAAAKGQGVLSEKLRSFSM

SEQ ID NO: 73141 - protein, 112 aa, Homo sapiens
MESQNLADFPRPVHHRIPNFKGASHAAEQLPRLQAFKTARTIKVNPDAPQKSARFFVLESKKTLLVPTPRLRTGLFNKITPPPGATKDILRKCATSQGVRNYSVPIGLDSRV

SEQ ID NO: 73142 - protein, 121 aa, Homo sapiens
MSARATRPRSRRGRHAPPGELDPVAESSEEVEAASGSSKPSFAPPPVSSGLEQLGPMEEVSGQGLGSRTDKKMDGGSGRELASAPEVPHKPAVEAHQAPEAALQYKETVPPGNGAPDVFQT

SEQ ID NO: 73143 - protein, 327 aa, Homo sapiens
MLGSLVLRRKALAPRLLLRLLRSPTLRGHGGASGRNVTTGSLGEPQWLRVATGGRPGTSPALFSGRGAATGGRQGGRFDTKCLAAATWGRLPGPEETLPGQDSWNGVPSRAGLGMCALAAALVVHCYSKSPSNKDAALLEAARANNMQEVSRLLSEGADVNAKHRLGWTALMVAAINRNNSVVQVLLAAGADPNLGDDFSSVYKTAKEQGIHSLEDGGQDGASRHITNQWTSALEFRRWLGLPAGVLITREDDFNNRLNNRASFKGCTALHYAVLADDYRTVKELLDGGSSRELSPHSPRHPSYTGINFSPRNLKCLWESRGELALT

SEQ ID NO: 73144 - protein, 17 aa, Homo sapiens
VMSIREMTQGWGSHMER

SEQ ID NO: 73145 - protein, 153 aa, Homo sapiens
MYKETVYSAFNLLMHYPPPSGAGQHPQPQPPLHKANQPPHGVPQLSLYEHFNSPHPTPAPADISQKQVHRPLQTPDLSGFYSLTSGSMGQLPHTVSWPSPPLYPLSPSCGYRQHFPAPTAAPGAPYPRFTHPSLMLGSGVPGHPAAIPHPAIV

SEQ ID NO: 73146 - protein, 416 aa, Homo sapiens
MAATTANPEMTSDVPSLGPAIASGNSGPGIQGGGAIVQRAIKRRPGLDFDDDGEGNSKFLRCDDDQMSNDKERFARSDDEQSSADKERLARENHSEIERRRRNKMTAYITELSDMVPTCSALARKPDKLTILRMAVSHMKSLRGTGNTSTDGSYKPSFLTDQELKHLILEAADGFLFIVSCETGRVVYVSDSVTPVLNQPQSEWFGSTLYDQVHPDDVDKLREQLSTSENALTGRILDLKTGTVKKEGQQSSMRMCMGSRRSFICRMRCGSSSVDPVSVNRLSFVRNRCRNGLGSVKDGEPHFVVVHCTGYIKAWPPAGVSLPDDDPEAGQGSKFCLVAIGRLQVTSSPNCTDMSNVCQPTEFISRHNIEGIFTFVDHRCVATVGYQPQELLGKNIVEFCHPEDQQLLRDSFQQEL

SEQ ID NO: 73147 - protein, 358 aa, Homo sapiens
MALFWCTEALPLAVTALFPLILFPMMGIVDASEVAVEYLKDSNLLFFGGLLVAIAVEHWNLHKRIALRVLLIVGVRPAPLILGFMLVTAFLSMWISNTATSAMMVPIAHAVLDQLHSSQASSNVEEGSNNPTFELQEPSPQKEVTKLDNGQALPVTSASSEGRAHLSQKHLHLTQCMSLCVCYSASIGGIATLTGTAPNLVLQGQINSLFPQNGNVVNFASWFSFAFPTMVILLLLAWLWLQILFLGFNFRKNFGIGEKMQEQQQAAYCVIQTEHRLLGPMTFAEKAISILFVILVLLWFTREPGFFWLGQFGFSQCQGGEVRVAGVGRRTHLGLTCSGRREGYRAPIAEQEVTLGGG

SEQ ID NO: 73148 - protein, 113 aa, Homo sapiens
MDHSCTRFIHRRGPPTRTRAGFKRGKRPRIQQRPRARVSGTIPASRLHPAPASQPGPCPAPGHCPVGPAHERPMGSSQEEGLRCQPSQPDHDADGHCGPDLEGAERASATPGP

SEQ ID NO: 73149 - protein, 326 aa, Homo sapiens
  MOD_RES (1)..(1): Any amino acid
XAYPKTLEDFRVKTCGGATVTIVSGLLMLLLFLSELQYYLTTEVHPELYVDKSRGDKLKINIDVLFPHMPCAWSQYLSLIFLLPDLSIDAMDVAGEQQLDVEHNLFKQRLDKDGIPVSSEAERHELGKVEVTVFDPDSLDPDRCESCYGAEAEDIKCCNTCEDVREAYRRRGWAFKNPDTIEQCRREGFSQKMQEQKNEGCQVYGFLEVNKVAGNFHFAPGKSFQQSHVHVHDLQSFGLDNINMTHYIQHLSFGEDYPGIVNPLDHTNVTAPQASMMFQYFVKVVPTVYMKVDGEVLRTNQFSVTRHEKVANGLLGDQGLPGVFVL

SEQ ID NO: 73150 - protein, 257 aa, Homo sapiens
MEEKDYSEADGLSERTTPSKAQKSPQKIAKKYKSAICRVTLLDASEYECEVEKHGRGQVLFDLVCEHLNLLEKDYFGLTFCDADSQKNWLDPSKEIKKQIRSSPWNFAFTVKFYPPDPAQLTEDITRYYLCLQLRADIITGRLPCSFVTHALLGSYAVQAELGDYDAEEHVGNYVSELRFAPNQTRELEERIMELHKTYRGMTPGEAEIHFLENAKKLSMYGVDLHHAKDSEGIDIMLGVCANGLLIYRDRLRINRF

SEQ ID NO: 73151 - protein, 114 aa, Homo sapiens
MMSSKPTSHAEVNETIPNPYPPSSFMAPGFQQPLGSINLENQAQGAQRAQPYGITSPGIFASSQPGQGNIQMINPSVGTAVMNFKEEAKALGVIQIMVGLMHIGFGIVLCLISF

SEQ ID NO: 73152 - protein, 107 aa, Homo sapiens
VRLVIVDGIAFPFRHDLDDLSLRTRLLNGLAQQMISLANNHRLAVILTNQMTTKIDRNQALLVPALGWQHCTSHPARRNAQYCFKSNLRDLEILLLLLHVHCKQKVP

SEQ ID NO: 73153 - protein, 136 aa, Homo sapiens
MTATEALLRVLLLLLAFGHSTYGAECFPACNPQNGFCEDDNVCRCQPGWQGPLCDQCVTSPGCLHGLCGEPGQCICTDGWDGELCDRGWHSPLFTSALRPYLPALAPTTSSQSPVAGVPHFLIPAHSVPCILKICL

SEQ ID NO: 73154 - protein, 752 aa, Homo sapiens
MDQREILQKFLDEAQSKKITKEEFANEFLKLKRQSTKYKADKTYPTTVAEKPKNIKKNRYKDILPYDYSRVELSLITSDEDSSYINANFIKGVYGPKAYIATQGPLSTTLLDFWRMIWEYSVLIIVMACMEYEMGKKKCERYWAEPGEMQLEFGPFSVSCEAEKRKSDYIIRTLKVKFNSETRTIYQFHYKNWPDHDVPSSIDPILELIWDVRCYQEDDSVPICIHCSAGCGRTGVICAIDYTWMLLKDGSQAKHCIPEKNHTLQADSYSPNLPKSTTKAAKMMNQQRTKMEIKESSSFDFRTSEISAKEELVLHPAKSSTSFDFLELNYSFDKNADTTMKWQTKAFPIVGEPLQKHQSLDLGSLLFEGCSNSKPVNAAGRYFNSKVPITRTKSTPFELIQQRETKEVDSKENFSYLESQPHDSCFVEMQAQKVMHVSSAELNYSLPYDSKHQIRNASNVKHHDSSALGVYSYIPLVENPYFSSWPPSGTSSKMSLDLPEKQDGTVFPSSLLPTSSTSLFSYYNSHDSLSLNSPTNISSLLNQESAVLATAPRIDDEIPPPLPVWTPESFIVVEEAGEFSPNVPKSLSSAVKVKIGTSLEWGGTSEPKKFDDSVILRPSKSVKLRSPKSELHQDRSSPPPPLPERTLESFFLADEDCMQAQSIETYSTSYPDTMENSTSSKQTLKTPGKSFTRSKSLKILRNMKKSICNSCPPNKPAESVQSNNSSSFLNFGFANRFSKPKGPRNPPPTWNI

SEQ ID NO: 73155 - protein, 71 aa, Homo sapiens
MAPAADREGYWGPTTSTLDWCEENYSVTWYIAEFLSNLIMIIPPMFGAVQSVRDGLEKRYIASYLALTAIG

SEQ ID NO: 73156 - protein, 36 aa, Homo sapiens
MFLQYYLNEQGDRVYTLKMTNTLDTESPSRNASRCS

SEQ ID NO: 73157 - protein, 202 aa, Homo sapiens
MGSRKKEIALQVNISTQELWEEMLSSKGLTVVDVYQGWCGPCKPVVSLFQKMRIEVGLDLLHFALAEADRLDVLEKYRGKCEPTFLFYAGGELVAVVRGANAPLLQKTILDQLEAEKKVLAEGRERKVIKDEALSDEDECVSHGKNNGEDEDMVSSERTCTLAIIKPDAVAHGKTDEIIMKIQEAGFEILTNEERTMTEAEV

SEQ ID NO: 73158 - protein, 1276 aa, Homo sapiens
LKERMDEPNAEQVYNPSQFENLRKFWDLEANSNSKDNDKNITTTSQKNSAPFNRQKHKEFSDIKLSGKNTHEAEVLLSPKKVMAREEMEKLNSKGILQVLPDEITFPLSPLRKYTYQLPGNESSKENVEKNTEGIVTPVFKEEKDYSEQEIQESIIKTNVLSKDCKDTFNDSLQKLLSETSTPAIQPSGGKVHGKQVLEPSVSENRTWPQKTDFADTEEEVKGPEKIINEHVDKTVVHPKVKRNSLTASLDKLLKEATGTSPSPLQAKLAPVITGTNSKLEEGRFFGKGIEQSHNTSADKREILAPFPVRDETFGNTALLKKAESGECQLSTQNLIQMAAEDSHPLDPTSQLSRKGSFGDVASPPQDMLFPQDAHLVPQARVHPSQTEISETVEKVILPPRPVLNDVSAALQKLCGEVWLSYPAGREVGPGEVNPEFPEAVQPVCSPLNPPGVISPWATMDTIVPDRKDFYSSNVVPDKTHEVGSYLAAQMSPSDQTLSSFASIVAQYGKGLPQEVEEIVRETIVQPKSEFLEFSAGLEKLLKEETETFPSKYESDTGNLSPSKLIGSTEEPRRATSECHPEELKETVEKAEAPLITESAFDAGFEKLLKEITEAPPYQPQVSVREETHEKESSQSEQTRFLGTVPHFYRAASQTSEMKDKSNGLESQVNQCDKMLGGDALVTDLLVDFCGSRSGVEIPRTPQLYVAHEIGTIKTVTPPEDRDSESGVAGGQGTLQEPGFGEASEAISVSRNRQPIPLLMNKENSTKTSKVELTLASPYMKQEKEEEKEGFSESDFSDGNTSSNAESWRNPSSSEEEPSPVLKTLERSAARKMPSKSLEDISSDSSNQAKVDNQPEELVRSAEDDEKPDQKPVTNECVPRISTVPTQPDNPFSHPDKLKRMSKSVPAFLQDESDDRETDTASESSYQLSRHKKSPSSLTNLSSSSGMTSLSSVSGSVMSVYSGDFGNLEVKGNIQFAIEYVESLKELHVFVAQCKDLAAADVKKQRSDPYVKAYLLPDKGKMGKKKTLVVKKTLNPVYNEILRYKIEKQILKTQKLNLSIWHRDTFKRNSFLGEVELDLETWDWDNKQNKQLRWYPLKRKTAPVALEAENRGEMKLALQYVPEPVPGKKLPTTGEVHIWVKECLDLPLLRGSHLNSFVKCTILPDTSRKSRQKTRAVGKTTNPIFNHTMVYDGFRPEDLMEACVELTVWDHYKLTNQFLGGLRIGFGTGKSYGTEVDWMDSTSEEVALWEKMVNSPNTWIEATLPLRMLLIAKISK

SEQ ID NO: 73159 - protein, 546 aa, Homo sapiens [sequence omitted]

SEQ ID NO: 73160 - protein, 188 aa, Homo sapiens
  MOD_RES (1)..(1): Any amino acid
XKPVTARAQLPRAAHTGGLGNAQTKQLQTAVSNVEKHFGELCQIFAAYVRKTARLRDKADLLVNEINAYAATETPHLKLGLMNFADEFAKLQDYRQAEVERLEAKVVEPLKTYGTIVKMKRDDLKATLTARNREAKQLTQLERTRQRNPSDRHVISQAETELQRAAMDASRTSRHLEETINNFERQKM

SEQ ID NO: 73161 - protein, 438 aa, Homo sapiens
MDTSPLCFSILLVLCIFIQSSALGQSLKPEPFGRRAQAVETNKTLHEMKTRFLLFGETNQGCQIRINHPDTLQECGFNSSLPLVMIIHGWSESVQLSRSHVHLIGYSLGAHVSGFAGSSIGGTHKIGRITGLDAAGPLFEGSAPSNRLSPDDANFVDAIHTFTREHMGLSVGIKQPIGHYDFYPNGGSFQPGCHFLELYRHIAQHGFNAITQTIKCSHERSVHLFIDSLLHAGTQSMAYPCGDMNSFSQGLCLSCKKGRCNTLGYHVRQEPRSKSKRLFLVTRAQSPFKVYHYQFKIQFINQTETPIQTTFTMSLLGTKEKMQKIPITLGKGIASNKTYSFLITLDVDIGELIMIKFKWENSAVWANVWDTVQTIIPWSTGPRHSGLVLKTIRVKAGETQQRMTFCSENTDDLLLRPTQEKIFVKCEIKSKTSKRKIR

SEQ ID NO: 73162 - protein, 174 aa, Homo sapiens
  MOD_RES (1)..(1): Any amino acid
XATPDGGPRATATKGAGVHSGERPPHSLSSNARTAVPSPVEAAAASDPAAARNGLAEGTEQEEEEEDEQAMVGEECVGAIVCKLDMHKKMFRRGYIAMLAVDSKYRRNGIGTNLVKKAIYAMVEGDCDEVVLETEITNKSALKLYENLGFVRDKRLFRYYLNGVDALRLKLWLR

SEQ ID NO: 73163 - protein, 128 aa, Homo sapiens
MKVWLLLGLLLVHEALEDVTGQHLPKNKRPKEPGENRIKPTNKKVKPKIPKMKDRDSANSAPKTQSIMMQVLDKGRFQKPAATLSLLAGQTVELRCKGSRIGWSYPAYLDTFKDSRLSVKQNERYGQL

SEQ ID NO: 73164 - protein, 205 aa, Homo sapiens
  MOD_RES (1)..(1): Any amino acid
XSGAGVAAGTRPPSSPTPGSRRRRQRPSVGVQSLRPQSPQLRQSDPQKRNLDLEKSLQFLQQQHSEMLAKLHEEIEHLKRENKGEPARGPRPALPPQAHSTLPLPQHRNTAINSSTRLGSGGTQDDLRYKLIMNQTSQKKDGPSGNHLSRASAPLGARWVCINGVWVEPGGPSPARLKEGSSRTHRPGGKHGRLAGGSADTVRSP

SEQ ID NO: 73165 - protein, 46 aa, Homo sapiens
SEAVYLNDSTYDGHTVGGLQYGGLGQLADGVVGLDDFRKSQELRVW

SEQ ID NO: 73166 - protein, 766 aa, Homo sapiens
MGVDFDVKTFCHNLRATKPPYECPVETCRKVYKSYSGIEYHLYHYDHDNPPPPQQTPLRKHKKKGRQSRPANKQSPSPSEVSQSPGREVMSYAQAQRMVEVDLHGRVHRISIFDNLDVVSEDEEAPEEAPENGSNKENTETPAATPKSGKHKNKEKRKDSNHHHHHNVSASTTPKLPEVVYRELEQDTPDAPPRPTSYYRYIEKSAEELDEEVEYDMDEEDYIWLDIMNERRKTEGVSPIPQEIFEYLMDRLEKESYFESHNKGDPNALVDEDAVCCICNDGECQNSNVILFCDMCNLAVHQECYGVPYIPEGQWLCRRCLQSPSRAVDCALCPNKGGAFKQTDDGRWAHVVCALWIPEVCFANTVFLEPIDSIEHIPPARWKLTCYICKQRGSGACIQCHKANCYTAFHVTCAQQAGLYMKMEPVRETGANGTSFSVRKTAYCDIHTPPGSARRLPALSHSEGEEDEDEEEDEGKGWSSEKVKKAKAKSRIKMKKARKILAEKRAAAPVVSVPCIPPHRLSKITNRLTIQRKSQFMQRLHSYWTLKRQSRNGVPLLRRLQTHLQSQRNCDQVGRDSEDKNWALKEQLKSWQRLRHDLERARLLVELIRKREKLKRETIKVQQIAMEMQLTPFLILLRKTLEQLQEKDTGNIFSEPVPLSEVPDYLDHIKKPMDFFTMKQNLEAYRYLNFDDFEEDFNLIVSNCLKYNAKDTIFYRAAVRLREQGGAVLRQARRQAEKMGIDFETGMHIPHSLAGDEATHHTEDGG

SEQ ID NO: 73167 - protein, 334 aa, Homo sapiens
MAGSADSYTSRPSDSDVSLEEDREAIRQEREQQAAIQLERAKSKPVAFAVKTNVSYCGALDEDVPVPSTAISFDAKDFLHIKEKYNNDWWIGRLVKEGCEIGFIPSPLRLENIRIQQEQKRGRFHGGKSSGNSSSSLGEMVSGTFRATPTSTAKQKQKVTEHIPPYDVVPSMRPVVLVGPSLKGYEEMFDVILDENQLEDACEHLGEYLEAYWRATHTTSSTPMTPLLGRNLGSTALSPYPTAISGLQSQRMRHSNHSTENSPIERRSLMTSDENYHNERARKSRNRLSSSSQHSRDHYPLVEEDYPDSYQDTYKPHRNRGSPGGYSHDSRHRL

SEQ ID NO: 73168 - protein, 85 aa, Homo sapiens
  MOD_RES (1)..(1): Any amino acid
XLKATPIERCLDQIPIFTVFQENHQVEKRKCNTATCATQRLANFLVHSSNNFGAILSSTNVGSNTYGKRNAVEVLKREPLNYLPL

SEQ ID NO: 73169 - protein, 360 aa, Homo sapiens
MRRALSWAAATPRSAPTLRNFRCDCGNSKFKNLECKLLPDKAKVNSGNKYNDNFFGLYCICKRPYPDPEDEIPDEMIQCVVCEDWFHGRHLGAIPPESGDFQEMVCQACMKRCSFLWAYAAQLAVTKISTEDDGLVRNIDGIGDQEVIKPENGEHQDSTLKEDVPEQGKDDVREVKVEQNSEPCAGSSSESDLQTVFKNESLNAESKSGCKLQELKAKQLIKKDTATYWPLNWRSKLCTCQDCMKMYGDLDVLFLTDEYDTVLAYENKGKIAQATDRSDPLMDTLSSMNRVQQVELICEYNDLKTELKDYLKRFADEGTVVKREDIQQFFEEFQKKEKKSGWDAVLLQLEWSMKLSHSSQ

SEQ ID NO: 73170 - protein, 254 aa, Homo sapiens
MSDDIDWLRSHRGVCKVDLYNPEGQQDQDRKVICFVDVSTLNVEDKDYKDAASSSSEGNLNLGSLEEKEIIVIKDTEKKDQSKTEGSVCLFKQAPSDPVSVLNWLLSDLQKYALGFQHALSPSTSTCKHKVGDTEGEYHRASSENCYSVYADQVNIDYLMNRPQNLRLEMTAAKNTNNNQSPSAPPAKPPSTQRAVISPDGECSIDDLSFYVNRLSSLVIQMAHKEIKEKLEGKSKCLHHSICPSPGNKERISP

SEQ ID NO: 73171 - protein, 121 aa, Homo sapiens
MAASVVCRAATAGAQVLLRARRSVRWECGLMLAAVLRLRRIMGQATFWSIWLSREQRIGLAVPWRRRWRAWGPILMPTAPGSTQLTTSRRCPRICRKLWSSWVTLCRTVVWKTHRLRRNVM

SEQ ID NO: 73172 - protein, 916 aa, Homo sapiens
MSSKKNRKRLNQSAENGSSLPSAASSCAEARAPSAGSDFAATSGTLTVTNLLEKDDKIPKTFQNSLIHLGLNTMKSANICIGRPVLLTSLNGKQEVYTAWPMAGFPGGKVGLSEMAQKNVGVRPGDAIQVQPLVGAVLQAEEMDVALSDKDMEINEEELTGCILRKLDGKIVLPGNFLYCTFYGRPYKLQVLRVKGADGMILGGPQSDSDTDAQRMAFEQSSMETSSLELSLQLSQLDLEDTQIPTSRSTPYKPIDDRITNKASDVLLDVTQSPGDGSGLMLEEVTGLKCNFESAREGNEQLTEEERLLKFSIGAKCNTDTFYFISSTTRVNFTEIDKNSKEQDNQFKVTYDMIGGLSSQLKAIREIIELPLKQPELFKSYGIPAPRGVLLYGPPGTGKTMIARAVANEVGAYVSVINGPEIISKFYGETEAKLRQIFAEATLRHPSIIFIDELDALCPKREGAQNEVEKRVVASLLTLMDGIGSEVSEGQVLVLGATNRPHALDAALRRPGRFDKEIEIGVPNAQDRLDILQKLLRRVPHLLTEAELLQLANSAHGYVGADLKVLCNEAAGTRILKAHMYVSAFATGLTQTPQGLCALRRILKKQPNLPDVKVAGLVKITLKDFLQAMNDIRPSAMREIAIDVPNVSWSDIGGLESIKLKLEQAVEWPLKHPESFIRMGIQPPKGVLLYGPPGCSKTMIAKALANESGLNFLAIKGPELMNKYVGESERAVRETFRKARAVAPSIIFFDELDALAVERGSSLGAGNVADRVLAQLLTEMDGIEQLKDVTILAATNRPDRIDKALMRPGRIDRIIYVPLPDAATRREIFKLQFHSMPVSNEVDLDELILQTDAYSGAEIVAVCREAALLALEEDIQANLIMKRHFTQALSTVTPRIPESLRRFYEDYQEKSGLHTL

SEQ ID NO: 73173 - protein, 159 aa, Homo sapiens
MSLWGLVSKMPPEKVQRLYVDFPQHLRHLLGDWLESQPWEFLVGSDAFCCNLASALLSDTVQHLQASVGEQGEGSTILQHISTLESIYQRDPLKLVATFRQILQGEKKAVMEQFRHLPMPFHWKQEELKFKTGLRRLQHRVGEIHLLREALQKGAEAGQ

SEQ ID NO: 73174 - protein, 152 aa, Homo sapiens
MHLGWNLPLTNNKMMSDASDMLAAALEQMDGIIAGSKALEYSNGIFDCQSPTSPFMGSLRALHLVEDLRGLLEMMETDEKEGLRCQIPDSTAETLVEWLQSQMTNGHLPGNGDVYQERLARLENDKESLVLQVSVLTDQVEAQGEKIRDLEF

SEQ ID NO: 73175 - protein, 88 aa, Homo sapiens [sequence omitted]

SEQ ID NO: 73176 - protein, 61 aa, Homo sapiens
MSSEDREAQEDELLALASIYDGDEFRKAESVQGGETRIYLDLPQNFKIFVSGNSNECLQNS

SEQ ID NO: 73177 - protein, 760 aa, Homo sapiens
MDELQLFRGDTVLLKGKKRREAVCIVLSDDTCSDEKIRMNRVVRNNLRVRLGDVISIQPCPDVKYGKRIHVLPIDDTVEGITGNLFEVYLKPYFLEAYRPIRKGDIFLVRGGMRAVEFKVVETDPSPYCIVAPDTVIHCEGEPIKREDEEESLNEVGYDDIGGCRKQLAQIKEMVELPLRHPALFKAIGVKPPRGILLYGPPGTGKTLIARAVANETGAFFFLINGPEIMSKLAGESESNLRKAFEEAEKNAPAIIFIDELDAIAPKREKTHGEVERRIVSQLLTLMDGLKQRAHVIVMAATNRPNSIDPALRRFGRFDREVDIGIPDATGRLEILQIHTKNMKLADDVDLEQVANETHGHVGADLAALCSEAALQAIRKKMDLIDLEDETIDAEVMNSLAVTMDDFRWALSQSNPSALRETVVEVPQVTWEDIGGLEDVKRELQELVQYPVEHPDKFLKFGMTPSKGVLFYGPPGCGKTLLAKAIANECQANFISIKGPELLTMWFGESEANVREIFDKARQAAPCVLFFDELDSIAKARGGNIGDGGGAADRVINQILTEMDGMSTKKNVFIIGATNRPDIIDPAILRPGRLDQLIYIPLPDEKSRVAILKANLRKSPVAKDVDLEFLAKMTNGFSGADLTEICQRACKLAIRESIESEIRRERERQTNPSAMVEEDDPVPEIRRDHFEEAMRFARRSVSDNDIRKYEMFAQTLQQSRGFGSFRFPSGNQGGAGPSQGSGGGTGGSVYTEDNDDDLYG

SEQ ID NO: 73178 - protein, 39 aa, Homo sapiens
MATGTGKHKLLSTGPTEPWSIREKLCLASSVMRSGDQNW

SEQ ID NO: 73179 - protein, 228 aa, Homo sapiens
  MOD_RES (1)..(1): Any amino acid
XGMIITIGQAIVYVMTGMYGDPAEMGAGICLLIIIQLFVAGLIVLLLDELLQKGYGLGSGISLFIATNICETIVWKAFSPTTINTGRGTEFEGAVIALFHLLATRTDKVRALREAFYRQNLPNLMNLIATVFVFAVVIYFQVAKQLKEQQMVMRGHRDTSMVHELNRYIPTAAAFGGLCIGALSVLADFLGAIGSGTGILLAVTIIYQYFEIFVKEQAEVGGMGALFF

SEQ ID NO: 73180 - protein, 452 aa, Homo sapiens
MPVAEAPQVAGGQGDGGDGEEAEPEGMFKACEDSKRKARGYLRLVPLFVLLALLVLASAGVLLWYFLGYKAEVMVSQVYSGSLRVLNRHFSQDLTRRESSAFRSETAKAQKMLKELITSTRLGTYYNSSSVYSFGEGPLTCFFWFILQIPEHRRLMLSPEVVQALLVEELLSTVNSSAAVPYRAEYEVDPEGLVILEASVKDIAALNSTLGCYRYSYVGQGQVLRLKGPDHLASSCLWHLQGPKDLMLKLRLEWTLAECRDRLAMYDVAGPLEKRLITSVYGCSRQEPVVEVLASGAIMAVVWKKGLHSYYDPFVLSVQPVVFQACEVNLTLDNRLDSQGVLSTPYFPSYYSPQTHCSWHLTVPSLDYGLALWFDAYALRRQKYDLPCTQGQWTIQNRRYHFLSSLWLPFLPPPPSLPSSIVTPSLEAQVPNLRGAARGASRGWGWCQACCP

SEQ ID NO: 73181 - protein, 55 aa, Homo sapiens
  MOD_RES (1)..(1): Any amino acid
XELHGFLFNDFLLLTYMVKQFAVSSGSEKLFSSKSNAQFKMYKTDRLGAEDQGGV

SEQ ID NO: 73182 - protein, 22 aa, Homo sapiens
MSENKRIEVLSNGSLYISEVEG

SEQ ID NO: 73183 - protein, 157 aa, Homo sapiens
MRRQNVSNQQQNKHSQRVSFPPRTSFAGHLAGILVGLMYTQGPLKKIMEACAGGFSSSVGYPGRQYYFNSSGSSGYQDYYPHGRPDHYEEAPRNYDTYTAGLSEEEQLERALQASLWDRGKPGHKETMASLLDPKIKVRTDKGPRCLGSLKQAAVWT

SEQ ID NO: 73184 - protein, 179 aa, Homo sapiens
  MOD_RES (1)..(1): Any amino acid
XGGDWEGGRSPFGLPYGSLRGRVVSTAQFRVPMPSASASRKSQEKPREIMDAAEDYAKERYGISSMIQSQEKPDRVLVRVRDLTIQKADEVVWVRARVHTSRAKGKQCFLVLRQQQFNVQALVAVGDHASKQMVKFAANINKESIVDVEGVVRKVNQKIGSCTQQDVELHVQKVSFFKI

SEQ ID NO: 73185 - protein, 64 aa, Homo sapiens
MMDKMRDNKYRSSETKRINIMLLSIVVAFAVCWLPLTIFNTVFDWNHQIIATCNHNLLFLLCHL

SEQ ID NO: 73186 - protein, 177 aa, Homo sapiens
  MOD_RES (1)..(1): Any amino acid
XQLGARTDRTGETALHLAARYARADAAKRLLDAGADTNAQDHSGRTPLHTAVTADAQGVFQILIRNRSTDLDARMADGSTALILAARLAVEGMVEELIASHADVNAVDELGKSALHWAAAVNNVEATLALLKNGANKDMQDSKVSPSPWSTGCQQWHSAIAIQPGQQSETLSKNKTK

SEQ ID NO: 73187 - protein, 134 aa, Homo sapiens
MTEVVPSSALSEVSLRLLCHDDIDTVKHLCGDWFPIEYPDSWYRDITSNKKFFSLAATYRGAIVGMIVAEIKNRTKIHKESPTDYIQHLGSALASLSPCSIPHRVYRQAHSLLCSFLPWSGISSKSGIEYSRTM

SEQ ID NO: 73188 - protein, 91 aa, Homo sapiens
MDEARDNACNDMGKMLQFVLPVATQIQQEVIKAYGFSCDGEGVLKFARLVKSYEAQDPEIASLSGKLKALFLPPMTLPPHGPAAGGSVAAS

SEQ ID NO: 73189 - protein, 153 aa, Homo sapiens
MAVAELYTQYNRVWIPDPEEVWKSAEIAKDYRVGDKVLRLLLEDGTELDYSVNPESLPPLRNPDILVGENDLTALSYLHEPAVLHNLRIRFAESKLIYTYSGIILVAMNPYKQLPIYGDAIIHAYSGQNMGDMDPHIFAVAEEAYKQMARWEI

SEQ ID NO: 73190 - protein, 56 aa, Homo sapiens
MVRWFHRDLSGLDAETLLKGRGVHGSFLARPSRKNQGDFSLSVRTATAPSSTSSTR

SEQ ID NO: 73191 - protein, 537 aa, Homo sapiens
MSSSGYPPNQGAFSTEQSRYPPHSVQYTFPNTRHQQEFAVPDYRSSHLEVSQASQLLQQQQQQQLRRRPSLLSEFHPGSDRPQERRTSYEPFHPGPSPVDHDSLESKRPRLEQVSDSHFQRVSAAVLPLVHPLPEGLRASADAKKDPAFGGKHEAPSSPISGQPCGDDQNASPSKLSKEELIQSMDRVDREIAKVEQQILKLKKKQQQLEEEAAKPPEPEKPVSPPPVEQKHRSIVQIIYDENRKKAEEAHKIFEGLGPKVELPLYNQPSDTKVYHENIKTGVPARRMMKNQVMRKKLILFFKRRNHARKQREQKICQRYDQLMEAWEKKVDRIENNPRRKAKESKTREYYEKQFPEIRKQREQQERFQRVGQRGAGLSATIARSEHEISEIIDGLSEQENNEKQMRQLSVIPPMMFDAEQRRVKFINMNGLMEDPMKVYKDRQFMNVWTDHEKEIFKDKFIQHPKNFGLIASYLERKSVPDCVLYYYLTKKNENYKALVRRNYGKRRGRNQQIARPSQEEKVEEKEEDKAEKTEKK

SEQ ID NO: 73192 - protein, 61 aa, Homo sapiens
MRLTRCQAALAAAITLNLLVLFYVSWLQHQPRNSRARGPRRASAAGPRVTVLVREFEAFDN

SEQ ID NO: 73193 - protein, 70 aa, Homo sapiens
MRYGNFIDKLRLFTRGGSGGMGYPRLGGEGGKGGDVWVVAQNRMTLKQLKDRYPRKRFVAGVGANSKRTQ

SEQ ID NO: 73194 - protein, 58 aa, Homo sapiens
MPGKHQHFQEPEVGCCGKYFLFGFNIVFWVSAGCWEPCSWLSASGPGVRRAFSRTSQR

SEQ ID NO: 73195 - protein, 84 aa, Homo sapiens
QQLERAKHKPVAFAVRTNVSYCGVLDEECPVQGSGVNFEAKDFLHIKENLGGPPCLSHSFALHPVISVLVPHTSLENRAPDFVP

SEQ ID NO: 73196 - protein, 1301 aa, Homo sapiens
MEMVGFLPKTRRQIFSLLSAILHLGNICYKKKTYRDDSIDICNPEVLPIVSELLEVKEEMLFEALVTRKTVTVGEKLILPYKLAEAVTVRNSMAKSLYSALFDWIVFRINHALLNSKDLEHNTKTLSIGVLDIFGFEDYENNSFEQFCINFANERLQHYFNQHIFKLEQEEYRTEGISWHNIDYIDNTCCINLISKKPTGLLHLLDEESNFPQATNQTLLDKFKHQHEDNSYIEFPAVMEPAFIIKHYAGKVKYGVKDFREKNTDHMRPDIVALLRSSKNAFISGMIGIDPVAVFRWAILRAFFRAMVAFREAGKRNIHRKTGHDDTAPCAILKSMDSFSFLQHPVHQRSLEILQRCKEEKYSKATNPDKLLSHIHLEMETRSILHQGITRKNPRTPLSDLQGMNALNEKNQHDTFDIAWNGRTGIRQSRLSSGTSLLDKDGIFANSTSSKLLERAHGILTRNKNFKSKPALPKHLLEVNSLKHLTRLTLQDRITKSLLHLHKKKKPPSISAQFQASLSKLMETLGQAEPYFVKCIRSNAEKLPLRFSDVLVLRQLRYTGMLETVRIRQSGYSSKYSFQDFVSHFHVLLPRNIIPSKFNIQDFFRKINLNPDNYQVGKTMVFLKEQERQHLQDLLHQEVLRRIILLQRWFRVLLCRQHFLHLRQASVIIQRFWRNYLNQKQVRDAAVQKDAFVMASAAALLQASWRAHLERQRYLELRAAAIVIQQKWRDYYRRRHMAAICIQARWKAYRESKRYQEQRKKIILLQSTCRGFRARQRFKALKEQRLRETKPEVGLVNIKGYGSLEIQGSDPSGWEDCSFDNRIKAIEECKSVIESNRISRESSVDCLKESPNKQQERAQSQSGVDLQEDVLVRERPRSLEDLHQKKVGRAKRESRRMRELEQAIFSLELLKVRSLGGISPSEDRRWSTELVPEGLQSPRGTPDSESSQGSLELLSYEESQKSKLESVISDEGDLQFPSPKISSSPKFDSRDNALSASNETSSAEHLKDGTMKEMVVCSSESITCKPQLKDSFISNSLPTFFYIPQQDPLKTNSQLDTSIQRNKLLENEDTAGEALTLDINRETRRYHCSGKDQIVPSLNTESSNPVLKKLEKLNTEKEERQKQLQQQNEKEMMEQIRQQTDILEKERKAFKTIEKPRIGECLVAPSSYQSKQRVERPSSLLSLNTSNKGELNVLGSLSLKDAALAQKDSSSAHLPPKDRPVTVFFERKGSPCQSSTVKELSKTDRMGTQLNVACKLSNNRISKREHFRPTQSYSHNSDDLSREGNARPIFFTPKDNMSIPL

SEQ ID NO: 73197 - protein, 224 aa, Homo sapiens
MLLLKKHTEDISSVYEIRERLGSGAFSEVVLAQERGSAHLVALKCIPKKALRGKEALVENEIAVLRRISHPNIVALEDVHESPSHLYLAMELVTGGELFDRIMERGSYTEKDASHLVGQVLGAVSYLHSLGIVHRDLKPENLLYATPFEDSKIMVSDFGLSKIQAGNMLGTACGTPGYVAPELLEQKPYGKAVDVWALGVISYILLCGYPPFYDESDPELFSQI

SEQ ID NO: 73198 - protein, 169 aa, Homo sapiens
MVQRYQSPVRVYKYPFELVMAAYEKRFPTCPQIPVFLGSEVLRESRSPDGAVHVVERSCRLRVDAPRLLRKIAGVEHVVFVQTNILNWKERTLLIEAHNETFANRVVVNEHCSYTVHPENEDWTCFEQSASLDIRSFFGFENALEKIAMKQYTANVKRGKEVIEHYLNE

SEQ ID NO: 73199 - protein, 230 aa, Homo sapiens
MSLLRSLRVFLVARTGSYPAGSLLRQSPQPRHTFYAGPRLSASASSKELLMKLRRKTGYSFVNCKKALETCGGDLKQAEIWLHKEAQKEGWSKAAKLQGRKTKEGLIGLLQEGNTTVLVEVNCETDFVSRNLKFQLLVQQVALGTMMHCQTLKDQPSAYSKGFLNSSELSGLPAGPDREGSLKDQLALAIGSQARNQPVKMGGSNPCLMIRIGVSGSRPLGSAFPNWSCL

SEQ ID NO: 73200 - protein, 138 aa, Homo sapiens
  MOD_RES (1)..(1): Any amino acid
XSEPQQEPCPYACVISLGDDSETDTEGDSESCSAREQECEVKLPFNAQRIISLSRNDFQSLLKMHKLTPEQLDCIHDIRRRSKNRIAAQRCRKRKLDCIQNLESEIEKLPTSHAPSWRLAGCPVLYQGMSDQQRGKSE

SEQ ID NO: 73201 - protein, 137 aa, Homo sapiens
MLTENGQVLSCGSNSFGQLGVPHGPRRCVVPQAIELHKEKVVCIAAGLRHAVAATASGIVFQWGTGLASCGRRLCPGQTLPLFFTAKEPSRVTGLENSKAMCVLAGSDHSASLTDAGEVYVWGSNKHGQLANEAAFL

SEQ ID NO: 73202 - protein, 48 aa, Homo sapiens
MTPPRLFWVWLLVAGTQGVNDGDMRLADGGATNQGRVEIFYRGPWPDL

SEQ ID NO: 73203 - protein, 498 aa, Homo sapiens
MAAGGDHGSPDSYRSPLASRYASPEMCFVFSDRYKFRTWRQLWLWLAEAEQTLGLPITDEQIQEMKSNLENIDFKMAAEEEKRLRHDVMAHVHTFGHCCPKAAGIIHLGATSCYVGDNTSLILSRGVIKAYCNLRLPGSDSSPVSVSQLARVISRLADFAKERASLPTLGFTHFQPAQLTTVGKRCCLWIQDLCMDLQNLKRVRDDLRFRGVKGTTGTQASFLQLFEGDDHKVEQLDKMVTEKAGFKRAFIITGQTYTRKVDIEVLSVLASLGASVHKICTDIRLLANLKEMEEPFEKQQIGSSAMPYKRNPMRSERCCSLARHLMTLVMDPLQTASVQWFERTLDDSANRRICLAEAFLTADTILNTLQNISEGLVVYPKVIERRIRQELPFMATENIIMAMVKAGGSRQDCHEKIRVLSQQAASVVKQEGGDNDLIERIQVDAYFSPIHSQLDHLLDPSSFTGRASQQVQRFLEEEVYPLLKPYESVMKVKAELCL

SEQ ID NO: 73204 - protein, 63 aa, Homo sapiens
MATGGYRTSSGLGGSTTDFLEEWKAKREKMRAKQNPPGPAPPGGGSSDAAGKPPAGALGTPAA

SEQ ID NO: 73205 - protein, 215 aa, Homo sapiens
MAHVGSRKRSRSRSRSRGRGSEKRKKKSRKDTSRNCSASTSQERSKQKARRRTRSSSSSSSSSSSSSSSSSSSSSSSSSDGRKKRGKYKDKRRKKKKKRKKLKKKGKEKAEAQQVEALPGPSLDQWHRSAGEEEDGPVLTDEQKSRIQAMKPMTKEEWDARQSIIRKVVDPETGRTRLIKGDGEVLEEIVTKERHREINKVGVAPLPAIRPQLCL

SEQ ID NO: 73206 - protein, 158 aa, Homo sapiens
MKLKGLGKRCKRREDLEIRFILIQNRAGKTRLAKWYMQFDDDEKQKLIEEVHAVVTVRDAKHTNFVEFRNFKIIYRRYAGLYFCICVDVNDNNLAYLEAIHNFVEVLNEYFHNVCELDLVFNFYKVYTVVDEMFLAGEIRETSQTKVLKQLLMLQSLE

SEQ ID NO: 73207 - protein, 303 aa, Homo sapiens
MRPVSVWQWSPWGLLLCLLCSSCLGSPSPSTGPEKKAGSQGLRFRLAGFPRKPYEGRVEIQRAGEWGTICDDDFTLQAAHILCRELGFTEATGWTHSAKYGPGTGRIWLDNLSCSGTEQSVTECASRGWGNSDCTHDEDAGVICKDQRLPGFSDSNVIEVEHHLQVEEVRIRPAVGWGRRPLPVTEGLVEVRLPDGWSQVCDKGWSAHNSHVVCGMLGFPSEKRVNAAFYRLLAQRQQHSFGLHGVACVGTEAHLSLCSLEFYRANDTARCPGGGPAVVSCVPGPVYAASSGQKKQQQSKPQG

SEQ ID NO: 73208 - protein, 263 aa, Homo sapiens
MSKLWRRGSTSGAMEAPEPGEALELSLAGAHGHGVHKKKHKKHKKKHKKKHHQEEDAGPTQPSPAKPQLKLKIKLGGQVLGTKSVPTFTVIPEGPRSPSPLMVVDNEEEPMEGVPLEQYRAWLDEDSNLSPSPLRDLSGGLGGQEEEEEQRWLDALEKGELDDNGDLKKEINERLLTARQRALLQKARSQPSPMLPLPVAEGCPPPALTEEMLLKREERARKRRLQAARRAEEHKNQTIERLTKTAATTSRAVPRSEQPALPL

SEQ ID NO: 73209 - protein, 53 aa, Homo sapiens
MDSELMHSIVGSYHKPPERVFVPSFTQNEPSQNCHPANLEVTSPKILHSPNSQ

SEQ ID NO: 73210 - protein, 703 aa, Homo sapiens
MAPPRNVVKIAIKMRDAIPQLIQLDQAKPLAAVLKEVCDAWSLTHSERYALQFADGHRRYITENDLEAEQLLGGLQSNSPEGRREALRRLVPLASDMIFAREVISRNGLQILGTIIEDGDDLGEVLALSLRAFSELMEHGVVSWETLSIPFVRKVVCYVNMNLMDASVPPLALGLLESVTLSSPALGQLVKSEVPLDRLLVHLQVMNQQLQTKAMALLTALLQGASPVERKHMLDYLWQRNLRQFIYKNIIHSAAPMGDEMAHHLYVLQALMLGLLEPRMRTPLDPYSQEQREQLQVLRQAAFEVEGESSGAGLSADRRRSLCAREFRKLGFSNSNPAQDLERVPPGLLALDNMLYFSRNAPSAYSRFVLENSSREDKHECPFARGSIQLTVLLCELLRVGEPCSETAQDFSPMFFGQDQSFHELFCVGIQLLNKTWKEMRATQEDFDKVMQVVREQLARTLALKPTSLELFRTKVNALTYGEVLRLRQTERLHQEGTLAPPILELREKLKPELMGLIRQQRLLRLCEGTLFRKISSRRRQDKLWFCCLSPNHKLLQYGDMEEGASPPTLESLPEQLPVADMRALLTGKDCPHVREKGSGKQNKDLYELAFSISYDRGEEEAYLNFIAPSKREFYLWTDGLSALLGSPMGSEQTRLDLEQLLTMETKLRLLELENVPIPERPPPVPPPPTNFNFCYDCSIAEP

SEQ ID NO: 73211 - protein, 137 aa, Homo sapiens
MAAARDPPEVSLREATQRKLRRFSELRGTREGTGVLLGNAEGGCFYVPGGKLVARGEFWDIVAITAADEKQELAYNQQLSEKLKRKELPLGVQYHVFVDPAGAKIGTRFMEMEDQHFVPFNVWKSYMEINGILLPSY

SEQ ID NO: 73212 - protein, 1016 aa, Homo sapiens
  MOD_RES (1)..(1): Any amino acid
XIPNDNISDEPSLCDCDVHKHNQNENLVPNNRVQIHRSPAQNLVGENNHDVDNSDLPVLSTDQDESLLLFEDVNTEFDDVSLSPLNSKSESLPVSDKTAISETPLVSQFLISDELLLDNNSELQDQITRDANSFKSRDQRGVQEEKVKNHEDIFDCSRDLFSVTFDLGFCSPDSDDEILEHTSDSNRPLDDLYGRYLEIKEISDANYVSNQALIPRDHSKNFTSGTVIIPSNEDMQNPNYVHLPLSAAKNEELLSPGYSQFSLPVQKKVMSTPLSKSNTLNSFSKIRKEILKTPDSSKEKVNLQRFKEALNSTFDYSEFSLEKSKSSGPMYLHKSCHSVEDGQLLTSNESEDDEIFRRKVKRAKGNVLNSPEDQKNSEVDSPLHAVKKRRFPINRSELSSSDESENFPKPCSQLEDFKVCNGNARRGIKVPKRQSHLKHVARKFLDDEAELSEEDAEYVSSDENDESENEQDSSLLDFLNDETQLSQAINDSEMRAIYMKSLRSPMMNNKYKMIHKTHKNINIFSQIPEQDETYLEDSFCVDEEESCKGQSSEEEVCVDFNLITDDCFANSKKYKTRRAVMLKEMMEQNCAHSKKKLSRIILPDDSSEEENNVNDKRESNIAVNPSTVKKNKQQDHCLNSVPSGSSAQSKVRSTPRVNPLAKQSKQTSLNLKDTISEVSDFKPQNHNEVQSTTPPFTTVDSQKDCRKFPVPQKRFGHLALMFPMPSASAKRGAHGPQDLADYFGKESWDGSALEDSSTSGASCSKSRPHLAGTHTSLRLPQEGKGTCILVGGHEITSGLEVISSLRAIHGLQVEVCPLNGCDYIVSNRMVVERRSQSEMLNSVNKNKFIEQIQHLQSMFERICVIVEKDREKTGDTSRMFRRTKSYDSLLTTLIGAGIRILFSSCQEETADLLKELSLVEQRKNVGIHVPTVVNSNKSEALQFYLSIPNISYITALNMCHQFSSVKRMANSSLQEISMYAQVTHQKAEEIYRYIHYVFDIQMLPNDLNQDRLKSDI

SEQ ID NO: 73213 - protein, 38 aa, Homo sapiens
MGLLAFLKTQFVLHLLVGFVFVVSGLVINFVQLCTLAL

SEQ ID NO: 73214 - protein, 68 aa, Homo sapiens
EKFKKAQELGATECLNPQDLKKPIQEVLFDMTDAGIDFCFEAIGNLDVLAGRADSTSLNWLLIIWQRS

SEQ ID NO: 73215 - protein, 407 aa, Homo sapiens
MREIVLTQIGQCGNQIGAKFWEVISDEHAIDSAGTYHGDSHLQLERINVYYNEASGQCGAGNNWAKGHYTEGAELMESVMDVVRKEAESCDCLQGFQLTHSLGGGTGSGMGTLLLSKIREEYPDRIINTFSILPSPKVSDTVVEPYNATLSVHQLIENADETFCIDNEALYDICSKTLKLPTPTYGDLNHLVSATMSGVTTCLRFPGQLNADLRKLAVNMVPFPRLHFFMPGFAPLTSRGSQQYRALTVAELTQQMFDAKNMMAACDPRHGRYLTAAAIFRGRMPMREVDEQMFNIQDKNSSYFADWLPNNVKTAVCDIPPRGLKMSATFIGNNTAIQELFKRVSEQFTAMFRRKAFLHWYTGEGMDEMEFTEAESNMNDLVSEYQQYQDATAEEEEDEEYAEEEVA

SEQ ID NO: 73216 - protein, 280 aa, Homo sapiens
MSGGFELQPRDGGPRVALAPGETVIGRGPLLGITDKRVSRRHAILEVAGGQLRIKPIHTNPCFYQSSEKSQLLPLKPNLWCYLNPGDSFSLLVDKYIFRILSIPSEVEMQCTLRNSQVLDEDNILNETPKSPVINLPHETTGASQLEGSTEIAKTQMTPTNSVSFLGENRDCNKQQPILAERKRILPTWMLAEHLSDQNLSVPAISGGNVIQGSGKEEICKDKSQLNTTQQGRRQLISSGSSENTSAEQDTGEECKNTDQEESTISSKMLIVKNGSIRSI

SEQ ID NO: 73217 - protein, 262 aa, Homo sapiens
MSGVVPTAPEQPAGEMENQTKPPDPRPDAPPEYNSHFLPGPPGTAVPPPTGYPGGLPMGYYSPQQPSTFPLYQPVGGIHPVRYQPGKYPMPNQSVPITWMPGPTPMANCPPGLEYLVQLDNIHVLQHFEPLEMMTCFETNNRYDIKNNSDQMVYIVTEDTDDFTRNAYRTLRPFVLRVTDCMGREIMTMQRPFRCTCCCFCCPSARQELEVQCPPGVTIGFVAEHWNLCRAVYSIQNEKKENVMRVRGPCSTYGCGSDSVFE

SEQ ID NO: 73218 - protein, 41 aa, Homo sapiens
MHSLATAADLALLPRLECSGVILAHRNLDLLGSVDSPTSAS

SEQ ID NO: 73219 - protein, 1322 aa, Homo sapiens
MKSCGVSLATAAAAAAAFGDEEKKMAAGKASGESEEASPSLTAEEREALGGLDSRLFGFVRFHEDGARTKALLGKAVRCYESLILKAEGKVESDFFCQLGHFNLLLEDYPKALSAYQRYYSLQSDYWKNAAFLYGLGLVYFHYNAFQWAIKAFQEVLYVDPSFCRAKEIHLRLGLMFKVNTDYESSLKHFQLALVDCNPCTLSNAEIQFHIAHLYETQRKYHSAKEAYEQLLQTENLSAQVKATVLQQLGWMHHTVDLLGDKATKESYAIQYLQKSLEADPNSGQSWYFLGRCYSSIGKVQDAFISYRQSIDKSEASADTWCSIGVLYQQQNQPMDALQAYICAVQLDHGHAAAWMDLGTLYESCNQPQDAIKCYLNATRSKSCSNTSALAARIKYLQNTSDNWSGGHAVSHPPVQQQAHSWCLTPQKLQMRPTGVAQVRSTGIPNGPTADSSLPTNSVSGQQPQLALTRVPSVSQPGVRPACPGQPLANGPFSAGHVPCSTSRTLGSTDTILIGNNHITGSGSNGNVPYLQRNALTLPHNRTNLTSSAEEPWKNQLSNSTQGLHKGQSSHSAGPNGERPLSSTGPSQHLQAAGSGIQNQNGHPTLPSNSVTQGAALNHLSSHTATSGGQQGITLTKESKPSGNILTVPETSRHTGETPNSTASVEGLPNHVHQMTADAVCSPSHGDSKSPGLLSSDNPQLSALLMGKANNNVGTGTCDKVNNIHPAVHTKTDNSVASSPSSAISTATPSPKSTEQTTTNSVTSLNSPHSGLHTINGEGMEESQSPMKTDLLLVNHKPSPQIIPSMSVSIYPSSAEVLKACRNLGKNGLSNSSILLDKCPPPRPPSSPYPPLPKDKLNPPTPSIYLENKRDAFFPPLHQFCTNPNNPVTVIRGLAGALKLDLGLFSTKTLVEANNEHMVEVRTQLLQPADENWDPTGTKKIWHCESNRSHTTIAKYAQYQASSFQESLREENEKRSHHKDHSDSESTSSDNSGRRRKGPFKTIKFGTNIDLSDDKKWKLQLHELTKLPAFVRVVSAGNLLSHVGHTILGMNTVQLYMKVPGSRTPGHQENNNFCSVNINIGPGDCEWFVVPEGYWGVLNDFCEKNNLNFLMGSWWPNLEDLYEANVPVYRFIQRPGDLVWINAGTVHWVQAIGWCNNIAWNVGPLTACQYKLAVERYEWNKLQSVKSIVPMVHLSWNMARNIKVSDPKLFEMIKYCLLRTLKQCQTLREALIAAGKEIIWHGRTKEEPAHYCSICEVEVFDLLFVTNESNSRKTYIVHCQDCARKTSGNLENFVVLEQYKMEDLMQVYDQFTLAPPLPSASS

SEQ ID NO: 73220 - protein, 145 aa, Homo sapiens
MKRVLVLLLAVAFGHALERGRDYEKNKVCKEFSHLGKEDFTSLSLVLYSRKFPSGTFEQVSQLVKEVVSLTEACCAEGADPDCYDTRTSALSAKSCESNSPFPVHPGTAECCTKEGLERKLCMAALKHQPQEFPTYVEPTNDEIC

SEQ ID NO: 73221 - protein, 81 aa, Homo sapiens
MILNSLSLCYHNKLILAPMVRVGTLPMRLLALDYGADIVYCEELIDLKMIQCKRVVNEVLSTVDFVAPDDRVVFRTCEREQ

SEQ ID NO: 73222 - protein, 28 aa, Homo sapiens
  MOD_RES (1)..(1): Any amino acid
XRNWIQTIMKHVHPTTAPDVTSSLNPGT

SEQ ID NO: 73223 - protein, 300 aa, Homo sapiens
IMSQWWRVGADAEAQRCHSNPRCCAFASNMPYVLLSSSVSFYLPLLVMLFVYARVFVVATRQLRLLRGELGRFPPEESPPAPSRSLAPAPVGTCAPPEGVPACGRRPARLLPLREHRALCTLGLIMGTFTLCWLPFFLANVLRALGGPSLVPGPAFLALNWLGYANSAFNPLIYCRSPDFRSAFRRLLCRCGRRLPPEPCAAARPALFPSGVPAARSSPAQPRLCQRLDGKQSLKEVVENIMLTKEKVKEKLQLLGTPGSWGHITEQSGTHGYLGLNCKGLGGWCPPFLTFGLYLSIKLH

SEQ ID NO: 73224 - protein, 42 aa, Homo sapiens
MASATEDPVLERYFKGHKAAITSLDLSPNGKQLGKGQADIKN

SEQ ID NO: 73225 - protein, 134 aa, Homo sapiens
MERKNPSRESPRRLSAKVGKGTEMKKVARQLGMAAAESDKDSGFSDGSSECLSSAEQMESEDMLSALGWSREDRPRQNSKTAKNAFPTLSPMVVMKNVLVKQGSSSSQLQSWTVQPSFEVISAQPQLLFLHPPV

SEQ ID NO: 73226 - protein, 171 aa, Homo sapiens
MGSPVHRVSLGDTWSRQMHPDIESERYMQSFDVERLTNILDGGAQNTALRRKVESIIHSYPEFSCKDNYFMTQNERYKAAMRRAFHIRLIARRLGWLEDGRELGYAYRALSGDVALNIHRVFVRALRSLGSEEQIAKWDPLCKNIQIIATYAQTELGHGTYLQGLETEATY

SEQ ID NO: 73227 - protein, 225 aa, Homo sapiens
MSVGFIGAGQLAFALAKGFTAAGVLAAHKIMASSPDMDLATVSALRKMGVKLTPHNKETVQHSDVLFLAVKPHIIPFILDEIGADIEDRHIVVSCAAGVTISSIEKKLSAFRPAPRVIRCMTNTPVVVREGATVYATGTHAQVEDGRLMEQLLSSVGFCTEVEEDLIDAVTGLSGSGPAYAFTALDALADGGVKMGLPRRLAVRLGAQALLGAAKMLLHSEQHPG

SEQ ID NO: 73228 - protein, 225 aa, Homo sapiens
MRPLLLLALLGWLLLAEAKGDAKPEAPCCQEGLRAGGSGSLHLGRDFTVLAGARGSPSPSVSSIPRFWIPGSDNLLVLTVATKETEGFRRFKRSAQFFNYKIQALGLGEDWNVEKGTSAGGGQKVRLLKKALEKHADKEDLVILFADSYDVLFASGPRELLKKFRQARSQVVFSAEELIYPDRRLETKYPVVSDGKRFLGSGGFIGYAPNLSKLVAEWEGQDSDS

SEQ ID NO: 73229 - protein, 113 aa, Homo sapiens
MSCQKAVLELNIGSQLGPKSPERTEGVTAFEDYGTGLLENQLSVGDFVKIQKAFEIAVAFTSKEVCFYDLLSKEEFACQYKLQGLKGTPICMDYWYDPLDANESILSFGDITG

SEQ ID NO: 73230 - protein, 198 aa, Homo sapiens
NLLLLDRNVDLLTPLATQLTYEGLIDEIYGIQNTSEDFFDKLTVEQEFMSGIDTDKVNNYIEDCIAQKHSLIKVLRLVCLQSVCNSGLKQKVLDYYKREILQTYGYEHILTLHNLEKAGLLKPQTGGRNNYPTIRKTLRLWMDDVNEQNPTDISYVYSGYAPLSVRLAQLLSRPGWRSIEEVLRILPGPHFEERQPLP

SEQ ID NO: 73231 - protein, 138 aa, Homo sapiens
MAARVLIIGSGGREHTLAWKLAQSHHVKQVLVAPGNAGTACSEKISNTAISISDHTALAQFCKEKKIEFVVVGPEAPLAAGIVGNLRSAGVQCFGPTAEAAQLESSKRFAKEFMDRHGIPTAQWKAFTKPEEACSFIL

SEQ ID NO: 73232 - protein, 60 aa, Homo sapiens
MEFYESAYFIVLIPSIVITVIFLFFWLFMKETLYDEVLAKQKREQKLIPTKTDKKKAEKK

SEQ ID NO: 73233 - protein, 81 aa, Homo sapiens
DYGSRTGSISSSVSVPAKPERRPSLPPSKQANKNLILKAISEAQESVTKTTNYSTETDTSSCSQNSNFSRRIASRSGPGTK

SEQ ID NO: 73234 - protein, 183 aa, Homo sapiens
MLPRVGGPGATSRERPWAASRGRLLLAEAHLTSRQLAPVLGYLGSRQKHSLPDLPYDYGALEPHINAQIMQLHHSKHHAAYVNNLNVTEEKYQEALAKGDVTAQIALQPALKFNGGGHINHSIFWTNLSPNGGGEPKGELLEAIKRDFGSFDKFKEKLTAASVGVQGSGWGWLGFNKERGHLQ

SEQ ID NO: 73235 - protein, 213 aa, Homo sapiens
MLSATRRACQLLLLHSLFPVPRMGNSASNIVSPQEALPGRKEQTPVAAKHHVNGNRTVEPFPEGTQMAVFGMGCFWGAERKFWVLKGVYSTQVGFAGGYTSNPTYKEVCSEKTGHAEVVRVVYQPEHMSFEELLKVFWENHDPTQGMRQGNDHGTQYRSAIYPTSAKQMEAALSSKENYQKLVLPCSSSAMLGLTAASSAQLAWVQPSSRKHY

SEQ ID NO: 73236 - protein, 613 aa, Homo sapiens
MGQALGIKSCDFQAARNNEEHHTKALSSRRLFVRRGQPFTIILYFRAPVRAFLPALKKVALTAQTEDAVFLKNEAQRMEYLLNQNGLIYLGTADCIQAESWDFGQFEGDVIDLSLRLLSKDKQVEKWSQPVHVARVLGALLHFLKEQRVLPTPQTQATQEGALLNKRRGSVPILRQWLTGRGRPVYDGQAWVLAAVACTVLRCLGIPARVVTTFASAQGTGGRLLIDEYYNEEGLQNGEGQRGRIWIFQTSTECWMTRPALPQGYDGWQILHPSAPNGGGVLGSCDLVPVRAVKEGTLGLTPAVSDLFAAINASCVVWKCCEDGTLELTDSNTKYVGNNISTKGVGSDRCEDITQNYKYPEGSLQEKEVLERVEKEKMEREKDNGIRPPSLETASPLYLLLKAPSSLPLRGDAQISVTLVNHSEQEKAVQLAIGVQAVHYNGVLAAKLWRKKLHLTLSANLEKIITIGLFFSNFERNPPENTFLRLTAMATHSESNLSCFAQEDIAICRPHLAIKMPEKAEQYQPLTASVSLQNSLDAPMEDCVISILGRGLIHRERSYRFRSVWPENTMCAKFQFTPTHVGLQRLTVEVDCNMFQNLTNYKSVTVVAPELSA

SEQ ID NO: 73237 - protein, 365 aa, Homo sapiens
MAWWKSWIEQEGVTVKSSSHFNPDPDAETLYKAMKGIGVGSQLLSHQAAAFAFPSSALTSVSPWGQQGHLCCNPAGTNEQAIIDVLTKRSNTQRQQIAKSFKAQFGKDLTETLKSELSGKFERLIVALMYPPYRYEAKELHDAMKGLGTKEGVIIEILASRTKNQLREIMKAYEEDYGSSLEEDIQADTSGYLERILVCLLQGSRDDVSSFVDPGLALQDAQDLYAAGEKIRGTDEMKFITILCTRSATHLLRVFEEYEKIANKSIEDSIKSETHGSLEEAMLTVVKCTQNLHSYFAERLYYAMKGAGTRDGTLIRNIVSRSEIDLNLIKCHFKKMYGKTLSSMIMEDTSGDYKNALLSLVGSDP

SEQ ID NO: 73238 - protein, 120 aa, Homo sapiens
MNYQEAAIYLQEGENNDKFFTHPKDAKALAAYLFAHNHLFYLMELATALLLLLLSLCEAPAVPALRLGIYVHATLELFALMVVVFELCMKLRWLGLHTFIRHKRTMVKTSVLVVQFVEAI

SEQ ID NO: 73239 - protein, 87 aa, Homo sapiens
MLENYGHLVSLGLSISKPDVVSLLEQGKEPWLGKREVKRDLFSVSESSGEIKDFSPKNVIYDDSSQYLIMERILSQGPVYSSFKGGW

SEQ ID NO: 73240 - protein, 302 aa, Homo sapiens
  MOD_RES (1)..(1): Any amino acid
XANSRLLEQLQEIGQEKEQLTQELQEARKSAEKRKAMLDELAMETLQEKSQHKEELGAVRLRHEKEVLGVRARYERELRELHEDKKRQEEELRGQIREEKARTRELETLQQTVEELQAQVHSMDGAKGWFERRLKEAEGKEEELQDVRDQLEQAQEERDCHLKTISSLKQEVKDTVDGQRILEKKGSAALKDLKRQLHLERKRADKLQERLQDILTNSKSRSGLEELVLSEMNSPSRTQTGDSSSISSFSYREILREKESSAVPARSLSSSPQAQPPRPAELSDEEVAELFQRLAETQQEKW

SEQ ID NO: 73241 - protein, 198 aa, Homo sapiens
MASAGAERRPGVQEATVVGQGQLTEEPGSAQTSECPVAGDQFLVPAHEARGTQSEDQRPAGAASESELQEEGPKLGEERPKPHAGALEERGPRPVVSIVRPRHGPKRKPVKSLSLPGLRAHLKAEAELPPKLPLQEEEPEDSQSEPSPSAKQHKKAKKRKSLGAPVLHAVASMVSAPLETLRLEPSALPWVFAGKAQR

SEQ ID NO: 73242 - protein, 630 aa, Homo sapiens
MPWEEPAGEKPSCSHSQKAFHMEPAQKPCFTTDMVTWALLCISAETVRGEAPSQPRGIPHRSPVSVDDLWLEKTQRKKLQKQAHVERRLHIGAVHKDGVKCWRKTIITSPESLNLPRRSHPLSQSAPTGLNHMGWPEHTPGTAMPDGALDTAVCADEVGSEEDLYDDLHSSSHHYSHPGGGGEQLAINELISDGSVVCAEALWDHVTMDDQELGFKAGDVIEVMDATNREWWWGRVADGEGWFPASFVRLRVNQDEPADDDAPLAGNSGAEDGGAEAQSSKDQMRTNVINEILSTERDYIKHLRDICEQADFQIYSEYCNNHPNACVELSRLTKLSKYVYFFEACRLLQKMIDISLDGFLLTPVQKICKYPLQLAELLKYTHPQHRDFKDVEAALHAMKNVAQLINERKRRLENIDKIAQWQSSIEDWEGEDLLVRSSELIYSGELTRVTQPQAKSQQRMFFLFDHQLIYCKKDLLRRDVLYYKGRLDMDGLEVVDLEDGKDRDLHVSIKNAFRLHRGATGDSHLLCTRKPEQKQRWLKAFAREREQVQLDQETGFSITELQRKQAMLNASKQQVTGKPKAVGRPCYLTRQKHPALPSNRPQQQVLVLAEPRRKPSTFWHSISRLAPFRK

SEQ ID NO: 73243 - protein, 43 aa, Homo sapiens
MAAAVAMETDDAGNRLRFQLELEFVQCLANPNYLNCTLSVYTC

SEQ ID NO: 73244 - protein, 64 aa, Homo sapiens
MVVLRSSLELHNHSAASATGSLDLSSDFLSLEHIGRRRLRSAGAAQKKPAATTAKAGAVGQTAG

SEQ ID NO: 73245 - protein, 154 aa, Homo sapiens
RGCTALELGAGTGLASIIAATMARTVYCTDVGADLLSMCQRNIALNSHLAATGGGIVRVKELDWLKDDLCTDPKVPFSWSQEEISDLYDHTTILFAAEVFYDDDLTDAVFKTLSRLAHRLKNACTAILSVEKSLCVRLAGLQAQLHIETLGRHM

SEQ ID NO: 73246 - protein, 163 aa, Homo sapiens
MSKPLEAEKQGLDSPSEHTDTERNGPDTNHQNPQNKTSPFSVSPTGPSTKIKAEDPSGDSAPAAPLPPQPAQPHLPQAQLMLTGSQLAGLTALMPAQQQLLLQQAQAQLLAAAVQQSSAAAAANAAAAAAAASASSSTSSSSSSSASSSTSQPPASSGGGDLP

SEQ ID NO: 73247 - protein, 416 aa, Homo sapiens
MTAVGVTRHKSKELSRKQSQQLELLESELRKEIRDGFAELQMDKLDVVDSFGTVPFLDYKHFALRTFFPESGGFTHIFTEDMHNRDANDKNESLTALDALICNKSFLVTVIHTLEKQKNFSVKDRCLFASFLTIALQTKLVYLTSILEVLTRDLMEQCSNMQPKLMLRRTESVVEKLLTNWMSVCLSGFLRETVGEPFYLLVTTLNQKINKGPVDVITCKALYTLNEDWLLWQVPEFSTVALNVVFEKIPENESADVCRNISVNVLDCDTIGQAKEKIFQAFLSKNGSPYGLQLNEIGLELQMGTRQKELLDIDSSSVILEDGITKLNTIGHYEISNGSTIKVFKKIANFTSDVEYSDDHCHLILPDSEAFQDVQGKRHRGKHKFKVKEMYLTKLLSTKPSSSLLGKHPEEPSVCL

SEQ ID NO: 73248 - protein, 1760 aa, Homo sapiens
MAKPTSKDSGLKEKFKILLGLGTPRPNPRSAEGKQTEFIITAEILRELSMECGLNNRIRMIGQICEVAKTKKFEEHAVEALWKAVADLLQPERPLEARHAVLALLKAIVQGQGERLGVLRALFFKVIKDYPSNEDLHERLEVFKALTDNGRHITYLEEELADFVLQWMDVGLSSEFLLVLVNLVKFNSCYLDEYIARMVQMICLLCVRTASSVDIEVSLQVLDAVVCYNCLPAESLPLFIVTLCRTINVKELCEPCWKLMRNLLGTHLGHSAIYNMCHLMEDRAYMEDAPLLRGAVFFVGMALWGAHRLYSLRNSPTSVLPSFYQAMACPNEVVSYEIVLSITRLIKKYRKELQVVAWDILLNIIERLLQQLQTLDSPELRTIVHDLLTTVEELCDQNEFHGSQERYFELVERCADQRPESSLLNLISYRAQSIHPAKDGWIQNLQALMERFFRSESRGAVRIKVLDVLSFVLLINRQFYEEELINSVVISQLSHIPEDKDHQVRKLATQLLVDLAEGCHTHHFNSLLDIIEKVMARSLSPPPELEERDVAAYSASLEDVKTAVLGLLVILQTKLYTLPASHATRVYEMLVSHIQLHYKHSYTLPIASSIRLQAFDFLLLLRADSLHRLGLPNKDGVVRFSPYCVCDYMEPERGSEKKTSGPLSPPTGPPGPAPAGPAVRLGSVPYSLLFRVLLQCLKQESDWKVLKLVLGRLPESLRYKVLIFTSPCSVDQLCSALCSMLSGPKTLERLRGAPEGFSRTDLHLAVVPVLTALISYHNYLDKTKQREMVYCLEQGLIHRCASQCVVALSICSVEMPDIIIKALPVLVVKLTHISATASMAVPLLEFLSTLARLPHLYRNFAAEQYASVFAISLPYTNPSKFNQYIVCLAHHVIAMWFIRCRLPFRKDFVPFITKGLRSNVLLSFDDTPEKDSFRARSTSLNERPKSRIQTSLTSASLGSADENSVAQADDSLKNLHLELTETCLDMMARYVFSNFTAVPKRSPVGEFLLAGGRTKTWLVGNKLVTVTTSVGTGTRSLLGLDSGELQSGPESSSSPGVHVRQTKEAPAKLESQAGQQVSRGARDRVRSMSGGHGLRVGALDVPASQFLGSATSPGPRTAPAAKPEKASAGTRVPVQEKTNLAAYVPLLTQGWAEILVRRPTGNTSWLMSLENPLSPFSSDINNMPLQELSNALMAAERFKEHRDTALYKSLSVPAASTAKPPPLPRSNTVASFSSLYQSSCQGQLHRSVSWADSAVVMEEGSPGEVPVLVEPPGLEDVEAALGMDRRTDAYSRSSSVSSQEEKSLHAEELVGRGIPIERVVSSEGGRPSVDLSFQPSQPLSKSSSSPELQTLQDILGDPGDKADVGRLSPEVKARSQSGTLDGESAAWSASGEDSRGQPEGPLPSSSPRSPSGLRPRGYTISDSAPSRRGKRVERDALKSRATASNAEKVPGINPSFVFLQLYHSPFFGDESNKPILLPNESQSFERSVQLLDQIPSYDTHKIAVLYVGEGQSNSELAILSNEHGSYRYTEFLTGLGRLIELKDCQPDKVYLGGLDVCGEDGQFTYCWHDDIMQAVFHIATLMPTKDVDKHRCDKKRHLGNDFVSIVYNDSGEDFKLGTIKGQFNFVHVIVTPLDYECNLVSLQCRKDMEGLVDTSVAKIVSDRNLPFVARQMALHANVHHSRSNPTDIYPSKWIARLRHIKRLRQRICEEAAYSNPSLPLVHPPSHSKAPAQTPAEPTPGYEVGQRKRLISSVEDFTEFV

SEQ ID NO: 73249 - protein, 121 aa, Homo sapiens
SLKTPLTIGAEKLAEVQQMLQVSKKRLISVKNYRMIKKRKGLRLIDALVEEKLLSEETECLLRAQFSDFKWELYNWRETDEYSAEMKQFACTLYLCSSKVYDYVRKILKLPHSSILRTSGQ

SEQ ID NO: 73250 - protein, 289 aa, Homo sapiens
MAIQQELEKEKQRVAQQKQQQLEQEQFHAFEEMIRNQELEKERLKIVQEFGKVDPGLGGPLVPDLEKPSLDVFPTLTVSSIQPSDCHTTVRPAKPPVVDRSLKPGALSNSESIPTIDGLRHVVVPGRLCPQFLQLASANTARGVETCGILCGKLMRNEFTITHVLIPKQSAGSDYCNTENEEELFLIQDQQGLITLGWIHTHPTQTAFLSSVDLHTHCSYQMMLPESVAIVCSPKFQETGFFKLTDHGLEEISSCRQKGFHPHSKDPPLFCSCSHVTVVDRAVTITDLR

SEQ ID NO: 73251 - protein, 107 aa, Homo sapiens
MNYQEAAIYLQEGENNDKFFTHPKDAKALAAYLFAHNHLFYLMELATALLLLLLSLCEAPAVPALRLGIYVHATLELFALMVVVFELCMKLRWLGLHTFIRHKRTMV

SEQ ID NO: 73252 - protein, 49 aa, Homo sapiens
MGMCSRQERIQKDIDVVIQKSRAEKDCLFADFRYSDSTFTFTYVGGPRR

SEQ ID NO: 73253 - protein, 199 aa, Homo sapiens
MSKAEWDTDQWKTENYINESTEAQSKQKEQKSSEDSYYRFNDLNYRWVSLDNWTYSKEFKIPFEISKWQKVNLILEGVDTVSKILFNEVTIGETDNMFNRYSFDITNVVRDVNSIELRFQSAVLYAAQQSKAHTRYQVPPDCPPLVQKGECHVNFVRKEQCSFSWDWGPSFPTQGIWKDVRIEAYNICHLNYFTFSPIY

SEQ ID NO: 73254 - protein, 131 aa, Homo sapiens
MNENIDILETAIKQAAEQGARIIVTPEDALYGWKFTRETVFPYLEDIPDPQVNWIPCQDPHRFGHTPVQARLSCLAKDNSIYVLANLGDKKPCNSRDSTCPPNGYFQYNTNVVYNTEGKLVARYHKVGKSH

SEQ ID NO: 73255 - protein, 211 aa, Homo sapiens
VSEPEPEGLPEACDDLELADDNLKEGTICTESSQQEPITKSGFTRLSSSPCYYFYQDGQHMFLHPVNVRCLVREYGSLERSPEKISATVVEIAGYSMSEDVRQRHRYLSHLPLTCEFSICELALQPPVVSKETLEMFSDDIEKRKRQRQKKAREERRRERRIEIEENKKQGKYPEVHIPLENLQQFPAFNSYTCSSDSALGPTSTEGHGAL

SEQ ID NO: 73256 - protein, 129 aa, Homo sapiens
  MOD_RES (1)..(1): Any amino acid
XPHHDDLYLNASSFLALINGERDHPNATVWRKNFLRVGHLVLIGGPDDGVITPWQSSFFGFYDANETVLEMEEQLPARPTHQSELLLLRLVCLKPPRRKKPGGNGEREEACRVQRQSESWGPGLSCALS

SEQ ID NO: 73257 - protein, 138 aa, Homo sapiens
MAGASVKVAVRVRPFNARETSQDAKCVVSMQGNTTSIINPKQSKDAPKSFTFDYSYWSHTSTEDPQFASQQQVYRDIGEEMLLHAFEGYNVCIFAYGQTGAGKSYTMMGRQEPGQQGIVPQLCEDLFSRVSENQSAQL

SEQ ID NO: 73258 - protein, 141 aa, Homo sapiens
MNGQLDLSGKLIIKAQLGEDIRRIPIHNEDITYDELVLMMQRVFRGKLLSNDEVTIKYKDEDGDLITIFDSSDLSFAIQCSRILKLTLFVNGQPRPLESSQVKYLRRELIELRNKVNRLLDSLEPPGEPGPSTNIPENGKP

SEQ ID NO: 73259 - protein, 159 aa, Homo sapiens
MELKVWVDGVQRIVCGVTEVTTCQEVVIALAQAIGRTGRYTLIEKWRDTERHLAPHENPIISLNKWGQYASDVQLILRRTGPSLSERPTSDSVARIPERTLYRQSLPPLAKLRPQIDKSIKRREPKRKSLTFTGGAKGLMDIFGKGKETEFKQKVLNNC

SEQ ID NO: 73260 - protein, 450 aa, Homo sapiens
MASSEVARHLLFQSHMATKTTCMSSQGSDDEQIKRENIRSLTMSGHVGFESLPDQLVNRSIQQGFCFNILCVGETGIGKSTLIDTLFNTNFEDYESSHFCPNVKLKAQTYELQESNVQLKLTIVNTVGFGDQINKEESYQPIVDYIDAQFEAYLQEELKIKRSLFTYHDSRIHVCLYFISPTGHSLKTLDLLTMKNLDSKVNIIPVIAKADTVSKTELQKFKIKLMSELVSNGVQIYQFPTDDDTIAKVNAAMNGQLPFAVVGSMDEVKVGNKMVKARQYPWGVVQVENENHCDFVKLREMLICTNMEDLREQTHTRHYELYRRCKLEEMGFTDVGPENKPVSVQETYEAKRHEFHGERQRKEEEMKQMFVQRVKEKEAILKEAERELQAKFEHLKRLHQEERMKLEEKRRLLEEEIIAFSKKKATSEIFHSQSFLATGSNLRKDKDRKK

SEQ ID NO: 73261 - protein, 25 aa, Homo sapiens
MDAIHIGMSSTPLVKHTAGAGLKAN

SEQ ID NO: 73262 - protein, 43 aa, Homo sapiens
MRQHRQFMDRTHYLLTFSSSETLLRLLLRQESRKKLGTHSRTW

SEQ ID NO: 73263 - protein, 318 aa, Homo sapiens
MAAAMPLALLVLLLLGPGGWCLAEPPRDSLREELVITPLPSGDVAATFQFRTRWDSELQREGVWINLGRSSVMSSQGSSAPLSTSSTPPTQSLPLPPSNPWVWPMAGLSVLLKADRLFHTSYHSQAVHIRPVCRNARCTSISWELRQTLSVVFDAFITGQGKKDWSLFRMFSRTLTEPCPLASESRVYVDITTYNQDNETLEVHPPPTTTYQDVILGTRKTYAIYDLLDTAMINNSRNLNIQLKWKRPPENEAPPVPFLHAQRYVSGYGLQKGELSTLLYNTHPYRAFPVLLLDTVPWYLRLYVHTLTITSKGKENKP

SEQ ID NO: 73264 - protein, 265 aa, Homo sapiens
MTTSPILQLLLRLSLCGLLLQRAETGSKGQTAGELYQRWERYRRECQETLAAAEPPSGLACNGSFDMYVCWDYAAPNATARASCPWYLPWHHHVAAGFVLRQCGSDGQWGLWRDHTQCENPEKNEAFLDQRLILERLQVMYTVGYSLSLATLLLALLILSLFRRLHCTRNYIHINLFTSFMLRAAAILSRDRLLPRPGPYLGDQALALWNQALAACRTAQIVTQYCVGANYTWLLVEGVYLHSLLVLVGGSEEGHFRYYLLLGWD

SEQ ID NO: 73265 - protein, 77 aa, Homo sapiens
MVLLKLLEVYRKGSAGTFHKSTIFGNTIMTSQPVPNETIIVLPSNVINFSQAEKPEPTNQGQDSLKKHLHAEIKVIG

SEQ ID NO: 73266 - protein, 75 aa, Homo sapiens
MEENLISMREDHSFHVRYRMEASCLELALEGERLCKSGDCRAGVSFFEAAVQVGTEDLKTLSAIYSQLGNAYFYL

SEQ ID NO: 73267 - protein, 107 aa, Homo sapiens
MREQYMRTGDGFLIVYSVTDKASFEHVDRFHQLILRVKDRESFPMILVANKVDLMHLRKITREQGKEMATKHNIPYIETSAKDPPLNVDKAFHDLVRVIRQQIPEKS

SEQ ID NO: 73268 - protein, 125 aa, Homo sapiens [sequence omitted]

SEQ ID NO: 73269 - protein, 347 aa, Homo sapiens
MAAAEEEPKPKKLKVEAPQALRENILFGMGNPLLDISAVVDKDFLDKYSLKPNDQILAEDKHKELFDELVKKFKVEYHAGGSTQNSIKVAQWMIQQPHKAATFFGCIGIDKFGEILKRKAAEAHVDAHYYEQNEQPTGTCAACITGDNRSLIANLAAANCYKKEKHLDLEKNWMLVEKARVCYIAGFFLTVSPESVLKVAHHASENNRIFTLNLSAPFISQFYKESLMKVMPYVDILFGNETEAATFAREQGFETKDIKEIAKKTQALPKMNSKRQRIVIFTQGRDDTIMATESEVTAFAVLDQDQKEIIDTNGAGDAFVGGILIKAYKSSRKKHSKQLTVDVLGGG

SEQ ID NO: 73270 - protein, 551 aa, Homo sapiens
MPVRKQDTQRALHLLEEYRSKLSQTEDRQLRSSIERVINIFQSNLFQALIDIQEFYEVTLLDNPKCIDRSKPSEPIQPVNTWEISSLPSSTVTSETLPSSLSPSVEKYRYQDEDTPPQEHISPQITNEVIGPELVHVSEKNLSEIENVHGFVSHSHISPIKVNSVDLRAASHEQAAAALKNAGQAVTIVAQYRPEEYSRFEAKIHDLREQMMNSSISSGSGSLRTSQKRSLYVRALFDYDKTKDSGLPSQGLNFKFGDILHVINASDDEWWQARQVTPDGESDEVGVIPSKRRVEKKERARLKTVKFNSKTRDKGEIPDDMGSKGLKHVTSNASDSESSYRGQEEYVLSYEPVNQQEVNYTRPVIILGPMKDRINDDLISEFPDKFGSCVPHTTRPKRDYEVDGRDYHFVTSREQMEKDIQEHKFIEAGQYNNHLYGTSVQSVREVAEKGKHCILDVSGNAIKRLQIAQLYPISIFIKPKSMENIMEMNKRLTEEQARKTFERAMKLEQEFTEHFTAIVQGDTLEDIYNQVKQIIEEQSGSYIWVPAKEKL

SEQ ID NO: 73271 - protein, 93 aa, Homo sapiens
MQVHKETIDAVPNAIPGRTDIELEIYGMEGIPEKDMDERRRLLEQKTQESQKKKQQDDSDEYDDDDSAASTSFQPQPVQPQQGYIPPMAQPGL

SEQ ID NO: 73272 - protein, 713 aa, Homo sapiens
MVKLANPLYTEWILEAIQKIKKQKQRPSEERICHAVSTSHGLDKKTVSEQLELSVQDGSVLKVTNKGLASYKDPDNPGRFSSVKPGTFPKSAKGSRGSCNDLRNVDWNKLLRRAIEGLEEPNGSSLKNIEKYLRSQSDLTSTTNNPAFQQRLRLGAKRAVNNGRLLKDGPQYRVNYGSLDGKGAPQYPSAFPSSLPPVSLLPHEKDQPRADPIPICSFCLGTKESNREKKPEELLSCADCGSSGHPSCLKFCPELTTNVKALRWQCIECKTCSACRVQGRNADNMLFCDSCDRGFHMECCDPPLSRMPKDTEIKINIKQESADVNVIGNKDVVTEEDLDVFKQAQELSWEKIECESGVEDCGRYPSVIEFGKYEIQTWYSSPYPQEYARLPKLYLCEFCLKYMKSKNILLRHSKKCGWFHPPANEIYRRKDLSVFEVDGNMSKIYCQNLCLLAKLFLDHKTLYYDVEPFLFYVLTKNDEKGCHLVGYFSKEKLCQQKYNVSCIMIMPQHQRQGFGRFLIDFSYLLSRREGQAGSPEKPLSDLGRLSYLAYWKSVILEYLYHHHERHISIKAISRATGMCPHDIATTLQHLHMIDKRDGRFVIIRREKLILSHMEKLKTCSRANELDPDSLRWTPILISNAAVSEEEREAEKEAERLMEQASCWEKEEQEILSTRANSRQSPAKVQSKNKYLHSPESRPVTGERGQLLELSKES

SEQ ID NO: 73273 - protein, 117 aa, Homo sapiens
MVHSSMGAPEIRMSKPLEAEKQGLDSPSEHTDTERNGPDTNHQNPQNKTSPFSVSPTGPSTKIKAEDPSGDSAPAAPLPPQPAQPHLPQAQLMLTGSQLAGLHEVRLIVVSPEETEA

SEQ ID NO: 73274 - protein, 681 aa, Homo sapiens
  MOD_RES (1)..(1): Any amino acid
XDKSKGKAPEEDEEERRRRERDDQMYRERLRTLLVIAVVMSLLNALSTSGGSISWNDFVHEMLAKGEVQRVQVVPESDVVEVYLHPGAVVFGRPRLALMYRMQVANIDKFEEKLRAAEDELNIEAKDRIPVSYKRTGFFGNALYSVGMTAVGLAILWYVFRLAGMTGREGGFSAFLKMARFTIVDGKMGKGVSFKDVAGMHEAKLEVREFVDYLKSPERFLQLGAKVPKGALLLGPPGCGKTLLAKAVATEAQVPFLAMAGPEFVEVIGGLGAARVRSLFKEARARAPCIVYIDEIDAVGKKRSTTMSGFSNTEEEQTLNQLLVEMDGMGTTDHVIVLASTNRADILDGALMRPGRLDRHVFIDLPTLQERREIFEQHLKSLKLTQSSTFYSQRLAELTPGFSGADIANICNEAALHAAREGHTSVHTLNFEYAVERVLAGTAKKSKILSKEEQKVVAFHESGHALVGWMLEHTEAVMKVSITPRTNAALGFAQMLPRDQHLFTKEQLFERMCMALGGRASEALSFNEVTSGAQDDLRKVTRIAYSMVKQFGMAPGIGPISFPEAQEGLMGIGRRPFSQGLQQMMDHEARLLVAKAYRHTEKVLQDNLDKLQALANALLEKEVINYEDIEALIGPPPHGPKKMIAPQRWIDAQREKQDLGEEETEETQQPPLGGEEPTWPK

SEQ ID NO: 73275 - protein, 70 aa, Homo sapiens [sequence omitted]

SEQ ID NO: 73276 - protein, 263 aa, Homo sapiens
MGADGMYDKLRMLNGQTGSWGTRPGWYPGTSVPGQPTQDGCQQQEGGGENTNSISSNGEDSDEAQMRLQLKRKLQRNRTSFTQEQIEALEKEFERTHYPDVFARERLAAKIDLPEARIQVWFSNRRAKWRREEKLRNQRRQASNTPSHIPISSSFSTSVYQPIPQPTTPVSSFTSGSMLGRTDTALTNTYSALPPMPSFTMANNLPMQVSAAGGGLHNPGPREVRSGSGPADLIGCVCTLESFSHYSDWLDQSSRRQSIPSLL

SEQ ID NO: 73277 - protein, 790 aa, Homo sapiens
MSTRTPLPTVNERDTENHTSHGDGRQEVTSRTSRSGARCRNSIASCADEQPHIGNYRLLKTIGKGNFAKVKLARHILTGREVAIKIIDKTQLNPTSLQKLFREVRIMKILNHPNIVKLFEVIETEKTLYLIMEYASGGEVFDYLVAHGRMKEKEARSKFRQIVSAVQYCHQKRIVHRDLKAENLLLDADMNIKIADFGFSNEFTVGGKLDTFCGSPPYAAPELFQGKKYDGPEVDVWSLGVILYTLVSGSLPFDGQNLKELRERVLRGKYRIPFYMSTDCENLLKRFLVLNPIKRGTLEQIMKDRWINAGHEEDELKPFVEPELDISDQKRIDIMVGMGYSQEEIQESLSKMKYDEITATYLLLGRKSSELDASDSSSSSNLSLAKVRPSSDLNNSTGQSPHHKVQRSVSSSQKQRRYSDHAGPAIPSVVAYPKRSQTSTADSDLKEDGISSRKSSGSAVGGKGIAPASPMLGNASNPNKADIPERKKSSTVPSSNTASGGMTRRNTYVCSERTTADRHSVIQNGKENSLTEMFAYAASPASVCTSTCRLRHQKSMSMSASGHPKMMLPPIDSEGDNFKAITIPDQRTPVASTHSISSAATPDRIRFPRGTASRSTFHGQPRERRTATYNGPPASPSLSHEATPLSQTRSRGSTNLFSKLTSKLTRRNMSFRFIKSRNVSAEQKDENKEAKPRSLRFTWSMKTTSSMDPGDMMREIRKVLDANNCDYEQRERFLLFCVHGDGHAENLVQWEMEVCKLPRLSLNGVRFKRISGTSIAFKNIASKIANELKL

SEQ ID NO: 73278 - protein, 98 aa, Homo sapiens
ICIKYYKQNPLDEQHIFQLPVRPTAVKNLYQSEKPQKWRVEIYSGQKKIKTVWQLSDSSPIDHLNFHKPDFSELTLNGSLEERIFFTNMVTCSQVHFK

SEQ ID NO: 73279 - protein, 361 aa, Homo sapiens
MDDDDFGGFEAAETFDGGSGETQTTSPAIPWAAFPAVSGVHLSPSSPEIVLDRDHSSSIGCLSSDAIISSPENTHAANSIVSQTIPKAQIQQSTHTHLDISLFPLGLTDEKSNGTIALVDDSEDPGANVSNIQLQQKISSLEIKLKVSEEEKQRIKQDVESLMEKHNVLEKGFLKEKEQEAISFQDRYKELQEKHKQELEDMRKAGHEALSIIVDEYKALLQSSVKQQVEAIEKQYISAIEKQAHKCEELLNAQHQRLLEMLDTEKELLKEKIKEALIQQSQEQKEILEKCLEEERQRNKEALVSAAKLEKEAVKDAVLKVVEEERKNLEKAHAEERELWKTEHAKDQEKVSQEIQKAIQE

SEQ ID NO: 73280 - protein, 727 aa, Homo sapiens
  MOD_RES (1)..(1): Any amino acid
XQDITGDIYYFNFANGQSMWDHPCDEHYRSLVIQERAKLSTSGAIKKKKKKKEKKDKKDRDPPKSSLETQPEEGLLPPSSFLCSLSPPSAPGLADLDLDQEMQAISEGSYNKGKSPGMLGDTPWRFMGALPRKLQPLSKGQPSQIHQVFADMEKILGRAPAQCRRELGDQQGLEKLQKATEKIYLGFSDPETEELEMRSRQQKLGTPAPQNTGLLQNMQDVVESRNQASVHSKLSEAIKGLPLKGEQHSHSLAKLSPTGPGGDKGQSPIPMSSPEEEPSLSSCSSGHMLPARKSKLLLDSSPTEDLSWQGVPGEGGSIGSGRRRREPPGLWMEQVSKLVNKDIPGSCKETEPSDPEALGASAEDLPQGLLLIPPETLASEPAQNPLLGRAPEEPPASEKRQALGSAELPYKDQKPSLSGPDLESSSSSSSNSNLASHLGSPVLDEVNNFPWNLQSSRGSEEGMAQSDSGLRDQHFSPFLDPHMSHMQSPDEEQSESEDYSEDQRFYQHILQMVKISRWPEGLGLPESMQDMPCRHSASTVCCMAAESSRMSSEGEHEAIRVMERDSRFLSWEPELLEHPQEVALAPAWQEASQQAHFQPSSSTLRQGLVQQSSSRGLTTEPGKMQHLNQALGSSLAPVHVPLGGLAPLRGLVDTPPSALRGSQSVSLGSSVESGRQLGELMLPSQGLKTSAYTKGLLGSIYEDKTALSLLGLGEETNEEDEEESDNQ

SEQ ID NO: 73281 - protein, 49 aa, Homo sapiens
MEARSMLVPPQASVCFEDVAMAFTQEEWEQLDLAQRTLYREGFSFPNLM

SEQ ID NO: 73282 - protein, 171 aa, Homo sapiens
MADSGLDKKSTKCPDCSSASQKDVLCVCSSKTRVPPVLVVEMSQTSSIGSAESLISLERKKEKNINRDITSRKDLPSRTSNVERKASQQQWGRGNFTEGKVPHIRIENGAAIEEIYTFGRILGKGSFGIVIEATDKETETKWAIKKVNKEKAGSSAVKLLEREVNILKSVK

SEQ ID NO: 73283 - protein, 272 aa, Homo sapiens
MAAEEPQQQKQEPLGSDSEGVNCLAYDEAIMAQQDRIQQEIAVQNPLVSERLELSVLYKEYAEDDNIYQQKIKDLHKKYSYIRKTRPDGNCFYRAFGFSHLEALLDDSKELQRRFKAVSAKSKEDLVSQGFTEFTIEDFHNTFMDLIEQVEKQTSVADLLASFNDQSTSDYLVVYLRLLTSGYLQRESKFFEHFIEGGRTVKEFCQQEVEPMCKESDHIHIIALAQALSVSIQVEYMDRGEGGTTNPHIFPEGSEPKVYLLYRPGHYDILYK

SEQ ID NO: 73284 - protein, 130 aa, Homo sapiens
MPASRLRDRAASSASGSTCGSMSQTHPVLESGLLASAGCSAPRGPRKGGPAPVDRKAKASAMPDSPAEVKTQPRSTPPSMPPPPPAASQGATRPPSFTPHTLMNGSSHSPTAINGAPCTPNGFSNGPATS

SEQ ID NO: 73285 - protein, 107 aa, Homo sapiens
  MOD_RES (1)..(1): Any amino acid
XLAKAVATEAQVPFLAMAGPEFVEVIGGLGAARVRSLFKEARARAPCIVYIDEIDAVGKKRSTTMSGFSNTEEEQTLNQLLVEMDVFYAEIEELKLVYPYHGVLHSD

SEQ ID NO: 73286 - protein, 211 aa, Homo sapiens
MGCCTGRCSLICLCALQLVSALERQIFDFLGFQWAPILGNFLHIIVVILGLFGTIQYRPRYIMVYTVWTALWVTWNVFIICFYLEVGGLSKDTDLMTFNISVHRSWWREHGPGCVRRVLPPSAHGMMDDYTYVSVTGCIVDFQYLEVIHSAVQILLSLVGFVYACYVISISMEEEDTWCTSNMVPAPAQLLERTQEAFTHDGRQSGRRHIT

SEQ ID NO: 73287 - protein, 832 aa, Homo sapiens
MKIIFPILSNPVFRRTVKLLLCLLWIGYSQGTTHVLRFGGIFEYVESGPMGAEELAFRFAVNTINRNRTLLPNTTLTYDTQKINLYDSFEASKKACDQLSLGVAAIFGPSHSSSANAVQSICNALGVPHIQTRWKHQVSDNKDSFYVSLYPDFSSLSRAILDLVQFFKWKTVTVVYDDSTGLIRLQELIKAPSRYNLRLKIRQLPADTKDAKPLLKEMKRGKEFHVIFDCSHEMAAGILKQTDAALMYDAVHVVSVAVQQFPQMTVSSLQCNRHKPWRFGTRFMSLIKEAHWEGLTGRITFNKTNGLRTDFDLDVISLKEEGLEKIGTWDPASGLNMTESQKGKPANITDSLSNRSLIVTTILEEPYVLFKKSDKPLYGNDRFEGYCIDLLRELSTILGFTYEIRLVEDGKYGAQDDANGQWNGMVRELIDHKADLAVAPLAITYVREKVIDFSKPFMTLGISILYRKPNGTNPGVFSFLNPLSPDIWMYILLAYLGVSCVLFVIARFSPYEWYNPHPCNPDSDVVENNFTLLNSFWFGVGALMQQGSELMPKALSTRIVGGIWWFFTLIIISSYTANLAAFLTVERMESPIDSADDLAKQTKIEYGAVEDGATMTFFKKSKISTYDKMWAFMSSRRQSVLVKSNEEGIQRVLTSDYAFLMESTTIEFVTQRNCNLTQIGGLIDSKGYGVGTPMGSPYRDKITIAILQLQEEGKLHMMKEKWWRGNGCPEEESKEASALGVQNIGGIFIVLAAGLVLSVFVAVGEFLYKSKKNAQLEKRSFCSAMVEELRMSLKCQRRLKHKPQAPVIVKTEEVINMHTFNDRRLPGKETMA

SEQ ID NO: 73288 - protein, 259 aa, Homo sapiens
MREFLLLEYASGLFAHPSLWQLGVDYFDYCPELGRVSLELHIERIPLNTEQKALKVLRICEQRQMTEQVRSICKILAMKAVRNNRLGSALSWSIRAKDAAFATLVSDRFLRDYCERGCFSDLDLIDNLGPAMMLSDRLTFLGKYREFHRMYGEKRFADAASLLLSLMTSRIAPRSFWMTLLTDALPLLEQKQVIFSAEQTYELMRCLEDLTSRRPVHGESDTEQLQDDDIETTKVEMLRLSLARNLARAIIREGSLEGS

SEQ ID NO: 73289 - protein, 49 aa, Homo sapiens
MAGSSSLEAVRRKIRSLQEQADAAEERAGTLQRELDHERKLRETRHESH

SEQ ID NO: 73290 - protein, 82 aa, Homo sapiens
EDSQVDLNSKPSVEMETQNATTIPPYNPVDARFTSNFQAKDQALFPRLPSISSKLNYTSSQEKTQAIVTKSCCGIALTAECI

SEQ ID NO: 73291 - protein, 212 aa, Homo sapiens
MFGVTKFGDNIEDEWFIVYVIKQITKEFPELVARIEDNDGEFLLIEAADFLPKWLDPENSTNRVFFCHGELCIIPAPRKSGAESWLPTTPPTIPQALNIITAHSEKILASESIRAAVNRRIRGYPEKIQASLHRAHCFLPAGIVAVLKQRPRLVAAAVQAFYLRDPIDLRACRVFKTFLPETRIMTSVTFTKCLYAQLVQQRFVPDRRSGYR

SEQ ID NO: 73292 - protein, 141 aa, Homo sapiens
MSEDEEKVKLRRLEPAIQKFIKIVIPTDLERLRKHQINIEKYQRCRIWDKLHEEHINAGRTVQQLRSNIREIEKLCLKVRKDDLVLLKRMIDPVKEEASAATAEFLQLHLESVEELKKQFNDEETLLQPPLTRSMTVGGLN

SEQ ID NO: 73293 - protein, 190 aa, Homo sapiens
  MOD_RES (1)..(1): Any amino acid
XHTLRQAPQPQSSLQRGIPTSARSMLSNFAQAPQLSVPGGLLGMPGGPNVIMRVLKSGRGRWRGERDGEPETRCAGGRGHSQGCPASRNRKSPRRKRTTPVGSVSDVQSRALHFTPAFMRVYPRASSRRAGTLWCSQLCAQSRVWHRMGSQLMFVKGRRCRAWWLAPVIPAPDHLRSAWATGQNPISTKN

SEQ ID NO: 73294 - protein, 50 aa, Homo sapiens
LENYCHLISVGCHMTKPDVILKLERGEEPWTSFAGHTCLGGEDGLTGCLS

SEQ ID NO: 73295 - protein, 88 aa, Homo sapiens
  MOD_RES (1)..(1): Any amino acid
XNLEPFVTQEDSALELALHAGKLPFPPEQGDELPELDNMADNWLGSIARATMQTYCDAILQIPELSPHSAKQLATDIGSPGPAPEILT

SEQ ID NO: 73296 - protein, 128 aa, Homo sapiens
MDDLLAEMQQIEQSNFRQAPQRAPGVADLALSENWAQEFLAAGDAVDVTQDYNETDWSQEFISEVTDPLSVSPARWAEEYLEQSEEKLWLGEPEGTATDRWYDEYHPEEDLQHTASDFVAKVDDPKLA

SEQ ID NO: 73297 - protein, 146 aa, Homo sapiens
MQTCPLAFPGHVSQALGTLLFLAASLSAQNEGWDSPICTEGVVSVSWGENTVMSCNISNAFSHVNIKLRAHGQESAIFNEVAPGYFSRDGWQLQVQGGVAQLVIKGARDSHAGLYMWHLVGHQRNNRQVTLEVSEPRGLKDRASAQ

SEQ ID NO: 73298 - protein, 61 aa, Homo sapiens
MGGRSSCEDPGCPRDEERAPRQTKQNRSSLEVANLSQFPPEEDGVHEVQVPPGRRQYILKN

SEQ ID NO: 73299 - protein, 151 aa, Homo sapiens
MEFVNGGDLMFHIQKSRRFDEARARFYAAEIISALMFLHDKGIIYRDLKLDNVLLDHEGHCKLADFGMCKEGICNGVTTATFCGTPDYIAPEILQEMLYGPAVDWWAMGVLLYEMLCGHAPFEAENEDDLFEAILNDEVVYPTWLHEDATG

SEQ ID NO: 73300 - protein, 70 aa, Homo sapiens
WESRVTQYERDFERISTVVRKEVIRFEKEKSKDFKNHVIKYLETLLYSQQQAGEQLGIRSGILLTKKLPR

SEQ ID NO: 73301 - protein, 185 aa, Homo sapiens
MLPLEKAFASPRSSPAPPDLPTPGSAAGVQQEEPETIPERTPADLEFSRLRFREFVYQEAAGPHQTLARLHELCRQWLMPEARSKEQMLELLVLEQFLGILPDKVRPWVVAQYPESCKKAASLVEGLADVLEEPGMLLGSPAGSSSILSDGVYERHMDPLLLPGELASPSQALGAGEIPAPSETR

SEQ ID NO: 73302 - protein, 75 aa, Homo sapiens
HQSLFMSALSAHPDRSLSVCWEQHCKLLPGVAGISASTVAKWTIDEVFGFVQTLTGCEDQARLFKDESCLIIATE

SEQ ID NO: 73303 - protein, 315 aa, Homo sapiens
MGDRGSSRRRRTGSRPSSHGGGGPAAAEEEVRDAAAGPDVGAAGDAPAPAPNKDGDAGVGSGHWELRCHRLQDSLFSSDSGFSNYRGILNWCVVMLILSNARLFLENLIKYGILVDPIQVVSLFLKDPYSWPAPCLVIAANVFAVAAFQVEKRLAVGALTEQAGLLLHVANLATILCFPAAVVLLVESITPVGSLLALMAHTILFLKLFSYRDVNSWCRRARAKAAHASTGQQQVDGQDRGVPGLGLLPRVPGERPSANVPPLGVHGHDGSDPTGLVRGPLFPGQLWQRSCVAVAHHRTANSRPHVRPRLLRAQL

SEQ ID NO: 73304 - protein, 128 aa, Homo sapiens
  MOD_RES (1)..(1): Any amino acid
XFETQAADLAGGTTVAAGNLLNESEKDCGQDRRAPGVQPCRLVTMTSVVKTVYSLQPPSALSGGQPADTQTRATSKSLLPVRSKEVDVSKQLHSGGPENDVTKITKLRRENGQMKATDTATRRNVRKG

SEQ ID NO: 73305 - protein, 321 aa, Homo sapiens
RRNVELINEEAAMFDSLLMDSYVSSTTGESVITREMVEMLFSDDSDLQLATTQKFRKLLSKEPSPPIDEVINTPRVVDRFVEFLKRNENCTLQAVWALGNIAGDSSVCRDYVLNCSILNPLLTLLTKSTRLTMTRNAVWALSNLCRGKNPPPEFAKVSPCLPVLSRLLFSSDSDLLADACWALSYLSDGPNEKIQAVIDSGVCRRLVELLMHNDYKVASPALRAVGNIVTGDDIQTQVILNCSALPCLLHLLSSPKESIRKEACWTISNITAGNRAQIQAVIDANIFPVLIEILQKAEFRTRKEAAWAITNATSGGTPEQI

SEQ ID NO: 73306 - protein, 177 aa, Homo sapiens
  MOD_RES (1)..(1): Any amino acid
XPLEESASRAPSTWEESGLRYDKAYPGDRRLSSVMTIVKSRPFREKQGKILLEGRRLISDALKAGAVPKMFFFSRLEYLKELPVDKLKGVSLIKVKFEDIKDWSDLVTPQGIMGIFAKPDHVKMTYPKTQLQHSLPLLLICDNLRDPGNLGTILRSAAGAGCSKVLLTKGKDIKGQA

SEQ ID NO: 73307 - protein, 169 aa, Homo sapiens
MMTGTIETTGNISAEKGGSIILQCHLSSTTAQVTQVNWEQQDQLLAICNADLGWHISPSFKDRVAPGPGLGLTLQSLTVNDTGEYFCIYHTYPDGTYTGRIFLEVLESSVAEHGARFQIPLLGAMAATLVVICTAVIVVVALTRKKKALRIHSVEGDLRRKSAGQEEWS

SEQ ID NO: 73308 - protein, 164 aa, Homo sapiens
MEKRTAHEKEKYQPSYDTTILTECSPWPDAPTAYVNNSPSPAPTFTSPQQSTCSVPDSNSSSPNHQGDGASQTSGEQIQPSATIQETQQWLLKNRFSSYTRLFSNFSGADLLKLTKEDLVQICGAADGIRLYNSLKSRAGPDMMQALMRAEVDCKTGRNAHGQY

SEQ ID NO: 73309 - protein, 222 aa, Homo sapiens
  MOD_RES (1)..(1): Any amino acid
XRAHREIKDIFYKAIQKRRQSQEKIDDILQTLLDATYKDGRPLTDDEVAGMLIGLLLAGQHTSSTTSAWMGFFLARDKTLQKKCYLEQKTVCGENLPPLTYDQLKDLNLLDRCIKETLRLRPPIMIMMRMARTPQTVAGYTIPPGHQDNPASGEKFAYVPFGAGRHRCIGENFAYVQIKTIWSTMLRLYEFDLIDGYFPTVNYTTMIHTPENPVIRYKRRSK

SEQ ID NO: 73310 - protein, 63 aa, Homo sapiens
MAQGLVTFADVAIDFSQEEWACLNSAQRDLYWDVMLENYSNLVSLDLESAYENKSLPTEKNIH

SEQ ID NO: 73311 - protein, 47 aa, Homo sapiens
  MOD_RES (1)..(1): Any amino acid
XLISHPMLATFPMLLEQPDVMDALRSSWAGKESTLKRSEKVKYESPH

SEQ ID NO: 73312 - protein, 13 aa, Homo sapiens
MSCFISRHSIPSE

SEQ ID NO: 73313 - protein, 113 aa, Homo sapiens
MSQPRTPEQALDTPGDCPPGRRDEDAGEGIQCSQRMLSFSDALLSIIATVMILPVTHTEISPEQFDRSVQRLLATRIAVYLMTFLIVTVAWAAHTRLFQVVGKTDDTLALLNL

SEQ ID NO: 73314 - protein, 181 aa, Homo sapiens
MSHVAVENALGLDQQFAGLDLNSSDNQSGGSTASKGRYIPPHLRNREATKGFYDKDSSGWSSSKDKDAYSSFGSRSDSRGKSSFFSDRGSGSRGRFDDRGRSDYDGIGSRGDRSGFGKFERGGNSRWCDKSDEDDWSKPLPPSERLEQELFSGGNTGINFEKYDDIPVEATGNNCPPHIES

SEQ ID NO: 73315 - protein, 54 aa, Homo sapiens
MQPLEVFSPGTLYSWPWRSASAWLKPSYSSHLNTPCSSSAPEKHGSGSTGQGRP

SEQ ID NO: 73316 - protein, 200 aa, Homo sapiens
MEDSHKSTTSETAPQPGSAVQGAHISHIAQQVSSLSESEESQDSSDSIGSSQKAHGILARRPSYRKILKDLSSEDTRGRKGDGENSGVSAAVTSMSVPTPIYQTSSGQYIAIAPNGALQLASPGTDGVQGLQTLTMTNSGSTQQGTTILQYAQTSDGQQILVPSNQVVVQTASGDMQTYQIRTTPSATSLPQTVVMTSPV

SEQ ID NO: 73317 - protein, 123 aa, Homo sapiens
  MOD_RES (1)..(1): Any amino acid
XCAENNNNMAMLICLIIIAVLFLICTFLFLSTVVLANKVSSLRRSKQVGKRQPRSNGDFLASGLWPAESDTWKRTKQLTGPNLVMQSTGVLTATRERKDEEGTEKLTNKQIAKSPKCPVRTRI

SEQ ID NO: 73318 - protein, 689 aa, Homo sapiens
MRHIMTRLTLPFWLQDTRHQRQREKFKGPTRLSFGQVLSRPEVAGRAERMGQPSLTWMLMVVVASWFITTAATDTSEARWCSECHSNATCTEDEAVTTCTCQEGFTGDGLTCVDLDECAIPGAHNCSANSSCVNTPGSFSCVCPEGFRLSPGLGCTDVDECAEPGLSHCHALATCVNVVGSYLCVCPAGYRGDGWHCECSPGSCGPGLDCVPEGDALVCADPCQAHRTLDEYWRSTEYGEGYACDTDLRGWYRFVGQGGARMAETCVPVLRCNTAAPMWLNGTHPSSDEGIVSRKACAHWSGHCCLWDASVQVKACAGGYYVYNLTAPPECHLAYCTDPSSVEGTCEECSIDEDCKSNNGRWHCQCKQDFNITDISLLEHRLECGANDMKVSLGKCQLKSLGFDKVFMYLSDSRCSGFNDRDNRDWVSVVTPARDGPCGTVLTRNETHATYSNTLYLADEIIIRDLNIKINFACSYPLDMKVSLKTALQPMVSALNIRVGGTGMFTVRMALFQTPSYTQPYQGSSVTLSTEAFLYVGTMLDGGDLSRFALLMTNCYATPSSNATDPLKYFIIQDRCPHTRDSTIQVVENGESSQGRFSVQMFRFAGNYDLVYLHCEVYLCDTMNEKCKPTCSGTRFRSGSVIDQSRVLNLGPITRKGVQATVSRAFSSLGLLKVWLPLLLSATLTLTFQ

SEQ ID NO: 73319 - protein, 102 aa, Homo sapiens
MDRRNDYGYRVPLFQSKHLNGDERSGSNYRRIPWGRRPAPPRDVAILQERANKLVKYLLVKDQTKIPIKRSDMLRDVIQEYDEYFPEIIERASYTLEKMFRV

SEQ ID NO: 73320 - protein, 9 aa, Homo sapiens
MMDGPRSDV

SEQ ID NO: 73321 - protein, 101 aa, Homo sapiens
MELDSALEAPSQEDSNLSEELSHSAFGQAFSKILHCLARPEARRGNVKDAVLKDLGDLIEATEFDRLFEGTGARLRGMPETLGQVAKALEKYAAPSKEEEG

SEQ ID NO: 73322 - protein, 155 aa, Homo sapiens
MSGGRAPAVLLGGVASLLLSFVWMPALLPVASRLLLLPRVLLTMASGSPPTQPSPASDSGSGYVPGSVSAAFVTCPNEKVAKEIARAVVEKRLAACVNLIPQITSIYEWKGKIEEDSEVLMFCAPLRSGRGNCIACGTGELSVPAVGAPGHRVSF

SEQ ID NO: 73323 - protein, 63 aa, Homo sapiens
MEGDFSVCRNCKRHVVSANFTLHEAYCLRFLVLCPECEEPVPKETMEEHCKLEHQQAWRAVEN

SEQ ID NO: 73324 - protein, 85 aa, Homo sapiens
MNELMGPEAPGGEEAARADQREPAGAAAAAGGRRGAGQAGERRSAGADGAAGPGCAAGPGARARAAAGGSERALRCRLHPVHARG

SEQ ID NO: 73325 - protein, 98 aa, Homo sapiens
  MOD_RES (1)..(1): Any amino acid
XREGQSRAKVLSNMIKQKRKEKAGKWEVPLPKVRAQGETEVLKVIRTGKRKKKAWKRMVTKVCFVGDGFTRKPPKYERFIRPMENMPRLPTILKMMDV

SEQ ID NO: 73326 - protein, 259 aa, Homo sapiens
MLFGSEICKEGKCVNTQPGYECYCKQGFYYDGNLLECVDVDECLDESNCRNGVCENTRGGYRCACTPPAEYSPAQRQCLSPEEMERAPERRDVCWSQRGEDGMCAGPLAGPALTFDDCCCRQGRGWGAQCRPCPPRGAGSHCPTSQSESNSFWDTSPLLLGKPPRDEDSSEEDSDECRCVSGRCVPRPGGAVCECPGGFQLDASRARCVDIDECRELNQRGLLCKSERCVNTSGSFRCVCKAGFARSRPHGACVPQRRR

SEQ ID NO: 73327 - protein, 186 aa, Homo sapiens
MFPVFPCTLLAPPFPVLGLDSRGVGGLMNSFPPPQGHAQNPLQVGAELQSRFFASQGCAQSPFQAAPAPPPTPQAPAAEPLQVDLLPVLAAAQDGSGGSGSSGSSSSPSHSCGLPLGGGGGACELSATSLPTLVSSKLVAGERGEWSRVPWYKLLSPLFSHQLLFPYQPRSLQKERRKKCFLRGIR

SEQ ID NO: 73328 - protein, 438 aa, Homo sapiens
MAAVSPTTRCQESVTFEDVAVVFTDEEWSRLVPIQRDLYKEVMLENYNSIVSLGLPVPQPDVIFQLKRGDKPWMVDLHGSEEREWPESVSLAQEKNCICFLFVPDWETKPEIHDASDKKSEGSLRECLGRQSPLCPKFEVHTPNGRMGTEKQSPSGETRKKSLSRDKGLRRRSALSREILTKERHQECSDCGKTFFDHSSLTRHQRTHTGEKPYDCRECGKAFSHRSSLSRHLMSHTGESPYECSVCSKAFFDRSSLTVHQRIHTGEKPFQCNECGKAFFDRSSLTRHQRIHTGESPYECHQCGKAFSQKSILTRHQLIHTGRKPYECNECGKAFYGVSSLNRHQKAHAGDPRYQCNECGKAFFDRSSLTQHQKIHTGDKPYECSECGKAFSQRCRLTRHQRVHTGEKPFECTVCGKVFSSKSSVIQHQRRYAKQGID

SEQ ID NO: 73329 - protein, 191 aa, Homo sapiens
MTRTQKGKTFLPHCFYQSLPPRLGWGMILNYSKLKGKEECASVSSVPMVFFSSQYRLHRKSQYLKMAAANLTFSQEVVWQRGLPSIPYSQYSFDHLYNTNDIIHTPQIRKARPQKPVSFKFLGSSSPLTGDTSLAVKTESSANPEKKLKKSKPASTVREAPRPLIHHPCMHPDMLGRPPSLDVNLEEREAW

SEQ ID NO: 73330 - protein, 1930 aa, Homo sapiens
MEEGVQAPDWDSDETVIEGSVTESDLEEKELPWRRLLFDQDASLKSEFSLHPDTRGMCKGMPSPEIQLGFKLREDLQEQMNKNKMMPVLSEDTILQSQDETERNQALLQTRKNCSMFIGSFRQSGLSLNHQNIEGPEAESPEVLPHIEKELSEGRDSPEVSLLSGTAITVSDTVAVKETSLVEPEKILAAPNTFFEPRKEVTMTMTSEETKDEESSLETFVSALESLLTSPESTQEERLFELVSDFDRKELMNPLSDSLSSISIPLNSWSACHRDLLEDAKDDALPAELLEALNTLSEAKVETICHRKEGGSSLIARNECLEVEFNTSQTNEDCTQIAETLQDPNPSGLQTLAHQNITSCEPLSNKRNSNSVTNSSDQETACVLRRSSRLEKLKVSRDAKYSDHMYKMPEKILPKILGCEDLTNNNSSAQNFRMQDPALMIDGKEKNMHSARFKNGKQIRKNEQFSGKKEKMKVNKISLHSINRRNIFGENLVYKAALHDDADLVHHCIKKGGNVNQPSYAGWTALHEASVGGFYRTASELLKGGADVNIKGLYQITPLHDAVMNGHYKVAELLLLNGADPLFRNDDGKCALDEAKDLCMKRLLERYIPKHQKCLTSAQRSSIDPLDIEDVYQHKKPKFSSKSHIWHVYNENSNRQKLEHVKVNKGSKASLFINKEDVYEYYQKDPKNTKFGKSKHKQSTLDQIYSTGLRKGNLHNVKDPNTNVPKGIGRRKTQHKRTQVDDVDCNPRKILAVSPSRRINRLVTYQQHIPETHNDLPEELCEPSSLTLSSLRNGLDSSTEACSVSKEKHIQNLDLSDSQEVQCLELESVDQTEAVSFPGLLLHKEIKLPVVTTDKQPHTLQEQHHVLYKSHENSNLVPKDERFNKWENSFLSFVKENSDNDDDDDCSTSEKAITSKKVLCSTGGKKHYNFKENLTNKKEMGFQQFLLSEDHLSQENELKAVSLTTLPEQEAVNFSYSDNAVISEHVANYEQCIFGPSFDHSNGNPEQNSLACMRTLLTHEASKLTNHVELFKKPQDYIPRAPTFLMNQTDTHIVEKMAKNCDTERNYIDRDQKIIYSNEPLSIVAHSQVIETTKVEKRRQNHLESETIHNIDSHSTDNMSKELANISKLSQREKKEISHKPDEELTNNISGDEITIRNCEEIKEKTESEIHMPTNSQEHKTVQNFRKRQSFLKTTCNLGMKAGRINKRNARGESQLHLAVRRGNLPLVKALIESGADVNLNDNAGWTPLHEASNEGSIDIIVELLKAGAKVNCENIDGILPLHDAVANNHLKAAEILLQNGANPNQKDQKQKSALDEADDEKMKELLRSYGAIETVNRDESDAIVNEKIPAVRSKRHKQCFCDDGKTIDSSSLSHQERSRESLSVHQTLSAILQDIEEKQEYLLEFEIRNPEDAEQYIEKMLKIKKIMDNVLAKQKAERDDLAKKYRVSIESFKHGALREQLANLAARQKSLLVVAKKQKKISLKIQNCRNVTSLPCLSLRKLPPRSEISSEKDSQELTSLENLEHPQSGSLSPVSGSMQETQLSLETWNYSQNTNICLNSEAVRRGEFSGNDMNSKQNGSDCTLDGFPKSRHSDGTEKNKLPSQPVAFIGQTEYSQKENDLTEATDKDHEFYVSSPVIGKLNISETASVLAENAAHPSNIICDQDLSNYDPKRGNRKTSSQQSPTGASESLAHQGIAVLGSDTVHQMKPYLKKSVSVVPCADDSQISSSSGSGQQDTIKKALNYSTAPKKKCIQIKDLILLGRINPGNNILEFKTQETTHKASILLNGKLKVESGQIYKNPVTWLKDLLGGNSYVTWNYAWSKVTYLGKELLRYVSEDAPILPEPNSVPQQYQPCLPEVACLDDPVQEPNKSMFEKTKFGQGTSRESMQSSPRYLQINEILLISDQEFLPCHIMDQHWKFCVECEELTP

SEQ ID NO: 73331 - protein, 252 aa, Homo sapiens
MASLSRPSLPSCLCSFLLLLLLQVSSSYAGQFRVIGPRHPIRALVGDEVELPCRISPGKNATGMEVGWYRPPFSRVVHLYRNGKDQDGDQAPEYRGRTELLKDAIGEGKVTLRIRNVRFSDEGGFTCFFRDHSYQEEAAMELKVEDPFYWVSPGVLVLLAVLPVLLLQITLGLVFLCLQYRLRGKLRAEIENLHRTFDPHFLRVPCWKITLFVIVPVLGPLVALIICYNWLHRRLAGQFLEELLFHLEALSG

SEQ ID NO: 73332 - protein, 93 aa, Homo sapiens
MNRKWEAKLKQIEERASHYERKPLSSVYRPRLSKPEEPPSIWRLFHRQAQAFNFVKSCKEDVHVFALECKVGDGQRIYLVTTYAEFWFYYKSR

SEQ ID NO: 73333 - protein, 328 aa, Homo sapiens
  MOD_RES (1)..(1): Any amino acid
XLFAIIVGRGIRKWWQALPPNKKEVVKENIRKNKWKLFLGLSSFGLLFVVFYFTHLEVSPITGRSKLLLLGKEQFRLLSELEYEAWMEEFKNDMLTEKDARYLAVKEVLCHLIECNKDVPGISQINWVIHVVDSPIINAFVLPNGQMFVFTGFLNSVTDIHQLSFLLGHEIAHAVLGHAAEKAGMVHLLDFLGMIFLTMIWAICPRDSLALLCQWIQSKLQEYMFNRPYSRKLEAEADKIGLLLAAKACADIRASSVFWQQMEFVDSLHGQPKMPEWLSTHPSHGNRVEYLDRLIPQLVREEKFIEQPEQIAELTLNSFIQNTEICRS

SEQ ID NO: 73334 - protein, 140 aa, Homo sapiens
MKVTLSALDTSESSFTPLVVIELAQDVKEETKEWLKNRIIAKKKDGGAQLLFRPLLNKYEQETLENQNLYLVGASKIRMLLGAEAVGLVKECNDNTMRAFTYRTRQNFKGFDDNNDDFLTMAECQFIIKHELENLRAKDE

SEQ ID NO: 73335 - protein, 99 aa, Homo sapiens
MSRHLPWICDQRCSSPSSPGRWPPAARMWLPRFSSKTVTVLLLAQTTCLLLFIISRPGPSSPAGGEDRVHVLVLSSWRSGSSFLGQLFSQHPDVFYLME

SEQ ID NO: 73336 - protein, 102 aa, Homo sapiens
MCPKNASYYGNRAATLMMLGRFREALGDAQQSVRLDDSFVRGHLREGKCHLSLGNAMAACRSFQRALELDHKNAQAQQEFKNANAVMEYEKIAETDFEKRDF

SEQ ID NO: 73337 - protein, 180 aa, Homo sapiens
MNYARFITAASAARNPSPIRTMTDILSRGPKSMISLAGGLPNPNMFPFKTAVITVENGKTIQFGEEMMKRALQYSPSAGIPELLSWLKQLQIKLHNPPTIHYPPSQGQMDLCVTSGSQQGLCKVFEMIINPGDNVLLDEPAYSGTLQSLHPLGCNIINVASDESGIVPDSLRDILSRWKP

SEQ ID NO: 73338 - protein, 65 aa, Homo sapiens
MGDPERPEAAGLDQDEMESCSVTRPECSGVISAHCNLCLLGSSDSPASASRVAGTTEIIFRHQRK

SEQ ID NO: 73339 - protein, 298 aa, Homo sapiens
MSWLFGVNKGPKGEGAGPPPPLPPAQPGAEGGGDRGLGDRPAPKDKWSNFDPTGLERAAKAARELEHSRYAKEALNLAQMQEQTLQLEQQSKLKQLLNEENLRKQEESASEHRQTVLESIRTAGTLFGEGFRAFVTDRDKVTATVAGLTLLAVGVYSAKNATAVTGRFIEARLGKPSLVRETSRITVLEALRHPIQVSRRLLSRPQDVLEGVVLSPSLEARVRDIAIATRNTKKNRGLYRHILLYGPPGTGKTLFAKKLALHSGMDYAIMTGGDVAPMGREGVTAMHKLFDWANTSRR

SEQ ID NO: 73340 - protein, 595 aa, Homo sapiens
  MOD_RES (1)..(1): Any amino acid
XARRESNPFTEIAMSSCRYNGGVMRPLSNLSASRRNLHEMDSEAQPLQPPASVGGGGGASSPSAAAAAAAAVSSSAPEIVVSKPEHNNSNNLALYGTGGGGSTGGGGGGGGSGHGSSSGTKSSKKKNQNIGYKLGHRRALFEKRKRLSDYALIFGMFGIVVMVIETELSWGAYDKASLYSLALKCLISLSTIILLGLIIVYHAREIQLFMVDNGADDWRIAMTYERIFFICLEILVCAIHPIPGNYTFTWTARLAFSYAPSTTTADVDIILSIPMFLRLYLIARVMLLHSKLFTDASSRSIGALNKINFNTRFVMKTLMTICPGTVLLVFSISLWIIAAWTVRACERYHDQQDVTSNFLGAMWLISITFLSIGYGDMVPNTYCGKGVCLLTGIMGAGCTALVVAVVARKLELTKAEKHVHNFMMDTQLTKRVKNAAANVLRETWLIYKNTKLVKKIDHAKVRKHQRKFLQAIHQARKLRSVKMEQRKLNDQANTLVDLAKTQNIMYDMISDLNERSEDFEKRIVTLETKLETLIGSIHALPGLISQTIRQQQRDFIEAQMESYDKHVTYNAERSRSSSRRRRSSSTAPPTSSESS

SEQ ID NO: 73341 - protein, 130 aa, Homo sapiens
MGVMLSERKGTDELYAVKILKKDVVIQDDDVECTMVEKRVLALPGKPPFLTQLHSCFQTMDRLYFVMEYVNGGDLMYHIQQVGRFKEPHAVFYAAEIAIGLFFLQSKGIIYRDLKLDNVMLDSEGHIKIA

SEQ ID NO: 73342 - protein, 97 aa, Homo sapiens
  MOD_RES (1)..(1): Any amino acid
XGYGGGGPGYSGGSRGYGSGGQGYGNQGSGYGGSGSYDSYNNGGGGGFGGGSGSYNDFGNYNNQSSNFGPMKGGNFGGRSSGPYGGGGQYFAKPRNQ

SEQ ID NO: 73343 - protein, 82 aa, Homo sapiens
MGLPRRAGDAAELRKSLKPLLEKRRRARINQSLSQLKGLILPLLGRENSNCSKLEKADVLEMTVRFLQELPASSWPTAAPRE

SEQ ID NO: 73344 - protein, 325 aa, Homo sapiens
  MOD_RES (1)..(1): Any amino acid
XTPEKKAEEERDEEEDKRRKGEEVTPISAIRHEGKTDSERTDTAADGETTATEELEKTQDDLMKHQTNISELKRTFLETSTDTAVTNEWEKRLSTSPVRLAARQEDAPMIEPLVPEETKQSSGEKLMDGSEIFSLLESARKPTEFIGGVTSTSQSWVQKMETKTESSGIETEPTVHHLPLSTEKVVQETVLVEERRVVHASGDASYSAGDSGDAAAQPAFTGIKGKEGSALTEGAKEEGGEEVAKAVLEQEETAAASRERQEEQSAAIHISETLEQKPHFESSTVKTETISFGSVSPGGVKLEISTKEVPVVHTETKTITYESSQ

SEQ ID NO: 73345 - protein, 57 aa, Homo sapiens
MAEEVSTLMKATVLMRQPGRVQEIVGALRKGGGDRLQISQYGHAASSNWTEGAHTST

SEQ ID NO: 73346 - protein, 132 aa, Homo sapiens [sequence omitted]

SEQ ID NO: 73347 - protein, 450 aa, Homo sapiens
MQLPRWWELGDPCAWTGQGRGTRRMSPATTGTFLLTVYSIFSKVHSDRNVYPSAGVLFVHVLEREYFKGEFPPYPKPGEISNDPITFNTNLMGYPDRPGWLRYIQRTPYSDGVLYGSPTAENVGKPTIIEITAYNRRTFETARHNLIINIMSAEDFPLPYQAEFFIKNMNVEEMLASEVLGDFLGAVKNVWQPERLNAINITSALDRGGRVPLPINDLKEGVYVMVGADVPFSSCLREVENPQNQLRCSQEMEPVITCDKKFRTQFYIDWCKISLVDKTKQVSTYQEVIRGEGILPDGGEYKPPSDSLKSRDYYTDFLITLAVPSAVALVLFLILAYIMCCRREGVIQLVHHSAIQKSTKELRDMSKNREIAWPLSTLPVFHPVTGEIIPPLHTDNYDSTNMPLMQTQQNLPHQTQIPQQQTTDFRLTTFQRFEVNGIPEERKLTEAMNL

SEQ ID NO: 73348 - protein, 277 aa, Homo sapiens
MDCLCIVTTKANSPPVIVNTDTLEAPGYELQVNGTEGEMEYEEITLERGNSGLGFSIAGGTDNPHIGDDPSIFITKIIPGGAAAQDGRLRVNDSILFVNEVDVREVTHSAAVEALKEAGSIVRLYVMRRKPPAEKVMEIKLIKGPKGLGFSIAGGVGNQHIPGDNSIYVTKIIEGGAAHKDGRLQIGDKILAVNSVGLEDVMHEDAVAALKNTYDVVYLKVAKPSNAYLSDSYAPPDITTCESPSNTKVPHDPSRLTHDMQSHDIPVAVPLQIFPMK

SEQ ID NO: 73349 - protein, 133 aa, Homo sapiens
MAELQEVQITEEKPLLPGQTPEAAKTHSVETPYGSVTFTVYGTPKPKRPAILTYHDVGLNYKSCFQPLFQFEDMQEIIQNFVRVHVDAPGMEEGAPVFPLGYQYPSLDQLADMIPCVLQYLNFSTIIGVGVGA

SEQ ID NO: 73350 - protein, 98 aa, Homo sapiens
MRGHPSLLLLYMALTTCLDTSPSEETDQEVFLGPPEAQSFLSSHTRIPRANHWDLELLTPGNLERECLEERCSWEEAREYFEDNTLTERFWESYIYNG

SEQ ID NO: 73351 - protein, 960 aa, Homo sapiens
  MOD_RES (1)..(1): Any amino acid
XTGDEFLLLFTMASNHPAFSFHQKQVLRQELTQIQSSLNGGGGHGGKGAPGPGGALPTCPACHKITPRTEAPVSSVSNSLENALHTSAHSTEESLPKRPLGKHSKVSVEKIDLKGLSHTKNDRNVECSFEVLWSDSSITSVTKSSSEVTEFISKLCQLYPEENLEKLIPCLAGPDAFYVERNHVDLDSGLRYLASLPSHVLKNDHVRRFLSTSSPPQQLQSPSPGNPSLSKVGTVMGVSGRPVCGVAGIPSSQSGAQHHGQHPAGSAAPLPHCSHAGSAGSALAYRTQMDTSPAILMPSSLQTPQTQEQNGILDWLRKLRLHKYYPVFKQLSMEKFLSLTEEDLNKFESLTMGAKKKLKTQLELEKEKSERRCLNPSAPPLVTSSGVARVPPTSHVGPVQSGRGSHAAELRVEVEQPHHQLPREGSSSEYSSSSSSPMGVQAREESSDSAEENDRRVEIHLESSDKEKPVMLLNHFTSSSARPTAQVLPVQNEASSNPSGHHPLPPQMLSAASHITPIRMLNSVHKPERGSADMKLLSSSVHSLLSLEERNKGSGPRSSMKVDKSFGSAMMDVLPASAPHQPVQVLSGLSESSSMSPTVSFGPRTKVVHASTLDRVLKTAQQPALVVETSTAATGTPSTVLHAARPPIKLLLSSSVPADSAISGQTSCPNNVQISVPPAIINPRTALYTANTKVAFSAMSSMPVGPLQGGFCANSNTASPSSHPSTSFANMATLPSCPAPSSSPALSSVPESSFYSSSGGGGSTGNIPASNPNHHHHHHHQQPPAPPQPAPPPPGCIVCTSCGCSGSCGSSGLTVSYANYFQHPFSGPSVFTFPFLPFSPMCSSGYVSAQQYGGGSTFPVVHAPYSSSGTPDPVLSGQSTFAVPPMQNFMAGTAGVYQTQGLVGSSNGSSHKKSGNLSCYNCGATGHRAQDCKQPSMDFNRPGTFRLKYAPPAESLDSTD

SEQ ID NO: 73352 - protein, 608 aa, Homo sapiens
MITSAAGIISLLDEDEPQLKEFALHKLNAVVNDFWAEISESVDKIEVLYEDEGFRSRQFAALVASKVFYHLGAFEESLNYALGAGDLFNVNDNSEYVETIIAKCIDHYTKQCVENADLPEGEKKPIDQRLEGIVNKMFQRCLDDHKYKQAIGIALETRRLDVFEKTILESNDVPGMLAYSLKLCMSLMQNKQFRNKVLRVLVKIYMNLEKPDFINVCQCLIFLDDPQAVSDILEKLVKEDNLLMAYQICFDLYESASQQFLSSVIQNLRTVGTPIASVPGSTNTGTVPGSEKDSDSMETEEKTSSAFVGKTPEASPEPKDQTLKMIKILSGEMAIELHLQFLIRNNNTDLMILKNTKDAVRNSVCHTATVIANSFMHCGTTSDQFLRDNLEWLARATNWAKFTATASLGVIHKGHEKEALQLMATYLPKDTSPGSAYQEGGGLYALGLIHANHGGDIIDYLLNQLKNASNDIVRHGGSLGLGLAAMGTARQDVYDLLKTNLYQDDAVTGEAAGLALGLVMLGSKNAQAIEDMVGYAQETQHEKILRGLAVGIALVMYGRMEEADALIESLCRDKDPILRRSGMYTVAMAYCGSGNNKAIRRLLHVANP

SEQ ID NO: 73353 - protein, 109 aa, Homo sapiens
QLVETVSCGGNLLMNIGPTLDGTISVVFEERLRQMGSWLKVNGEAIYETHTWRSQNDTVTPDVWYTSKPKEKLVYAIFLKWPTSGQLFLGHPKAILGATEVRGNFTLFL

SEQ ID NO: 73354 - protein, 265 aa, Homo sapiens
MDASEEPLPPVIYTMENKPIVTCAGDQNLFTSVYPTLSQQLPREPMEWRRSYGRAPKMIHLESNFVQFKEELLPKEGNKALLTFPFLHIYWTECCDTEVYKATVKDDLTKWQNVLKAHSSVDWLIVIVENDAKKKNKTNILPRTSIVDKIRNDFCNKQSDRCVVLSDPLKDSSRTQESWNAFLTKLRTLLLMSFTKNLGKFEDDMRTLREKRTEPGWSFCEYFMVQEELAFVFEMLQQFEDALVQYDELDALFSQYVVNFGAGGA

SEQ ID NO: 73355 - protein, 57 aa, Homo sapiens
MSCKDGKASFTCTCKPGWQGEKCEFDINECKDPSNINGGCSQICDNTPGSYHCSCKN

SEQ ID NO: 73356 - protein, 117 aa, Homo sapiens
MAAPVDLELKKAFTELQAKVIDTQQKVKLADIQIEQLNRTKKHAHLTDTEIMTLVDETNMYEGVGRMFILQSKEAIHSQLLEKQKIAEEKIKELEVTEPFLSWGMGLALFSFPFLYL

SEQ ID NO: 73357 - protein, 293 aa, Homo sapiens [sequence omitted]

SEQ ID NO: 73358 - protein, 226 aa, Homo sapiens
MDQSRVLLWVKAEPFIVGALQVPPPSKFSLHYLRKISTYVQIRATEGAYPRLYWSTWRHIACGKLQLAKDLAWLYFEIFDSLSMKTPEERLEWSEVLSNCMSEEEVEKQRNQLSVDTLQFLLFLYIQQLNKVSLRTSLIGEEWPSPRNKSQSPDLTEKSNCHNKNWNDYSHQAFVYDHLSDLLELLLDPKQLTASFHSTHSSLVSREAVVALSFLIEGTISRARKI

SEQ ID NO: 73359 - protein, 434 aa, Homo sapiens
MAVQESAAQLSMTLKVQEYPTLKVPYETLNKRFRAAQKNIDRETSHVTMVVAELEKTLSGCPAVDSVVSLLDGVVEKLSVLKRKAVESIQAEDESAKLCKRRIEHLKEHSSDQPAAASVWKRKRMDRMMVEHLLRCGYYNTAVKLARQSGIEDLVNIEMFLTAKEVEESLERRETATCLAWCHDNKSRLRKMKGRQNKHEAKTGRKSRAASSSPKESLDLGMETLKGKPELSCLEFSLRIQEFIELIRQNKRLDAVRHARKHFSQAEGSQLDEVRQAMGMLAFPPDTHISPYKDLLDPARWRMLIQQFRYDNYRLHQLGNNSVFTLTLQAGLSAIKTPQCYKEDGSSKSPDCPVCSRSLNKLAQPLPMAHCANSRLVCKISGDVMNENNPPMMLPNGYVYGYNSLLSIRQDDKVVCPRTKEVFHFSQAEKVYIM

SEQ ID NO: 73360 - protein, 264 aa, Homo sapiens
MDYDLHKDGYPREEIVYQWKRSSVEVGDTRSWRLYQFSFVGLRNTTEVVKTTSGDYVVMSVYFDLSRRMGYFTIQTYIPCTLIVVLSWVSFWINKDAVPARTSLGITTVLTMTTLSTIARKSLPKVSYVTAMDLFVSVCFIFVFSALVEYGTLHYFVSNRKPSKDKDKKKKNPAPTIDIRPRSATIQMNNATHLQERDEEYGYECLDGKDCASFFCCFEDCRTGAWRHGRIHIRIAKMDSYARIFFPTAFCLFNLVYWVSYLYL

SEQ ID NO: 73361 - protein, 398 aa, Homo sapiens
MSACREIALLRELKHPNVIALQKVFLSHSDRKVWLLFDYAEHDLWHIIKFHRASKANKKPMQLPRSMVKSLLYQILDGIHYLHANWVLHRDLKPANILVMGEGPERGRVKIDIWAIGCIFAELLTSEPIFHCRQEDIKTSNPFHHDQLDRIFSVMGFPADKDWEDIRKMPEYPTLQKDFRRTTYANSSLIKYMEKHKVKPDSKVFLLLQKLLTMDPTKRITSEQALQDPYFQEDPLPTLDVFAGCQIPYPKREFLNEDDPEEKGDKNQQQQQNQHQQPTAPPQQAAAPPQAPPPQQNSTQTNGTAGGAGAGVGGTGAGLQHSQDSSLNQVPPNKKPRLGPSGANSGGPVMPSDYQHSSSRLNYQSSVQGSSQSQSTLGYSSSSQQSSQYHPSHQAHRY

SEQ ID NO: 73362 - protein, 204 aa, Homo sapiens
  MOD_RES (1)..(1): Any amino acid
XLLAVVFDTFNDIEKRKFKSLLLHKRTAIQHAYRLLISQRRPAGISYRQFEGLMRFYKPRMSARERYLTFKALNQNNTPLLSLKDFYDIYEVAALKWKAKKNREHWFDELPRTALLIFKGINILVKSKAFQYFMYLVVAVNGVWILVETFMLKVYGVELFLKVAGLGPVEYLSSGWNLFDFSVTVFAFLGLLALALNMEPFYFI

SEQ ID NO: 73363 - protein, 516 aa, Homo sapiens
MVNFVNMIYKTLNIHVTLVGIEIWTHEDKIELYSNIETTLLRFSFWQEKILKTRKDFDHVVLLSGKWLYSHVQGISYPGGMCLPYYSTSIIKDLLPDTNIIANRMAHQLGHNLGMQHDEFPCTCPSGKCVMDSDGSIPALKFSKCSQNQYHQYLKDYKPTCMLNIPFPYNFHDFQFCGNKKLDEGEECDCGPAQECTNPCCDAHTCVLKPGFTCAEGECCESCQIKKAGSICRPAKDECDFPEMCTGHSPACPKDQFRVNGFPCKNSEGYCFMGKCPTREDQCSELFDDEAIESHDICYKMNTKGNKFGYCKNKENRFLPCEEKDVRCGKIYCTGGELSSLLGEDKTYHLKDPQKNATVKCKTIFLYHDSTDIGLVASGTKCGEGMVCNNGECLNMEKVYISTNCPSQCNENPVDGHGLQCHCEEGQAPVACEETLHVTNITILVVVLVLVIVGIGVLILLVRYRKCIKLKQVQSPPTETLGVENKGYFGDEQQIRTEPILPEIHFLNHLLYGRHQ

SEQ ID NO: 73364 - protein, 137 aa, Homo sapiens
MRPGGFLGAGQRLSRAMSRCVLEPRPPGKRWMFPWCRPQVAGLGNPGLPGTRHSVGMAVLGQLARRLGVAESWTRDRHCAADLALAPLGDAQLVLLRPRRLMNANGRSVARAAELFGLTAEEVYLVHDELDKPLGRL

SEQ ID NO: 73365 - protein, 143 aa, Homo sapiens
  MOD_RES (1)..(1): Any amino acid
XTSKPSSDLLDLQPDFSSGGAAAAAAPAPPPPAGGATAWGDLLGEDSLAALSSVPSEAQISDPFAPEPTPPTTTAEIATASASASTTTTVTAVTAEVDLFGGSAEAAPELDLFAMKPPETSVPVVTPTASTAPPVPATAPSPA

SEQ ID NO: 73366 - protein, 108 aa, Homo sapiens
MDMNSFSPMMPTSPLSMINQIKFEDEPDLKDLFITVDEPESHVTTIETFITYRIITKTSRGEFDSSEFEVRRRYQDFLWLKGKLEEAHPTLIIPPLPEKFIVKGMVER

SEQ ID NO: 73367 - protein, 605 aa, Homo sapiens
  MOD_RES (1)..(1): Any amino acid
XDPDYWEKLLRHHYEQQQEDLARNLGKGKRIRKQVNYNDGSQEDRDWQDDQSDNQSDYSVASEEGDEDFDERSEAPRRPSRKGLRNDKDKPLPPLLARVGGNIEVLGFNARQRKAFLNAIMRYGMPPQDAFTTQWLVRDLRGKSEKEFKAYVSLFMRHLCEPGADGAETFADGVPREGLSRQHVLTRIGVMSLIRKKVQEFEHVNGRWSMPELAEVEENKKMSQPGSPSPKTPTPSTPGDTQPNTPAPVPPADGIKIEENSLKEEESIEGEKEVKSTAPETAIECTQAPAPASEDEKVVVEPPEGEEKVEKAEVKERTEEPMETEPKGKGAADVEKVEEKSAIDLTPIVVEDKEEKKEEEEKKEVMLQNGETPKDLNDEKQKKNIKQRFMFNIADGGFTELHSLWQNEERAATVTKKTYEIWHRRHDYWLLAGIINHGYARWQDIQNDPRYAILNEPFKGEMNRGNFLEIKNKFLARRFKLLEQALVIEEQLRRAAYLNMSEDPSHPSMALNTRFAEVECLAESHQHLSKESMAGNKPANAVLHKVLKQLEELLSDMKADVTRLPATIARIPPVAVRLQMSERNILSRLANRAPEPTPQQVAQQQ

SEQ ID NO: 73368 - protein, 192 aa, Homo sapiens
MLLSIGMLMLSATQVYTILTVQLFAFLNLLPVEADILAYNFENASQTFDDLPARFGYRLPAEGLKGFLINSKPENACEPIVPPPVKDNSSGTFIVLIRRLDCNFDIKVLNAQRAGYKAAIVHNVDSDDLISMGSNDSKYRGHLILVPEFSLPLEYYLIPFLIIVGICLILIVIFMITKFVQDRHRARRNRLR

SEQ ID NO: 73369 - protein, 64 aa, Homo sapiens
MQGDARRRRNENYFDDIPRSKLERQMAQSSVCEIWTNQNAGFPFSAIHQVHNTGDWGEPSITLR

SEQ ID NO: 73370 - protein, 203 aa, Homo sapiens
MRPEGGPRRRRQERPPPVLPAARRITYKEEEDLTLQPRSCLQCSESLVGLQEGKSTEQGNHDQLKELYSAGNLTVLATDPLLHQDPVQLDFHFRLTSQTSAHWHGLLCDRRLFLDIPYQALDQGNRESLTATLEYVEEKTNVDSVFVNFQNDRNDRGALLRAFSYMGFEVVRPDHPALPPLDNVIFMVYPLERDVGHLPSEPP

SEQ ID NO: 73371 - protein, 910 aa, Homo sapiens
  MOD_RES (1)..(1): Any amino acid
XAIPSTTPWNSCSGCWIVYMRTWRVHPEGRCRRRSSLTCPHCLKQSNTFDPFLCVSLPIPLRQTRFLSVTLVFPSKSQRFLRVGLAVPILSTVAALRKMVAEEGGVPADEVILVELYPSGFQRSFFDEEDLNTIAEGDNVYAFQVPPSPSQGTLSAHPLGLSASPRLAAREGQRFSLSLHSESKVLILFCNLVGSGQQASRFGPPFLIREDRAVSWAQLQQSILSKVRHLMKSEAPVQNLGSLFSIRVVGLSVACSYLSPKDSRPLCHWAVDRVLHLRRPGGPPHVKLAVEWDSSVKERLFGSLQEERAQDADSVWQQQQAHQQHSCTLDECFQFYTKEEQLAQDDAWKCPHCQVLQQGMVKLSLWTLPDILIIHLKRFCQVGERRNKLSTLVKFPLSGLNMAPHVAQRSTSPEAGLGPWPSWKQPDCLPTSYPLDFLYDLYAVCNHHGNLQGGHYTAYCRNSLDGQWYSYDDSTVEPLREDEVNTRGAYILFYQKRNSIPPWSASSSMRGSTSSSLSDHWLLRLGSHAGSTRGSLLSWSSAPCPSLPQVPDSPIFTNSLCNQEKGGLEPRRLVRGVKGRSISMKAPTTSRAKQGPFKTMPLRWSFGSKEKPPGASVELVEYLESRRRPRSTSQSIVSLLTGTAGEDEKSASPRSNVALPANSEDGGRAIERGPAGVPCPSAQPNHCLAPGNSDGPNTARKLKENAGQDIKLPRKFDLPLTVMPSVEHEKPARPEGQKAMNWKESFQMGSKSSPPSPYMGFSGNSKDSRRGTSELDRPLQGTLTLLRSVFRKKENRRNERAEVSPQVPPVSLVSGGLSPAMDGQAPGSPPALRIPEGLARGLGSRLERDVWSAPSSLRLPRKASRAPRGSALGMSQRTVPGEQASYGTFQRVKYHTLSLGRKKTLPESSF

SEQ ID NO: 73372 - protein, 65 aa, Homo sapiens
MDVIARQNFTEPTAIQAQGWPVALSGLDMVGVAQTGSGKTLSYLLPAIVHINHQPFLERGDGPIC

SEQ ID NO: 73373 - protein, 364 aa, Homo sapiens
GDAVKDLMLRFLGEKAAAKRQVLNADSVEQSFVGLKQLISCRNWRAAVDLCGRLLTAHGQGYGKSGLLTSHTTDSLQLWFVRLALLVKLGLFQNAEMEFEPFGNLDQPDLYYEYYPHVYPGRRGSMVPFSMRILHAELQQYLGNPQESLDRLHKVKTVCSKILANLEQGLAEDGGMSSVTQEGRQGCSYLVASIRLWRSRLGRVMYSMANCLLLMKDYVLAVEAYHSVIKYYPEQEPQLLSGIGRISLQIGDIKTAEKYFQDVEKVTQKLDGLQGKIMVLMNSAFLHLGQNNFAEAHRFFTEILRMDPRNAVQMLSASHPTGKEPSPKDAEEHPEGHRDSAEPGPARPMVPQRAPPGPALCAQP

SEQ ID NO: 73374 - protein, 64 aa, Homo sapiens
MRKSSSPSLSNCNSVLANKIFGIPLDELQQGGHPDNEVPFIVRHVVDYIEEHGGLEQQGLFQVN

SEQ ID NO: 73375 - protein, 39 aa, Homo sapiens
MPGRLLRGLWQRWRRYKYRFVPWIALNLSHNPRYSISEV

SEQ ID NO: 73376 - protein, 65 aa, Homo sapiens
MNLQAQPKAQNKRKRCLFGGQEPAPKEQPPPLQPPQQSIRVKEEQYLGHEGPGGAVSTSQPVELP

SEQ ID NO: 73377 - protein, 399 aa, Homo sapiens
MKKHVVETFFGFDEESVDSETLSETSYNTDRTDRTPATPEEDLDDATAREEADLRFCQLTREYQALQRAYALLQEQVGGTLDAEREARTREQLQADLLRCQAKIEDLEKLLVEKGQDSKWVEEKQLLIRTNQDLLEKIYRLEMEENQLKNEMQDAKDQNELLEFRVLELEERERRSPAFNLQITTFPENHSSALQLFCHQEGVKDVNVSELMKKLDILGDNGNLRNEEQVAIIQAGTVLALCEKWLKQIEGTEAALTQKMLDLEKEKDLFSRQKGYLEEELDYRKQALDQAYLKIQDLEATLYTALQQEPGRRAGEALSEGQREDLQAAVEKVRRQILRQSREFDSQILRERMELLQQAQQRIRELEDKLEFQKRHLKELEEKFLFLFLFFSLAFILWP

SEQ ID NO: 73378 - protein, 21 aa, Homo sapiens
  MOD_RES (1)..(1): Any amino acid
XNSGGYQKVTFGTGTKLQVIP

SEQ ID NO: 73379 - protein, 925 aa, Homo sapiens
MRLHLLLLLALCGAGTTAAELSYSLRGNWSICNGNGSLELPGAVPGCVHSALFQQGLIQDSYYRFNDLNYRWVSLDNWTYSKEFKIPFEISKWQKVNLILEGVDTVSKILFNEVTIGETDNMFNRYSFDITNVVRDVNSIELRFQSAVLYAAQQSKAHTRYQVPPDCPPLVQKGECHVNFVRKEQCSFSWDWGPSFPTQGIWKDVRIEAYNICHLNYFTFSPIYDKSAQEWNLEIESTFDVVSSKPVGGQVIVAIPKLQTQQTYSIELQPGKRIVELFVNISKNITVETWWPHGHGNQTGYNMTVLFELDGGLNIEKSAKVYFRTVELIEEPIKGSPGLSFYFKINGFPIFLKGSNWIPADSFQDRVTSELFHKKMKFFSRHSHGIIGSIFFLFKCSSPLPAGAGLAVVLQPNWANWLRLLLQSVVDANMNTLRVWGGGIYEQDEFYELCDELGIMVWQDFMFACALYPTDQGFLDSVTAEVAYQIKRLKSHPSIIIWSGNNENEEALMMNWYHISFTDRPIYIKDYVTLYVKNIRELVLAGDKSRPFITSSPTNGAETVAEAWVSQNPNSNYFGDVHFYDYISDCWNWKVFPKARFASEYGYQSWPSFSTLEKVSSTEDWSFNSKFSLHRQHHEGGNKQMLYQAGLHFKLPQSTDPLRTFKDTIYLTQVMQAQCVKTETEFYRRSRSEIVDQQGHTMGALYWQLNDIWQAPSWASLEYGGKWKMLHYFAQNFFAPLLPVGFENENTFYIYGVSDLHSDYSMTLSVRVHTWSSLEPVCSRVTERFVMKGGEAVCLYEEPVSELLRRCGNCTRESCVVSFYLSADHELLSPTNYHFLSSPKEAVGLCKAQITAIISQQGDIFVFDLETSAVAPFVWLDVGSIPGRFSDNGFLMTEKTRTILFYPWEPTSKNELEQSFHVTSLTDIY

SEQ ID NO: 73380 - protein, 48 aa, Homo sapiens
  MOD_RES (1)..(1): Any amino acid
XAMTEEQHKSVVIDCSSSQPQFCNAGHTRHKQFEEIYPTGRNESLCFV

SEQ ID NO: 73381 - protein, 339 aa, Homo sapiens
MGEMEQLRQEAEQLKKQIADARKACADVTLAELVSGLEVVGRVQMRTRRTLRGHLAKIYAMHWATDSKLLVSASQDGKLIVWDSYTTNKVHAIPLRSSWVMTCAYAPSGNFVACGGLDNMCSIYNLKSREGNVKVSRELSAHTGYLSCCRFLDDNNIVTSSGDTTALWDIETGQQKTVFVGHTGDCMSLAVSPDFNLFISGACDASAKLWDVREGTCRQTFTGHESDINAICFFPNGEAICTGSDDASCRLFDLRADQELICFSHESIICGITSVAFSLSGRLLFAGYDDFNCNVWDSMKSERVGILSGHDNRVSCLGVTADGMAVATGSWDSFLKIWN

SEQ ID NO: 73382 - protein, 328 aa, Homo sapiens
RYRAPGEQDGDAMPLGSAVDILATDDPNFSQEDQQDTQIYEKHDNLLHGTKKKKEKMVSAAFMKKYIHVAKIIKPVLTQESATYIAEEYSRLRSQDSMSSDTARTSPVTARTLETLIRLATAHAKARMSKTVDLQDAEEAVELVQYAYFKKVLEKEKKRKKRSEDESETEDEEEKSQEDQEQKRKRRKTRQPDAKDGDSYDPYDFSDTEEEMPQVHTPKTADSQETKESQKVELSESRDGISPCCPGWSWTPGLKQSFYLSLPKGWDYRHKPLCLFDLILFNDCRVSMVEGIQGGPLGCVPGSSCAVNRHESPHRIHQPGQRRALLFS

SEQ ID NO: 73383 - protein, 156 aa, Homo sapiens
MQTIKCVVVGDGAVGKTCLLISYTTNKFPSEYVPTLKNQWKVRRGDTGFARSAGRQNSSRQDSNEWWSQFGEVCPTSWNEVFDNYAVTVMIGGEPYTLGLFDTAGQEDYDRLRPLSYPQTDVFLVCFSVVSPSSFENVKEKWVPEITHHCPKTPFL

SEQ ID NO: 73384 - protein, 88 aa, Homo sapiens
MADIQTERAYQKQPTIFQNKKRVLLGETGKEKLPRADPLWRGDQDEDAEDHCHPPRLSALHPQVQPLREAPQEHVCTPVPLLQGRPDR

SEQ ID NO: 73385 - protein, 191 aa, Homo sapiens
  MOD_RES (1)..(1): Any amino acid
XEQGPAAPKSWLLLPTTLALHGSLDAVSQAQGRPGHPDAPPNIYEGGLGSPQPQCPSAQGSKPKNFRLRHLRGLGLYLESHPPPTGQCESHWLGRLMAGGCLPQPEGTAWALDLPQGTLGPRNSLCSALLEARLPRDSLGSSASSSSMDPDKGALPQPSPSRLRPKRSWGTWEEAMCPLCKRTRSGALERP

SEQ ID NO: 73386 - protein, 370 aa, Homo sapiens
MAQRYDDLPHYGGMDGVGIPSTMYGDPHAARSMQPVHHLNHGPPLHSHQYPHTAHTNAMAPSMGSSVNDALKRDKDAIYGHPLFPLLALIFEKCELATCTPREPGVAGGDVCSSESFNEDIAVFAKQIRAEKPLFSSNPELDNLMIQAIQVLRFHLLELEKVHELCDNFCHRYISCLKGKMPIDLVIDDREGGSKSDSEDITRSANLTDQPSWNRDHDDTASTRSGGTPGPSSGGHTSHSGDNSSEQGDGLDNSVASPSTGDDDDPDKDKKRHKKRGIFPKVATNIMRAWLFQHLTHPYPSEEQKKQLAQDTGLTILQVNNWFINARRRIVQPMIDQSNRAGKSPIVTVFKSRKRKPSSSHSPGGPLPGK

SEQ ID NO: 73387 - protein, 583 aa, Homo sapiens
MNSPGGRGKKKGSGGASNPVPPRPPPPCLAPAPPAAGPAPPPESPHKRNLYYFSYPLFVGFALLRLVAFHLGLLFVWLCQRFSRALMAAKRSSGAAPAPASASAPAPVPGGEAERVRVFHKQAFEYISIALRIDEDEKGQKEQAVEWYKKGIEELEKGIAVIVTGQGEQCERARRLQAKMMTNLVMAKDRLQLLESGAVPKRKDPLTHTSNSLPRSKTVMKTGSAGLSGHHRAPSYSGLSMVSGVKQGSGPAPTTHKGTPKTNRTNKPSTPTTATRKKKDLKNFRNVDSNLANLIMNEIVDNGTAVKFDDIAGQDLAKQALQEIVILPSLRPELFTGLRAPARGLLLFGPPGNGKTMLAKAVAAESNATFFNISAASLTSKYVGEGEKLVRALFAVARELQPSIIFIDEVDSLLCERREGEHDASRRLKTEFLIEFDGVQSAGDDRVLVMGATNRPQELDEAVLRRFIKRVYVSLPNEETRLLLLKNLLCKQGSPLTQKELAQLARMTDGYSGSDLTALAKDAALGPIRELKPEQVKNMSASEMRNIRLSDFTESLKKIKRSVSPQTLEAYIRWNKDFGDTTV

SEQ ID NO: 73388 - protein, 50 aa, Homo sapiens
MENAHTKTVEEVLGHFGVNESTGLSLEQVKKLKERWGSNGRCREKPCWNL

SEQ ID NO: 73389 - protein, 1163 aa, Homo sapiens
MVSSGCRMRSLWFIIVISFLPNTEGFSRAALPFGLVRRELSCEGYSIDLRCPGSDVIMIESANYGRTDDKICDADPFQMENTDCYLPDAFKIMTQRCNNRTQCIVVTGSDVFPDPCPGTYKYLEVQYECVPYIFVCPGTLKAIVDSPCIYEAEQKAGAWCKDPLQAADKIYFMPWTPYRTDTLIEYASLEDFQNSRQTTTYKLPNRVDGTGFVVYDGAVFFNKERTRNIVKFDLRTRIKSGEAIINYANYHDTSPYRWGGKTDIDLAVDENGLWVIYATEQNNGMIVISQLNPYTLRFEATWETVYDKRAASNAFMICGVLYVVRSVYQDNESETGKNSIDYIYNTRLNRGEYVDVPFPNQYQYIAAVDYNPRDNQLYVWNNNFILRYSLEFGPPDPAQVPTTAVTITSSAELFKTIISTTSTTSQKGPMSTTVAGSQEGSKGTKPPPAVSTTKIPPITNIFPLPERFCEALDSKGIKWPQTQRGMMVERPCPKGTRGTASYLCMISTGTWNPKGPDLSNCTSHWVNQLAQKIRSGENAASLANELAKHTKGPVFAGDVSSSVRLMEQLVDILDAQLQELKPSEKDSAGRSYNKAIVDTVDNLLRPEALESWKHMNSSEQAHTATMLLDTLEEGAFVLADNLLEPTRVSMPTENIVLEVAVLSTEGQIQDFKFPLGIKGAGSSIQLSANTVKQNSRNGLAKLVFIIYRSLGQFLSTENATIKLGADFIGRNSTIAVNSHVISVSINKESSRVYLTDPVLFTLPHIDPDNYFNANCSFWNYSERTMMGYWSTQGCKLVDTNKTRTTCACSHLTNFAILMAHREIAYKDGVHELLLTVITWVGIVISLVCLAICIFTFCFFRGLQSDRNTIHKNLCINLFIAEFIFLIGIDKTKYAIACPIFAGLLHFFFLAAFAWMCLEGVQLYLMLVEVFESEYSRKKYYYVAGYLFPATVVGVSAAIDYKSYGTEKACWLHVDNYFIWSFIGPVTFIILLNIIFLVITLCKMVKHSNTLKPDSSRLENIKSWVLGAFALLCLLGLTWSFGLLFINEETIVMAYLFTIFNAFQGVFIFIFHCALQKKVRKEYGKCFRHSYCCGGLPTESPHSSVKASTTRTSARYSSGTQSRIRRMWNDTVRKQSESSFISGDINSTSTLNQGGINLNILLQD

SEQ ID NO: 73390 - protein, 512 aa, Homo sapiens
MDRVLLRWISLFWLTAMVEGLQVTVPDKKKVAMLFQPTVLRCHFSTSSHQPAVVQWKFKSYCQDRMGESLGMSSTRAQSLSKRNLEWDPYLDCLDSRRTVRVVASKQGSTVTLGDFYRGREITIVHDADLQIGKLMWGDSGLYYCIITTPDDLEGKNEDSVELLVLVRKGYRIQADKERDSMKVLYYVEKELAQFDPARRMRGRYNNTISELSSLHEEDSNFRQSFHQMRSKQFPVSGDLESNPDYWSGVMGGSSGASRGPSAMEYNKEDRESFRHSQPRSKSEMLSRKNFATGVPAVSMDELAAFADSYGQRPRRADGNSHEARGGSRFERSESRAHSGFYQDDSLEEYYGQRSRSREPLTDADRGWAFSPARRRPAEDAHLPRLVSRTPGTAPKYDHSYLGSARERQARPEGASRGGSLETPSKRSAQLGPRSASYYAWSPPGTYKAGSSQDDQEDASDDALPPYSELELTRGPSYRGRDLPYHSNSEKKRKKEPAKKTNDFPTRMSLVV

SEQ ID NO: 73391 - protein, 110 aa, Homo sapiens
MDSETDMVRQIRALDSDMQTLVYENYNKFISATDTIRKMKNDFRKMEDEMDRLATNMAVITDFSARISATLQDRHERITKLAGVHALLRKLQFLFELPSRLTKCVELGAY

SEQ ID NO: 73392 - protein, 194 aa, Homo sapiens
TVSISFNAVVPSGLGPSSHARQRQLWYQLPGSPVALLQTYSNEVHCVEEILKEMTHSWPPPLTAIHTPSTAEPSKFPFPTKDSQHVSSVTQNQKQYDTSSKTHSNSQQGTSSMLEDDLQLSDSEDSDSEQTPEKPPSSSAPPSAPQSLPEPVASAHSSSAESESTSDSDSSSDSESESSSSDSEENEPLETPAP

SEQ ID NO: 73393 - protein, 919 aa, Homo sapiens
MAPQMYEFHLPLSPEELLKSGGVNQYVVQEVLSIKHLPPQLRAFQAAFRAQGPLAMLQHFDTIYSILHLVTGCCYRLLENPTINHQKNRPTREAITHLLGVALTRYNHMLSATVKIIQMLQHFEHLAPVLVAAVSLWATDYGMKSIVGEIVREIGQKCPQELSRDPSGTKGFAAFLTELAERVPAILMSSMCILLDHLDGENYMMRNAVLAAMAEMVLQVLSGDQLEAAARDTRDQFLDTLQAHGHDVNSFVRSRVLQLFTRIVQQKALPLTRFQAVVALAVGRLADKSVLVCKNAIQLLASFLANNPFSCKLSDADLAGPLQKETQKLQEMRAQRRTAAASAVLDPEEEWEAMLPELKSTLQQLLQLPQGEEEIPEQIANTETTEDVKGRIYQLLAKASYKKAIILTREATGHFQESEPFSHIDPEESEETRLLNILGLIFKGPAASTQEKNPRESTGNMVTGQTVCKNKPNMSDPEESRGNDELVKQEMLVQYLQDAYSFSRKITEAIGIISKMMYENTTTVVQEVIEFFVMVFQFGVPQALFGVRRMLPLIWSKEPGVREAVLNAYRQLYLNPKGDSARAKAQALIQNLSLLLVDASVGTIQCLEEILCEFVQKDELKPAVTQLLWERATEKVACCPLERCSSVMLLGMMARGKPEIVGSNLDTLVSIGLDEKFPQDYRLAQQVCHAIANISDRRKPSLGKRHPPFRLPQEHRLFERLRETVTKGFVHPDPLWIPFKEVAVTLIYQLAEGPEVICAQILQGCAKQALEKLEEKRTSQEDPKESPAMLPTFLLMNLLSLAGDVALQQLVHLEQAVSGELCRRRVLREEQEHKTKDPKEKNTSSETTMEEELGLVGATADDTEAELIRGICEMELLDGKQTLAAFVPLLLKVCNNPGLYSNPDLSAAASLALGKFCMI

SEQ ID NO: 73394 - protein, 281 aa, Homo sapiens
  MOD_RES (1)..(1): Any amino acid
XAYDIFLNAKEQNIVFNAETYSNLIKLLMSEDYFTQAMEVKAFAETHIKGFTLNDAANSRLIITQVRRDYLKEAVTTLKTVLDQQQTPSRLAVTRVIQALAMKGDVENIEVVQKMLNGLEDSIGLSKMVFINNIALAQIKNNNIDAAIENIENMLTSENKVIEPQYFGLAYLFRKVIEEQLEPAVEKISIMAERLANQFAIYKPVTDFFLQLVDAGKVDDARALLQRCGAIAEQTPILLLFLLRNSRKQGKASTVKSVLELIPELNEKEEAYNSLMKSYEK

SEQ ID NO: 73395 - protein, 110 aa, Homo sapiens
MTGSNSHITILTLKVLPHFESLGKQEKIPNKMSAFRNHCPHLDSVGEITKEDLIQKSLGTCQDCKVQGPNLWACLENRCSYVGCGESQVDHSTIHSQETKHYLTVNLTTL

SEQ ID NO: 73396 - protein, 59 aa, Homo sapiens
MLATRLSRPLSRLPGKTLSACDRENGARATLGVMGIQTDALWMESFTSFGCTDHTILIT

SEQ ID NO: 73397 - protein, 1436 aa, Homo sapiens
MNQPPQIAPKRERKTIRIRDPNQGGKDITEEIMSGARTASTPTPPQTGGGLEPQANGETPQVAVIVRPDDRSQGAIIADRPGLPGPEHSPSESQPSSPSPTPSPSPVLEPGSEPNLAVLSIPGDTMTTIQMSVEESTPISRETGEPYRLSPEPTPLAEPILEVEVTLSKPVPESEFSSSPLQAPTPLASHTVEIHEPNGMVPSEDLEPEVESSPELAPPPACPSESPVPIAPTAQPEELLNGAPSPPAVDLSPVSEPEEQAKEVTASMAPPTIPSATPATAPSATSPAQEEEMEEEEEEEEGEAGEAGEAESEKGGEELLPPESTPIPANLSQNLEAAAATQVAVSVPKRRRKIKELNKKEAVGDLLDAFKEANPAVPEVENQPPAGSNPGPESEGSGVPPRPEEADETWDSKEDKIHNAENIQPGEQKYEYKSDQWKPLNLEEKKRYDREFLLGFQFIFASMQKPEGLPHISDVVLDKANKTPLRPLDPTRLQGINCGPDFTPSFANLGRTTLSTRGPPRGGPGGELPRGPQAGLGPRRSQQGPRKEPRKIIATVLMTEDIKLNKAEKAWKPSSKRTAADKDRGEEDADGSKTQDLFRRVRSILNKLTPQMFQQLMKQVTQLAIDTEERLKGVIDLIFEKAISEPNFSVAYANMCRCLMALKVPTTEKPTVTVNFRKLLLNRCQKEFEKDKDDDEVFEKKQKEMDEAATAEERGRLKEELEEARDIARRRSLGNIKFIGELFKLKMLTEAIMHDCVVKLLKNHDEESLECLCRLLTTIGKDLDFEKAKPRMDQYFNQMEKIIKEKKTSSRIRFMLQDVLDLRGSNWVPRRGDQGPKTIDQIHKEAEMEEHREHIKVQQLMAKGSDKRRGGPPGPPISRGLPLVDDGGWNTVPISKGSRPIDTSRLTKITKPGSIDSNNQLFAPGGRLSWGKGSSGGSGAKPSDAASEAARPATSTLNRFSALQQAVPTESTDNRRVVQRSSLSRERGEKAGDRGDRLERSERGGDRGDRLDRARTPATKRSFSKEVEERSRERPSQPEGLRKAASLTEDRDRGRDAVKREAALPPVSPLKAALSEEELEKKSKAIIEEYLHLNDMKEAVQCVQELASPSLLFIFVRHGVESTLERSAIAREHMGQLLHQLLCAGHLSTAQYYQGLYEILELAEDMEIDIPHVWLYLAELVTPILQEGGVPMGELFREITKPLRPLGKAASLLLEILGLLCKSMGPKKVGTLWREAGLSWKEFLPEGQDIGAFVAEQKVEYTLGEESEAPGQRALPSEELNRQLEKLLKEGSSNQRVFDWIEANLSEQQIVSNTLVRALMTAVCYSAIIFETPLRVDVAVLKARAKLLQKYLCDEQKELQALYALQALVVTLEQPPNLLRMFFDALYDEDVVKEDAFYSWESSKDPAEQQGKGVALKSVTAFFKWLREAEEESDHN

SEQ ID NO: 73398 - protein, 185 aa, Homo sapiens
MYQVSGQRPSGCDAPYGAPSAAPGPGQPQGNPLGCTPLLPNDSGHPSELGGTRRAGNGALGGPKAHRKLQTHPSLASQGSKKSKSSSKSTTSQIPLQAQEDCCVHCILSCLFCEFLTLCNIVLDCATCGSCSSEDSCLCCCCCGSGECADCDLPCDLDCGILDACCESADCLEICMECCGLCFSS

SEQ ID NO: 73399 - protein, 54 aa, Homo sapiens
MWKGCLTLYTGRGGELQKIGDLGAVQAAAMRDSIHYYPGNDLHPDLEEPSSLGV

SEQ ID NO: 73400 - protein, 268 aa, Homo sapiens
MRSGGRGRPRLRLGERGLMEPLLPPKRRLLPRVRLLPLLLALAVGSAFYTIWSGWHRRTEELPLGRELRVPLIGSLPEARLRRVVGQLDPQRLWSTYLRPLLVVRTPGSPGNLQVRKFLEATLRSLTAGWHVELDPFTASTPLGPVDFGNVVATLDPRAARHLTLACHYDSKLFPPGSTPFVGATDSAVPCALLLELAQALDLELSRAKKQAAPVTLQLLFLDGEEALKEWGPKDSLYGSRHLAQLMESIPHSPGPTRIQAIRSVCTV

SEQ ID NO: 73401 - protein, 139 aa, Homo sapiens
MLATRVFSLVGKRAISTSVCVRAHESVVKSEDFSLPAYMDRRDHPLPEVAHVKHLSASQKALKEKEKASWSSLSMDEKVELYRIKFKESFAEMNRGSNEWKTVVGGAMFFIGFTALVIMWQKHYGHLGLCLSDPVIHSL

SEQ ID NO: 73402 - protein, 84 aa, Homo sapiens
MVAGWLTNYSQDSVTFEDVAVDFTQEEWTLLDQTQRNLYRDVMLENYKNLVAVDWESHINTKWSAPQQNFLQGKTSSVVEMGWV

SEQ ID NO: 73403 - protein, 209 aa, Homo sapiens
MTPSEGARAGTGRELEMLDSLLALGGLVLLRDSVEWEGRSLLKALVKKSALCGEQVHILGCEVSEEEFREGFDSDINNRLVYHDFFRDPLNWSKTEEAFPGGPLGALRAMCKRTDPVPVTIALDSLSWLLLRLPCTTLCQVLHAVSHQDSCPGDSSSVGKVSVLGLLHEELHGPGPVGALSSLAQTEVTLGGTMGQASAHILCRRPRQR

SEQ ID NO: 73404 - protein, 34 aa, Homo sapiens
MPAKTPIYLKAANNKKGKKFKLRDILSPDMISPP

SEQ ID NO: 73405 - protein, 211 aa, Homo sapiens
MENLKHIITLGQVIHKRCEEMKYCKKQCRRLGHRVLGLIKPLEMLQDQGKRSVPSEKLTTAMNRFKAALEEANGEIEKFSNRSNICRFLTASQDKILFKDVNRKLSDVWKELSLLLQVEQRMPVSPISQGASWAQEDQQDADEDRRAFQMLRRDNEKIEASLRRLEINMKEIKETLRQYLPPKCMQEIPQEQIKEIKKEQLSGSPWILLRE

SEQ ID NO: 73406 - protein, 498 aa, Homo sapiens
MVENERLRQEMRRCEAELQELRTKPAGPCPGCEHSQESAQLRDKLSQLQLEMAESKGMLSELNLEVQQKTDRLAEVELRLKDCLAEKAQEEERLSRRLRDSHETIASLRAQSPPVKYVIKTVEVESSKTKQALSESQARNQHLQEQVAMQRQVLKEMEQQLQSSHQLTARLRAQIAMYESELERAHGQMLEEMQSLEEDKNRAIEEAFARAQVEMKAVHENLAGVRTNLLTLQPALRTLTNDYNGLKRQVRGFPLLLQEALRSVKAEIGQAIEEVNSNNQELLRKYRRELQLRKKCHNELVRLKGNIRVIARVRPVTKEDGEGPEATNAVTFDADDDSIIHLLHKGKPVSFELDKVFSPQASQQDVFQEVQALVTSCIDGFNVCIFAYGQTGAGKTYTMEGTAENPGINQRALQLLFSEVQEKASDWEYTITVSAAEIYNEVLRDLLGKEPQEKLEIRLCPDGSGQLYVPGLTEFQVQSVDDINKVWRREPLTTATLL

SEQ ID NO: 73407 - protein, 180 aa, Homo sapiens
MGDWMTVTDPGLSSESKTISQYTSETKMSPSSLYSQQVLCSSIPLSKNVHSFFSAFCTEDNIEQSISYLDQELTTFGFPSLYEESKGKETKRELNIVAVLNCMNELLVLQRKNLLAQENVETQNLKLGSDMDHLQSCYSKLKEQLETSRREMIGLQERDRQLQCKNRNLHQLLKNEKDEV

SEQ ID NO: 73408 - protein, 223 aa, Homo sapiens
MELFLAGRRVLVTGAGKGRGTVQALHATGARVVAVSRTQADLDSLVRECPGIEPVCVDLGDWEATERALGSVGPVDLLVNNAAVALLQPFLEVTKEAFDRSFEVNLRAVIQVSQIVARGLIARGVPGAIVNVSSQCSQRAVTNHSVYCSTKGALDMLTKVMALELGPHKIRVNAVNPTVVMTSMGQATWSDPHKAKTMLNRIPLGKFAEVEHVVNAILFLLSD

SEQ ID NO: 73409 - protein, 445 aa, Homo sapiens
MGGPRAWALLCLGLLLPGGGAAWSIGAAPFSGRRNWCSYVVTRTISCHVQNGTYLQRVLQNCPWPMSCPGSSYRTVVRPTYKVMYKIVTAREWRCCPGHSGVSCEEVAASSASLEPMWSGSTMRRMALRPTAFSGCLNCSKVSELTERLKVLEAKMTMLTVIEQPVPPTPATPEDPAPLWGPPPAQGSPGDGGLQDQVGAWGLPGPTGPKGDAGSRGPMGMRGPPGPQGPPGSPGRAGAVGTPGERGPPGPPGPPGPPGPPAPVGPPHARISQHGDPLLSNTFTETNNHWPQGPTGPPGPPGPMGPPGPPGPTGVPGSPGHIGPPGPTGPKGISGHPGEKGERGLRGEPGPQGSAGQRGEPGPKGDPGEKSHWAPSLQSFLQQQAQLELLARRVTLLEAIIWPEPELGSGAGPAGTGTPSLLRGKRGGHATNYRIVAPRSRDERG

SEQ ID NO: 73410 - protein, 1232 aa, Homo sapiens
  MOD_RES (1)..(1): Any amino acid
XEPPDTYEEDGGVYFSEGPEPPTASVGPPGLLPGDVCTQDDLPSTDESGNGLPKTKEAAPAVGEEDDDYQAYYLNAQDGAGGEEEKAEGGAGEEHDLFAGLKPLEQESRMEVLFACAEALHAHGYSSEASRLTVELAQDLLANPPDLKVEPPPAKGKKNKVSTSRQTWVATNTLSKAAFLLTVLSERPEHHNLAFRVGMFALELQRPPASTKALEVKLAYQESEVAALLKKIPLGPSEMSTMRCRAEELREGTLCDYRPVLPLMLASFIFDVLCAPGSRPPSRNWNSETPGDEELGFEAAVAALGMKTTVSEAEHPLLCEGTRREKGDLALALMITYKDDQAKLKKILDKLLDRESQTHKPQTLSSFYSSSRPTTASQRSPSKHGGPSAPGALQPLTSGSAGPAQPGSVAGAGPGPTEGFTEKNVPESSPHSPCEGLPSEAALTPRPEGKVPSRLALGSRGGYNGRGWGSPGRPKKKHTGMASIDSSAPETTSDSSPTLSRRPLRGGWAPTSWGRGQDSDSISSSSSDSLGSSSSSGSRRASASGGARAKTVEVGRYKGRRPESHAPHVPNQPSEAAAHFYFELAKTVLIKAGGNSSTSIFTHPSSSGGHQGPHRNLHLCAFEIGLYALGLHNFVSPNWLSRTYSSHVSWITGQAMEIGSAALTILVECWDGHLTPPEVASLADRASRARDSNMVRAAAELALSCLPHAHALNPNEIQRALVQCKEQDNLMLEKACMAVEEAAKGGGVYPEVLFEVAHQWFWLYEQTAGGSSTAREGATSCSASGIRAGGEAGRGMPEGRGGPGTEPVTVAAAAVTAAATVVPVISVGSSLYPGPGLGHGHSPGLHPYTALQPHLPCSPQYLTHPAHPAHPMPHMPRPAVFPVPSSAYPQGVHPAFLGAQYPYSVTPPSLAATAVSFPVPSMAPITVHPYHTEPGLPLPTSVALSSVHPASTFPAIQGASLPALTTQPSPLVSGGFPPPEEETHSQPVNPHSLHHLHAAYRVGMLALEMLGRRAHNDHPNNFSRSPPYTDDVKWLLGLAAKLGDRHGDAAAAESRSCPQPPACPGLPPTGAALPAGIHAVHPPPLDSPDSCGLRRLCECDPECPQRLLPDAHGHDAVQRHPTEPQAQQTDQGAVAAGLTRDGHLLPLSLSPLGSYTGTQACGYGGPSHRGSETWLDRSSSLSSLVAQTDSCSWAIAWGQDVSHPRSLGLGETALSGRGRWVASGIYLAFINI

SEQ ID NO: 73411 - protein, 521 aa, Homo sapiens
MADTRSVHETRFEAAVKVIQSLPKNGSFQPTNEMMLKFYSFYKQATEGPCKLSRPGFWDPIGRYKWDAWSSLGDMTKEEAMIAYVEEMKKIIETMPMTEKVEELLRVIGPFYEIVEDKKSGRSSDITSVRLEKISKCLEDLGNVLTSTPNAKTVNGKAESSDSGAESEEEEAQEEVKGAEQSDNDKKMMKKSADHKNLEVIVTNGYDKDGFVQDIQNDIHASSSLNGRSTEEVKPIDENLGQTGKSAVCIHQDINDDHVEDVTGIQHLTSDSDSEVYCDSMEQFGQEESLDSFTSNNGPFQYYLGGHSSQPMENSGFREDIQVPPGNGNIGNMQVVAVEGKGEVKHGGEDGRNNSGAPHREKRGGETDEFSNVRRGRGHRMQHLSEGTKGRQVGSGGDGERWGSDRGSRGSLNEQIALVLMRLQEDMQNVLQRLQKLETLTALQAKSSTSTLQTAPQPTSQRPSWWPFEMSPGVLTFAIIWPFIAQWLVYLYYQRRRRLKCSGVNMARCSLDLLGSSNLPA

SEQ ID NO: 73412 - protein, 164 aa, Homo sapiens
MGVSVDVHQVYKYPFEQVVASFLRKYPNPMDKNVISVKIMEEKRDESTGVIYRKRIAICQNVVPEILRKVSILKVPNIQLEEESWLNPRERNMAIRSHCLTWTQYASMKEESVFRESMENPNWTEFIQRGRISITGVGFLNCVLETFASTFLRQGAQKVTIFLL

SEQ ID NO: 73413 - protein, 162 aa, Homo sapiens
  MOD_RES (1)..(1): Any amino acid
XTRAVAAESHFLRVFLFFRPFRGVGTESGSESGSSNAKEPKTRAGGFASALERHSELLQKRWGFAMLPRLVLNSWVQVILLRWPPKVLGLQMTDGSPKNVESFASMLRHSPLTQMGPAKDKLVIGRIFHIVENDLYIDFGGKFHCVCRRPEVDGEKYQKGTR

SEQ ID NO: 73414 - protein, 85 aa, Homo sapiens
MHHQWLLLAACFWVIFMFMVASKFITLTFKDPDVYSAKQEFLFLTTMPEVRKLPEEKHIPEELKPTGKELPDSQLVQPLVYMERL

SEQ ID NO: 73415 - protein, 93 aa, Homo sapiens
  MOD_RES (1)..(1): Any amino acid
XQGRKGDKGERGAPGVTGPKGDVGARGVSGFPGADGIPGHPGQGGPRGRPGYDGCNGTQGDSGPQGPPGSEGFTGPPVSIPTAPVLQGRADPC

SEQ ID NO: 73416 - protein, 449 aa, Homo sapiens
MHSWTWDPHSSEQLDLAQSLSEEDPLSSLRGSIQPQPPAEAPDKGGSQANNDPGGWDPGCSSSQVLGRTRGPCLGVRVREEEAGTRVKENLPVWTVTGELQGKPLGNPAAGTMNPESSIFIEDYLKYFQDQVSRENLLQLLTDDEAWNGFVAAAELPRDEADELRKALNKLASHMVMKDKNRHDKDQQHRQWFLKEFPRLKRELEDHIRKLRALAEEVEQVHRGTTIANVVSNSVGTTSGILTLLGLGLAPFTEGISFVLLDTGMGLGAAAAVAGITCSVVELVNKLRARAQARNLDQSGTNVAKVMKEFVGGNTPNVLTLVDNWYQVTQGIGRNIRAIRRARANPQLGAYAPPPHVIGRISAEGGEQVERVVEGPAQAMSRGTMIVGAATGGILLLLDVVSLAYESKHLLEGAKSESAEELKKRAQELEGKLNFLTKIHEMLQPGQDQ

SEQ ID NO: 73417 - protein, 36 aa, Homo sapiens
MWPLWHAPSSGEANVTLAMALFTILTSIYFFNKAQQ

SEQ ID NO: 73418 - protein, 100 aa, Homo sapiens
MLARVTRKMLRHAKCFQRLAIFGSVRALHKDNRTATPQNFSNYESMKQDFKLGIPEYFNFAKDVLDQWTDKEKAGKKPSNPAFWWINRNGEEMRWSFEEL

SEQ ID NO: 73419 - protein, 165 aa, Homo sapiens
MATEHVNGNGTEEPMDTTSAVIHSENFQTLLDAGLPQKVAEKLDEIYVAGLVAHSDLDERAIEALKEFNEDGALAVLQQFKDSDLSHVQNKSAFLCGVMKTYRQREKQGTKVADSSKGPDEAKIKALLERTGYTLDVTTGQRKYGGPPPDSVYSDICGKDPKRSI

SEQ ID NO: 73420 - protein, 33 aa, Homo sapiens
  MOD_RES (1)..(1): Any amino acid
XPVLLVVGSFEVVSTLIKVRSTRGTGLLEVRII

SEQ ID NO: 73421 - protein, 92 aa, Homo sapiens
MDQREILQKFLDEAQSKKITKEEFANEFLGLALSPRLECRGLIIAHCRLDFLDSSDPPASASQSAEITTMSHHTWPEKAFWTSLNRSNLLLS

SEQ ID NO: 73422 - protein, 131 aa, Homo sapiens
NTPEPTTTQEPLVGSQKRKARKTKITHLVRTADGRVSPAGDDKPKEQLQRSLPKATETDCNDKCSHNTEVGETRSSTPEMPAVSAFFSLAALAEVAAMENVHRGQRSTPLTHDGQPKEMPQAPVLISCADQ

SEQ ID NO: 73423 - protein, 173 aa, Homo sapiens
MLTRKIKLWDINAHITCRLCSGYLIDATTVTECLHTCTCPARATQGGRALPSSVLFRTLAFVLPHAFSSSPTKAGTRTRGRDDLEDKSEKSFHAKGPVGGVRADEASLRRAKHRRDPTFLPRSSKASSRCDSAHCWQFPNLQRSSLDPSKGNLPVCSSHLMCVLTPDESVLWC

SEQ ID NO: 73424 - protein, 101 aa, Homo sapiens
MFSKFTSILQHAVEALAPSLPLQEDFVYHWKAITHYYIETSDDKAPVTDTNIPSHLEQMLDILVQEENERESGETGPCMEYLLHHKILETLYTLGKADVSS

SEQ ID NO: 73425 - protein, 119 aa, Homo sapiens
MVRTKTWTLKKHFVGYPTNSDFELKTAELPPLKNGEVLLEALFLTVDPYMRVVESKNVALPKGTIVLASPGWTTHSISDGKDLEKLLTEWPDTIPLSLALGTVGMPGLTAYFGLLEICG

SEQ ID NO: 73426 - protein, 475 aa, Homo sapiens
PCEGGARSCLVTESARGGLQFLQQCDREDLVELALPQLAQVVTVYEFLLMKVEKDHLAKPFFPAIYKEFEELHKMVKKMCQDYLSSSGLCSQETLEINNDKVAESLGITEFLRKKEIHPDNLGPKHLSRDMDGEQLEGASSEKREREAAEEGLASVKRPRREALSNDTTESLAANSRGREKPRPLHALAAGFSPPVNVTVSPRSEESHTTTVSGGNGSVFQAGPQLQALANLEARRGSIGAALSSRDVSGLPVYAQSGEPRRLTQAQVAAFPGENALEHSSDQDTWDSLRSPGFCSPLSSGGGAESLPPGGPGHAEAGHLGKVCDFHLNHQQPSPTSVLPTEVAAPPLEKILSVDSVAVDCAYRTVPKPGPQPGPHGSLLTEGCLRSLSGDLNRFPCGMEVHSGQRELESVVAVGEAMAFEISNGSHELLSQGQKQIFIQTSDGLILSPPGTIVSQEEDIVTVTDAEGRACGWAR

SEQ ID NO: 73427 - protein, 1215 aa, Homo sapiens
MEQLPGVPPGPPHPVRPPPPPPPPMPLQLEAHLRSHGLEPAAPSPRLRPEESLDPPGAMQELLGALEPLPPAPGDTGVGPPNSEGKDPAGAYRSPSPQGTKAPRFVPLTSICFPDSLLQDEERSFFPTMEEMFGGGAADDYGKAGPPEDEGDPKAGAGPPPGPPAYDPYGPYCPGRASGAGPETPGLGLDPNKPPELPSTVNAEPLGLIQSGPHQAAPPPPPPPPPPPAPASEPKGGLTSPIFCSTKPKKLLKTSSFHLLRRRDPPFQTPKKLYAQEYEFEADEDKADVPADIRLNPRRLPDLVSSCRSRPALSPLGDIDFCPPNPGPDGPRRRGRKPTKAKRDGPPRPRGRPRIRPLEVPTTAGPASASTPTDGAKKPRGRGRGRGRKAEEAGGTRLEPLKPLKIKLSVPKAGEGLGTSSGDAISGTDHNSLDSSLTREKIEAKIKEVEEKQPEMKSGFMASFLDFLKSGKRHPPLYQAGLTPPLSPPKSVPPSVPARGLQPQPPATPAVPHPPPSGAFGLGGALEAAESEGLGLGCPSPCKRLDEELKRNLETLPSFSSDEEDSVAKNRDLQESISSAISALDDPPLAGPKDTSTPDGPPLAPAAAVPGPPPLPGLPSANSNGTPEPPLLEEKPPPTPPPAPTPQPQPPPPPPPPQPALPSPPPLVAPTPSSPPPPPLPPPPPPAMPSPPPPPPPAAAPLAAPPEEPAAPSPEDPELPDTRPLHLAKKQETAAVCGETDEEAGESGGEGIFRERDEFVIRAEDIPSLKLALQTGREPPPIWRVQKALLQKFTPEIKDGQRQFCATSNYLGYFGDAKNRYQRLYVKFLENVNKKDYVRVCARKPWHRPPVPVRRSGQAKNPVSAGGSSAPPPKAPAPPPKPETPEKTTSEKPPEQTPETAMPEPPAPEKPSLLRPVEKEKEKEKVTRGERPLRGERATSGRQTRPERSLATGQPATSRLPKARPTKVKAEPPPKKRKKWLKEAGGNATAGGGPPGSSSDSESSPGAPSEDERAVPGRLLKTRAMREMYRSYVEMLVSTALDPDMIQALEDTHDELYLPPMRKIDGLLNEHKKKVLKRLSLSPALQDALHTFPQLQVEQSGEGSPEEGAVRLRPAGEPYNRKTLSKLKRSVVRAQEFKVELEKSGYYTLYHSLHHYKYHTFLRCRDQTLAIEGGAEDLGQEEVVQQCMRNQPWLEQLFDSFSDLLAQAQAHSRCG

SEQ ID NO: 73428 - protein, 187 aa, Homo sapiens
MATASPSVFLLMVNGQVESAQFPEYDDLYCKYCFVYGQDWAPTAGLEEGISQITSKSQDVRQALVWNFPIDVTFKSTNPYGWPQIVLSVYGPDVFGNDVVRGYGAVHVPFSPGRHKRTIPMFVPESTSKLQKFTSWFMGRRPEYTDPKVVAQGEGREDENAEAEIPRSTWVSLCPSPAWLMLPFCPQ

SEQ ID NO: 73429 - protein, 89 aa, Homo sapiens
MLGKNRLIFPGEKVLLAWSGGPSSSSMVWQVLEGLSQDSAKRLRFVAGVIFVDEGAACGQSLEERSKTLAEVKPILQATGFPWHVVALE

SEQ ID NO: 73430 - protein, 101 aa, Homo sapiens
  MOD_RES (1)..(1): Any amino acid
XPFSAPWWFWLSLTGVSLAGALGVKFVGLFIILQVGLNTIADLWYLFGDLSLSLKMCKDHPATVCEVTVGKHLTARVLCLIVLPLALYTATFAVHFMVLSK

SEQ ID NO: 73431 - protein, 41 aa, Homo sapiens
  MOD_RES (1)..(1): Any amino acid
XTYFPFSCSCLNQLLAVVSKWLIMRKSLIRHLEERGVQVRP

SEQ ID NO: 73432 - protein, 591 aa, Homo sapiens
MKLLHVFLLFLCFHLRFCKVTYTSQEDLVEKKCLAKKYTHLSCDKVFCQPWQRCIEGTCVCKLPYQCPKNGTAVCATNRRSFPTYCQQKSLECLHPGTKFLNNGTCTAEGKFSVSLKHGNTDSEGIVEVKLVDQDKTMFICKSSWSMREANVACLDLGFQQGADTQRRFKLSDLSINSTECLHVHCRGLETSLAECTFTKRRTMGYQDFADVVCYTQKADSPMDDFFQCVNGKYISQMKACDGINDCGDQSDELCCKACQGKGFHCKSGVCIPSQYQCNGEVDCITGEDEVGCAAARHPTIQGFASVTQEETEILTADMDAERRRIKSLLPKLSCGVKNRMHIRRKRIVGGKRAQLGDLPWQVAIKDASGITCGGIYIGGCWILTAAHCLRASKTHRYQIWTTVVDWIHPDLKRIVIEYVDRIIFHENYNAGTYQNDIALIEMKKDGNKKDCELPRSIPACVPWSPYLFQPNDTCIVSGWGREKDNERVFSLQWGEVKLISNCSKFYGNRFYEKEMECAGTYDGSIDACKGDSGGPLVCMDANNVTYVWGVVSWGENCGKPEFPGVYTKVANYFDWISYHVGRPFISQYNV

SEQ ID NO: 73433 - protein, 463 aa, Homo sapiens
MGDDRPFVCNAPGCGQRFTNEDHLAVHKHKHEMTLKFGPARTDSVIIADQTPTPTRFLKNCEEVGLFNELASSFEHEFKKAADEDEKKAAAGPLDMSLPSTPDIKIKEEEPVEVDSSPPDSPASSPCSPPLKEKEVTPKPVLISTPTPTIVRPGSLPLHLGYDPLHPTLPSPTSVITQAPPSNRQMGSPTGSLPLVMHLANGQTMPVLPGPPVQMPSVISLARPVSMVPNIPGIPGPPVNSSGSISPSGHPIPSEAKMRLKATLTHQVSSINGGCGMVVGTASTMVTARPEQSQILIQHPDAPSPAQPQVSPAQPTPSTGGRRRRTVDEDPDERRQRFLERNRAAASRCRQKRKLWVSSLEKKAEELTSQNIQLSNEVTLLRNEVAQLKQLLLAHKDCPVTALQKKTQGYLGGRQRTPPTTGCPDLWVTVALPAPGNGETWPEPSLPVSAPEVWQKYPGILEE

SEQ ID NO: 73434 - protein, 198 aa, Homo sapiens
MPEGAQGLSLSKPSPSLGCGRRGEVCDCGTVCETRTAAPAAPTMASPRGSGSSTSLSTVGSEGDPAPGPTPACSASRPEPLPGPPIRLHLSPVGIPGSARPSRLERVAREIVETERAYVRDLRSIVEDYLGPLLDGGVLGLSVEQVGTLFANIEDIYEFSSELLEDLENSSSAGGIAECFVQRSEDFDIYTLYCMNYP

SEQ ID NO: 73435 - protein, 39 aa, Homo sapiens
APLNETGEVVNEKVSRRWQVLQIHLSNVKFVLQRVLPLI

SEQ ID NO: 73436 - protein, 595 aa, Homo sapiens
MVKLAKAGKNQGDPKKMAPPPKEVEEDSEDEEMSEDEEDDSSGEEVVIPQKKGKKAAATSAKKVVVSPTKKVAVATPAKKAAVTPGKKAAATPAKKTVTPAKAVTTPGKKGATPGKALVATPGKKGAAIPAKGAKNGKNAKKEDSDEEEDDDSEEDEEDDEDEDEDEDEIEPAAMKAAAAAPASEDEDDEDDEDDEDDDDDEEDDSEEEAMETTPAKGKKAAKVVPVKAKNVAEDEDEEEDDEDEDDDDDEDDEDDDDEDDEEEEEEEEEEPVKEAPGKRKKEMAKQKAAPEAKKQKVEGTEPTTAFNLFVGNLNFNKSAPELKTGISDVFAKNDLAVVDVRIGMTRKFGYVDFESAEDLEKALELTGLKVFGNEIKLEKPKGKDSKKERDARTLLAKNLPYKVTQDELKEVFEDAAEIRLVSKDGKSKGIAYIEFKTEADAEKTFEEKQGTEIDGRSISLYYTGEKGQNQDYRGGKNSTWSGESKTLVLSNLSYSATEETLQEVFEKATFIKVPQNQNGKSKGYAFIEFASFEDAKEALNSCNKREIEGRAIRLELQGPRGSPNARSLTFFFPSQSHPKLCLSKACLRIPLKRH

SEQ ID NO: 73437 - protein, 117 aa, Homo sapiens
  MOD_RES (1)..(1): Any amino acid
XPNIEKSVKDLQRCTVSLTRYRVMIKEEVDSSVKKIKAAFAELHNCIIDKEVSLMAEMDKVKEEAKSHPVTQAGVQWHNLCSLQAPPPRFTPFSCLSLLSSWDYRRPPPRPANFLGF

SEQ ID NO: 73438 - protein, 139 aa, Homo sapiens
EEHLRRMEEARLQLKDQLLCLETEQESILGVIGKEIDAACKTFSKDSVEKLKVFSSGPDIHYDPHRWLAESKTKLQWLCEELKERENREKNLRHQLMLCRQQLRNLTENKESELQCLFQQIERQEQLLDEIHREKRGVC

SEQ ID NO: 73439 - protein, 333 aa, Homo sapiens
MAAQGCAASRLLQLLLQLLLLLLLLAAGGARARWRGEGTSAHLRDIFLGRCAEYRALLSPEQRQIRNSREPPVLHTTQNKNCTAIWEAFKVALDKDPCSVLPSDYDLFINLSRHSIPRDKSLFWENSHLLVNSFADNTRRFMPLSDVLYGRVADFLSWCRQKNDSGLDYQSCPTSEDCENNPVDSFWKRASIQYSKDSSGVIHVMLNGSEPTGAYPIKGFFADYEIPNLQKEKITRIEIWVMHEIGGPNVESCGEGSMKVLEKRLKDMGFQYSCINDYRPVKLLQCVDHSTHPDCALKSAAAATQRKAPSLYTEQRAGLIIPLFLVLASRTQL

SEQ ID NO: 73440 - protein, 83 aa, Homo sapiens
  MOD_RES (1)..(1): Any amino acid
XDSGKVTTVVATLGQGPERSQEVAYTDIKVIGNGSFGVVYQARLAETRELVAIKKNRELQIMRKLDHCNIVRLRYFFYSSGEK

SEQ ID NO: 73441 - protein, 68 aa, Homo sapiens
MALRYPMAVGLNKGHKVTKNVSKPRHSRRRGREHLESGAGQRVWGSDAGVGVRSWSWPEVAVCEVEGF

SEQ ID NO: 73442 - protein, 131 aa, Homo sapiens
MSKNPSGKNRETVPIKDNFELEVLQAQYKELKEKMKVMEEEVLIKNGEIKILRDSLHQTESVLEEQRRSHFLLEQEKTQALSDKEKEFSKKLQSLQSELQFKDAEMNELRTKLQTSERANKLAAPSVSHVR

SEQ ID NO: 73443 - protein, 279 aa, Homo sapiens
MSEESDSLRTSPSVASLSENELPPPPEPPGYVCSLTEDLVTKAREELQEKPEWRLRDVQALRDMVRKEYPNLSTSLDDAFLLRFLRARKFDYDRALQLLVNYHSCRRSWPEVFNNLKPSALKDVLASGFLTVLPHTDPRGCHVVCIRPDRWIPSNYPITENIRAIYLTLEKLIQSEETQDGFPIRIKAVHVVNEPRIFKGIFAIIKPFLKEKIANRFFLHGSDLNSLHTNLPRSILPKEYGGTAGELDTATWNAVLLASEDDFVKEFCQPVPACDSILG

SEQ ID NO: 73444 - protein, 60 aa, Homo sapiens
MVNKDMNGFPVKKCSAFQFFKKRVRRWIKSPMVSVDKHQSPSLKYTGSSMVHIPPGEPDF

SEQ ID NO: 73445 - protein, 86 aa, Homo sapiens
MASVWQRLGFYASLLKRQLNGGPDVIKWERRVIPGCTRSIYSATGKWTKEYTLQTRKDVEKWWHQRIKEQASKISEADTGAEFFLA

SEQ ID NO: 73446 - protein, 124 aa, Homo sapiens
MDTLPDNRTRVVEDNHSYYVSRLYGPSEPHSRELWVDVAEANRSQVKIHTILSNTHRQASRVVLSFDFPFYGHPLRQITIATGGFIFMGDVIHRMLTATQYVAPLMANFNPGYSDNSTVVYFDN

SEQ ID NO: 73447 - protein, 448 aa, Homo sapiens
MYPQGRHPAPHQPGQPGFKFTVAESCDRIKDEFQFLQAQYHSLKVEYDKLANEKTEMQRHYVMYYEMSYGLNIEMHKQTEIAKRLNTILAQIMPFLSQEHQQQVAQAVERAKQVTMTELNAIIGQQQLQAQHLSHATHGPPVQLPPHPSGLQPPGIPPVTGSSSGLLALGALGSQAHLTVKDEKNHHELDHRERESSANNSVSPSESLRASEKHRGSADYSMEAKKRKAEEKDSLSRYDSDGDKSDDLVVDVSNEDPATPRVSPAHSPPENGLDKARSLKKDAPTSPASVASSSSTPSSKTKDLGHNDKSSTPGLKSNTPTPRNDAPTPGTSTTPGLRSMPGKPPGMDPIGIMASALRTPISITSSYAAPFAMMSHHEMNGSLTSPGAYAGLHNIPPQMSAAAAAAAAAYGRSPMVGFDPHPPMRATGLPSSLASIPGGKPVLIPCEC

SEQ ID NO: 73448 - protein, 295 aa, Homo sapiens
MAWRGWAQRGWGCGQAWGASVGGRSCEELTAVLTPPQLLGRRFNFFIQQKCGFRKAPRKVEPRRSDPGTSGEAYKRSALIPPVEETVFYPSPYPIRSLIKPLFFTVGFTGCAFGSAAIWQYESLKSRVQSYFDGIKADWLDSIRPQKEGDFRKEINKWWNNLSDGQRTVTGIIAANVLVFCLWRVPSLQRTMIRYFTSNPASSVISNFVSYVGKVATGRYGPSLGAALKAIIAMDTAGMILGWKFFDHAAHLGGALFGIWYVTYGHELIWKNREPLVKIWHEIRTNGPKKGGGSK

SEQ ID NO: 73449 - protein, 1235 aa, Homo sapiens
MIQGTLEPDGPLWGWDWDSDNDWDSAVLALLALAVVAATALALHWFGSGHDQEAAEPVSTALGAQPHQAGGAELALQPKSKVSDGSEGQSPGQGKPEPPGRGQQSPVPAAAPGGGLAAMARLPLKTAVEEARREALGQQRGSATPAAPRAEGKEPPRPGTALLGRSEAGGMSAPLLIHFTPRSPGSEAEAETGGVRASSRQAAGPAGQQDTGPWQAGAGPSGSMGRGRGRRRRMDAGSGDRARRPRKLDPLRLGAAGSVWDAVDGAAALDAHARGLPTGPPLAQEPALPALPAPRALQPGSQTEGSGAKGGWSREASGVPAPGGGWPWVSREVPGTRSFGPAPDSTRPWLESPPQGRPLSSQGPGATGAYDAGEAGADSSRDNSPAADLGPTRPPEQAKPAAAGHSRAPSRSREPRPRSASPPAAPGPGFPPEALTLPSPSDFLPLEVTQDPSVGENLRAAPAPSSASAQVLTSAPASVLAPALASSPSSAPTSATTSTSSPTSAPAPAPTSAPTSTPAPAPSPAAAATPAPAPVPVPTLTPPSPALTPVPTPALSPAPTPALTPAASPALTPVPTPALSPAPTPAPTPAASPAPAPTSAPTPTPAASPAPADGSKPQESVALPRRYQEGQVSASWGNLIAMVLRSHPFPRQDRPQGSVPRAVPGSPVGPSTSTHSEDRHGPSSSVGTVIGTGTGGLVEAGGQPQPRSSETNGSPSPDPPPGLRGEGTREKSLDPLPQAAMPRGPAQPPAQRPPGPAASSSARRSQPVPQLRKRSRCEIAPSSEQEVRPAASGDPQGEAPGEGGSPAGRSGALTEKQEEARKLMVFLQRPGGWGVVEGPRKPSSRALEPATAAALRRRLDLGSCLDVLAFAQQHGEPGLAQETYALMSDNLLRVLGDPCLYRRLSAADRERILSLRTGRGRAVLGVLVLPSLYQGGRSGLPRGPRGEEPPAAAPVSLPLPAHLHVFNPRENTWRPLTQVPEEAPLRGCGLCTMHNYLFLAGGIRGSGAKAVCSNEVFCYNPLTNIWSQVRPMQQARAQLKLVALDGLLYAIGGECLYSMECYDPRTDAWTPRAPLPAGTFPVAHEAVACRGDIYVTGGHLFYRLLRYSPVKDAWDECPYSASHRRSSDIVALGGFLYRFDLLRGVGAAVMRYNTVTGSWSRAASLPLPAPAPLHCTTLGNTIYCLNPQVTATFTVSGGTAQFQAKELQPFPLGSTGVLSPFILTLPPEDRLQTSL

SEQ ID NO: 73450 - protein, 330 aa, Homo sapiens
EQCPENGEEAVTLVEDLEREPGRPRSSVTVSVKGQEVRLEKMTPPKSSQELLSVRQESVEPQPRGVPKKERARSPDLGPQEQMNPKEKLKPFQRSGLPFPKSGVVSRLEQGEPWIPDLLGSKEKELPSGSHIGDRRVHADLLPSKKDRRSWVEQDHWSFEDEKVAGVHWGYEETRTLLAILSQTEFYEALRNCHRNSQVYGAVAERLREYGFLRTLEQCRTKFKGLQKSYRKVKSGHPPETCPFFEEMEALMSAQVIALPSNGLEAAASHSGLVGSDAETEEPGQRGWQHEEGAEEAVAQESDSDDMDLEATPQDPNSAAPVVFRSPGGA

SEQ ID NO: 73451 - protein, 106 aa, Homo sapiens
MIKCLSVEVQAKLRSGLAISSLGQCVEELALNSIDAEAKCVAVRVNMETFQVQVIDNGFGMGSDDVEKVGNRYFTSKCHSVQDLENPRFYGFRGEALANIADMASA

SEQ ID NO: 73452 - protein, 161 aa, Homo sapiens
MESPEEPGASMDENYFVNYTFKDRSHSGRVAQGIMKLCLEEELFADVTISVEGREFQLHRLVLSAQSCFFRSMFTSNLKEAHNRVIVLQDVSESVFQLLVDYIYHGTVKLRAEELQEIYEVSDMYQLTSLFEECSRFLARTVQVGNCLQVMWLADRHSDPE

SEQ ID NO: 73453 - protein, 131 aa, Homo sapiens
MEQVAKKLGVAHEEIQRLTDELQVKEKEQCKLDSALKKAQLEIDKLKENLVKLKENDAADLQKAKEQNQRLDEEILALRNRVRSLDSEKKVLGEMVERLKGEVCESQENKQLGNHSPGKTVGGEQREQVLK

SEQ ID NO: 73454 - protein, 739 aa, Homo sapiens
MAALLRSARWLLRAGAAPRLPLSLRLLPGGPGRLHAASYLPAARAGPVAGGLLSPARLYAIAAKEKDIQEESTFSSRKISNQFDWALMRLDLSVRRTGRIPKKLLQKVFNDTCRSGGLGGSHALLLLRSCGSLLPELKLEERTEFAHRIWDTLQKLGAVYDVSHYNALLKVYLQNEYKFSPTDFLAKMEEANIQPNRVTYQRLIASYCNVGDIEGASKILGFMKTKDLPVTEAVFSALVTGHARAGDMENAENILTVMRDAGIEPGPDTYLALLNAYAEKGDIDHVKQTLEKVEKSELHLMDRDLLQIIFSFSKAGYPQYVSEILEKVTCERRYIPDAMNLILLLVTEKLEDVALQILLACPVSKEDGPSVFGSFFLQHCVTMNTPVEKLTDYCKKLKEVQMHSFPLQFTLHCALLANKTDLAKALMKAVKEEGFPIRPHYFWPLLVGRRKEKNVQGIIEILKGMQELGVHPDQETYTDYVIPCFDSVNSARAILQENGCLSDSDMFSQAGLRSEAANGNLDFVLSFLKSNTLPISLQSIRSSLLLGFRRSMNINLWSEITELLYKDGRYCQEPRGPTEAVGYFLYNLIDSMSDSEVQAKEEHLRQYFHQLEKMNVKIPENIYRGIRNLLESYHVPELIKDAHLLVESKNLDFQKTVQLTSSELESTLETLKAENQPIRDVLKQLILVLCSEENMQKALELKAKYESDMVTGGYAALINLCCRHDKVEDALNLKEELCY

SEQ ID NO: 73455 - protein, 51 aa, Homo sapiens
GEKEQPVFAMTGLRWGSFRDAGVKVSKYWYLGPLKIKAAHFFSTLKPFPKR

SEQ ID NO: 73456 - protein, 103 aa, Homo sapiens
MALCALTRALRSLNLAPPTVAAPAPSLFPAAQMMNNGLLQQPSALMLLPCRPVLTSVALNANFVSWKSRTKYTITPVKMRKSGGRDHTGAGNVRSNSRPSIQR

SEQ ID NO: 73457 - protein, 81 aa, Homo sapiens
MAGRKLALKTIDWVAFAEIIPQNQKAIASSLKSWNETLTSRLAALPENPPAIDWAYYKANVAKAGLVDDFEKKLSIIAKLS

SEQ ID NO: 73458 - protein, 84 aa, Homo sapiens
MRREFCWDAYSKAAGSRASSPLPRQDRDSFCHQMSFCLTELHLWSLKNTLHIADRDIGIYQYYDKKDPPARDYPWTLKNRRPEK

SEQ ID NO: 73459 - protein, 1521 aa, Homo sapiens
MQPQNVQGLSKVSEEPSTSSDERASLIKKEIHGSLPHVAEPSVPYRGTVFAMDPRNGYMEPHYHPPHLFPAFHPPVPIDARHHEGRYHYDPSPIPPLHMTSALSSSPTYPDLPFIRISPHRNPTAASESPFSPPHPYINPYMDYIRSLHSSPSLSMISATRGLSPTDAPHAGVSPAEYYHQMALLTGQRSPYADIIPSAATAGTGAIHMEYLHAMDSTRFSSPRLSARPSRKRTLSISPLSDHSFDLQTMIRTSPNSLVTILNNSRSSSSASGSYGHLSASAISPALSFTYSSAPVSLHMHQQILSRQQSLGSAFGHSPPLIHPAPTFPTQRPIPGIPTVLNPVQVSSGPSESSQNKPTSESAVSSTGDPMHNKRSKIKPDEDLPSPGARGQQEQPEGTTLVKEEGDKDESKQEPEVIYETNCHWEGCAREFDTQEQLVHHINNDHIHGEKKEFVCRWLDCSREQKPFKAQYMLVVHMRRHTGEKPHKCTFEGCTKAYSRLENLKTHLRSHTGEKPYVCEHEGCNKAFSNASDRAKHQNRTHSNEKPYVCKIPGCTKRYTDPSSLRKHVKTVHGPEAHVTKKQRGDIHPRPPPPRDSGSHSQSRSPGRPTQGALGEQQDLSNTTSKREECLQVKTVKAEKPMTSQPSPGGQSSCSSQQSPISNYSNSGLELPLTDGGSIGDLSAIDETPIMDSTISTATTALALQARRNPAGTKWMEHVKLERLKQVNGMFPRLNPILPPKAPAVSPLIGNGTQSNNTCSLGGPMTLLPGRSDLSGVDVTMLNMLNRRDSSASTISSAYLSSRRSSGISPCFSSRRSSEASQAEGRPQNVSVADSYDPISTDASRRSSEASQSDGLPSLLSLTPAQQYRLKAKYAAATGGPPPTPLPNMERMSLKTRLALLGDALEPGVALPPVHAPRRCSDGGAHGYGRRHLQPHDAPGHGVRRASDPVRTGSEGLALPRVPRFSSLSSCNPPAMATSAEKRSLVLQNYTRPEGGQSRNFHSSPCPPSITENVTLESLTMDADANLNDEDFLPDDVVQYLNSQNQAGYEQHFPSALPDDSKVPHGPGDFDAPGLPDSHAGQQFHALEQPCPEGSKTDLPIQWNEVSSGSADLSSSKLKCGPRPAVPQTRAFGFCNGMVVHPQNPLRSGPAGGYQTLGENSNPYGGPEHLMLHNSPGSGTSGNAFHEQPCKAPQYGNCLNRQPVAPGALDGACGAGIQASKLKSTPMQGSGGQLNFGLPVAPNESAGSMVNGMQNQDPVGQGYLAHQLLGDSMQHPGAGRPGQQMLGQISATSHINIYQGPESCLPGAHGMGSQPSSLAVVRGYQPCASFGGSRRQAMPRDSLALQSGQLSDTSQTCRVNGIKMEMKGQPHPLCSNLQNYSGQFYDQTVGFSQQDTKAGSFSISDASCLLQGTSAKNSELLSPGANQVTSTVDSLDSHDLEGVQIDFDAIIDDGDHSSLMSGALSPSIIQNLSHSSSRLTTPRASLPFPALSMSTTNMAIGDMSSLLTSLAEESKFLAVMQ

SEQ ID NO: 73460 - protein, 205 aa, Homo sapiens
  MOD_RES (1)..(1): Any amino acid
XKHAAKHGWDINKDACLFRSWAIHTGRYKAGEKEPDPKTWKANFRCAMNSLPDIEEVKDQSRNKGSSAVRVYRMLPPLTKNQRKERKSKSSRDAKSKAKRKSCGDSSPDTFSDGLSSSTLPDDHSSYTVPGYMQDLEVEQALTPALSPCAVSSTLPDWHIPVEVVPDSTSDLYNFQVSPMPSTSEALGAVGVAANKRGWEGVPTQ

SEQ ID NO: 73461 - protein, 62 aa, Homo sapiens
MVRTDGHTLSEKRNYQVTNSMFGASRKKFVEGVDSDYHDENMYYSQSSMFPHRSEKDTEVKM

SEQ ID NO: 73462 - protein, 76 aa, Homo sapiens
MAKRNAEKELTDRNWDQEDEAEEVGTFSMASEEVLKNRAIKKAKRRNVGFEVLLLQMALPPWLIKFQIPKLMGTVS

SEQ ID NO: 73463 - protein, 148 aa, Homo sapiens
MSEEIITPVYCTGVSAQVQKQRARELGLGRHENAIKYLGQDYEQLRVRCLQSGTLFRDEAFPPVPQSLGYKDLGPNSSKTYGIKWKRPTELLSNPQFIVDGATRTDICQGALGDCWLLAAIASLTLNDTLLHRVVPHGQSFQNGYAGI

SEQ ID NO: 73464 - protein, 105 aa, Homo sapiens
MEPAMEPETLEARINRATNPLNKELDWASINGFCEQLNEDFEGPPLATRLLAHKIQSPQEWEAIQALTVLETCMKSCGKRFHDEVGKFRFLNELIKVVSPKGTLL

SEQ ID NO: 73465 - protein, 70 aa, Homo sapiens
MSGHKCYPWDLQDRYAQDKSVVNKMQQKYWETKQAFIKATGKKEDEHVVASDADLDAKLELFHSIQRTCL

SEQ ID NO: 73466 - protein, 599 aa, Homo sapiens
MNPSAPSYPMASLYVGDLHPDVTEAMLYEKFSPAGPILSIRVCRDMITRRSLGYAYVNFQQPADAERALDTMNFDVIKGKPVRIMWSQRDPSLRKSGVGNIFIKNLDKSIDNKALYDTFSAFGNILSCKVVCDENGSKGYGFVHFETQEAAERAIEKMNGMLLNDRKVFVGRFKSRKEREAELGARAKEFTNVYIKNFGEDMDDERLKDLFGKFGPALSVKVMTDESGKSKGFGFVSFERHEDAQKAVDEMNGKELNGKQIYVGRAQKKVERQTELKRKFEQMKQDRITRYQGVNLYVKNLDDGIDDERLRKEFSPFGTITSAKVMMEGGRSKGFGFVCFSSPEEATKAVTEMNGRIVATKPLYVALAQRKEERQAHLTNQYMQRMASVRAVPNPVINPYQPAPPSGYFMAAIPQTQNRAAYYPPSQIAQLRPSPRWTAQGARPHPNTSTQTMGPRPAAAAAAATPAVRTVPQYKYAAGVRNPQQHLNAQPQVTMQQPAVHVQGQEPLTASMLASAPPQEQKQMLGERLFPLIQAMHPTLAGKITGMLLEIDNSELLHMLESPESLRSKVDEAVAVLQAHQAKEAAQKAVNSATGVPTV

SEQ ID NO: 73467 - protein, 4222 aa, Homo sapiens
MMPAQYALTSSLVLLVLLSTARAGPFSSRSNVTLPAPRPPPQPGGHTVGAGVGSPSSQLYEHTVEGGEKQVVFTHRINLPPSTGCGCPPGTEPPVLASEVQALRVRLEILEELVKGLKEQCTGGCCPASAQAGTGQTDVRTLCSLHGVFDLSRCTCSCEPGWGGPTCSDPTDAEIPPSSPPSASGSCPDDCNDQGRCVRGRCVCFPGYTGPSCGWPSCPGDCQGRGRCVQGVCVCRAGFSGPDCSQRSCPRGCSQRGRCEGGRCVCDPGYTGDDCGMRSCPRGCSQRGRCENGRCVCNPGYTGEDCGVRSCPRGCSQRGRCKDGRCVCDPGYTGEDCGTRSCPWDCGEGGRCVDGRCVCWPGYTGEDCSTRTCPRDCRGRGRCEDGECICDTGYSGDDCGVRSCPGDCNQRGRCEDGRCVCWPGYTGTDCGSRACPRDCRGRGRCENGVCVCNAGYSGEDCGVRSCPGDCRGRGRCESGRCMCWPGYTGRDCGTRACPGDCRGRGRCVDGRCVCNPGFTGEDCGSRRCPGDCRGHGLCEDGVCVCDAGYSGEDCSTRSCPGGCRGRGQCLDGRCVCEDGYSGEDCGVRQCPNDCSQHGVCQDGVCICWEGYVSEDCSIRTCPSNCHGRGRCEEGRCLCDPGYTGPTCATRMCPADCRGRGRCVQGVCLCHVGYGGEDCGQEEPPASACPGGCGPRELCRAGQCVCVEGFRGPDCAIQTCPGDCRGRGECHDGSCVCKDGYAGEDCGEEVPTIEGMRMHLLEETTVRTEWTPAPGPVDAYEIQFIPTTEGASPPFTARVPSSASAYDQRGLAPGQEYQVTVRALRGTSWGLPASKTITTMIDGPQDLRVVAVTPTTLELGWLRPQAEVDRFVVSYVSAGNQRVRLEVPPEADGTLLTDLMPGVEYVVTVTAERGRAVSYPASVRANTGSSPLGLLGTTDEPPPSGPSTTQGAQAPLLQQRPQELGELRVLGRDETGRLRVVWTAQPDTFAYFQLRMRVPEGPGAHEEVLPGDVRQALVPPPPPGTPYELSLHGVPPGGKPSDPIIYQGIMDKDEEKPGKSSGPPRLGELTVTDRTSDSLLLRWTVPEGEFDSFVIQYKDRDGQPQVVPVEGPQRSAVITSLDPGRKYKFVLYGFVGKKRHGPLVAEAKILPQSDPSPGTPPRLGNLWVTDPTPDSLHLSWTVPEGQFDTFMVQYRDRDGRPQVVPVEGPERSFVVSSLDPDHKYRFTLFGIANKKRYGPLTADGTTAPERKEEPPRPEFLEQPLLGELTVTGVTPDSLRLSWTVAQGPFDSFMVQYKDAQGQPQAVPVAGDENEVTVPGLDPDRKYKMNLYGLRGRQRVGPESVVAKTAPQEDVDETPSPTELGTEAPESPEEPLLGELTVTGSSPDSLSLFWTVPQGSFDSFTVQYKDRDGRPRAVRVGGKESEVTVGGLEPGHKYKMHLYGLHEGQRVGPVSAVGVTAPQQEETPPATESPLEPRLGELTVTDVTPNSVGLSWTVPEGQFDSFIVQYKDKDGQPQVVPVAADQREVTVYNLEPERKYKMNMYGLHDGQRMGPLSVVIVTAPLPPAPATEASKPPLEPRLGELTVTDITPDSVGLSWTVPEGEFDSFVVQYKDRDGQPQVVPVAADQREVTIPDLEPSRKYKFLLFGIQDGKRRSPVSVEAKTVARGDASPGAPPRLGELWVTDPTPDSLRLSWTVPEGQFDSFVVQFKDKDGPQVVPVEGHERSVTVTPLDAGRKYRFLLYGLLGKKRHGPLTADGTTEARSAMDDTGTKRPPKPRLGEELQVTTVTQNSVGLSWTVPEGQFDSFVVQYKDRDGQPQVVPVEGSLREVSVPGLDPAHRYKLLLYGLHHGKRVGPISAVAITAGREETETETTAPTPPAPEPHLGELTVEEATSHTLHLSWMVTEGEFDSFEIQYTDRDGQLQMVRIGGDRNDITLSGLESDHRYLVTLYGFSDGKHVGPVHVEALTVPEEEKPSEPPTATPEPPIKPRLGELTVTDATPDSLSLSWTVPEGQFDHFLVQYRNGDGQPKAVRVPGHEEGVTISGLEPDHKYKMNLYGFHGGQRMGPVSVVGVTAAEEETPSPTEPSMEAPEPAEEPLLGELTVTGSSPDSLSLSWTVPQGRFDSFTVQYKDRDGRPQVVRVGGEESEVTVGGLEPGRKYKMHLYGLHEGRRVGPVSAVGVTAPEEESPDAPLAKLRLGQMTVRDITSDSLSLSWTVPEGQFDHFLVQFKNGDGQPKAVRVPGHEDGVTISGLEPDHKYKMNLYGFHGGQRVGPVSAVGLTAPGKDEEMAPASTEPPTPEPPIKPRLEELTVTDATPDSLSLSWTVPEGQFDHFLVQYKNGDGQPKATRVPGHEDRVTISGLEPDNKYKMNLYGFHGGQRVGPVSAIGVTAAEEETPSPTEPSMEAPEPPEEPLLGELTVTGSSPDSLSLSWTVPQGRFDSFTVQYKDRDGRPQVVRVGGEESEVTVGGLEPGRKYKMHLYGLHEGRRVGPVSTVGVTAPQEDVDETPSPTEPGTEAPEPPEEPLLGELTVTGSSPDSLSLSWTVPQGRFDSFTVQYKDRDGRPQAVRVGGQESKVTVRGLEPGRKYKMHLYGLHEGRRLGPVSAVGVTEDEAETTQAVPTMTPEPPIKPRLGELTMTDATPDSLSLSWTVPEGQFDHFLVQYRNGDGQPKAVRVPGHEDGVTISGLEPDHKYKMNLYGFHGGQRVGPISVIGVTAAEEETPSPTELSTEAPEPPEEPLLGELTVTGSSPDSLSLSWTIPQGHFDSFTVQYKDRDGRPQVMRVRGEESEVTVGGLEPGRKYKMHLYGLHEGRRVGPVSTVGVTVPTTTPEPPNKPRLGELTVTDATPDSLSLSWMVPEGQFDHFLVQYRNGDGQPKVVRVPGHEDGVTISGLEPDHKYKMNLYGFHGGQRVGPISVIGVTAAEEETPAPTEPSTEAPEPPEEPLLGELTVTGSSPDSLSLSWTIPQGRFDSFTVQYKDRDGRPQVVRVRGEESEVTVGGLEPGCKYKMHLYGLHEGQRVGPVSAVGVTVPTMTPEPPIKPRLGELTVTDATPDSLSLSWMVPEGQFDHFLVQYRNGDGQPKAVRVPGHEDGVTISGLEPDHKYKMNLYGFHGGQRVGPVSAIGVTEEETPSPTEPSTEAPEAPEEPLLGELTVTGSSPDSLSLSWTVPQGRFDSFTVQYKDRDGQPQVVRVRGEESEVTVGGLEPGRKYKMHLYGLHEGQRVGPVSTVGITAPLPTPLPVEPRLGELAVAAVTSDSVGLSWTVAQGPFDSFLVQYRDAQGQPQAVPVSGDLRAVAVSGLDPARKYKFLLFGLQNGKRHGPVPVEARTAPDTKPSPRLGELTVTDATPDSVGLSWTVPEGEFDSFVVQYKDKDGRLQVVPVAANQREVTVQGLEPSRKYRFLLYGLSGRKRLGPISADSTTAPLEKELPPHLGELTVAEETSSSLRLSWTVAQGPFDSFVVQYRDTDGQPRAVPVAADQRTVTVEDLEPGKKYKFLLYGLLGGKRLGPVSALGMTAPEEDTPAPELAPEAPEPPEEPRLGVLTVTDTTPDSMRLSWSVAQGPFDSFVVQYEDTNGQPQALLVDGDQSKILISGLEPSTPYRFLLYGLHEGKRLGPLSAEGTTGLAPAGQTSEESRPRLSQLSVTDVTTSSLRLNWEAPPGAFDSFLLRFGVPSPSTLEPHPRPLLQRELMVPGTRHSAVLRDLRSGTLYSLTLYGLRGPHKADSIQGTARTLSPVLESPRDLQFSEIRETSAKVNWMPPPSRADSFKVSYQLADGGEPQSVQVDGQARTQKLQGLIPGARYEVTVVSVRGFEESEPLTGFLTTVPDGPTQLRALNLTEGFAVLHWKPPQNPVDTYDIQVTAPGAPPLQAETPGSAVDYPLHDLVLHTNYTATVRGLRGPNLTSPASITFTTGLEAPRDLEAKEVTPRTALLTWTEPPVRPAGYLLSFHTPGGQTQEILLPGGITSHQLLGLFPSTSYNARLQAMWGQSLLPPVSTSFTTGGLRIPFPRDCGEEMQNGAGASRTSTIFLNGNRERPLIVFCDMETDGGGWLVFQRRMDGQTDFWRDWEDYAHGFGNISGEFWLGNEALHSLTQAGDYSMRVDLRAGDEAVFAQYDSFHVDSAAEYYRLHLEGYHGTAGDSMSYHSGSVFSARDRDPNSLLISCAVSYRGAWWYRNCHYANLNGLYGSTVDHQGVSWYHWKGFEFSVPFTEMKLRPRNFRSPAGGG

SEQ ID NO: 73468 - protein, 52 aa, Homo sapiens
MSATSVDQRPKGQGNKVSVQNGSIHQKDAVNDDDFEPYLSSQTNQERNRNKQ

SEQ ID NO: 73469 - protein, 769 aa, Homo sapiens
MTDAGNRKEGFKKCRSATFSIDGYSFTIVANEAGDKNARPLARFSRSKSQNCLWNSLIDGLTGNVKEKPRPTIVHDPRPPEEILADELPQLDSPEVLVKTSFRLRSLVKQLERGEASVVDLKKNLEYAATVLESVYIDETRRLLDTEDELSDIQSDAVPSEVRDWLASTFTRQMGMMLRRSDEKPRFKSIVHAVQAGIFVERMYRRTSNMVGLSYPPAVIEALKDVDKWSFDVFSLNEASGDHALKFIFYELLTRYDLISRFKIPISALVSFVEALEVGYSKHKNPYHNLMHAADVTQTVHYLLYKTGVANWLTELEIFAIIFSAAIHDYEHTGTTNNFHIQTRSDPAILYNDRSVLENHHLSAAYRLLQDDEEMNILINLSKDDWREFRTLVIEMVMATDMSCHFQQIKAMKTALQQPEAIEKPKALSLMLHTADISHPAKAWDLHHRWTMSLLEEFFRQGDREAELGLPFSPLCDRKSTMVAQSQVGFIDFIVEPTFTVLTDMTEKIVSPLIDETSQTGGTGQRRSSLNSISSSDAKRSGVKTSGSEGSAPINNSVISVDYKSFKATWTEVVHINRERWRAKVPKEEKAKKEAEEKARLAAEEQQKEMEAKSQAEEGASGKAEKKTSGETKNQVNGTRANKSDNPRGKNSKAEKSSGEQQQNGDFKDGKNKTDKKDHSNIGNDSKKTDGTKQRSHGSPAPSTSSTCRLTLPVIKPPLRHFKRPAYASSSYAPSVSKKTDEHPARYKMLDQRIKMKKIQNISHNWNRK

SEQ ID NO: 73470 - protein, 47 aa, Homo sapiens
MTSSQVKTKPFDSWSYSEMEKEFPELIRSVGLLTVAADSISTNGSEA

SEQ ID NO: 73471 - protein, 333 aa, Homo sapiens
MVPFIYLQAHFTLCSGWSSTYRDLRKGVYVPYTQGKWEGELGTDLVSIPHGPNVTVRANIAAITESDKFFINGSNWEGILGLAYAEIARPDDSLEPFFDSLVKQTHVPNLFSLQLCGAGFPLNQSEVLASVGGSMIIGGIDHSLYTGSLWYTPIRREWYYEVIIVRVEINGQDLKMDCKEYNYDKSIVDSGTTNLRLPKKVFEAAVKSIKAASSTEKFPDGFWLGEQLVCWQAGTTPWNIFPVISLYLMGEVTNQSFRITILPQQYLRPVEDVATSQDDCYKFAISQSSTGTVMGAVIMEGFYVVFDRARKRIGFAVSACHGESARAEGLGAR

SEQ ID NO: 73472 - protein, 86 aa, Homo sapiens
MWSNLGIGLAISLSVVGAAWGIYITGSSIIGGGVKAPRIKTKNLVSIIFCEAVAIYGIIMAIVISNMAEPFSATDPKAIGHRNYHA

SEQ ID NO: 73473 - protein, 146 aa, Homo sapiens
MAVGLCKAMSQGLVTFRDVALDFSQEEWEWLKPSQKDLYRDVMLENYRNLVWLGLSISKPNMISLLEQGKEPWMVERKMSQGHCAGSHSVAQAGVQWHDLGSLQPIPTELKQSSHLSMHTTAPDVVRMVVRRSCSPSLCSLCLAGF

SEQ ID NO: 73474 - protein, 299 aa, Homo sapiens
MARRPRHSIYSSDEDDEDFEMCDHDYDGLLPKSGKRHLGKTRWTREENRTDVQCQHRWQKVLNPELIKGPWTKEEDQRVIELVQKYGPKRWSVIAKHLKGRIGKQCRERWHNHLNPEVKKTSWTEEEDRIIYQAHKRLGNRWAEIAKLLPGRTDNAIKNHWNSTMRRKVEQEGYLQESSKASQPAVATSFQKNSHLMGFAQAPPTAQLPATGQPTVNNDYSYYHISEAQNVSSHVPYPVALHVNIVNVPQPAAAAIQRHYNDEDPEKEKRIKELELLLMSTENELKGQQVLPVRLSSCA

SEQ ID NO: 73475 - protein, 439 aa, Homo sapiens
MDVTDYKGETVFHYAVQGDNSQVLQLLGRNAVAGLNQVNNQGLTPLHLACQLGKQEMVRVLLLCNARCNIMGPNGYPIHSAMKFSQKGCAEMIISMDSSQIHSKDPRYGASPLHWAKNAEMARMLLKRGCNVNSTSSAGNTALHVAVMRNRFDCAIVLLTHGANADARGEHGNTPLHLAMSKDNVEMIKALIVFGAEVDTPNDFGETPTFLASKIGRQLQDLMHISRARKPAFILGSMRDEKRTHDHLLCLDGGGVKGLIIIQLLIAIEKASGVATKDLFDWVAGTSTGGILALAILHSKSMAYMRGMYFRMKDEVFRGSRPYESGPLEEFLKREFGEHTKMTDVRKPKVMLTGTLSDRQPAELHLFRNYDAPETVREPRFNQNVNLRPPAQPSDQLVWRAARSSGAAPTYFRPNGRFLDGGLLANNPTLDAMTEIHEY

SEQ ID NO: 73476 - protein, 313 aa, Homo sapiens
MEPMYQDRARDTQTDEIVALKKVRMDKEKDGIPISSLREITLLLRLRHPNIVELKEVVVGNHLESIFLVMGYCEQDLASLLENMPTPFSEAQVKCIVLQVLRGLQYLHRNFIIHRDLKVSNLLMTDKGCVKTADFGLARAYGVPVKPMTPKVVTLWYRAPELLLGTTTQTTSIDMWAVGCILAELLAHRPLLPGTSEIHQIDLIVQLLGTPSENIWPGFSKLPLVGQYSLRKQPYNNLKHKFPWLSEAGLRLLHFLFMYDPKKRATAGDCLESSYFKEKPLPCEPELMPTFPHHRNKRAAPATSEGQSKRCKP

SEQ ID NO: 73477 - protein, 82 aa, Homo sapiens
MASQSQGIQQLLQAEKRAAEKVSEARKRKNRRLKQAKEEAQAEIEQYRLQREKEFKAKEAAVGHWDPVAVAALKWRRRPRRR

SEQ ID NO: 73478 - protein, 90 aa, Homo sapiens
MAVKLHGGIDILVSNAAVNPFFGSLMDVTEEVWDKGFSPYNVSKTALLGLNNTLAIELAPRNIRVNCLHLDLSRLASAGCSGWTRKKRKA

SEQ ID NO: 73479 - protein, 94 aa, Homo sapiens
MSTNICSFKDRCVSILCCKFCKQVLSSRGMKAVLLADTEIDLFSTDIPPTNAVDFTGRCYFTKICKCKLKDIACLKWCKHPTLGQLARDRREYR

SEQ ID NO: 73480 - protein, 303 aa, Homo sapiens
MGGVKALTIDHLAVNDVMLESLRGEGQGLVCDLCNDREVEKRCQTCKANLCHFCCQAHRRQKKTTYHTMVDLKDLKGYSRIGKPILCPVHPAEELRLFCEFCDRPVCQDCVVGEHREHPCDFTSNVIHKHGDSVWELLKGTQPHVEALEEALAQIHIINSALQKRVEAVAADVRTFSEGYIKAIEEHRDKLLKQLEDIRAQKENSLQLQKAQLEQLLADMRTGVEFTEHLLTSGSDLEILITKRVVVERLRKLNKVQYSTRPGVNDKIRFCPQEKAGQCRGYEIYGTINTKEVDPAKCVLQGE

SEQ ID NO: 73481 - protein, 138 aa, Homo sapiens
  MOD_RES (1)..(1): Any amino acid
XQGELTVMRYQLSDDLPSPLPFRLFPSVQWDRGSGRLQVYLKLRCDLLSKSQALNVRLHLPLPRGVVSLSQELSSPEQKAELAEGALRWDLPRVQGGSQLSGLFQVRFLRLAFRPCGNANPHKWVRHLSHSDAYVIRI

SEQ ID NO: 73482 - protein, 285 aa, Homo sapiens
  MOD_RES (1)..(1): Any amino acid
XPKDVTVLSVAEEQDLLKQERLVTVDEIGEVEELPLNESADITFATLNTKGNEGDTVRDSIGFISSQVPEDPSTLVTVDEIQDDSSDLHLVTLDEVTEEDEDSLADFNNLKEELNFVTVDEVGEEEDGDNDLKVELAQSKNDHPTDKKGNRKKRAVDTKKTKLESLSQVGPVNENVMEEDLKTMIERHLTVDEESGLKDSEPERKRKKTEDSSSGKSVASDVPEELDFLVPKAGFFCPICSLFYSGEKAMTNHCKSTRHKQNTEKFMAKQRKEKEQNEAEERSSR

SEQ ID NO: 73483 - protein, 104 aa, Homo sapiens
MAAGERSWCLCKLLRFFYSLFFPGLIVCGTLCVCLVIVLWGIRLLLQRKKKLVSTSKNGKNQMVIAFFHPYCNAGGGGERVLWCALRALQKKRSFTLVAQAGVQ

SEQ ID NO: 73484 - protein, 65 aa, Homo sapiens
  MOD_RES (1)..(1): Any amino acid
XNFDAQQFAGTWLLVAVGSACRFLQEQGHRAEATTLHVAPQGTAMAVSTFRKLPRRPRGCARGCR

SEQ ID NO: 73485 - protein, 144 aa, Homo sapiens
MIDKNQTCGVGQDSVPYMICLIHILEEWFGVEQLEDYLNFANYLLWVFTPLILLILPYFTIFLLYLTIIFLHIYKRKNVLKEAYSHNLWDGARKTVATLWDGHAAVWHGFSLLLDVFCALHGPREKCVEILRSGHLLAISPGGV

SEQ ID NO: 73486 - protein, 55 aa, Homo sapiens
MEDSHKSTTSETAPQPGSAVQGAHISHIAQQLPLPQMEPYSWQVQAQMEYRDFRH

SEQ ID NO: 73487 - protein, 115 aa, Homo sapiens
MDFSMKVFAQIFPQWRKGNTEECLPYKCSETGALGENYSWQIPINHNDFKILKNNERQLCEVLQNKFGCISTLVSPVQEGNSKSLQVFRKMLTPRIELSVWKDDLTTHAVDAVVN

SEQ ID NO: 73488 - protein, 145 aa, Homo sapiens
MGKEKTHINIVVIGHVDSGKSTTTGHLIYKCGGIDKRTIEKFEKEAAEMGKGSFKYAWVLDKLKAERERGITIDISLWKFETSKYYVTIIDAPGHRDFIKNMITGTSQADCAVLIVAAGVGEFEAGISKNGQTREHALLAYTLGV

SEQ ID NO: 73489 - protein, 99 aa, Homo sapiens
MKCSCCEMNVHRRCVRSVPSLCGVDHTERRGRLQLEIRAPTADEIHVTVGEARNLIPMDPNGLSDPYVKLKLIPDPRNLTKQKTRTVKATLNPVWNETF

SEQ ID NO: 73490 - protein, 74 aa, Homo sapiens
MSSHGNSLFLRESGQRLGRVGWLQRLQESLQQRALRTRLRLQTMTLEHVLRFLRRNAFILLTVSAVVIGELCLL

SEQ ID NO: 73491 - protein, 252 aa, Homo sapiens
MARNAEKAMTALARFRQAQLEEGKVKERRPFLASECTELPKAEKWRRQIIGEISKKVAQIQNAGLGEFRIRDLNDEINKLLREKGHWEVRIKELGGPDYGKVGPKMLDHEGKEVPGNRGYKYFGAAKDLPGVRELFEKEPLPPPRKTRAELMKAIDFEYYGYLDEDDGVIVPLEQEYEKKRSQSRVSGKVESRERGSAGKRRKGRGGGRGGRDQHLCSHRGGVGRGRQPGERRGRQPAEVHCSRPCSLAARD

SEQ ID NO: 73492 - protein, 402 aa, Homo sapiens
YYEIPGPINKTTERHLAINCVHDRVVCWWPLVNDDAWPWAPISSEKDRANLLLLGYAQGRLEVLSSVRTEWDPLDVRFGTKQPYQVFTVEHSVSVDKEPMADSCIYECIRNKIQCVSVTRIPLKSKAISCCRNVTEDKLILGCEDSSLILYETHRRVTLLAQTELLPSLISCHPSGAILLVGSNQGELQIFDMALSPINIQLLAEDRLPRETLQFSKLFDASSSLVQMQWIAPQVVSQKGEGSDIYDLLFLRFERGPLGVLLFKLGVFTRGQLGLIDIIFQYIHCDEIYEAINILSSMNWDTLGHQCFISMSAIVNHLLRQKLTPEREAQLETSLGTFYAPTRPLLDSTILEYRDQISKYARRFFHHLLRYQRFEKAFLLAVDVGARDLFMNSWDPWTEGIC

SEQ ID NO: 73493 - protein, 139 aa, Homo sapiens
MDRVYEIPEEPNVDPVSSLEEDVIRGANPRFTFPFSILFSTFLYCGEAASALYMVRIYRKNSETYWMTYTFSFFMFSSIMVQLTLIFVHRDLAKDKPLSLFMHLILLGPVISCANGIFPGICHLWGHPLQYVGYPDQVR

SEQ ID NO: 73494 - protein, 224 aa, Homo sapiens
MNQADPRLRAVCLWTLTSAAMSRGDNCTDLLALGIPSITQAWGLWVLLGAVTLLFLISLAAHLSQWTRGRSRSHPGQGRWVKDNRDGLTESSLLPRSPHSSPKLCVASGESVEEVPLYGNLHYLQTGRLSQDPEPDQQDPTLGGPARAAEEVMCYTSLQLRPPQGRIPGPGTPVKYSEVVLDSEPKSQASGPEPELYASVCAQTRRARASFPDQAYANSQPAAS

SEQ ID NO: 73495 - protein, 93 aa, Homo sapiens
MEPGPDGPAASGPAAIREGWFRETCSLWPGQALSLQVEQLLHHRRSRYQDILVFRREPRSPTVTPPAVRPMATCWCWTVSSSARRETSSPTRR

SEQ ID NO: 73496 - protein, 112 aa, Homo sapiens
MKNQVCSKCGEGTYSLGSGIKFDEWDELPAGFSNIATFMDTVVGPSDSRPDGCNNSSWIPRGNYIESNRDDCTVSLIYAVHLKKSGYVFFEYQYVDNNIFFEFFIQNDQCQE

SEQ ID NO: 73497 - protein, 97 aa, Homo sapiens
MNEENMTELLSSGLKNDYNKETFTLKHKIDEQMFPCRFIKIVPLLSWGPSFNFSIWYVELSGIDDPDIVQPCLNWYSKYREQEAIRLCLKHFRQHNY

SEQ ID NO: 73498 - protein, 260 aa, Homo sapiens
MAQDLLDDLKSELTGKFEKLIVALMKPSRLYDAYELKHALKGAGTNEKVLTEIIASRTPEELRAIKQVYEEEYGSSLEDDVVGDTSGYYQRMLVVLLQANRDPDAGIDEAQVEQDAQALFQAGELKWGTDEEKFITIFGTRSVSHLRKVFDKYMTISGFQIEETIDRETSGNLEQLLLAVVKSIRSIPAYLAETLYYAMKGAGTDDHTLIRVMVSRSEIDLFNIRKEFRKNFATSLYSMIKGDTSGDYKKALLLLCGEDD

SEQ ID NO: 73499 - protein, 93 aa, Homo sapiens
  MOD_RES (1)..(1): Any amino acid
XHSYTGQDYSTQGNVGKISLDQIDLLSTKSFPPCMRQLHKALRENHHLRHGGRMQYGLFLKGIGLTLEQALQFWKQEFIKGKMDPDKEEENDE

SEQ ID NO: 73500 - protein, 879 aa, Homo sapiens
MVSSAQMGFNLQALLEQLSQDELSKFKYLITTFSLAHELQKIPHKEVDKADGKQLVEILTTHCDSYWVEMASLQVFEKMHRMDLSERAKDEVREAALKSFNKRKPLSLAFTETKGNVICLGKEVFKGKKPDKDNRCRYILKTKFREMWKSWPGDSKEVQVMAERYKMLIPFSNPRVLPGPFSYTVVLYGPAGLGKTTLAQKLMLDWAEDNLIHKFKYAFYLSCRELSRLGPCSFAELVFRDWPELQDDIPHILAQARKILFVIDGFDELGAAPGALIEDICGDWEKKKPVPVLLGSLLNRVMLPKAALLVTTRPRALRDLRILAEEPIYIRVEGFLEEDRRAYFLRHFGDEDQAMRAFELMRSNAALFQLGSAPAVCWIVCTTLKLQMEKGEDPVPTCLTRTGLFLRFLCSRFPQGAQLRGALRTLSLLAAQGLWAQTSVLHREDLERLGVQESDLRLFLDGDILRQDRVSKGCYSFIHLSFQQFLTALFYTLEKEEEEDRDGHAWDIGDVQKLLSGVERLRNPDLIQAGYYSFGLANEKRAKELEATFGCRMSPDIKQELLRCDISCKGGHSTVTDLQELLGCLYESQEEELVKEVMAQFKEISLHLNAVDVVPSSFCVKHCRNLQKMSLQVIKENLPENVTASESDAEVERSQDDQHMLPFWTDLCSIFGSNKDLMGLAINDSFLSASLVRILCEQIASDTCHLQRVVFKNISPADAHRNLCLALRGHKTVTYLTLQGNDQDDMFPALCEVLRHPECNLRYLGLVSCSATTQQWADLSLALEVNQSLTCVNLSDNELLDEGAKLLYTTLRHPKCFLQRLSLENCHLTEANCKDLAAVLVVSRELTHLCLAKNPIGNTGVKFLCEGLRYPECKLQTLV

SEQ ID NO: 73501 - protein, 1168 aa, Homo sapiens
MREGDAGNKPAANKARLGWGGQQPVRSVDAVDRAGWPVIMDKYQEQPHLLDPHLEWMMNLLLDIVQDQTSPASLVHLAFKFLYIITKVRGYKTFLRLFPHEVADVEPVLDLVTIQNPKDHEAWETRYMLLLWLSVTCLIPFDFSRLDGNLLTQPGQARMSIMDRILQIAESYLIVSDKARDAAAVLVSRFITRPDVKQSKMAEFLDWSLCNLARSSFQTMQGVITMDGTLQALAQIFKHGKREDCLPYAATVLRCLDGCRLPESNQTLLRKLGVKLVQRLGLTFLKPKVAAWRYQRGCRSLAANLQLLTQGQSEQKPLILTEDDDEDDDVPEGVERVIEQLLVGLKDKDTVVRWSAAKGIGRMAGRLPRALADDVVGSVLDCFSFQETDKAWHGGCLALAELGRRGLLLPSRLVDVVAVILKALTYDEKRGACSVGTNVRDAACYVCWAFARAYEPQELKPFVTAISSALVIAAVFDRDINCRRAASAAFQENVGRQGTFPHGIDILTTADYFAVGNRSNCFLVISVFIAGFPEYTQPMIDHLVTMKISHWDGVIRELAARALHNLAQQAPEFSATQVFPRLLSMTLSPDLHMRHGSILACAEVAYALYKLAAQENRPVTDHLDEQAVQGLKQIHQQLYDRQLYRGLGGQLMRQAVCVLIEKLSLSKMPFRGDTVIDGWQWLINDTLRHLHLISSHSRQQMKDAAVSALAALCSEYYMKEPGEADPAIQEELITQYLAELRNPEEMTRCGFSLALGALPGFLLKGRLQQVLTGLRAVTHTSPEDVSFAESRRDGLKAIARICQTVGVKAGAPDEAVCGENVSQIYCALLGCMDDYTTDSRGDVGTWVRKAAMTSLMDLTLLLARSQPELIEAHTCERIMCCVAQQASEKIDRFRAHAASVFLTLLHFDSPPIPHVPHRGELEKLFPRSDVASVNWSAPSQAFPRITQLLGLPTYRYHVLLGLVVSLGGLTESTIRHSTQSLFEYMKGIQSDPQALGSFSGTLLQIFEDNLLNERVSVPLLKTLDHVLTHGCFDIFTTEEDHPFAVKLLALCKKEIKNSKDIQKLLSGIAVFCEMVQFPGDVRRQALLQLCLLLCHRFPLIRKTTASQVYETLLTYSDVVGADVLDEVVTVLSDTAWDAELAVVREQRNRLCDLLGVPRPQLVPQPGAC

SEQ ID NO: 73502 - protein, 242 aa, Homo sapiens
MDLPGDSSPPGQPRLCRQPLTRALWGARSPKRPRLQLPGAPSPLEKASRRVLAVVLEDVMAVHMVPVVPSKQTSIPQHHSYHQDPVHRQPPASPPRQAGWSSQARPPDPLCLCREPLSRIHRTSSTLRRRSRTTPGPEEGPSQKVDRAPQPTLVVMLEDIASPRPPAEGFIDETPNFIIPAQRAEPMRIVRQPTPPPGDLEPPFQPSALPADPLESPPTAPDPALELPSTPPPSSLLRPRLS

SEQ ID NO: 73503 - protein, 139 aa, Homo sapiens
MEQQDQSMKEGRLTLVLALATLIAAFGSSFQYGYNVAAVNSPALLMQQFYNETYYGRTGEFMEDFPLTLLWSVTVSMFPFGGFIGSLLVGPLVNKFGRKGALLFNNIFSIVPAILMGCSRVATSFELIIISRLLVGICA

SEQ ID NO: 73504 - protein, 152 aa, Homo sapiens
MGDPSKQDILTIFKRLRSVPTNKVCFDCGAKNPSWASITYGVFLCIDCSGSHRSLGVHLSFIRSTELDSNWSWFQLRCMQVGGNASAVSDTAWASAIAEPSSLTSRPVETTLENNEGGQEQGPSVEGLNVPTKATLEVSSIIKKKPNQAKKG

SEQ ID NO: 73505 - protein, 70 aa, Homo sapiens
MQKAGAGGRRASDCGLAPHRPRCITKFAQYVGSFPVDDLDTQESVWLVQQQLWALKDCPRRRAVILKFSL

SEQ ID NO: 73506 - protein, 93 aa, Homo sapiens
  MOD_RES (1)..(1): Any amino acid
XDYLKGFLEDLAPPERSSLIQDWETSGLVYLDYIRVIEMLRHIQQVDCSGNDLEQLHIKVTSLCSRIEQIQCYSAKDRLAQSGTVHTILASWA

SEQ ID NO: 73507 - protein, 164 aa, Homo sapiens
  MOD_RES (1)..(1): Any amino acid
XTGAGVFPGSQFVPGVRSIAEFLAKSKSEETQEEVQVLLDSLVHGNPKYQNQVYKGLIALLPCESPKAQQLSLQTLRTAQPIIGTTHPSIVDCVLKVLGTMHLEVQYEAIELIKDLVGYDVRQALLKGLVALLIPSVKEISKLQAKILSAHPQPADVFAAGRGR

SEQ ID NO: 73508 - protein, 111 aa, Homo sapiens
MTDVPATFTQAECNGDKPPENGQQTITKISEELTDVDSPLPHYRVEPSLEGALTKGSQEERRKLQGNMLLNSSMEDKMLKEEKLFIVHKAITDLSLQETSADEMTFREGHQ

SEQ ID NO: 73509 - protein, 108 aa, Homo sapiens
MVWEVKTNQMPNAVQKLLLVMDKRASGMNDSLELLQCNENLPSSPGYNSCDEHMELDDLPELQAVQSDPTQSGMYQLSSDVSHQEYPRSSWNQNTSDIPETTYRENEV

SEQ ID NO: 73510 - protein, 464 aa, Homo sapiens
MDPKLGRMTLKEWVAIESDSVQPVPRFRQELFRMMAVAADTLQRLGARVASVDMGPQQLPDGQSLPIPPVILAELGSDPTKGTVCFYGHLDVQPADRGDGWLTDPYVLTEVDGKLYGRGATDNKGPVLAWINAVSAFRALEQDLPVNIKFIIEGMEEAGSVALEELVEKEKDRFFSGVDYIVISDNLWISQRKPAITYGTRGNSYFMVEVKCRDQDFHSGTFGGILHEPMADLVALLGSLVDSSGHILVPGIYDEVVPLTEEEINTYKAIHLDLEEYRNSSRVEKFLFDTKEEILMHLWRYPSLSIHGIEGAFDEPGTKTVIPGRVIGKFSIRLVPHMNVSAVEKQVTRHLEDVFSKRNSSNKMVVSMTLGLHPWIANIDDTQYLAAKRAIRTVFGTEPDMIRDGSTIPIAKMFQEIVHKSVVLIPLGAVDDGEHSQNEKINRWNYIEGTKLFAAFFLEMAQLH

SEQ ID NO: 73511 - protein, 69 aa, Homo sapiens
MQLKPMEINPEVSARCCPGWGSPASGASWTCWGWKRSLWARCQRLPARCCCCFPSRPSMRTSGKSRLKS

SEQ ID NO: 73512 - protein, 533 aa, Homo sapiens
MWAVLRLALRPCARASPAGPRAYHGDSVASLGTQPDLGSALYQENYKQMKALVNQLHERVEHIKLGGGEKARALHISRGKLLPRERIDNLIDPGSPFLELSQFAGYQLYDNEEVPGGGIITGIGRVSGVECMIIANDATVKGGAYYPVTVKKQLRAQEIAMQNRLPCIYLVDSGGAYLPRQADVFPDRDHFGRTFYNQAIMSSKNIAQIAVVMGSCTAGGAYVPAMADENIIVRKQGTIFLAGPPLVKAATGEEVSAEDLGGADLHCRKSGVTIEPSEEPLFPADELYGIVGANLKRSFDVREVIARIVDGSRFTEFKAFYGDTLVTGFARIFGYPVGIVGNNGVLFSESAKKGTHFVQLCCQRNIPLLFLQNITGFMVGREYEAEGIAKDGAKMVAAVACAQVPKITLIIGGSYGAGNYGMCGRAYSPRFLYIWPNARISVMGGEQAANVLATITKDQRAREGKQFSSADEAALKEPIIKKFEEEGNPYYSSARVWDDGIIDPADTRLVLGLSFSAALNAPIEKTDFGIFRM

SEQ ID NO: 73513 - protein, 53 aa, Homo sapiens
MRAWIFFLLCLAGRALAAPQQEALPDETEVVEETVAEVTEVSVGANPVQVEVG

SEQ ID NO: 73514 - protein, 119 aa, Homo sapiens
PLMIIHHLDECPHSQALKKVFAENKEIQKLAEQFVLLNLVYETTDKHLSPDGQYVPRIMFVDPSLTVRADITGRYSNRLYAYEPADTALCKCDLQFGCCPRVEHLYCCSDGTRGCMVSA

SEQ ID NO: 73515 - protein, 173 aa, Homo sapiens
  MOD_RES (1)..(1): Any amino acid
XPDEYFNEEFDLKDRDIGRPKELTIRTQKFKAMLWMCEEFPLSLVEQVIPIIDLMARTSAHFARLRDFIKLEFPPGFPVKIEIPLFHVLNARITFGNVNGCSTAEESVSQNVEGTQADSASHITNFEVDQSVFEIPESYYVQDNGRNVHLQDEDYEIMQFAIQQILQLSLTDK

SEQ ID NO: 73516 - protein, 156 aa, Homo sapiens
MSKLPRELTRDLERSLPAVASLGSSLSHSQSLSSHLLPPPEKRRAISDVRRTFCLFVTFDLLFISLLWIIELNTNTGIRKNLEQEIIQYNFKTSFFDIFVLAFFRFSGLLLGYAVLRLRHWSRRWCPVHSSLSRSSSLSCSAKGHLATCSPSSLLS

SEQ ID NO: 73517 - protein, 198 aa, Homo sapiens
MAHAGRTGYDNREIVMKYIHYKLSQRGYEWDAGDVGAAPPGAAPAPGIFSSQPGHTPHPAASRDPVARTSPLQTPAAPGAAAGPALSPVPPVVHLTLRQAGDDFSRRYRRDFAEMSSQLHLTPFTARGRFATVVEELFRDGVNWGRIVAFFEFGGVMCVESVNREMSPLVDNIALWMTEYLNRHLHTWIQDNGGWLYM

SEQ ID NO: 73518 - protein, 87 aa, Homo sapiens
MARTAGDTLDVFTMIDIFKYVIYGIAAAFFVYGILLMVEGFFTTGAIKDLYGDFKITTCGRCFIMLTYLFMLAWLGVTAFTSLPVYM

SEQ ID NO: 73519 - protein, 134 aa, Homo sapiens
  MOD_RES (1)..(1): Any amino acid
XGCSVLVNTSCRLVNLTAHLRQKAGLPPDATIALLAEDGNLVSLEEDLKEGASRAQTMGNSLLKERAIYVLVRIISKVAQEGEDMASTRYESLLENLDDHYPELAGANRQQPSRTPLAESGIAEKLHQQEGQGP

SEQ ID NO: 73520 - protein, 340 aa, Homo sapiens
MLALTLRPPPLAKSHLKLGGTPAPARVNGKLVALKVIRLQEEEGTPFTAIREASLLKGLKHANIVLLHDIIHTKETLTLVFEYVHTDLCQYMDKHPGGLHPDNVKLFLFQLLRGLSYIHQRYILHRDLKPQNLLISDTGELKLADFGLARAKSVPSHTYSNEVVTLWYRPPDVLLGSTEYSTCLDMWGVGCIFVEMIQGVAAFPGMKDIQDQLERIFLVLGTPNEDTWPGVHSLPHFKPERFTLYSSKNLRQAWNKLSYVNHAEDLASKLLQCSPKNRLSAQAALSHEYFSDLPPRLWELTDMSSIFTVPNVRLQPEAGESMRAFGKNNSYGKSLSNSKH

SEQ ID NO: 73521 - protein, 119 aa, Homo sapiens
YWAFSDIQTGRVLTKVTDETSGCSLTCAQFHPDGLIFGTGTMDSQIKIWDLKVKSLIFDQSGTYLALGGTDVQIYICKQWTEILHFTEHSGLTTGVAFGHHAKFIASTGMDRSLKFYSL

SEQ ID NO: 73522 - protein, 208 aa, Homo sapiens
MIQDRDRCAQAAAVAAVEEIVAHASNVSSLVLGKASGRLLATGGDDCRVNLWSINKPNCIMSLTGHTSPVESVRLNTPEELIVAGSQSGSIRVWDLEAAKILRTLMGHKANICSLDFHPYGEFVASGSQDTNIKLWDIRRKGCVFRYRGHSQAVRCLRFSPDGKWLASAADDHTVKLWDLTAGKMMSEFPGHTGPVNVVEFHPNEYLL

SEQ ID NO: 73523 - protein, 121 aa, Homo sapiens
MNGEQQLDADAGSGMEEVELSWEDYLEETGSTAVPYGSFKHVDTRLQNGFAPGMKLEVAVRTDPETYWVATVITTCEQLLLLRYDGYGEDRRADFWCDIRKADLYPIGWCEQNKKTLEAPE

SEQ ID NO: 73524 - protein, 74 aa, Homo sapiens
ENMIVYVEKKVLEDPAIASDESFGAVKKKFCTFREDYDDISNQIDFIICLGGDGTLLYASSLFQGTQLLFSGVG

SEQ ID NO: 73525 - protein, 202 aa, Homo sapiens
MNTSPGTVGSDPVILATAGYDHTVRFWQAHSGICTRTVQHQDSQVNALEVTPDRSMIAAAGYQHIRMYDLNSNNPNPIISYDGVNKNIASVGFHEDGRWMYTGGEDCTARIWDLRSRNLQCQRIFQVNAPINCVCLHPNQAELIVGDQSGAIHIWDLKTDHNEQLIPEPEVSITSAHIDPDASYMAAVNSTGNCYVWNLTGG

SEQ ID NO: 73526 - protein, 104 aa, Homo sapiens
MHQRLIFRLLKLEVQFIITGTNHHSEKEFCSYLQYLEYLSQNRPPPNAYELFAKGYEDYLQSPLQPLMDNLESQTYEVFEKDPIKYSQYQQAIYKCLLDRVPEE

SEQ ID NO: 73527 - protein, 88 aa, Homo sapiens
MLRNNKTIIIKYFLNLINGAFLVLGLLFMGFGAWLLLDRNNFLTAFDENNHFIVPISQILIGMGSSTVLFCLLGYIGIHNEIRWLLIV

SEQ ID NO: 73528 - protein, 625 aa, Homo sapiens
MEENLISMREDHSFHVRYRMEASCLELALEGERLCKSGDCRAGVSFFEAAVQVGTEDLKTLSAIYSQLGNAYFYLHDYAKALEYHHHDLTLARTIGDQLGEAKASGNLGNTLKVLGNFDEAIVCCQRHLDISRELNDKVGEARALYNLGNVYHAKGKSFGCPGPQDVGEFPEEVRDALQAAVDFYEENLSLVTALGDRAAQGRAFGNLGNTHYLLGNFRDAVIAHEQRLLIAKEFGDKAAERRAYSNLGNAYIFLGEFETASEYYKKTLLLARQLKDRAVEAQSCYSLGNTYTLLQDYEKAIDYHLKHLAIAQELNDRIGEGRACWSLGNAYTALGNHDQAMHFAEKHLEISREVGDKSGELTARLNLSDLQMVLGLSYSTNNSIMSENTEIDSSLNGVRPKLGRRHSMENMELMKLTPEKKISADTIGDEGFFDLLSRFQSNRMDDQRCCLQEKNCHTASTTTSSTPPKMMLKTSSVPVVSPNTDEFLDLLASSQSRRLDDQRASFSNLPGLRLTQNSQSVLSHLMTNDNKEADEDFFDILVKCQGSRLDDQRCAPPPATTKGPTVPDEDFFSLILRSQGKRMDEQRVLLQRDQNRDTDFGLKDFLQNNALLEFKNSGKKSADH

SEQ ID NO: 73529 - protein, 1794 aa, Homo sapiens
  MOD_RES (1)..(1): Any amino acid
XQEAELGEPDPEQKRSRARERRREGRSKTFDWAEFRPIQQALAQERVGGVGPADTHEPLRPEAEPGELERERARRREERRKRFGMLDATDGPGTEDAALRMEVDRSPGLPMSDLKTHNVHVEIEQRWHQVETTPLREEKQVPIAPVHLSSEDGGDRLSTHELTSLLEKELEQSQKEASDLLEQNRLLQDQLRVALGREQSAREGYVLQTEVAASPSGAWQRLHRVNQDLQSELEAQCQRQELITHQIQTLKRSYGEAKDTIRHHEAEIRSLQARLSNAAAELAIKEQALAKLKGDLKREQGRVREQLEERQHSEAALSSQLRASEQKLKSAEALLLEKTQELRGLETQQALQRDRQKEVQRLQERIADLSQQLGASEQAQRLMEEKLQRNYELLLESCEKEKQALLQNLKEVEDKASAYEDQLQGQAQQVETLQKEKLSATFEGSEQVHQLEEQLEAREASVRRLAEHVQSLCDERDLLRQRFQELTERVATSDEDVAELREKLRRREADNQSLEHSYQRVSSQLQSMHTLLREKEEELERIKEAHEKVLEKKEQDLNEALVKMVALGSSLEETEIKLQAKEEILRKFASESPKDMEEPRSTPEETERDGTLLPGQPVQATRAPLGLPHTRLEDEDEDLGAPPGEEYGDGSPSREDSMVPPKSVEVLDREGHQQGTAKLDQGAPGVKRQRIRFSTIQCQRYIHPEGSEKTWTSSTSSDTSQDRSPSEESMSSEPAPSVLPATGDSDTYLSIIHSLETKLYVTEEKLKDVTVRLESQQGQSREALLALHHQWAGTEAQLREQLRASLLQVGALASQLEQERQERARRVEGHVGELGDFQVKNSQALMCLENCREQLRSLPRASQEDEQDARAASLASVESALVSAIQALQHWPAPAHGGARAQLETGGTEENGKPASLQQCSQSELTEQEQVRLLSDQIALEASLISQIADSLKNTTSDVSRMLHEISWSGQPPMESAGAPVDTWARKVLVDGEFWSQVESLRKHLGTLGGEAVGASGDGQQSIPQGLAPILANATWVRAELSFATQSVRESFHRRLQSIQETLRGTQTALRQHKCLLREILGAYQTPDFERVMQQVLEALRLPAGHEDGVQLSWDLSPLGEVLGRDSDSSQEPFDVSDQSPGAFVAIQEELAQQLKEKASLLEEIAAALPSLPPVESLRDCQKLLQVSQSLSYNTCLGGLGQYSSLLVQDAIIQAQVCYASCRIRLEYEKELQLCKESWQTREPSCSEQAQAARALREEYEELLRKQKSEYLDVIAIVERENAELKAKAAQLDHQQQCLEDAESKHSMSMFTLRGRYEEEIRCVVEQLTRTESTLQAERSRVLSQLDASVRDRQDMERHHGEQIQTLEDRFQLKVRELQTIHEEELRTLQEHYSQSLRCLQDTLCLHQGPHPKALPAPAPNWQATQGEADSMTGLRERIQELEAQMDVMREELGHKDLEGDAATLREKYQRDLESLKATCERGFAAMEETHQKKIEDLQRQHQRELEKLREEKDRLLAEETAATISAIEAMKNAHREEMERELEKSQRSQISSVNSDVEALRRQYLEELQSVQRELEVLSEQYSQKCLENAHLAQALEAERQALRQCQRENQELNAHNQELNNRLAAEITRLRTLLTGDGGGEATGSPLAQGKDAYELEVLLRVKESEIQYLKQEISSLKDELQTALRDKKYASDKYKDIYTELSIAKAKADCDISRLKEQLKAATEALGEKSPDSATVSGYDIMKSKSNPDFLKKDRSCVTRQLRNIRSKSLKEGLTVQERLKLFESRDLKKD

SEQ ID NO: 73530 - protein, 682 aa, Homo sapiens [sequence omitted]

SEQ ID NO: 73531 - protein, 137 aa, Homo sapiens
MSSLGGGSQDAGGSSSSSTNGSGGSGSSGPKAGAADKSAVVAAAAPASVADDTPPPERRNKSGIISEPLNKSLRRSRPLSHYSSFGSSGGSGGGSMMGGESADKATAAAAAASLLANGHDLAAAMAVDKSNPTSKHK

SEQ ID NO: 73532 - protein, 25 aa, Homo sapiens
MTKRKKLRTSAPLMRKQDLPAGSSV

SEQ ID NO: 73533 - protein, 353 aa, Homo sapiens
MQPMVMQGCPYTLPRCHDWQAADQFHHSSSLRSTCPHPQVRAAVTSPAPPQDGAGVPCLSLKLLNGSVGASGPLEPPAMNLCWNEIKKKSHNLRARLEAFSDHSGKLQLPLQEIIDWLSQKDEELSAQLPLQGDVALVQQEKETHAAFMEEVKSRGPYIYSVLESAQAFLSQHPFEELEEPHSESKDTSPKQRIQNLSRFVWKQATVASELWEKLTARCVDQHRHIERTLEQLLEIQGAMEELSTTLSQAEGVRATWEPIGDLFIDSLPEHIQAIKLFKEEFSPMKDGVKLVNDLAHQLAISDVHLSMENSQALEQINVRWKQLQASVSERLKQLQDAHRDFGPGSQHFLSCT

SEQ ID NO: 73534 - protein, 55 aa, Homo sapiens
EPTGEPSPKRPRGRPKGSKNKSPSKAAQKKAEATGEKRPRGRPRKWWLLMKSPCW

SEQ ID NO: 73535 - protein, 1358 aa, Homo sapiens
MAEARKRRELLPLIYHHLLRAGYVRAAREVKEQSGQKCFLAQPVTLLDIYTHWQQTSELGRKRKAEEDAALQAKKTRVSDPISTSESSEEEEEAEAETAKATPRLASTNSSVLGADLPSSMKEKAKAETEKAGKTGNSMPHPATGKTVANLLSGKSPRKSAEPSANTTLVSETEEEGSVPAFGAAAKPGMVSAGQADSSSEDTSSSSDETDVEVKASEKILQVRAASAPAKGTPGKGATPAPPGKAGAVASQTKAGKPEEDSESSSEESSDSEEETPAAKALLQAKASGKTSQVGAASAPAKESPRKGAAPAPPGKTGPAVAKAQAGKREEDSQSSSEESDSEEEAPAQAKPSGKAPQVRAASAPAKESPRKGAAPAPPRKTGPAAAQVQVGKQEEDSRSSSEESDSDREALAAMNAAQVKPLGKSPQVKPASTMGMGPLGKGAGPVPPGKVGPATPSAQVGKWEEDSESSSEESSDSSDGEVPTAVAPAQEKSLGNILQAKPTSSPAKGPPQKAGPVAVQVKAEKPMDNSESSEESSDSADSEEAPAAMTAAQAKPALKIPQTKACPKKTNTTASAKVAPVRVGTQAPRKAGTATSPAGSSPAVAGGTQRPAEDSSSSEESDSEEEKTGLAVTVGQAKSVGKGLQVKAASVPVKGSLGQGTAPVLPGKTGPTVTQVKAEKQEDSESSEEESDSEEAAASPAQVKTSVKKTQAKANPAAARAPSAKGTISAPGKVVTAAAQAKQRSPSKVKPPVRNPQNSTVLARGPASVPSVGKAVATAAQAQTGPEEDSGSSEEESDSEEEAETLAQVKPSGKTHQIRAALAPAKESPRKGAAPTPPGKTGPSAAQAGKQDDSGSSSEESDSDGEAPAAVTSAQVIKPPLIFVDPNRSPAGPAATPAQAQAASTPRKARASESTARSSSSESEDEDVIPATQCLTPGIRTNVVTMPTAHPRIAPKASMAGASSSKESSRISDGKKQEGPATQVDSAVGTLPATSPQSTSVQAKGTNKLRKPKLPEVQQATKAPESSDDSEDSSDSSSGSEEDGEGPQGAKSAHTLVGPTPSRTETLVEETAAESSEDDVVAPSQSLLSGYMTPGLTPANSQASKATPKLDSSPSVSSTLAAKDDPDGKQEAKPQQAAGMLSPKTGGKEAASGTTPQKSRKPKKGAGNPQASTLALQSNITQCLLGQPWPLNEAQVQASVVKVLTELLEQERKKVVDTTKESSRKGWESRKRKLSGDQPAARTPRSKKKKKLGAGEGGEASVSPEKTSTTSKGKAKRDKASGDVKEKKGKGSLGSQGAKDEPEEELQKGMGTVEGGDQSNPKSKKEKKKSDKRKKDKEKKEKKKKAKKASTKDSESP

SEQ ID NO: 73536 - protein, 109 aa, Homo sapiens
MSLAAYCVICCRRIGTSTSPPKSGTHWRDIRNIIKFTGSLILGSGPEEGCDIRYSSGRTRKNEVIYICAHSFFRQRRKSWYCLAGKKRTSQSSKKSIGNISQDTAESIC

SEQ ID NO: 73537 - protein, 170 aa, Homo sapiens
MPGGACVLVIALMFLAWGEAQECSPGGHQFLRSPYRSVRFDSWHLQQSAVQDLICDHSLSPGWYRFLILDRPAEMPTKCVEMNHCGTQAPIWLSLRDSETLPSPGEIKQLTACATWQFLFSTTKDCCLFQIPVSVRNCGNFSVYLLQPTQGCMGYCAEGFFAKIVKSPHT

SEQ ID NO: 73538 - protein, 147 aa, Homo sapiens
MSSVAVLTQESFAEHRSGLVPQQIKVATLNSEEESDPPTYKDAFPPLPEKAACLESAQEPAGAWGNKIRPIKASVITQVFHVPLEERKYKDMNQFGEGEQAKICLEIMQRTGAHLELSLAKDQGLSIMVSGKLDAVMKARKDIVARL

SEQ ID NO: 73539 - protein, 105 aa, Homo sapiens
  MOD_RES (1)..(1): Any amino acid
XFDRITTRSEKPLRSIKRIFHTVTTTDDPVIRKLAKTQGNVFATDAILATLMSCTRSVYSWDIVVQRVGSKLFFDKRDNSDFALRTLSVTLCCMVSDHATLLQTS

SEQ ID NO: 73540 - protein, 200 aa, Homo sapiens
MSKLGISFSEDQQKEKDQLGKAPKKEEAAALRKDISGSDKRSLEKNQINFWRNQMTKRWEPSLNWKTTVNYKGKGSAKEIQEDKHTGKLEKPRPSVSHGRAQLLRKSAEKIEETVSDSSSESEEDEEPPDHRQEASADLPSEYWQIQKLVKYLKGGNQTATVIALCSMRDFSLAQETCQLAIRDVGGLEVLINLLETDEV

SEQ ID NO: 73541 - protein, 2358 aa, Homo sapiens
LQGPYSLNGYRVRVYRQDSATQWFTGIITHHDLFTRTMIVMNDQVLEPQNVDPSMVQMTFLDDVVHSLLKGENIGITSRRRSRANQNVNAVHSHYTRAQANSPRPAMNSQAAVPKQNTHQQQQQRSIRPNKRKGSDSSIPDEEKMKEEKYDYISRGENPKGKNKHLMNKRRKPEEDEKKLNMKRLRTDNVSDFSESSDSENSNKRIIDNSSEQKPENELKNKNTSKINGEEGKPHNNEKAGEETLKNSQPPWDQIQEDKKHEEAEKRKSVDTQLQEDMIIHSSEQSTVSDHNSNDLLPQECNMDKTHTMELLPKEKFVSRPPTPKCVIDITNDTNLEKVAQENSSTFGLQTLQKMDPNVSDSKHSIANAKFLETAKKDSDQSWVSDVVKVDLTQSSVTNASSGNDHLNMEKEKYVSYISPLSAVSVMEDKLHKRSPPPETIKSKLNTSVDTHKIKSSPSPEVVKPKITHSPDSVKSKATYVNSQATGERRLANKIEHELSRCSFHPIPTRSSTLETTKSPLIIDKNEHFTVYRDPALIGSETGANHISPFLSQHPFPLHSSSHRTCLNPGTHHPALTPAPHLLAGSSSQTPLPTINTHPLTSGPHHAVHHPHLLPTVLPGVPTASLLGGHPRLESAHASSLSHLALAHQQQQQLLQHQSPHLLGQAHPSASYNQLGLYPIIWQYPNGTHAYSGLGLPSSKWVHPENAVNAEASLRRNSPSPWLHQPTPVTSADGIGLLSHIPVRPSSAEPHRPLKITAHSSPPLTKTLVDHHKEELERKAFMEPLRSVASTSAKNDLDLNRSQTGKDCHLHRHFVDPVLNQLQRPPQETGERLNKYKEEHRRILQESIDVAPFTTKIKGLEGERENYSRVASSSSSPKSHIIKQDMDVERSVSDLYKMKHSVPQSLPQSNYFTTLSNSVVNEPPRSYPSKEVSNIYGDKQSNALAAAAANPQTLTSFITSLSKPPPLIKHQPESEGLVGKIPEHLPHQIASHSVTTFRNDCRSPTHLTVSSTNTLRSMPALHRAPVFHPPIHHSLERKEGSYSSLSPPTLTPVMPVNAGGKVQESQKPPTLIPEPKDSQANFKSSSEQSLTEMWRPNNNLSKEKTEWHVEKSSGKLQAAMASVIVRPSSSTKTDSMPAMQLASKDRVSERSSAGAHKTDCLKLAEAGETGRIILPNVNSDSVHTKSEKNFQAVSQGSVPSSVMSAVNTMCNTKTDVITSAADTTSVSSWGGSEVISSLSNTILASTSSECVSSKSVSQPVAQKQECKVSTTAPVTLASSKTGSVVQPSSGFSGTTDFIHLKKHKAALAAAQYKSSNASETEPNAIKNQTLSASLPLDSTVICSTINKANSVGNGQASQTSQPNYHTKLKKAWLTRHSEEDKNTNKMENSGNSVSEIIKPCSVNLIASTSSDIQNSVDSKIIVDKYVKDDKVNRRKAKRTYESGSESGDSDESESKSEQRTKRQPKPTYKKKQNDLQKRKGEIEEDLKPNGVLSRSAKERSKLKLQSNSNTGIPRSVLKDWRKVKKLKQTGESFLQDDSCCEIGPNLQKCRECRLIRSKKGEEPAHSPVFCRFYYFRRLSFSKNGVVRIDGFSSPDQYDDEAMSLWTHENFEDDELDIETSKYILDIIGDKFCQLVTSEKTALSWVKKDAKIAWKRAVRGVREMCDACEATLFNIHWVCQKCGFVVCLDCYKAKERKSSRDKELYAWMKCVKGQPHDHKHLMPTQIIPGSVLTDLLDAMHTLREKYGIKSHCHCTNKQNLQVGNFPTMNGVSQVLQNVLNHSNKISLCMPESQQQNTPPKSEKNGGSSPESDVGTDNKLTPPESQSPLHWLADLAEQKAREEKKENKELTLENQIKEEREQDNSESPNGRTSPLVSQNNEQGSTLRDLLTTTAGKLRVGSTDAGIAFAPVYSMGAPSSKSGRTMPNILDDIIASVVENKIPPSKTSKINVKPELKEEPEESIISAVDENNKLYSDIPHSWICEKHILWLKDYKNSSNWKLFKECWKQGQPAVVSGVHKKMNISLWKAESISLDFGDHQADLLNCKDSIISNANVKEFWDGFEEVSKRQKNKSGETVVLKLKDWPSGEDFKTMMPARYEDLLKSLPLPEYCNPEGKFNLASHLPGFFVRPDLGPRLCSAYGVVAAKDHDIGTTNLHIEVSDVVNILVYVGIAKGNGILSKAGILKKFEEEDLDDILRKRLKDSSEIPGALWHIYAGKDVDKIREFLQKISKEQGLEVLPEHDPIRDQSWYVNKKLRQRLLEEYGVRTCTLIQFLGDAIVLPAGALHQVQNFHSCIQVTEDFVSPEHLVESFHLTQELRLLKEEINYDDKLQVKNILYHAVKEMVRALKIHEDEVEDMEEN

SEQ ID NO: 73542 - protein, 14 aa, Homo sapiens
MFRKKKKKRPEISA

SEQ ID NO: 73543 - protein, 246 aa, Homo sapiens
MGTGEGRDTVTQILLKAFLPRVSPAEFPAPLAPVMAKQYDVLFRLLLIGDSGVGKTCLLCRFTDNEFHSSHISTIGVDFKMKTIEVDGIKVRIQIWDTAGQERYQTITKQYYRRAQGIFLVYDISSERSYQHIMKWVSDVDEYAPEGVQKILIGNKADEEQKRQVGREQGQQLAKEYGMDFYETSACTNLNIKESFTRLTELVLQAHRKELEGLRMRASNELALAELEEEEGKPEGPANSSKTCWC

SEQ ID NO: 73544 - protein, 215 aa, Homo sapiens
MSDLLLLGLIGGLTLLLLLTLLAFAGYSGLLAGVEVSAGSPPIRNVTVAYKFHMGLYGETGRLFTESCSISPKLRSIAVYYDNPHMVPPDKCRCAVGSILSEGEESPSPELIDLYQKFGFKVFSFPAPSHVVTATFPYTTILSIWLATRRVHPALDTYIKERKLCAYPRLEIYQEDQIHFMCPLARQGDFYVPEMKETEWKWRGLVEAIDTQVDG

SEQ ID NO: 73545 - protein, 74 aa, Homo sapiens
LLEQSEWQPTNVDGKGYLLNEPGVQPTSVYGDFSCKEEPEIDSPGDLKNMDATWLDSLLTPVRLPSIQAIPCAP

SEQ ID NO: 73546 - protein, 459 aa, Homo sapiens
MTILTYPFKNLPTASKWALRFSIRPLSCSSQLRAAPAVQTKTKKTLAKPNIRNVVVVDGVRTPFLLSGTSGLLHRTSVPKEVVDYIIFGTVIQEVKTSNVAREAALGAGFSDKTPAHTVTMACISANQAMTTGVGLIASGQCDVIVAGGVELMSDVPIRHSRKMRKLMLDLNKAKSMGQRLSLISKFRFNFLAPELPAVSEFSTSETMGHSADRLAAAFAVSRLEQDEYALRSHSLAKKAQDEGLLSDVVPFKVPGKDTVTKDNGIRPSSLEQMAKLKPAFIKPYGTVTAANSSFLTDGASAMLIMAEEKALAMGYKPKAYLRDFMYVSQDPKDQLLLGPTYATPKVLEKAGLTMNDIDAFEFHEAFSGQILANFKAMDSDWFAENYMGRKTKVGLPPLEKFNNWGGSLSLGHPFGATGCRLVMAAANRLRKEGGQYGLVAACAAGGQGHAMIVEAYPK

SEQ ID NO: 73547 - protein, 368 aa, Homo sapiens
  MOD_RES (1)..(1): Any amino acid
XDSKLNKNIYSDIPPQVPVRPISYTPSIPSDSRNNLDRNSFEGSAIPEHPEFSTFNPESVHGHRKAVAVCSVAPNLPPPPPSNSPSDSDSIQKPSWDFDYDTKVVDLDPCLSKKPLEEKPSQPYSARESLSEVQSLSSFQSESCDDNESLAAPDLSKPRGYHWDTSDWMPSVPLPDIQEFPNYEVIDEQTPLYSADPNAIDTDYYPGGYDIESDFPPPPEDFPAADELPPLPPEFSNQFESIHPPRDMPAAGSLGSSSRNRQRFNLNQYLPNFYPLDMSEPQTKGTGENSTCREPHAPYPPGYQRHFEAPAVESMPMSVYASTASCSDVSACCEVESEVMMSDYESGDDGHFEEVTIPPLDSQQHTEV

SEQ ID NO: 73548 - protein, 175 aa, Homo sapiens
MGCRDVHAATVLSFLCGIASVAGLFAGTLLPNWRKLRLITFNRNEKNLTVYTGLWVKCARYDGSSDCLMYDTTWYSSVDQLDLRVLQFALPLSMLIAMGALLLCLIGMCNTAFRSSVPNIKLAKCLVNSAGCHLVAGLLFFLAGTVSLSPSIWVIFYNIHLNKKFEPVFSFDYAV

SEQ ID NO: 73549 - protein, 138 aa, Homo sapiens
MAEAPNMAVVNEQQMPEEVPAPAPAQEPVQEAPKGRKRKPRTTEPKQPVEPKKPVESKKSGKSAKSKEKQEKITDTFKVKRKVDRFNGVSEAELLTKTLPDILTFNLDIVIIGINPGLMAAYKGHHYPGPGNHFWKCL

SEQ ID NO: 73550 - protein, 82 aa, Homo sapiens
MIIEMATGNPYLPSSSDLDLLHKIVLKVGNLSPHLQNIFSKSPIFAGVVLPQVQHPKNARKKYPKLNGLLADIVHIHARTES

SEQ ID NO: 73551 - protein, 109 aa, Homo sapiens
MNQLQALHVKALSRAMLLTSYLPPPLLRHRLKTHTTVIHQLDKALAKLGIGQLTAQEVKSACYLRGLNSTHIGEDRCRTWLGEWLQISCSLKEAELSLLLHNVVLLSTN

SEQ ID NO: 73552 - protein, 103 aa, Homo sapiens
MSPVLHFYVRPSGHEGAAPGHTRRKLQGKLPELQGVETELCYNVNWTAEALPSAEETKKLMWLFGCPLLLDDVARESWLLPGSNDLLLEVGPRLNFSTPTSTN

SEQ ID NO: 73553 - protein, 404 aa, Homo sapiens
  MOD_RES (1)..(1): Any amino acid
XEIDLLRTTVKVPGKRLPRATPATAPGTSPRANGLSVERSNTQLGGGTASGPAEVLSSSPKLDPPPSPHSNRKKHRRKKSTGTPRPDGPSSATEEAEESFEFVVVSLTGQTWHFEASTAEERELWVQSVQAQILASLQGCRSAKDKTRLGNQNAALAVQAVRTVRGNSFCIDCDAPNPDWASLNLGALMCIECSGIHRHLGAHLSRVRSLDLDDWPPELLAVMTAMGNALANSVWEGALGGYSKPGPDACREEKERWIRAKYEQKLFLAPLPSSDVPLGQQLLRAVVEDDLRLLVMLLAHGSKEEVNETYGDGDGRTALHLSSAMANVVFTQLLIWYGVDVRSRDARGLTPLAYARRAGSQECADILIQHGCPGEGCGLAPTPNREPANGTNPSAELHRSPSLL

SEQ ID NO: 73554 - protein, 528 aa, Homo sapiens
VKYSTQKILLVRNIGNKNAVFHIKTCRPFSIEPAIGTLNVGESMQLEVEFEPQSVGDHSGRLIVCYDTGEKVFVSLYGAAIDMNIRLDKNSLTIEKTYISLANQRTITIHNRSNIIAHFLWKVFATQQEEDREKYRACDDLIKEEKDETDEFFEECITDPLLREHLSVLSRTFANQRRLVQGDSKLFFNNVFTVEPLEGDVWPNSSAEITVYFNPLEAKLYQQTIYCDILGREIRLPLRIKGEGMGPKIHFNFELLDIGKVFTGSAHCYEAILYNKGSIDALFNMTPPTSALGACFVFSPKEGIIEPSGVQAIQISFSSTILGNFEEEFLVNVNGSPEPVKLTIRGCVIGPTFHFNVPALHFGDVSFATQELRDPQVLIPFQRFPHTLICSLNNTSLIPMTYKLRIPGDGLGHKSISYCEQHVDYKRPSWTKEEISSMKPKEFTISPDCGTIRPQGFAAIRVTLCSNTVQKYELALVVDVEGIGEEVLALLITASAPELCNRKVMLSVLQWKIHRAKRSLPRDTVAVT

SEQ ID NO: 73555 - protein, 120 aa, Homo sapiens
MKENVASATVFTLLLFLNTCLLNGQLPPGKPEIFKCRSPNKETFTCWWRPGTDGGLPTNYSLTYHREGETLMHECPDYITGGPNSCHFGKQYTSMWRTYIMMVNATNQMGSSFSDELYVD

SEQ ID NO: 73556 - protein, 261 aa, Homo sapiens
MNLLLILTFVAAAVAAPFDDDDKIVGGYICEENSVPYQVSLNSGYHFCGGSLISEQWVVSAGHCYKSAINSKLSGRGCEYHRIQVRLGEHNIEVLEGNEQFINAAKIIRHPKYNSRTLDNDILLIKLSSPAVINSRVSAISLPTAPPAAGTESLISGWGNTLSSGADYPDELQCLDAPVLSQAECEASYPGKITNNMFCVGFLEGGKDSCQGDSGGPVVSNGELQGIVSWGYGCAQKNRPGVYTKVYNYVDWIKDTIAANS

SEQ ID NO: 73557 - protein, 322 aa, Homo sapiens
MIPGDGIGPELMLHVKSVFRHACVPVDFEEVHVSSNADEEDIRNAIMAIRRNRVALKGNIETNHNLPPSHKSRNNILRTSLDLYANVIHCKSLPGVVTRHKDIDILIVRENTEGEYSSLEHESVAGVVESLKIITKAKSLRIAEYAFKLAQESGRKKVTAVHKANIMKLGDGLFLQCCREVAARYPQITFENMIVDNTTMQLVSRPQQFDVMVMPNLYGNIVNNVCAGLVGGPGLVAGANYGHVYAVFETATRNTGKSIANKNIANPTATLLASCMMLDHLKLHSYATSIRKAVLASMDNENVRFPSHPTLLPRPVSPCSLL

SEQ ID NO: 73558 - protein, 1458 aa, Homo sapiens
MDTTAAAALPAFVALLLLSPWPLLGSAQGQFSAGGCTFDDGPGACDYHQDLYDDFEWVHVSAQEPHYLPPEMPQGSYMIVDSSDHDPGEKARLQLPTMKENDTHCIDFSYLLYSQKGLNPGTLNILVRVNKGPLANPIWNVTGFTGRDWLRAELAVSTFWPNEYQVIFEAEVSGGRSGYIAIDDIQVLSYPCDKSPHFLRLGDVEVNAGQNATFQCIATGRDAVHNKLWLQRRNGEDIPVAQTKNINHRRFAASFRLQEVTKTDQDLYRCVTQSERGSGVSNFAQLIVREPPRPIAPPQLLGVGPTYLLIQLNANSIIGDGPIILKEVEYRMTSGSWTETHAVNAPTYKLWHLDPDTEYEIRVLLTRPGEGGTGLPGPPLITRTKCAEPMRTPKTLKIAEIQARRIAVDWESLGYNITRCHTFNVTICYHYFRGHNESKADCLDMDPKAPQHVVNHLPPYTNVSLKMILTNPEGRKESEETIIQTDEDVPGPVPVKSLQGTSFENKIFLNWKEPLDPNGIITQYEISYSSIRSFDPAVPVAGPPQTVSNLWNSTHHVFMHLHPGTTYQFFIRASTVKGFGPATAINVTTNISAPTLPDYEGVDASLNETATTITVLLRPAQAKGAPISAYQIVVEELHPHRTKREAGAMECYQVPVTYQNAMSGGAPYYFAAELPPGNLPEPAPFTVGDNRTYQGFWNPPLAPRKGYNIYFQAMSSVEKETKTQCVRIATKAAATEEPEVIPDPAKQTDRVVKIAGISAGILVFILLLLVVILIVKKSKLAKKRKDAMGNTRQEMTHMVNAMDRSYADQSTLHAEDPLSITFMDQHNFSPRLPNDPLVPTAVLDENHSATAESSRLLDVPRYLCEGTESPYQTGQLHPAIRVADLLQHINLMKTSDSYGFKEEYESFFEGQSASWDVAKKDQNRAKNRYGNIIAYDHSRVILQPVEDDPSSDYINANYIDIWLYRDGYQRPSHYIATQGPVHETVYDFWRMIWQEQSACIVMVTNLVEVGRVKCYKYWPDDTEVYGDFKVTCVEMEPLAEYVVRTFTLERRGYNEIREVKQFHFTGWPDHGVPYHATGLLSFIRRVKLSNPPSAGPIVVHCSAGAGRTGCYIVIDIMLDMAEREGVVDIYNCVKALRSRRINMVQTEEQYIFIHDAILEACLCGETAIPVCEFKAAYFDMIRIDSQTNSSHLKDEFQTLNSVTPRLQAEDCSIACLPRNHDKNRFMDMLPPDRCLPFLITIDGESSNYINAALMDSYRQPAAFIVTQYPLPNTVKDFWRLVYDYGCTSIVMLNEVDLSQGCPQYWPEEGMLRYGPIQVECMSCSMDCDVINRIFRICNLTRPQEGYLMVQQFQYLGWASHREVPGSKRSFLKLILQVEKWQEECEEGEGRTIIHCLNGGGRSGMFCAIGIVVEMVKRQNVVDVFHAVKTLRNSKPNMVEAPEQYRFCYDVALEYLESS

SEQ ID NO: 73559 - protein, 845 aa, Homo sapiens
MGSWALLWPPLLFTGLLVRPPGTMAQAQYCSVNKDIFEVEENTNVTEPLVDIHVPEGQEVTLGALSTPFAFRIQGNQLFLNVTPDYEEKSLLEAQLLCQSGGTLVTQLRVFVSVLDVNDNAPEFPFKTKEIRVEEDTKVNSTVIPETQLQAEDRDKDDILFYTLQEMTAGASDYFSLVSVNRPALRLDRPLDFYERPNMTFWLLVRDTPGENVEPSHTATATLVLNVVPADLRPPWFLPCTFSDGYVCIQAQYHGAVPTGHILPSPLVLRPGPIYAEDGDRGINQPIIYSIFRGNVNGTFIIHPDSGNLTVARSVPSPMTFLLLVKGQQADLARYSVTQVTVEAVAAAGSPPRFPQSLYRGTVARGAGAGVVVKDAAAPSQPLRIQAQDPEFSDLNSAITYRITNHSHFRMEGEVVLTTTTLAQAGAFYAEVEAHNTVTSGTATTVIEIQVSEQEPPSTDVPPSPEAGGTTGPWTSTTSEVPRPPEPSQGPSTTSSGGGTGPHPPSGTTLRPPTSSTPGGSPGAENSTSHQPATPGGDTAQTPKPGTSQPMPPGVGTSTSHQPATPSGGTAQTPEPGTSQPMPPSMGTSTSHQPATPGGGTAQTPEAGTSQPMPPGMGTSTSHQPTTPGGGTAQTPEPGTSQPMPLSKSTPSSGGGPSEDKRFSVVDMAALGGVLGALLLLALLGLAVLVHKHYGPRLKCCSGKAPEPQPQGFDNQAFLPDHKANWAPVPSPTHDPKPAEAPMPAEPAPPGPASPGGAPEPPAAARAGGSPTAVRSILTKERRPEGGYKAVWFGEDIGTEADVVVLNAPTLDVDGASDSGSGDEGEGAGRGGGPYDAPGGDDSYI

SEQ ID NO: 73560 - protein, 83 aa, Homo sapiens
MSPCGRARRQTSRGAMAVLAWKFPRTRLPMGASALCVVVLCWLYIFPVYRLPNEKEIVQGVLQQGTAWRRNQTAARAFSCGIA

SEQ ID NO: 73561 - protein, 180 aa, Homo sapiens
MGSAISKHWEAELATLKGNNAKLTAALLESTANVKQWKQQLAAYQEEAERLHKRVTELECVSSQANAVHTHKTELNQTIQELEETLKLKEEEIERLKQEIDNARELQEQRDSLTQKLQEVEIRNKDLEGQLSDLEQRLEKSQNEQEAFRNNLKTLLEILDGKIFELTELRDNLAKLLECS

SEQ ID NO: 73562 - protein, 33 aa, Homo sapiens
MGLTPLRGRGLRSQEKLRKLSKPVYLRSHDEVS

SEQ ID NO: 73563 - protein, 144 aa, Homo sapiens
MSLMPKMHLLFPLTLVRSFWSDMMDSAQSFITSSWTFYLQADDGKIVIFQSKPEIQYAPHLEQEPTNLRESSLSKMSYLQMRNSQAHRNFLEDGESDGFLRCLSLNSGWILTTTLVLSVMVLLWICCATVATAVEQYVPSEVNL

SEQ ID NO: 73564 - protein, 79 aa, Homo sapiens
MGLSIFLLLCVLGEFSRSRERAGLRLDPFTPMRRPHHPPHLSSGPQPGGEEERGFLCASIYLQLSGAQPGSHTEDFQWH

SEQ ID NO: 73565 - protein, 41 aa, Homo sapiens
MAGPGWGPPRLDGFILTERLGSGTYATVYKAYAKNAKKWIS

SEQ ID NO: 73566 - protein, 534 aa, Homo sapiens
MIPDLTSPYLPNGSLSPTARTYLQMKWPLLDVQAGSLQSRQALKDARSPSPAHIVQSPLPCCTQGHDCQHFYPPSDFTVSTQVFRDMKRSHSLQKVGEPWCIESNKVPVVQHPHHVHPLTPLITYSNEHFTPGNPPPHLPADVDPKTGIPRPPHPPDISPYYPLSPGTVGQIPHPLGWQGQPVYPITTGGFRHPYPTALTVNASMSRFPPHMVPPHHTLHTTGIPHPAIVTPTVKQESSQSDVGSLHSSKHQDSKKEEEKKKPHIKKPLNAFMLYMKEMRAKVVAECTLKESAAINQILGRRWHALSREEQAKYYELARKERQLHMQLYPGWSARDNYGKKKKRKRDKQPGETNEHSECFLNPCLSLPPITDANTPKKCRALFGLDRQTLWCKPCRRKKKCVRYIQGEGSCLSPPSSDGSLLDSPPPSPNLLGSPPRDAKSQTEQTQPLSLSLKPDPLAHLSMMPPPPALLLAEATHKASALCPNGALDLPPAALQPAAPSSSIAQPSTSSLHSHSSLAGTQPQPLSLVTKSLE

SEQ ID NO: 73567 - protein, 112 aa, Homo sapiens
MSIMSYNGGAVMAMKGKNCVAIAADRRFGIQAQMVTTDFQKIFPMGDRLYIGLAGLATDVQTVAQRLKFRLNLYELKEGRQIKPYTLMSMVANLLYEKRIRITCLKPSPKPC

SEQ ID NO: 73568 - protein, 82 aa, Homo sapiens
MTPLLTLILVVLMGLPLAQALDCHVCAYNGDNCFNPMRCPAMVAYCMTTRTYYTPTRMKLQPKPYGVTSARASEGAPMDPDA

SEQ ID NO: 73569 - protein, 69 aa, Homo sapiens
MAAINPWASWGALTDQSWGMTAVDPWASWALCPQYPAWHVEGSLEEGRRATGLPAAQVQVRWGCPVPRG

SEQ ID NO: 73570 - protein, 326 aa, Homo sapiens
MSGRRFHLSTTDRVIKAVPFPPTQRLTFKEVFENGKPKVDVLKNHLVKEGRLEEEVALKIINDGAAILRQEKTMIEVDAPITVCGDIHGQFFDLMKLFEVGGSPSNTRYLFLGDYVDRGYFSIECVLYLWSLKINHPKTLFLLRGNHECRHLTDYFTFKQECRIKYSEQVYDACMETFDCLPLAALLNQQFLCVHGGMSPEITSLDDIRKLDRFTEPPAFGPVCDLLWSDPSEDYGNEKTLEHYTHNTVRGCSYFYSYPAVCEFLQNNNLLSIIRAHEAQDAGYRMYRKSQATGFPSLITIFSAPNYLDVYNNKGKGIQQYLSLNL

SEQ ID NO: 73571 - protein, 62 aa, Homo sapiens
MSRVRDAGCVAAGIVIGAGAWYCVYKYTRGRDQTKKRMAKPKNRAVAGTGARARAGLRAGFT

SEQ ID NO: 73572 - protein, 134 aa, Homo sapiens
MADDFGFFSSSESGAPEAAEEDPAAAFLAQQESEIAGIENDEGFGAPAGSHAAPAQPGPTSGAGSEDMGTTVNGDVFQPVHHQRVQLQTQLPIQPKDEPAHNYSSSIWHSQGQGQKGPAGLRLPTSAQILSPFP

SEQ ID NO: 73573 - protein, 204 aa, Homo sapiens
  MOD_RES (1)..(1): Any amino acid
XNPGTLNILVRVNKGPLANPIWNVTGFTGRDWLRAELAVSTFWPNEYQRRNGEDIPVAQTKNINHRRFAASFRLQEVTKTDQDLYRCVTQSERGSGVSNFAQLIVREPPRPIAPPQLLGVGPTYLLIQLNANSIIGDGPIILKEVEYRMTSGSWTETHAVNAPTYKLWHLDPDTEYEIRVLLTRPGEGGTGLPGPPLITRTKCA

SEQ ID NO: 73574 - protein, 79 aa, Homo sapiens
MRPMRIFVNDDRHVMAKHSSVYPTQEELEAVQNMVSHTERALKAVSDWIDEQEKGSSEQAESDNMDVPPEDDSKEGAGL

SEQ ID NO: 73575 - protein, 1321 aa, Homo sapiens
MAAETQTLNFGPEWLRALSSGGSITSPPLSPALPKYKLADYRYGREEMLALFLKDNKIPSDLLDKEFLPILQEEPLPPLALVPFTEEEQRNFSMSVNSAAVLRLTGRGGGGTVVGAPRGRSSSRGRGRGRGECGFYQRSFDEVEGVFGRGGGREMHRSQSWEERGDRRFEKPGRKDVGKKNGYYCMYSPVLLLGQPLCQGRPNFEEGGPTSVGRKHEFIRSESENWRIFREEQNGEDEDGGWRLAGSRRDGERWRPHSPDGPRSAGWREHMERRRRFEFDFRDRDDERGYRRVRSGSGSIDDDRDSLPEWCLEDAEEEMGTFDSSGAFLSLKKVQKEPIPEEQEMDFRPVDEGEECSDSEGSHNEEAKEPDKTNKKEGEKTDRVGVEASEETPQTSSSSARPGTPSDHQSQEASQFERKDEPKTEQTEKAEEETRMENSLPAKVPSRGDEMVADVQQPLSQIPSDTASPLLILPPPVPNPSPTLRPVETPVVGAPGMGSVSTEPDDEEGLKHLEQQAEKMVAYLQDSALDDERLASKLQEHRAKGVSIPLMHEAMQKWYYKDPQGEIQGPFNNQEMAEWFQAGYFTMSLLVKRACDESFQPLGDIMKMWGRVPFSPGPAPPPHMGELDQERLTRQQELTALYQMQHLQYQQFLIQQQYAQVLAQQQKAALSSQQQQQLALLLQQFQTLKMRISDQNIIPSVTRSVSVPDTGSIWELQPTASQPTVWEGGSVWDLPLDTTTPGPALEQLQQLEKAKAAKLEQERREAEMRAKREEEERKRQEELRRQQEEILRRQQEEERKRREEEELARRKQEEALRRQREQEIALRRQREEEERQQQEEALRRLEERRREEEERRKQEELLRKQEEEAAKWAREEEEAQRRLEENRLRMEEEAARLRHEEEERKRKELEVQRQKELMRQRQQQQEALRRLQQQQQQQQLAQMKLPSSSTWGQQSNTTACQSQATLSLAEIQKLEEERERQLREEQRRQQRELMKALQQQQQQQQQKLSGWGNVSKPSGTTKSLLEIQQEEARQMQKQQQQQQQHQQPNRARNNTHSNLHTSIGNSVWGSINTGPPNQWASDLVSSIWSNADTKNSNMGFWDDAVKEVGPRNSTNKNKNNASLSKSVGVSNRQNKKVEEEEKLLKLFQGVNKAQDGFTQWCEQMLHALNTANNLDVPTFVSFLKEVESPYEVHDYIRAYLGDTSEAKEFAKQFLERRAKQKANQQRQQQQLPQQQQQQPPQQPPQQPQQQDSVWGMNHSTLHSVFQTNQSNNQQSNFEAVQSGKKKKKQKMVRADPSLLGFSVNASSERLNMGEIETLDDY

SEQ ID NO: 73576 - protein, 318 aa, Homo sapiens
MEEYNTSSTDFTFMGLFNRKETSGLIFAIISIIFFTALMANGVMIFLIQTDLRLHTPMYFLLSHLSLIDMMYISTIVPKMLVNYLLDQRTISFVGCTAQHFLYLTLVGAEFFLLGLMAYDRYVAICNPLRYPVLMSRRVCWMIIAGSWFGGSLDGFLLTPITMSFPFCNSREINHFFCEAPAVLKLACADTALYETVMYVCCVLMLLIPFSVVLASYARILTTVQCMSSVEGRKKAFATCSSHMTVVSLFYGAAMYTYMLPHSYHKPAQDKVLSVFYTILTPMLNPLIYSLRNKDVTGALKRALGRFKGPQRVSGGVF

SEQ ID NO: 73577 - protein, 199 aa, Homo sapiens
MYPATAVPQINITILKGEKGDRGDRGLQGKYGKTGSAGARGHTGPKGQKGSMGAPGERCKSHYAAFSVGRKKPMHSNHYYQTVIFDTEFVNLYDHFNMFTGKFYCYVPGLYFFSLNVHTWNQKETYLHIMKNEEEVVILFAQVGDRSIMQSQSLMLELREQDQVWVRLYKGERENAIFSEELDTYITFSGYLVKHATEP

SEQ ID NO: 73578 - protein, 80 aa, Homo sapiens
MDKFWWHAAWGLCLVPLSLAQIDLNITCRFAGVFHVEKNGRYSISRTEAADLCKAFNSTLPTMAQMEKALSIGFETCSST

SEQ ID NO: 73579 - protein, 159 aa, Homo sapiens
MATSAPLRSLEEEVTCSICLDYLRDPVTIDCGHVFCRSCTTDVRPISGSRPVCPLCKKPFKKENIRPVWQLEKILNHLSTLRRDRDKIQGFQAKGEADILAALKKLQDQRQYIVAEFEQGHQFLREREEHLLEQLAKLEQELTEGREKFKSRGVGELAR

SEQ ID NO: 73580 - protein, 144 aa, Homo sapiens
MDDLKYGVYPLKEASGCPGAERNLLVYSYFEKETLTFRDVAIEFSLEEWECLNPAQQNLYMNVMLENYKNLVFLGVAVSKQDPVTCLEQEKEPWNMKRHEMVDEPPGYMCRMCSYVFLFYQRPLARARHKRFFSTSNTEKIWQM

SEQ ID NO: 73581 - protein, 17 aa, Homo sapiens
  MOD_RES (1)..(1): Any amino acid
XAKNIQYFGAGTRLSVL

SEQ ID NO: 73582 - protein, 77 aa, Homo sapiens
MFNSKFGSIPKFYVRAPGRVNIIGEHIDYCGYSVLPMAVEQDVLIAVEPVKTYALQLANTNPLYPSSGLQGSLRQRL

SEQ ID NO: 73583 - protein, 147 aa, Homo sapiens
MQFMLLFSRQGKLRLQKWYVPLSDKEKKKITRELVQTVLARKPKMCSFLEWRDLKIVYKRYASLYFCCAIEDQDNELITLEIIHRYVELLDKYFGSVCELDIIFNFEKAYFILDEFLLGGEVQETSKKNVLKAIEQADLLQESFFSS

SEQ ID NO: 73584 - protein, 8 aa, Homo sapiens
MEVAPEQP

SEQ ID NO: 73585 - protein, 247 aa, Homo sapiens
MLLAASKVLDRLKPVIGVNTDPERSEGHLCLPVRYTHSFPEALQKFYRGEFRWLWRQRIRLYLEGTGINPVPVDLHEQQLSLNQHNRALNIERAHDERSEASGPQLLPVRALNEVFIGESLSSRSFNINRVATQAVEDVLNIAKRQGNLSLPLNRELVEKVTNEYNESLLYSPEEPKILFSIREPIANRVFSSSRQRCFSSKVCVRSRCWDACMVVDGGTSFEFNDGAIASMMINKEDELRTVLLEQ

SEQ ID NO: 73586 - protein, 79 aa, Homo sapiens
MLQNGKKFDSSRDRNKPFKFRIGKQEVIKGFEEGAAQMSLGQRAKLTCTPDVAYGATGHPGVIPPNATLIFDVELLNLE

SEQ ID NO: 73587 - protein, 114 aa, Homo sapiens
SNSMSDDLDNLKKMGQNLARVLSQLTSDYTIGFGKFVDKVSVPQTDMRPEKLKEPWPNSDPPFSFKNVISLTEDVDEFRNKLQGERISATPSLHPWGPSPPACTEQGLGVSWEA

SEQ ID NO: 73588 - protein, 543 aa, Homo sapiens
MAVNSSGYSRWCCFADSWQREKLASMESPEEPGASMDENYFVNYTFKDRSHSGRVAQGIMKLCLEEELFADVTISVEGREFQLHRLVLSAQSCFFRSMFTSNLKEAHNRVIVLQDVSESVFQLLVDYIYHGTVKLRAEELQEIYEVSDMYQLTSLFEECSRFLARTVQVGNCLQVMWLADRHSDPELYTAAKHCAKTHLAQLQNTEEFLHLPHRLLTDIISDGVPCSQNPTEAIEAWINFNKEEREAFAESLRTSLKEIGENVHIYLIGKESSRTHSLAVSLHCAEDDSISVSGQNSLCHQITAACKHGGDLYVVGGSIPRRMWKCNNATVDWEWCAPLPRDRLQHTLVSVPGKDAIYSLGGKTLQDTLSNAVIYYRVGDNVWTETTQLEVAVSGAAGANLNGIIYLLGGEENDLDFFTKPSRLIQCFDTETDKCHVKPYVLPFAGRMHAAVHKDLVFIVAEGDSLVCYNPLLDSFTRLCLPEAWSSAPSLWKIASCNGSIYVFRDRYKKGDANTYKLDPATSAVTVTRGIKVLLTNLQFVLA

SEQ ID NO: 73589 - protein, 201 aa, Homo sapiens
MQSGTHWRVLGLCLLSVGVWGQDGNEEMAYKVSISGTTVILTCPQYPGSEILWQHNDKNIGGDEDDKNIGSDEDHLSLKEFSELEQSGYYVCYPRGSKPEDANFYLYLRARVCENCMEMDVMSVATIVIVDICITGGLLLLVYYWSKNRKAKAKPVTRGAGAGGRQRGQNKERPPPVPNPDYEPIRKGQRDLYSGLNQRRI

SEQ ID NO: 73590 - protein, 82 aa, Homo sapiens
MRSAARRGRAAPAARDSLPVLLFLCLLLKTCEPKTANAFKPNILLIMADDLGTGDLGCYGNNTLRDRFSLCCQGLSRTPGLK

SEQ ID NO: 73591 - protein, 324 aa, Homo sapiens
MAPYSLLVTRLQKALGVRQYHVASVLCQRAKVAMSHFEPNEYIHYDLLEKNINIVRKRLNRPLTLSEKIVYGHLDDPASQEIERGKSYLRLRPDRVAMQDATAQMAMLQFISSGLSKVAVPSTIHCDHLIEAQVGGEKDLRRAKDINQEVYNFLATAGAKYGVGFWKPGSGIIHQIILENYAYPGVLLIGTDSHTPNGGGLGGICIGVGGADAVDVMAGIPWELKCPKVIGVKLTGSLSGWSSPKDVILKVAGILTVKGGTGAIVEYHGPGVDSISCTGMATICNMGAEIGATTSVFPYNHRMKKYLSKTGREAEATHQWALHP

SEQ ID NO: 73592 - protein, 205 aa, Homo sapiens
MGMVVLLMGLVFASVYIYRYFFLAQLARDNFFRCGVLYEDSLSSQVRTQMELEEDVKIYLDENYERINVPVPQFGGGDPADIIHDFQRGLTAYHDISLDKCYVIELNTTIVLPPRNFWELLMNVKRGTYLPQTYIIQEEMVVTEHVSDKEALGSFIYHLCNGKDTYRLRRRATRRRINKRGAKNCNAIRHFENTFVVETLICGVV

SEQ ID NO: 73593 - protein, 196 aa, Homo sapiens
MATSTSTEAKSASWWNYFFLYDGSKVKEEGDPTRAGICYFYPSQTLLDQQELLCGQIAGVVRCVSDISDSPPTLVRLRKLKFAIKVDGDYLWVLGCAVELPDVSCKRFLDQLVGFFNFYNGPVSLAYENCSQEELSTEWDTFIEQILKNTSDLHKIFNSLWNLDQTKALSYTLSSCSVQPFPLFSLPDCEHADGWA

SEQ ID NO: 73594 - protein, 53 aa, Homo sapiens
MEAGGFLDSLIYGACVVFTLGMFSAGLSDLRHMRMTRSVDNVQFLPFLTTEVK

SEQ ID NO: 73595 - protein, 83 aa, Homo sapiens
MLLAQINRDSQGMTEFPGGGMEAQHVTLCLTEAVTVADGDNLENMEGVSLQAVTLADGSTAYIQHNSKDAKLIDGQVIQLEDG

SEQ ID NO: 73596 - protein, 104 aa, Homo sapiens
SLGVVTCGSVVKLLNTRHNVRLHSHDVRYGSGSGQQSVTGVTSVDDSNSYWRIRGKSATVCERGTPIKCGQPIRLTHVNTGRNLHSHHFTSPLSGNQLLCKVIL

SEQ ID NO: 73597 - protein, 549 aa, Homo sapiens
MFTLDVKSNTVFDIITDNCDLHFKISRDRLSASSLTMESFAFLWAGGRASYGVSKGKVCFEMKVTEKIPVRHLYTKDIDIHEVRIGWSLTTSGMLLGEEEFSYGYSLKGIKTCNCETEDYGEKFDENDVITCFANFESDEVELSYAKNGQDLGVAFKISKEVLAGRPLFPHVLCHNCAVEFNFGQKEKPYFPIPEEYTFIQNVPLEDRVRGPKGPEEKKDCEVVMMIGLPGAGKTTWVTKHAAENPGKYNILGTNTIMDKMMVAGFKKQMADTGKLNTLLQRAPQCLGKFIEIAARKKRNFILDQTNVSAAAQRRKMCLFAGFQRKAVVVCPKDEDYKQRTQKKAEVEGKDLPEHAVLKMKGNFTLPEVAECFDEITYVELQKEEAQKLLEQYKEESKKALPPEKKQNTGSKKSNKNKSGKNQFNRGGGHRGRGGFNMRGGNFRGGAPGNRGGYNRRGNMPQRGGGGGGSGGIGYPYPRAPVFPGRGSYSNRGNYNRGGMPNRGNYNQNFRGRGNNRGYKNQSQGYNQWQQGQFWGQKPWSQHYHQGYY

SEQ ID NO: 73598 - protein, 364 aa, Homo sapiens
MLSSFPVVLLETMSHYTDEPRFTIEQIDLLQRLRRTGMTKHEILHALETLDRLDQEHSDKFGRRSSYGGSSYGNSTNNVPASSSTATASTQTQHSGMSPSPSNSYDTSPQPCTTNQNGRENNERLSTSNGKMSPTRYHANSMGQRSYSFEASEEDLDVDDKVEELMRRDSSVIKEEIKAFLANRRISQAVVAQVTGISQSRISHWLLQQGSDLSEQKKRAFYRWYQLEKTNPGATLSMRPAPIPIEDPEWRQTPPPVSATSGTFRLRRGSRFTWRKECLAVMESYFNENQYPDEAKREEIANACNAVIQKPEAAILESHGIDVQSPGGHSNSDDVDGNDYSEQDTWQVRNGEEEEGRSSEGGRE

SEQ ID NO: 73599 - protein, 117 aa, Homo sapiens
VCGDYLLSRMDVTSCISYRNFASCMGDSRLLNKVDAYIQEHLLQISEEEEFLKLPRLKLEVMLEDNVCLPSNGKLYTKVINWVQRSIWENGDSLEELMEEVSFKVNGIQPFLKIILL

SEQ ID NO: 73600 - protein, 790 aa, Homo sapiens
MDGDGGRRDVPGTLMEPGRGAGPAGMAEPRAKAARPGPQRFLRRSVVESDQEEPPGLEAAEAPGPQPPQPLQRRVLLLCKTRRLIAERARGRPAAPAPAALVAQPGAPGAPADAGPEPVGTQEPGPDPIAAAVETAPAPDGGPREEAAATVRKEDEGAAEAKPEPGRTRRDEPEEEEDDEDDLKAVATSLDGRFLKFDIELGRGSFKTVYKGLDTETWVEVAWCELQDRKLTKLERQRFKEEAEMLKGLQHPNIVRFYDFWESSAKGKRCIVLVTELMTSGTLKTYLKRFKVMKPKVLRSWCRQILKGLLFLHTRTPPIIHRDLKCDNIFITGPTGSVKIGDLGLATLKRASFAKSVIGTPEFMAPEMYEEHYDESVDVYAFGMCMLEMATSEYPYSECQNAAQIYRKVTCGIKPASFEKVHDPEIKEIIGECICKNKEERYEIKDLLSHAFFAEDTGVRVELAEEDHGRKSTIALRLWVEDPKKLKGKPKDNGAIEFTFDLEKETPDEVAQEMIESGFFHESDVKIVAKSIRDRVALIQWRRERIWPALQPKEQQDVGSPDKARGPPVPLQVQVTYHAQAGQPGPPEPEEPEADQHLLPPTLPTSATSLASDSTFDSGQGSTVYSDSQSSQQSVMLGSLADAAPSPAQCVCSPPVSEGPVLPQSLPSLGAYQQPTAAPPPLAQPTPLPQVLAPQPVVPLQPVPPHLPPYLAPASQVGAPAQLKPLQMPQAPLQPLAQVPPQMPPIPVVPPITPLAGIDGLPPALPDLPTATVPPVPPPQYFSPAVILPS

SEQ ID NO: 73601 - protein, 238 aa, Homo sapiens
  MOD_RES (1)..(1): Any amino acid
XEKRSAELPDAVGPIVQLQEKLYVPVKEYPDEEQNRGKPNWEHLNEDLHVLITVEDAQNRAEIKLKRAVEEVKKLLVPAAEGEDSLKKMQLMELAILNGTYRDANIKSPALAFSLAATAQAAPRIITGPAPVLPPAALRTPTPAGPTIMPLIRQIQTAVMPNGTPHPTAAIVPPGPEAGLIYTPYEYPYTLAPATSILEYPIEPSGVLGAVATKVRRHDMRVHPYQRIVTADRAATGN

SEQ ID NO: 73602 - protein, 234 aa, Homo sapiens
MPKEKYEPPDPRRMYTIMSSEEAANGKKSHWAELEISGNPLTQDILNLYQEPDGTRRLLNYLLDNLSVTTEQPPPRSWIMLQEPDRTRPTALFSVMCYNVLCDKYATRQLYGYCPSWALNWDYRKKAIIQEILSCNADIVSLQEVETEQYYSFFLVELKERGYNGFFSPKSRARTMSEQERKHVDGCAIFFKTEKFTLVQKHTVEFNQLAMANSEGSEAMLNRVMTKDNIGVAV

SEQ ID NO: 73603 - protein, 123 aa, Homo sapiens
MLLESVLIFFNLLAVLSYLKFFNCQKHSPFSLSWWFWLTLTGVACSCAVGIKYMGVFTYVLVLGVAAVHAWHLLGDQTLSNVGADVQCCMRPACMGQMQMSQGVCVFCHLLARAVALLVIPVV

SEQ ID NO: 73604 - protein, 254 aa, Homo sapiens
MAQKKYLQAKLTQFLREDRIQLWKPPYTDENKKVGLALKDLAKQYSDRLECCENEVEKVIEEIRCKAIERGTGNDNYRTTGIATIEVFLPPRLKKDRKNLLETRLHITGRELRSKIAETFGLQENYIKIVINKKQLQLGKTLEEQGVAHNVKAMVLELKQSEEDARKNFQLEEEEQNEAKLKEKQIQRTKRGLEILAKRAAETVVDPEMTPYLDIANQTGRSIRIPPSERKALMLAMGYHEKGRAFLKRKEYGI

SEQ ID NO: 73605 - protein, 696 aa, Homo sapiens
  MOD_RES (1)..(1): Any amino acid
XKNSDTAHIKSIEITSILNGLQASESSAEDSEQEDERGAQDMDNNGKEESKIDHLTNNRNDLISKEEQNSSSLLEENKVHADLVISKPVSKSPERLRKDIEVLSEDTDYEEDEVTKKRKDVKKDTTDKSSKPQIKRGKRRYCNTEECLKTGSPGKKEEKAKNKESLCMENSSNSSSDEDEEETKAKMTPTKKYNGLEEKRKSLRTTGFYSGFSEVAEKRIKLLNNSDERLQNSRAKDRKDVWSSIQGQWPKKTLKELFSDSDTEAAASPPHPAPEEGVAEESLQTVAEEESCSPSVELEKPPPVNVDSKPIEEKTVEVNDRKAEFPSSGSNSVLNTPPTTPESPSSVTVTEGSRQQSSVTVSEPLAPNQEEVRSIKSETDSTIEVDSVAGELQDLQSEGNSSPAGFDASVSSSSSNQPEPEHPEKACTGQKRVKDAQGGGSSSKKQKRSHKATVVNNKKKGKGTNSSDSEELSAGESITKSQPVKSVSTGMKSHSTKSPARTQSPGKCGKNGDKDPDLKEPSNRLPKVYKWSFQMSDLENMTSAERITILQEKLQEIRKHYLSLKSEVASIDRRRKRLKKKERESAATSSSSSSPSSSSITAAVMLTLAEPSMSSASQNGMLQPLPEDVLHSQNEAFLKRRGPPTDGDKPAPSPSASLRRRPAADCRRGGGVARERKCPEPGSASWRAAAVWESLE

SEQ ID NO: 73606 - protein, 124 aa, Homo sapiens
MDDLCEANGTFAISLFKILGEEDNSRNVFFSPMSISSALAMVFMGAKGSTAAQMSQALCLYKDGDIHRGFQSLLSEVNRTGTQYLLRTANRLFGEKTCDFLPDFKEYCQKFYQAELEELSFAED

SEQ ID NO: 73607 - protein, 181 aa, Homo sapiens
DLIEPTLLDELICHIGSLASVYHKPPNAFVEGSHGIHRKHLPIHHGSTDAGDSPVGTTTATNLEQPQVIPSQGDLLGDLLNLDLGPPVNVPQVSSMQMGAVDLLGGGLDSLPQKLFTVQFSSAYSEIERYPRNQDEKKLKPLFLLWIRMWLNIYSLRESRFLFREHHKEDLNLPVWKKMSF

SEQ ID NO: 73608 - protein, 775 aa, Homo sapiens
MSWFNASQLSSFAKQALSQAQKSIDRVLDIQEEEPSIWAETIPYGEPGISSPVSGGWDTSTWGLKSNTEPQSPPIASPKAITKPVRRTVVDESENFFSAFLSPTDVQTIQKSPVVSKPPAKSQRPEEEVKSSLHESLHIGQSRTPETTESQVKDSSLCVSGETLAAGTSSPKTEGKHEETVNKESDMKVPTVSLKVSESVIDVKTTMESISNTSTQSLTAETKDIALEPKEQKHEDRQSNTPSPPVSTFSSGTSTTSDIEVLDHESVISESSASSRQETTDSKSSLHLMQTSFQLLSASACPEYNRLDDFQKLTESCCSSDAFERIDSFSVQSLDSRSVSEINSDDELSGKGYALVPIIVNSSTPKSKTVESAEGKSEEVNETLVIPTEEAEMEESGRSATPVNCEQPDILVSSTPINEGQTVLDKVAEQCEPAESQPEALSEKEDVCKTVEFLNEKLEKREAQLLSLSKEKALLEEAFDNLKDEMFRVKEESSSISSLKDEFTQRIAEAEKKVQLACKERDAAKKEIKNIKEELATRLNSSETADLLKEKDEQIRGLMEEGEKLSKQQLHNSNIIKKLRAKDKENENMVAKLNKKVKELEEELQHLKQVLDGKEEVEKQHRENIKKLNSMVERQEKDLGRLQVDMDELEEKNRSIQAALDSAYKELTDLHKANAAKDSEAQEAALSREMKAKEELSAALEKAQEEARQQQETLAIQVGDLRLALQRTEQAAARKEDYLRHEIGELQQLRENVQLQKNSLLTKFRCLPWSHRILF

SEQ ID NO: 73609 - protein, 573 aa, Homo sapiens
MVLTSERLFAQREHCELELGGGYSLPSTLSLLPTTLPTSTGFPKPNSQVKELKQNSAFINHEKNGADGKHCESHQCARAFCQSIYLSKLGNVETGKKNPYEYIVSGDSLNYGSSLCFHGRTFSVKKSDDCKDYGNLFSHSVSLNEQKPVHFGKSQYECDECRETCSESLCLVQTERSGPGETPFRCEERCAAFPMASSFSDCNIIQTTEKPSVCNQCGKSFSCCKLIHQRTHTGEKPFECTQCGKSFSQSYDLVIHQRTHTGEKPYECDLCGKSFTQRSKLITHQRIHTGEKPYQCIECRKSFRWNSNLIVHQRIHTGEKPYECTHCGKSFSQSYELVTHKRTHTGEKPFKCTQCGKSFSQKYDLVVHQRTHTGEKPYECNLCGKSFSQSSKLITHQRIHTGEKPYQCIECGKSFRWNSNLVIHQRIHTGEKPYDCTHCGKSFSQSYQLVAHKRTHTGEKPYECNECGKAFNRSTQLIRHLQIHTGEKPYKCNQCNKAFARSSYLVMHQRTHTGEKPFECSQCGKAFSGSSNLLSHHRIHSGEKPYECSDCGKSFRQQSQLVVHRRTHTGEKP

SEQ ID NO: 73610 - protein, 60 aa, Homo sapiens
MDSEAFQSARDFLDMNFQSLAMKHMDLKQMELDTAAAKVDELTKQLESLWSDSPAPPGPQ

SEQ ID NO: 73611 - protein, 285 aa, Homo sapiens
ARVHIPNDDAQFDASHCDSDKGEFGGFGSVTGKIECEIKINHEGEVNRARYMPQNPHIIATKTPSSDVLVFDYTKHPAKPDPSGECNPDLRLRGHQKEGYGLSWNSNLSGHLLSASDDHTVCLWDINAGPKEGKIVDAKAIFTGHSAVVEDVAWHLLHESLFGSVADDQKLMIWDTRSNTTSKPSHLVDAHTAEVNCLSFNPYSEFILATGSADKVCDSFLVSVCQEMKSRDSSVKLYQTRGSTIEKNVLYVVLHGDAHRVHWSPHNETILASSGTDRRLNVWDL

SEQ ID NO: 73612 - protein, 238 aa, Homo sapiens
MAELTALESLIEMGFPRGRAEKALALTGNQGIEAAMDWMLELVAQKQREREEREEREALERERQRRRQGQELSAARQRLQEDEMRRAAEERRREKAEELAARQRVREKIERDKAERAKKYGGSVGSQPPPVAPEPGPVPSSPSQEPPTKREYDQCRIQVRLPDGTSLTQTFRAREQLAAVRLYVELHRGEELGGGQDPVQLLSGFPRRAFSEADMERPLQELGLVPSAVLIVAKKCPS

SEQ ID NO: 73613 - protein, 183 aa, Homo sapiens
MLPCASCLPGSLLLWALLLLLLGSASPQDSEEPDSYTECTDGYEWDPDSQHCRDVNECLTIPEACKGEMKCINHYGGYLCLPRSAAVINDLHGEGPPPPVPPAQHPNPCPPGYEPDDQDSCVDVDECAQALHDCRPSQDCHNLPGSYQCTCPDGYRKIGPECVDIDECRYRYCQHRCVNLPGS

SEQ ID NO: 73614 - protein, 119 aa, Homo sapiens
MAAVAAVAARRRRLSVSGRDENSVELTMAEGPYKIILTARPFRLDLLEDRSLLLSVNARGLLEFEHQRAPRVSFSDKVNLTLGSIWDKIKNLFSRQGSKDPAEGDGAQPEETPRDGDKA

SEQ ID NO: 73615 - protein, 21 aa, Homo sapiens
GEELHPSSPHHGPSDLQQSIE

SEQ ID NO: 73616 - protein, 65 aa, Homo sapiens
MYAVDLMLKWDNGPDGRRVMQPQILEVNFNPDCERACRYHPTFFNDVFSTLFLDQPGGCHVTCLV

SEQ ID NO: 73617 - protein, 149 aa, Homo sapiens
MGSTWGSPGWVRLALCLTGLVLSLYALHVKAARARDRDYRALCDVGTAISCSRVFSSRVQGTGLTVLTWFHPTPPLCQVGQGFRAGGACAGTGQHPQSIQQHIRLHLLHTTAIVRLPADTLGLCPDAAELPGVSRWFCLPGLDPVLRAL

SEQ ID NO: 73618 - protein, 121 aa, Homo sapiens
MAAAALRDPAQQGYVTFEDVAVYFSQEEWRLLDDAQRLLYRNVMLENFTLLASLGCWHGAEAEEAPEQIASVGLLSSNIQQHQKQHCGEKPLKRQEGRVPVLRSCKVHLSEKSLQSREVGK

SEQ ID NO: 73619 - protein, 293 aa, Homo sapiens
  MOD_RES (1)..(1): Any amino acid
XKFQKSRQPRPSSQYNQRLFGGDMEKFIQSSGQPVPLVVESCIRFINLNGEDPLVEGCTAHDLDSVAGVLKLYFRSLEPPLFPPDLFGELLASSELEATAERVEHVSRLLWRLPAPVLVVLRYLFTFLNHLAQYSDENMMDPYNLAVCFGPTLLPVPAGQDPVALQGRVNQLVQTLIVQPDRVFPPLTSLPGPVYEKCMAPPSASCLGDAQLESLGADNEPELEAEMPAQEDDLEGVVEAVACFAYTGRTAQELSFRRGDVLRLHERASSDWWRGEHNGMRGLIPHKYITLPA

SEQ ID NO: 73620 - protein, 349 aa, Homo sapiens
MSREVAEQEERLRRGDDLRLQMALEESRRDTVKIPKKKETTLLDLMDALPSSGPAAQKAEPWGPSASTNQTNPWGGPAAPASTSDPWPSFGTKPAASIDPWGVPTGATVQSVPKNSDPWAASQQPASSAGKRASDAWGAVSTTKPVSVSGSFELFSNLNGTIKDDFSEFDNLRTSKKTAESVTSLPSQNNGTTSPDPFESQPLTVASSKPSSARKTPESFLGPNAALVNLDSLVTRPAPPAQSLNPFLAPGAPATSAPVNPFQVNQPQPLTLNQLRGSPVLGTSTSFGPGPGVESMAVASMTSAAPQPALGATGSSLTPLGPAMMNMVGSVGIPPSAAQATGTTNPFLL

SEQ ID NO: 73621 - protein, 67 aa, Homo sapiens
  MOD_RES (1)..(1): Any amino acid
XNHNLADTVLKITDFGLAREWHKTTKMSAAGTYAWMAPEVIRLSLFSKSSDVWRMLGPRPPRAARFR

SEQ ID NO: 73622 - protein, 122 aa, Homo sapiens
MLMILTVFLSNNEQILTEVPITPETTCRDVVEFCKEPGEGSCHLAEVWRGNERPIPFDHMMYEHLQKWGPRREEVKFFLRHEDSPTENSEQGGRQTQEQRTQRNVINVPGEKRTENGDSYLG

SEQ ID NO: 73623 - protein, 122 aa, Homo sapiens
MHICDIINTTQDGPKDAVKALKKRISKNYNHKEIQLTLSLIDMCVQNCGPSFQSLIVKKEFVKENLVKLLNPRYNLPLDIQNRILNFIKTWSQGFPGGVDVSEVKEVYLDLVKKGVQFPPSE

SEQ ID NO: 73624 - protein, 300 aa, Homo sapiens
MSKSKVDNQFYSVEVGDSTFTVLKRYQNLKPIGSGAQGIVCAAYDAVLDRNVAIKKLSRPFQNQTHAKRAYRELVLMKCVNHKNIISLLNVFTPQKTLEEFQDVYLVMELMDANLCQVIQMELDHERMSYLLYQMLCGIKHLHSAGIIHRDLKPSNIVVKSDCTLKILDFGLARTAGTSFMMTPYVVTRYYRAPEVILGMGYKENVDIWSVGCIMGEMVRHKILFPGRDYIDQWNKVIEQLGTPCPEFMKKLQPTVRNYVENRPKYAGLTFPKLFPDSLFPADSEHNKLKAKPGTCCQRC

SEQ ID NO: 73625 - protein, 122 aa, Homo sapiens
MPLPDGARTPGGVCREARGGGYTNRTFEFDDGQCAPRRPCAGDGALLDTAGFKMSDLDSEVLPLPPRYRFRDLLLGDPSFQNDDRVQVEFYVNENTFKERLKLFFIKNQRSSQKRAEPTRRV

SEQ ID NO: 73626 - protein, 20 aa, Homo sapiens
MVCEGKRSASCPCFFLLTAK

SEQ ID NO: 73627 - protein, 15 aa, Homo sapiens
MFWTFKEWFWLERFW

SEQ ID NO: 73628 - protein, 275 aa, Homo sapiens
  MOD_RES (1)..(1): Any amino acid
XVKDRKKKKKKGQEAGGFFEDASQYDENLSFQDMNLSRPLLKAITAMGFKQPTPIQKACIPVGLLGKDICACAATGTGKTAAFALPVLERLIYKPRQAPVTRVLVLVPTRELGIQVHSVTRQLAQFCNITTCLAVGGLDVKSQEAALRAAPDILIATPGRLIDHLHNCPSFHLSSIEVLILDEADSPPVDTAWPHAPTLWLLHLPFPQPGAISCPFRMLDEYFEEQMKEIIRMCSHHRQTMLFSATMTDEVKDLASVSLKNPVRIFVNSNTDVAP

SEQ ID NO: 73629 - protein, 115 aa, Homo sapiens
MVVAELEKTLSGCPAVDSVVSLLDGVVEKLSVLKRKAVESIQAEDESAKLCKRRIEHLKEHSSDQPAAASVWKRKRMDRMMVEHLLRCGYYNTAVKLARQSGIEDLVNIEMFLTA

SEQ ID NO: 73630 - protein, 1494 aa, Homo sapiens
MRILKRFLACIQLLCVCRLDWANGYYRQQRKLVEEIGWSYTGALNQKNWGKKYPTCNSPKQSPINIDEDLTQVNVNLKKLKFQGWDKTSLENTFIHNTGKTVEINLTNDYRVSGGVSEMVFKASKITFHWGKCNMSSDGSEHSLEGQKFPLEMQIYCFDADRFSSFEEAVKGKGKLRALSILFEVGTEENLDFKAIIDGVESVSRFGKQAALDPFILLNLLPNSTDKYYIYNGSLTSPPCTDTVDWIVFKDTVSISESQLAVFCEVLTMQQSGYVMLMDYLQNNFREQQYKFSRQVFSSYTGKEEIHEAVCSSEPENVQADPENYTSLLVTWERPRVVYDTMIEKFAVLYQQLDGEDQTKHEFLTDGYQDLGAILNNLLPNMSYVLQIVAICTNGLYGKYSDQLIVDMPTDNPELDLFPELIGTEEIIKEEEEGKDIEEGAIVNPGRDSATNQIRKKEPQISTTTHYNRIGTKYNEAKTNRSPTRGSEFSGKGDVPNTSLNSTSQPVTKLATEKDISLTSQTVTELPPHTVEGTSASLNDGSKTVLRSPHMNLSGTAESLNTVSITEYEEESLLTSFKLDTGAEDSSGSSPATSAIPFISENISQGYIFSSENPETITYDVLIPESARNASEDSTSSGSEESLKDPSMEGNVWFPSSTDITAQPDVGSGRESFLQTNYTEIRVDESEKTTKSFSAGPVMSQGPSVTDLEMPHYSTFAYFPTEVTPHAFTPSSRQQDLVSTVNVVYSQTTQPVYNEASNSSHESRIGLAEGLESEKKAVIPLVIVSALTFICLVVLVGILIYWRKCFQTAHFYLEDSTSPRVISTPPTPIFPISDDVGAIPIKHFPKHVADLHASSGFTEEFETLKEFYQEVQSCTVDLGITADSSNHPDNKHKNRYINIVAYDHSRVKLAQLAEKDGKLTDYINANYVDGYNRPKAYIAAQGPLKSTAEDFWRMIWEHNVEVIVMITNLVEKGRRKCDQYWPADGSEEYGNFLVTQKSVQVLAYYTVRNFTLRNTKIKKGSQKGRPSGRVVTQYHYTQWPDMGVPEYSLPVLTFVRKAAYAKRHAVGPVVVHCSAGVGRTGTYIVLDSMLQQIQHEGTVNIFGFLKHIRSQRNYLVQTEEQYVFIHDTLVEAILSKETEVLDSHIHAYVNALLIPGPAGKTKLEKQFQGLTLSPRLECRGTISAHCNLPLPGLTDPPTSASRVARTILLSQSNIQQSDYSAALKQCNREKNRTSSIIPVERSRVGISSLSGEGTDYINASYIMGYYQSNEFIITQHPLLHTIKDFWRMIWDHNAQLVVMIPDGQNMAEDEFVYWPNKDEPINCESFKVTLMAEEHKCLSNEEKLIIQDFILEATQDDYVLEVRHFQCPKWPNPDSPISKTFELISVIKEEAANRDGPMIVHDEHGGVTAGTFCALTTLMHQLEKENSVDVYQVAKMINLMRPGVFADIEQYQFLYKVILSLVSTRQEENPSTSLDSNGAALPDGNIAESLESLV

SEQ ID NO: 73631 - protein, 63 aa, Homo sapiens
MFVPESTSKLQKFTSWFMGRRPEYTDPKVVAQGEGREGKAPSPLLPPSPIQVTAWEWVGPGLG

SEQ ID NO: 73632 - protein, 162 aa, Homo sapiens
FKTNYEKRSFKVPIQANETLVGAVINNVSEAMETLTRITEELVPVPGSVNGVNALGLVVFSMCFGFVIGNMKEQGQALREFFDSLNEAIMRLVAVIMCSATLPITFKCLEENNGVDKRVTRFVLPVGATINMDGTALYEALAAIFIAQVNNFELNFGQIITI

SEQ ID NO: 73633 - protein, 1136 aa, Homo sapiens
MKKASRSVGSVPKVSAISKTQTAEKIKPENSSSASTGGKLVKPGTAASLSKGLTLLPRLEYGGVITAQCSFDLPGSSDPLTSTFPITRTTGMCHFAQTKSSDDLLAGMAGGVTVTNGVKGKKSTCPSAAPSASAPAMTTVENKSKISTGTASSTKRSTSTGQGANDMALAKRSRSRTATECDVRMSKSKSDNQISDRAALEAKVKDLLTLAKTKDVEILHLRNELRDMRAQLGINEDHSEGDEKSEKETIMAHQPTDVESTLLQLQEQNTAIREELNQLKNENRMLKDRLNALGFSLEQRLDNSEKLFGYQSLSPEITPGNQSDGGGTLTSSVEGSAPGSVEDLLSQDENTLMDHQHSNSMDNLDSECSEVYQPLTSSDDALDAPSSSESEGIPSIERSRKGSSGNASEVSVACLTERIHQMEENQHSTSEELQATLQELADLQQITQELNSENERLGEEKVILMESLCQQSDKLEHFSRQIEYFRSLLDEHHISYVIDEDVKSGRYMELEQRYMDLAENARFEREQLLGVQQHLSNTLKMAEQDNKEAQEMIGALKERSHHMERIIESEQKGKAALAATLEEYKATVASDQIEMNRLKAQLENEKQKVAELYSIHNSGDKSDIQDLLESVRLDKEKAETLASSLQEDLAHTRNDANRLQDAIAKVEDEYRAFQEEAKKQIEDLNMTLEKLRSDLDEKETERSDMKETIFELEDEVEQHRAVKLHDNLIISDLENTVKKLQDQKHDMEREIKTLHRRLREESAEWRQFQADLQTAVVIANDIKSEAQEEIGDLKRRLHEAQEKNEKLTKELEEIKSRKQEEERGRVYNYMNAVERDLAALRQGMGLSRRSSTSSEPTPTVKTLIKSFDSASQVPNPAAAAIPRTPLSPSPMKTPPAAAVSPMQRHSISGPISTSKPLTALSDKRPNYGEIPVQEHLLRTSSASRPASLPRVPAMESAKTLSVSRRSSEEVKRDISAQEGASPASLMAMGTTSPQLSLSSSPTASVTPTTRSRIREERKDPLSALAREYGGSKRNALLKWCQKKTEGYQNIDITNFSSSWNDGLAFCALLHTYLPAHIPYQELNSQDKRRNFMLAFQAAESVGIKSTLDINEMVRTERPDWQNVMLYVTAIYKYFET

SEQ ID NO: 73634 - protein, 191 aa, Homo sapiens
SWDEHVFELVLPKACMVGHVDFKFVLNSNITNIPQIQVTLLKNKAPGLGKVNGLRLCPFLEDHKEDILCGPVWLASGLDLSGHAGMLTLTSPKLVKGMAGGKYRSFLIHVKAVNERGTEEICNGGMRPVVRLPSLKHQSNKGYSLASLLAKVAAGKEKSSNVKNENTSGTRKSENLRGCDLLQEVSVTIRR

SEQ ID NO: 73635 - protein, 158 aa, Homo sapiens
ILDRCDDAITPLLNQWTYQAMVHELLGINNNRIDLSRVPGISKDLREVVLSAENDEFYANNMYLNFAEIGSNIKNLMEDFQKKKPKEQQKLESIADMKAFVENYPQFKKMSGTVSKHVTVVGELSRLVSERNLLEVSEVEQELACQNDHSSALQVSPI

SEQ ID NO: 73636 - protein, 55 aa, Homo sapiens
GNHSYLESLTDKSKAEVQWHDLGLLQPPPPGFKQFPCLSLLSIWDYRHAPPRPAN

SEQ ID NO: 73637 - protein, 186 aa, Homo sapiens
MAIQFRSLFPLALPGMLALLGWWWFFSRKKGHVSSHDEQQVEAGAVQLRADPAIKEPLPVEDVCPKVVSTPPSVTEPPEKELSTVSKLPAEPPALLQTHPPCRRSESSGILPNTTDMRLRPGTRRDDSTKLELALTGGEAKSIPLECPLSSPKGVLFSSKSAEVCKQDSPFSRVPRKVQPGYPVVP

SEQ ID NO: 73638 - protein, 77 aa, Homo sapiens
MDIAIHHPWIRRPFFPFHSPSRLFDQFFGEHLLESDLFPTSTSLSPFYLRPPSFLRAPSWFDTGLSEMRLEKDRFSV

SEQ ID NO: 73639 - protein, 711 aa, Homo sapiens
MMADAKYVLCRWEKRLWPAKVLARTATSTKNKRRKEYFLAVQILSLEEKIKVKSTEVEILEKSQIEAIASSLASQNEVPAAPLEELAYRRSLRVALDVLSEGSIWSQESSAGTGRADRSLRGKPMEHVSSPCDSNSSSLPRGDVLGSSRPHRRRPCVQQSLSSSFTCEKDPECKVDHKKGLRKSENPRGPLVLPAGGGAQDESGSRIHHKNWTLASKRGGNSAQKASLCLNGSSLSEDDTERDMGSKGGSWAAPSLPSGVREDDPCANAEGHDPGLPLGSLTAPPAPEPSACSEPGECPAKKRPRLDGSQRPPAVQLEPMAAGAAPSPGPGPGPRESVTPRSTARLGPPPSHASADATRCLPCPDSQKLEKECQSSEESMGSNSMRSILEEDEEDEEPPRVLLYHEPRSFEVGMLVWHKHKKYPFWPAVVKSVRQRDKKASVLYIEGHMNPKMKGFTVSLKSLKHFDCKEKQTLLNQAREDFNQDIGWCVSLITDYRVRLGCGSFAGSFLEYYAADISYPVRKSIQQDVLGTKLPQLSKGSPEEPVVGCPLGQRQPCRKMLPDRSRAARDRANQKLVEYIVKAKGAESHLRAILKSRKPSRWLQTFLSSSQYVTCVETYLEDEGQLDLVVKYLQGVYQEVGAKVLQRTNGDRIRFILDVLLPEAIICAISAVDEVDYKTAEEKYIKGPSLSYREKEIFDNQLLEERNRRRR

SEQ ID NO: 73640 - protein, 98 aa, Homo sapiens
MQQGTVAFEDVAVNFSQEEWSLLSEVQRCLYHDVMLENWVLISSLGCWCGSEDEEAPSKKSISIQRVSQVSTPGAGVSPKKAHSCEMCGAILGDILHL

SEQ ID NO: 73641 - protein, 162 aa, Homo sapiens
MASQPPEDTAESQASDELECKICYNRYNLKQRKPKVLECCHRVCAKCLYKIIDFGDSPQGVIVCPFCRFETCLPDDEVSSLPDDNNILVNLTCGGKGKKCLPENPTELLLTPKRLASLVSPSHTSSNCLVITIMEVQRESSPSLSSTPVVEFYRPASFDSVT

SEQ ID NO: 73642 - protein, 102 aa, Homo sapiens
MSLNPPIFLKRSEENSSKFVETKQSQTTSIASEDPLQNLCLASQEVLQKAQQSGRSKCLKCGGSRMFYCYTCYVPVENVPIEQIPLVKENPMPEDLSLSPMS

SEQ ID NO: 73643 - protein, 105 aa, Homo sapiens
MARFLTLCTWLLLLGPGLLATVRAECSQDCATCSYRLVRPADINFLACVMECEGKLPSLKIWETCKELLQLSKPELPQDGTSTLRENSKPEESHLLAKRYGGFMK

SEQ ID NO: 73644 - protein, 32 aa, Homo sapiens
  MOD_RES (1)..(1): Any amino acid
XALQHNLGIGGAVVVTLYKMGFPEAARKGNSL

SEQ ID NO: 73645 - protein, 240 aa, Homo sapiens
PHSAPAVLTHNNESRSNCVFEFHVHTPSSSSGEGGGILPQRVYRNRQVAVDLNQEELPPQSVGLHGYLQPVTEEKHNYHAPELTVSVVEPIGQNWPIGSPEYSSDSSQITSSDPSDFQSPPPTGGAAAPFGSDVSMPFIHLPQTVLQESPLFFCFPQGTTSQQVLTASFSSGGSALHPQAQGQSQGQPSSSSLTGVSSSQPIQHPQQQQGIQQTAPPQQTVQYSLSQTSTSSEATTAQPV

SEQ ID NO: 73646 - protein, 162 aa, Homo sapiens
MKPSIAEMLHRGRMLWIILLSTIALGWTTPIPLIEDSEEIDEPCFDPCYCEVKESLFHIHCDSKGFTNISQITEFWSRPFKLYLQRNSMRKLYTNSFLHLNNAVSINLGNNALQDIQTGAFNGLKILKRLYLHENKLDVFRNDTFLGLESLEYLQADYNVIK

SEQ ID NO: 73647 - protein, 301 aa, Homo sapiens
MAPARTMARARLAPAGIPAVALWLLCTLGLQGTQAGPPPAPPGLPAGADCLNSFTAGVPGFVLDTNASVSNGATFLESPTVRRGWDCVRACCTTQNCNLALVELQPDRGEDAIAACFLINCLYEQNFVCKFAPREGFINYLTREVYRSYRQLRTQGFGGSGIPKAWAGIDLKVQPQEPLVLKDVENTDWRLLRGDTDVRVERKDPNQVELWGLKEGTYLFQLTVTSSDHPEDTANVTVTVLSTKQTEDYCLASNKVGRCRGSFPRWYYDPTEQICKSFVYGGCLGNKNNYLREEECILACR

SEQ ID NO: 73648 - protein, 179 aa, Homo sapiens
MLFRNRFLLLLALAALLAFVSLSLQFFHLIPVSTPKNGMSSKSRKRIMPDPVTEPPVTDPVYEALLYCNIPSVAERSMEGHAPHHFKLVSVHVFIRHGDRYPLYVIPKTKRPEIDCTLVANRKPYHPKLEAFISHMSKGSGASFESPLNSLPLYPNHPLCEMGELTQTVGLAVHLRGSC

SEQ ID NO: 73649 - protein, 213 aa, Homo sapiens
MRGQRSLLLGPARLCLRLLLLLGYRRRCPPLLRGLVQRWRYGKVCLRSLLYNSFGGSDTAVDAAFEPVYWLVDNVIRWFGVVFVVLVIVLTGSIVAIAYLCVLPLILRTYSVPRLCWHFFYSHWNLILIVFHYYQAITTPPGYPPQGRNDIATVSICKKCIYPKPARTHHCSICNRCVLKMDHHCPWLNNCVGHYNHRYFFSFCFFMTLGCVY

SEQ ID NO: 73650 - protein, 164 aa, Homo sapiens
ITGLWSLAIISWERWMVVCKPFGNVRFDAKLAIVGIAFSWIWAAVWTAPPIFGWSRYWPHGLKTSCGPDVFSGSSYPGVQSYMIVLMVTCCIIPLAIIMLCYLQVWLAIRAVAKQQKESESTQKAEKEFRNCILQLFGKKVDDGSELSSASKTEVSSVSSVSPA

SEQ ID NO: 73651 - protein, 60 aa, Homo sapiens
MNMFKEAVTFKDVAVAFTEEELGLLGPAQRKLYRDVMVENFRNLLSVGHPPFKQDVSPIE

SEQ ID NO: 73652 - protein, 152 aa, Homo sapiens
MADWARAQSPGAVEEILDRENKRMADSLASKVTRLKSLALDIDRDAEDQNRYLDGMVFQDSQEGAHIRRETVSKSVCAEPWRHQRARDPAPTNFPLKCQKQRGASTSSGQHGGRVNLVFFIDDDYSPPSKRQRPTSHHSHQSQNPPMLGNGK

SEQ ID NO: 73653 - protein, 28 aa, Homo sapiens
LHPFHVIRINKMLSCAGADSPIPSPPPR

SEQ ID NO: 73654 - protein, 168 aa, Homo sapiens
IAQMFLNMTKLEKEAQVEATSRKEKAKQRPLALNTVEMLRVASSSLGMGPQHAMQTAERLYTQGYISYPRTETTHYPENFDLKGSLRQQANHPYWADTVKRLLAEGINRPRKGHDAGDHPPITPMKSATEAELGFAVCPAQRLCKQELAARARVLGAPHGQSPQLAPN

SEQ ID NO: 73655 - protein, 201 aa, Homo sapiens
  MOD_RES (1)..(1): Any amino acid
XQKFKQAKKGLLTLTVRTRLTAPPSLCSHLSPPLCRSLSSSTCITKDSSSFALESPSAPISTAKPNYRIMVEVSLQKEAGVGLGIGLCSVPYFQCISGIFVHTLSPGSVAHLDGRLRCGDEIVEISDSPVHCLTLNEVYTILSHCDPGPVPIIVSRHPDPQVSEQQLKEAVAQAVENTKFGKERHQWSLEDAEMELGPPGS

SEQ ID NO: 73656 - protein, 202 aa, Homo sapiens
MPNVAETERSNDSGNGEHKSERKSPEENLQGAVKSFCTSASGAPLGPKGDGHYPWSCPVTHTREKIYAICSDYAFLNQATSIYKTPNPSRSPCLPDSTSLSAGNNSSRYIGIPTSTSEIIYNEENSLENLSNSLGKLPLAWEIDKSEFDGVTTNSKHKSGNAKKQVSKRKTSDKKGRYQKECPQHSPLEDIKQRKVLDLRRW

SEQ ID NO: 73657 - protein, 9 aa, Homo sapiens
MEAAVKEEI

SEQ ID NO: 73658 - protein, 119 aa, Homo sapiens
METESGNQEKVMEEESTEKKKEVEKKKRSRVKQVLADIAKQVDFWFGDANLHKDRFLREQIEKSRDGYVDISLLVSFNKMKKLTTDGKLIARALRSSAVVELDLEGTRIRRKKPLGERP

SEQ ID NO: 73659 - protein, 284 aa, Homo sapiens
  MOD_RES (1)..(1): Any amino acid
XQLEEFLNQSSPFYFWMNGDRIDSLLENDRQQTHMLDVMQDHFSRASSIIDELFQDRFFTREPQDTYHYLPFSLPHRRPHFFFPKSRIVRSLMPFSPYEPLNFHAMFQPFLEMIHEAQQAMDIHFHSPAFQHPPTEFIREGDDDRTVCREIRHNSTGCLRMKDQCDKCREILSVDCSTNNPSQAKLRRELDESLQVAERLTRKYNELLKSYQWKMLNTSSLLEQLNEQFNWVSRLANLTQGEDQYYLRVTTVASHTSDSDVPSGVTEVVVKLFDSDPITVTVPV

SEQ ID NO: 73660 - protein, 199 aa, Homo sapiens
MAYHSGYGAHGSKHRARAAPDPPPLFDDTSGGYSSQPGGYPATGADVAFSVNHLLGDPMANVAMAYGSSIASHGKDMVHKELHRFVSVSKLKYFFAVDTAYVAKKLGLLVFPYTHQNWEVQYSRDAPLPPRQDLNAPDLYIPTMAFITYVLLAGMALGIQKRMPGSEPPLLWRRFSPEVLGLCASTALVWVVMEVLALL

SEQ ID NO: 73661 - protein, 248 aa, Homo sapiens
MEENWNAEKRSPTFHLGDAAHLQAEIHTGSHVPLRLFVDHCVATPTPDQNASPYHTIVDFHGCLVDGLTDASSAFKVPRPGPDTLQFTVDVFHFANDSRNMIYITCHLKVTLAEQDPDELNKACSFSKPSNSWFPVEGSADICQCCNKGDCGTPSHSRRQPHVMSQWSRSASRNRRHVTEEADVTVGPLIFLDRRGDHEVEQWALPSDTSVVLLGVGLAVVVSLTLTAVILVLTRRCRTASHPVSASE

SEQ ID NO: 73662 - protein, 11 aa, Homo sapiens
  MOD_RES (1)..(1): Any amino acid
XDFSWDGINAL

SEQ ID NO: 73663 - protein, 525 aa, Homo sapiens
  MOD_RES (1)..(1): Any amino acid
XSSSLGIPDADCCRRHMEFRKLRGMETRPPANTARLQPPRDLRSSSPRSGTPGRMGRGLECGQGPQGSYLSPFRKQLSESSDDDYDDVDIPTPAEDTPPPLPPKPKFRSPSDEGPGSMGDDGQLSPGVLVRCASGPPPNSPRPGPPPSTSSPHLTAHSEPSLWNPPSRELDKPPLLPPKKEKMKRKGCALLVKLFNGCPLRIHSTAAWTHPSTKDQHLLLGAEEGIFILNRNDQEATLEMLFPSRTTWVYSINNVLMSLSGKTPHLYSHSILGLLERKETRAGNPIAHISPHRLLARKNMVSTKIQDTKGCRACCVAEGASSGGPFLCGALETSVVLLQWYQPMNKFLLVRQVLFPLPTPLSVFALLTGPGSELPAVCIGVSPGRPGKSVLFHTVRFGALSCWLGEMSTEHRGPVQVTQVEEDMVMVLMDGSVKLVTPEGSPVRGLRTPEIPMTEAVEAVAMVGGQLQAFWKHGVQVWALGSDQLLQELRDPTLTFRLLGSPRPVVVETRPVDDPTAPSNLYIQE

SEQ ID NO: 73664 - protein, 174 aa, Homo sapiens
  MOD_RES (1)..(1): Any amino acid
XILESPEHLPSNFLAQPVNDSAPHPESDATCQQPVKQMRLKKAIHLKKLNFLKSQKYAEQVSEPKSDDGLTKRLESASKNTLEKASSQSAEEKESEEVVSCENFNCISETERPEDPAALEDQSQTLQSQRQYACELCGKPFKHPSNLELHKRSHTGKCFGGSGDLRRHVRTHTG

SEQ ID NO: 73665 - protein, 148 aa, Homo sapiens
MSVEHADIWVKSYSLYSRERYICNSGFKRKAGTSSLTECVLNKATNVAHWTTPSLKCINPALVHQRPAPPSTVTTAGVTPQPESLSPSGKEPAASSPSSNNTAATTAAIVPGSQLMPSKSPSTGTTEISSHESSHGTPSQTTAKNWEL

SEQ ID NO: 73666 - protein, 72 aa, Homo sapiens
MSSGDLENDEQAASAISELVSTACGFRLHRGMNVPFKRLSVVFGEHTLLVTVSGQRVFVVKRQNRGREPIDV

SEQ ID NO: 73667 - protein, 422 aa, Homo sapiens
MSLHFLYYCSEPTLDVKIAFCQGFDKQVDVSYIAKHYNMSKSKVDNQFYSVEVGDSTFTVLKRYQNLKPIGSGAQGIVCAAYDAVLDRNVAIKKLSRPFQNQTHAKRAYRELVLMKCVNHKNIISLLNVFTPQKTLEEFQDVYLVMELMDANLCQVIQMELDHERMSYLLYQMLCGIKHLHSAGIIHRDLKPSNIVVKSDCTLKILDFGLARTAGTSFMMTPYVVTRYYRAPEVILGMGYKENVDIWSVGCIMGEMVRHKILFPGRDYIDQWNKVIEQLGTPCPEFMKKLQPTVRNYVENRPKYAGLTFPKLFPDSLFPADSEHNKLKASQARDLLSKMLVIDPAKRISVDDALQHPYINVWYDPAEVEAPPPQIYDKQLDEREHTIEEWKELIYKEVMNSEEKTKNGVVKGQPSPSGTHSP

SEQ ID NO: 73668 - protein, 323 aa, Homo sapiens [sequence omitted]

SEQ ID NO: 73669 - protein, 543 aa, Homo sapiens
MGAGPGRGGGPWAPRVGAGSEAGWLRRSADVAAQMASRLTLLTLLLLLLAGDRASSNPNATSSSSQDPESLQDRGEGKVATTVISKMLFVEPILEVSSLPTTNSTTNSATKITANTTDEPTTQPTTEPTTQPTIQPTQPTTQLPTDSPTQPTTGSFCPGPVTLCSDLESHSTEAVLGDALVDFSLKLYHAFSAMKKVETNMAFSPFSIASLLTQVLLGAGENTKTNLESILSYPKDFTCVHQALKGFTTKGVTSVSQIFHSPDLAIRDTFVNASRTLYSSSPRVLSNNSDANLELINTWVAKNTNNKISRLLDSLPSDTRLVLLNAIYLSEQPSHLFPLAKWKTTFDPKKTRMEPFHFKNSVIKVPMMNSKKYPVAHFIDQTLKAKVGQLQLSHNLSLVILVPQNLKHRLEDMEQALSPSVFKAIMEKLEMSKFQPTLLTLPRIKVTTSQDMLSIMEKLEFFDFSYDLNLCGLTEDPDLQVSAMQHQTVLELTETGVEAAAASAISVARTLLVFEVQQPFLFVLWDQQHKFPVFMGRVYDPRA

SEQ ID NO: 73670 - protein, 215 aa, Homo sapiens
  MOD_RES (1)..(1): Any amino acid
XFVGFTPSPVAQPHPSAGLNVDFESVFGNKSTNVIVDSGGGLLKPTVASQNQNLPVAKLPPSKLVSDDLDSSLANLVGNLGIGNGTTKNDVNWSQPGEKKLTGGSNWQPKVAPTTAWNAATMNGMHFPQYAPPVMAYPATTPTGMIGYGIPPQMGSVPVMTQPTLIYSQPVMRPPNPFGPVSGAQLSAASSPSSHSPHRASGKDPFAELSLEDFL

SEQ ID NO: 73671 - protein, 304 aa, Homo sapiens
  MOD_RES (1)..(1): Any amino acid
XLKENNISEEVEAPEVEPRLVYCYPVRLAVSAPPMPSVEMHMENNVVCIRYKGEMVKVSRNYFSKLWLLYRYSCIDDSAFERFLPRVWCLLRRYQMMFGVGLYEGTGLQGSLPVHVFEALHRLFGVSFECFASPLNCYFRQYCSAFPDTDGYFGSRGPCLDFAPLSGSFEANPPFCEELMDAMVSHFERLLESSPEPLSFIVFIPEWREPPTPALTRMEQSRFKRHQLILPAFEHEYRSGSQHICKKWVPGRAGEGGWAGQARPSPTLSHCLCPQGGNALQGRPQHGCALPTERPWLCQVGADA

SEQ ID NO: 73672 - protein, 246 aa, Homo sapiens
MGIKVQRPRCFFDIAINNQPAGRVVFELFSDVCPKTCENFRCLCTGEKGTGKSTQKPLHYKSCLFHRVVKDFMVQGGDFSEGNGRGGESIYGGFFEDESFAVKHNKEFLLSMANRGKDTNGSQFFITTKPTPHLDGHHVVFGQVISGQEVVREIENQKTDAASKPFAEVRILSCGELIPKSKVKKEEKKRHKSSSSSSSSSSDSDSSSDSQSSSDSSDSESATEEKSKKRKKKHRKNSRKHKKEKK

SEQ ID NO: 73673 - protein, 1549 aa, Homo sapiens
MQLVELDVSRNDIPEIPESIKFCKALEIADFSGNPLSRLPDGFTQLRSLAHLALNDVSLQALPGDVGNLANLVTLELRENLLKSLPASLSFLVKLEQLDLGGNDLEVLPDTLGALPNLRELWLDRNQLSALPPELGNLRRLVCLDVSENRLEELPAELGGLVLLTDLLLSQNLLRRLPDGIGQLKQLSILKVDQNRLCEVTEAIGDCENLSELILTENLLMALPRSLGKLTKLTNLNVDRNHLEALPPEIGGCVALSVLSLRDNRLAVLPPELAHTTELHVLDVAGNRLQSLPFALTHLNLKALWLAENQAQPMLRFQTEDDARTGEKVLTCYLLPQQPPPSLEDAGQQGSLSETWSDAPPSRVSVIQFLEAPIGDEDAEEAAAEKRGLQRRATPHPSELKVMKRSIEGRRSEACPCQPDSGSPLPAEEEKRLSAESGLSEDSRPSASTVSEAEPEGPSAEAQGGSQQEATTAGGEEDAEEDYQEPTVHFAEDALLPGDDREIEEGQPEAPWTLPGGRQRLIRKDTPHYKKHFKISKLPQPEAVVALLQGMQPDGEGPVAPGGWHNGPHAPWAPRAQKEEEEEEEGSPQEEEEEEEEENRAEEEEASTEEEDKEGAVVSAPSVKGVSFDQANNLLIEPARIEEEELTLTILRQTGGLGISIAGGKGSTPYKGDDEGIFISRVSEEGPAARAGVRVGDKLLEVNGVALQGAEHHEAVEALRGAGTAVQMRVWRERMVEPENAVTITPLRPEDDYSPRERRGGGLRLPLLPPESPGPLRQRHVACLARSERGLGFSIAGGKGSTPYRAGDAGIFVSRIAEGGAAHRAGTLQVGDRVLSINGVDVTEARHDHAVSLLTAASPTIALLLEREAGGPLPPSPLPHSSPPTAAVATTSITTATPGVPGLPSLAPSLLAAALEGPYPVEEIRLPRAGGPLGLSIVGGSDHSSHPFGVQEPGVFISKVLPRGLAARSGLRVGDRILAVNGQDVRDATHQEAVSALLRPCLELSLLVRRDPAPPGLRELCIQKAPGERLGISIRGGARGHAGNPRDPTDEGIFISKVSPTGAAGRDGRLRVGLRLLEVNQQSLLGLTHGEAVQLLRSVGDTLTVLVCDGFEASTDAALEVSPGVIANPFAAGIGHRNSLESISSIDRELSPEGPGKEKELPGQTLHWGPEATEAAGRGLQPLKLDYRALAAVPSAGSVQRVPSGAAGGKMAESPCSPSGQQPPSPPSPDELPANVKQAYRAFAAVPTSHPPEDAPAQPPTPGPAASPEQLSFRERQKYFELEVRVPQAEGPPKRVSLVGADDLRKMQEEEARKLQQKRAQMLREAAEAGAEARLALDGETLGEEEQEDEQPPWASPSPTSRQSPASPPPLGGGAPVRTAKAERRHQERLRVQSPEPPAPERALSPAELRALEAEKRALWRAARMKSLEQDALRAQMVLSRSQEGRGTRGPLERLAEAPSPAPTPSPTPVEDLGPQTSTSPGRLSPDFAEELRSLEPSPSPGPQEEDGEVALVLLGRPSPGAVGPEDVALCSSRRPVRPGRRGLGPVPS

SEQ ID NO: 73674 - protein, 139 aa, Homo sapiens
VGKVTSYIINNLQPDTTYRIRIQALNSLGAGPFSHMIKLKTKPLPPDPPRLECVAFSHQNLKLKWGEGTPKTLSTDSIQYHLQMEDKNGRNIQSKIMGCIQLIDNILGEICMIFNFIEQFKWVCIPIQRTMSYIQSTKT

SEQ ID NO: 73675 - protein, 158 aa, Homo sapiens
MGRSRSRSPRRERRRSRSTSRERERRRRERSRSRERDRRRSRSRSPHRRRSRSPRRHRSTSPSPSRLKERRDEEKKETKETKSKERQITEEDLEGKTEEEIEMMKLMGFASFDSTKAVHESKRWIQQTFGFHCMRIEVLKDDFFSPHLGQRVDFVFCI

SEQ ID NO: 73676 - protein, 1374 aa, Homo sapiens
MKSCGVSLATAAAAAAAFGDEEKKMAAGKASGESEEASPSLTAEEREALGGLDSRLFGFVRFHEDGARTKALLGKAVRCYESLILKAEGKVESDFFCQLGHFNLLLEDYPKALSAYQRYYSLQSDYWKNAAFLYGLGLVYFHYNAFQWAIKAFQEVLYVDPSFCRAKEIHLRLGLMFKVNTDYESSLKHFQLALVDCNPCTLSNAEIQFHIAHLYETQRKYHSAKEAYEQLLQTENLSAQVKATVLQQLGWMHHTVDLLGDKATKESYAIQYLQKSLEADPNSGQSWYFLGRCYSSIGKVQDAFISYRQSIDKSEASADTWCSIGVLYQQQNQPMDALQAYICAVQLDHGHAAAWMDLGTLYESCNQPQDAIKCYLNATRSKSCSNTSALAARIKYLQACKPHHPNTEPVLGLSQTPISQQSLPLHMIPSSQVDDLSSPAKRKRTSSPTKNTSDNWSGGHAVSHPPVQQQAHSWCLTPQKLQMRPTGVAQVRSTGIPNGPTADSSLPTNSVSGQQPQLALTRVPSVSQPGVRPACPGQPLANGPFSAGHVPCSTSRTLGSTDTILIGNNHITGSGSNGNVPYLQRNALTLPHNRTNLTSSAEEPWKNQLSNSTQGLHKGQSSHSAGPNGERPLSSTGPSQHLQAAGSGIQNQNGHPTLPSNSVTQGAALNHLSSHTATSGGQQGITLTKESKPSGNILTVPETSRHTGETPNSTASVEGLPNHVHQMTADAVCSPSHGDSKSPGLLSSDNPQLSALLMGKANNNVGTGTCDKVNNIHPAVHTKTDNSVASSPSSAISTATPSPKSTEQTTTNSVTSLNSPHSGLHTINGEGMEESQSPMKTDLLLVNHKPSPQIIPSMSVSIYPSSAEVLKACRNLGKNGLSNSSILLDKCPPPRPPSSPYPPLPKDKLNPPTPSIYLENKRDAFFPPLHQFCTNPNNPVTVIRGLAGALKLDLGLFSTKTLVEANNEHMVEVRTQLLQPADENWDPTGTKKIWHCESNRSHTTIAKYAQYQASSFQESLREENEKRSHHKDHSDSESTSSDNSGRRRKGPFKTIKFGTNIDLSDDKKWKLQLHELTKLPAFVRVVSAGNLLSHVGHTILGMNTVQLYMKVPGSRTPGHQENNNFCSVNINIGPGDCEWFVVPEGYWGVLNDFCEKNNLNFLMGSWWPNLEDLYEANVPVYRFIQRPGDLVWINAGTVHWVQAIGWCNNIAWNVGPLTACQYKLAVERYEWNKLQSVKSIVPMVHLSWNMARNIKVSDPKLFEMIKYCLLRTLKQCQTLREALIAAGKEIIWHGRTKEEPAHYCSICEVEVFDLLFVTNESNSRKTYIVHCQDCARKTSGNLENFVVLEQYKMEDLMQVYDQFTLAPPLPSASS

SEQ ID NO: 73677 - protein, 313 aa, Homo sapiens
GSFMMVNSSGRASGQKAHLLLPTLKENDTHCIDFHYYFSSRDRSSPGALNVYVKVNGGPQGNPVWNVSGVVTEGWVKAELAISTFWPHFYQVIFESVSLKGHPGYIAVDEVRVLAHPCRKAPHFLRLQNVEVNVGQNATFQCIAGGKWSQHDKLWLQQWNGRDTALMVTRVVNHRRFSATVSVADTAQRSVSKYRCVIRSDGGSGVSNYAELIVKEPPTPIAPPELLAVGATYLWIKPNANSIIGDGPIILKEVEYRTTTGTWAETHIVDSPNYKLWHLDPDVEYEIRVLLTRPGEGGTGPPGPPLTTRTKCA

SEQ ID NO: 73678 - protein, 183 aa, Homo sapiens
  MOD_RES (1)..(1): Any amino acid
XNNDWSEGAAVARGGGSRTAAPAGPRRHFGLYPAPVQLIVQFLEQASKPSVNEQNQVQPPPDNKRNRILKLLALKVAAHLKWDLDILEKSLSVPVLNMLLNELLCISKVPPGTKHVDMDLATLPPTTAMAVLLYNRWAIRTIVQSSFPVKQAKPGPPQLSVMNQMQQEKELTENILKVLKEQA

SEQ ID NO: 73679 - protein, 39 aa, Homo sapiens
  MOD_RES (1)..(1): Any amino acid
XYDYSGYGASSGRPSERNLYADIDAAWQALRTRNLGPEL

SEQ ID NO: 73680 - protein, 474 aa, Homo sapiens
MSPADFQRAVDERFPGCMQGRTMYVLPFSMGPVGSPLSRIGVQLTDSAYVVASMRIMTRLGTPVLQALGDGDFVKCLHSVGQPLTGQGEPVSQWPCNPEKTLIGHVPDQREIISFGSGYGGNSLLGKKCFALRIASRLARDEGWLAEHMLILGITSPAGKKRYVAAAFPSACGKTNLAMMRPALPGWKVECVGDDIAWMRFDSEGRLRAINPENGFFGVAPGTSATTNPNAMATIQSNTIFTNVAETSDGGVYWEGIDQPLPPGVTVTSWLGKPWKPGDKEPCAHPNSRFCAPARQCPIMDPAWEAPEGVPIDAIIFGGRRPKGKIIMHDPFAMRPFFGYNFGHYLEHWLSMEGRKGAQLPRIFHVNWFRRDEAGHFLWPGFGENARVLDWICRRLEGEDSARETPIGLVPKEGALDLSGLRAIDTTQLFSLPKDFWEQEVRDIRSYLTEQVNQDLPKEVLAELEALERRVHKM

SEQ ID NO: 73681 - protein, 351 aa, Homo sapiens
MSCNPSFGGIGKGHLMREVDALDGLCSRICDQSGVHYKVLNRRKGPAVWGLRAQIDRKLYKQNMQKEILNTPLLTVQEGAVEDLILTEPEPEHTGKCRVSGVVLVDGSTVYAESVILTTGTFLRGMIVIGLETHPAGRLGDQPSIGLAQTLEKLGFVVGRLKTGTPPRIAKESINFSILNKHIPDNPSIPFSFTNETVWIKPEDQLPCYLTHTNPRVDEIVLKNLHLNSHVKETTRGPRYCPSIESKVLRFPNRLHQVWLEPEGMDSDLIYPQGLSMTLPAELQEKMITCIRGLEKAKVIQPGYGVQYDYLDPRQITPSLETHLVQRLFFAGQINGTTGYEEAAAQCSCRV

SEQ ID NO: 73682 - protein, 111 aa, Homo sapiens
MTRLDRSSHSGGGHAKGSRPLNSLLAGHRVAQPASAPGSRASVQDIDLIDILWRQDIDLGAGREVFDYSHRQKEQDVEKELRDGGEQDTWAGEGAEALARNLLVDGETGES

SEQ ID NO: 73683 - protein, 483 aa, Homo sapiens
  MOD_RES (1)..(1): Any amino acid
XETNESTEGSRSRSLDIQPSSEGLGPTSEPFPSSDDSPRSALAAATAAAAAAASAAAATAAFTTAKAAALSTKTPAPCSEFMEPSSDPSLLGEPCAGPGFTHNIAHGSLGFEPVYVSCIAQDTCTTTDHSSNPGPVPGSSSGPVLGSSSGAGHGSGSGSGPGCGSVPGSGSGPGPGSGPGSGPGHGSGSHPGPASGPGPDTGPDSELSPCIPPGFRNLVADRVPNYTSWSQHCPWEPQKQPPWEFLQVLEPGARGLWKPPDIKGKLMVCYETLPRGQCLLYNWEEERATNHLDQVPSMQDGSESFFFRHGHRGLLTMQLKSPMPSSTTQKDSYQPPGNVYWPLRGKREAMLEMLLQHQICKEVQAEQEPTRKLFEVESVTHHDYRMELAQAGTPAPTKPHDYRQEQPETFWIQRAPQLPGVSNIRTLDTPFRKNCSFSTPVPLSLGKLLPYEPENYPYQLGEISSLPCPGGRLGGGGGRMTPF

SEQ ID NO: 73684 - protein, 213 aa, Homo sapiens
  MOD_RES (1)..(1): Any amino acid
XLFFLVRAFILHKADPVPNGLRALPVFYACTVGINLFSIMYTGAPLLGFDKLPLWGTILISVGCAVFCALIVWFFVCPRMKRKIERPATVPLQAVVEERTVSFKLGDLEEAPERERLPSVDLKEETSIDSTVNGAVQLPNGNLVQFSQAVSNQINSSGHYQYHTVHKDSGLYKELLHKLHLAKVGDCMGDSGDKPLRRNNSYTSYTMAICGMP

SEQ ID NO: 73685 - protein, 480 aa, Homo sapiens
MGWGGGGGCTPRPPIHQQPPERRVVTVVFLGLLLDLLAFTLLLPLLPGLLESHGRAHDPLYGSWQGGVDWFATAIGMPVEKRYNSVLFGGLIGSAFSVLQFLCAPLTGATSDCLGRRPVMLLCLMGVATSYAVWATSRSFAAFLASRLIGGISKGNVSLSTAIVADLGSPLARSQGMAVIGVAFSLGFTLGPMLGASLPLEMAPWFALLFAASDLLFIFCFLPETLPLEKRAPSIALGFRDAADLLSPLALLRFSAVARGQDPPSGDRLSSLRRLGLVYFLYLFLFSGLEYTLSFLTHQRFQFSSLQQGKMFFLIGLTMATIQGAYARRIHPGGEVAAVKRALLLLVPAFLLIGWGRSLPVLGLGLLLYSFAAAVVVPCLSSVVAGYGSPGQKGTVMGTLRSLGALARAAGPLVAASGEGAGWCWGRLGAKHLPSPPKCQPPRGLGDATVSPQCTGWPGPRPASPRGPGSFCSPSSSCRS

SEQ ID NO: 73686 - protein, 790 aa, Homo sapiens
MAGPRGALLAWCRRQCEGYRGVEIRDLSSSFRDGLAFCAILHRHRPDLLDFDSLSKDNVFENNRLAFEVAEKELGIPALLDPNDMVSMSVPDCLSIMTYVSQYYNHFCSPGQAGVSPPRKGLAPCSPPSVAPTPVEPEDVAQGEELSSGSLSEQGTGQTPSSTCAACQQHVHLVQRYLADGRLYHRHCFRCRRCSSTLLPGAYENGPEEGTFVCAEHCARLGPGTRSGTRPGPFSQPKQQHQQQLAEDAKDVPGGGPSSSAPAGAEADGPKASPEARPQIPTKPRVPGKLQELASPPAGRPTPAPRKASESTTPAPPTPRPRSSLQQENLVEQAGSSSLVNGRLHELPVPKPRGTPKPSEGTPAPRKDPPWITLVQAEPKKKPAPLPPSSSPGPPSQDSRQVENGGTEEVAQPSPTASLESKPYNPFEEEEEDKEEEAPAAPSLATSPALGHPESTPKSLHPWYGITPTSSPKTKKRPAPRAPSASPLALHASRLSHSEPPSATPSPALSVESLSSESASQTAGAELLEPPAVPKSSSEPAVHAPGTPGNPVSLSTNSSLASSGELVEPRVEQMPQASPGLAPRTRGSSGPQPAKPCSGATPTPLLLVGDRSPVPSPGSSSPQLQVKSSCKENPFNRKPSPAASPATKKATKGSKPVRPPAPGHGFPLIKRKVQADQYIPEEDIHGEMDTIERRLDALEHRGVLLEEKLRGGLNEGREDDMLVDWFKLIHEKHLLVRRESELIYVFKQQNLEQRQADVEYELRCLLNKPGLDGGGPGPGEGADAGACDPH

SEQ ID NO: 73687 - protein, 153 aa, Homo sapiens
MKLWVSALLMAWFGVLSCVQAEFFTSIGHMTDLIYAEKELVQSLKEYILVEEAKLSKIKSWANKMEALTSKSAADAEGYLAHPVNAYKLVKRLNTDWPALEDLVLQDSAAGFIANLSVQRQFFPTDEDEIGAAKALMRLQDTYRLDPGTISRG

SEQ ID NO: 73688 - protein, 1909 aa, Homo sapiens [sequence omitted]

SEQ ID NO: 73689 - protein, 144 aa, Homo sapiens
  MOD_RES (1)..(1): Any amino acid
XAVTDGIPAASEGKIQAALKLEHIDGVNLTVPVKAPSRKDILEGVKKTLSHFRVVATGSGCALVQLQPLTVFSSQLQVHMVLQLCPVLGDHMYSARVGTVLGQRFLLPAENNKPQRQVLQPTCLLLSEGWRERSWMKPSSDAST

SEQ ID NO: 73690 - protein, 16 aa, Homo sapiens
MKLHCCLFTLVASIIV

SEQ ID NO: 73691 - protein, 133 aa, Homo sapiens
LLMVNGQVESAQFPEYDDLYCKYCFVYGQDWAPTAGLEEGISQITSKSQDVRQALVWNFPIDVTFKSTNPYGWPQIVLSVYGPDVFGNDVVRGYGAVHVPFSPGRHKRTIPMFVPESTSKLQKFTRSASCSTH

SEQ ID NO: 73692 - protein, 85 aa, Homo sapiens
MELVQVLKRGLQQITGHGGLRGYLRVFFRTNDAKVGTLVGEDKYGNKYYEDNKQFFGRHRWVVYTTEMNGKNTFWDVDGSMVPPE

SEQ ID NO: 73693 - protein, 34 aa, Homo sapiens
  MOD_RES (1)..(1): Any amino acid
XLIRPATNGSELVTVQLMVSLAQLISVPLFLPAA

SEQ ID NO: 73694 - protein, 133 aa, Homo sapiens
SGLNPGPAVPMKDHDAIKLFVGQIPRGLDEQDLKPLFEEFGRIYELTVLKDRLTGLHKGCAFLTYCARDSALKAQSALHEQKTLPGRTESCLWGCWASSRVRRTSDACSSPLATSRSARSCGVLTAPVKAVPL

SEQ ID NO: 73695 - protein, 479 aa, Homo sapiens
MKGFIDDANYSVGLLDEGTNLGNVIDNYVYEHTLTGKNAFFVGDLGKIVKKHSQWQNVVAQIKPFYTVKCNSAPAVLEILAALGTGFACSSKNEMALVQELGVPPENIIYISPCKQVSQIKYAAKVGVNILTCDNEIELKKIARNHPNAKVLLHIATEDNIGGEEGNMKFGTTLKNCRHLLECAKELDVQIIGVKFHVSSACKESQVYVHALSDARCVFDMAGEIGFTMNMLDIGGGFTGTEFQLEEVNHVISPLLDIYFPEGSGVKIISEPGSYYVSSAFTLAVNIIAKKVVENDKFPSGVEMEFCHVVQADLELLTSSDPPTSASQSARITEKTGSDEPAFMYYMNDGVYGSFASKLSEDLNTIPEVHKKYKEDEPLFTSSLWGPSCDELDQIVESCLLPELNVGDWLIFDNMGADSFHEPSAFNDFQRPAIYYMMSFSDWYEMQDAGITSDSMMKNFFFVPSCIQLSQEDSFSAEA

SEQ ID NO: 73696 - protein, 475 aa, Homo sapiens
MAAVATCGSVAASTGSAVATASKSNVTSFQRRGPRASVTNDSGPRLVSIAGTRPSVRNGQLLVSTGLPALDQLLGGGLAVGTVLLIEEDKYNIYSPLLFKYFLAEGIVNGHTLLVASAKEDPANILQELPAPLLDDKCKKEFDEDVYNHKTPESNIKMKIAWRYQLLPKMEIGPVSSSRFGHYYDASKRMPQELIEASNWHGFFLPEKISSTLKVEPCSLTPGYTKLLQFIQNIIYEEGFDGSNPQKKQRNILRIGIQNLGSPLWGDDICCAENGGNSHSLTKFLYVLRGLLRTSLSACIITMPTHLIQNKAIIARVTTLSDVVVGLESFIGSERETNPLYKDYHGLIHIRQIPRLNNLICDESDVKDLAFKLKRKLFTIEWVQDNYLRQERNIYPPGFSYLLKQKDSAWGEGSLQHSTFLMSFLAKATAFASRLVRHSEPLKQNGSGRIRQAAGPRLWHDGRRQEAPGLLGIPP

SEQ ID NO: 73697 - protein, 155 aa, Homo sapiens
MPLKTRTALSDDPDSSTSTLGNMLELPGTSSSSTSQELPFCQPKKKSTPLKYEVGDLIWAKFKRRPWWPCRICSDPLINTHSKMKVSNRRPYRQYYVEAFGDPSERAWVAGKAIVMFEGRHQFEELPVLRRRGKQKEKGYRHKVPQKILSKWEAS

SEQ ID NO: 73698 - protein, 66 aa, Homo sapiens
MVPALRYLVGACGRARGLFAGGSPGACGFASGRPRPLCGGSRSASTRRNSLCEGCKAWRGFGYFDD

SEQ ID NO: 73699 - protein, 314 aa, Homo sapiens
MGARGAPSRRRQAGRRLRYLPTGSFPFLLLLLLLCIQLGGGQKKKENLLAEKVEQLMEWSSRRSIFRMNGDKFRKFIKAPPRNYSMIVMFTALQPQRQCSVCRQANEEYQILANSWRYSSAFCNKLFFSMVDYDEGTDVFQQLNMNSAPTFMHFPPKGRPKRADTFDLQRIGFAAEQLAKWIADRTDVHIRVFRPPNYSGTIALALLVSLVGGLLYLRRNNLEFIYNKTGWAMVSLCIVFAMTSGQMWNHIRGPPYAHKNPHNGQVSYIHGSSQAQFVAESHIILVLNAAITMGMVLLNEAATSKGDVGKRRTF

SEQ ID NO: 73700 - protein, 57 aa, Homo sapiens
MAKRKEENFSSPKNAKRPRQEELEDFDKDGDEDECKGTTLTAAEVGIIESIHLKNFM

SEQ ID NO: 73701 - protein, 192 aa, Homo sapiens
MNGKRPQHLHPLGSDNSEAENITVTKDFRRVENAYHMEAEVCITFTEFGKMQNICNFLVEKLDSSVVISPPQFYHTPGSVENLRRQACLVAVENAWRKAQEVCNLVGQTLGKPLLIKEEETKEWEGQIDDHQSSRLSSSLTVQQKIKSATIHAASKVFITFEQLLESFFNIPTNNYSQIAMSPVNYHESHIK

SEQ ID NO: 73702 - protein, 53 aa, Homo sapiens
LYMYQLFRSLAYIHSFGICHRDIKPQNLLLDPDTAVLKLCDFGRCMVCWLCVG

SEQ ID NO: 73703 - protein, 406 aa, Homo sapiens
MAFTERVNSSGNSLYNDDRNLLRIREKERRNQEAHQEKEAFPEKIPLFGEPYKTAKGDELSSRIQNMLGNYEEVKEFLSTKSHTHRLDASENRLGKPKYPLIPDKGSSIPSSSFHTSVHHQSIHTPASGPLSVGNISHNPKMAQPRTEPMPSLHAKSCGPPDSQHLTQDRLGQEGFGSSHHKKGDRRADGDHCASVTDSAPERELSPLISLPSPVPPLSPIHSNQQTLPRTQGSSKVHGSSNNSKGYCPAKSPKDLAVKVHDKETPQDSLVAPAQPPSQTFPPPSLPSKSVAMQQKPTAYVRPMDGQDQAPSESPELKPLPEDYRQQTFEKTDLKVPAKAKLTKLKMPSQSVETYSNEVHCVEEILKEMTHSWPPPLTAIHTPSTAEPSKFPFPTKDSQHVSSVTQ

SEQ ID NO: 73704 - protein, 246 aa, Homo sapiens
MNDTHVNEDLKAIKFSEADYFGNVLQTRKYLAQSDFFWLRKAVPKTEWFTNPTTVNAFYSASTNQIRFPAGELQKPFFWGTEYPRSLSYGAIGVIVGHEFTHGFDNNGRKYDKNGNLDPWWSTESEEKFKEKTKCMINQYSNYYWKKAGLNVKGKRTLGENIADNGGLREAFRAYRKWINDRRQGLEEPLLPGITFTNNQLFFLSYAHVRCNSYRPEAAREQVQIGAHSPPQFSQPANMNEWPLSK

SEQ ID NO: 73705 - protein, 88 aa, Homo sapiens
MLDTIARALQDLGRQVLPTLPSLSQEEVSIIWGNVSEFVRRQLTLHKRPGTVDSVLSSREALRKWPSSVLAFPRIELKEMENKLPMET

SEQ ID NO: 73706 - protein, 122 aa, Homo sapiens
PPMPFRKCSNPDVASGPGKSLKYKRQLSEDGRQLRRGSLGGALTGRYLLPNPVAGQAWPASAETSNLVRMRSQALGQSAPSLTASLKELSLPRRGSLCRSSDCDWVIDKRSERNCFLGKMLL

SEQ ID NO: 73707 - protein, 61 aa, Homo sapiens
MYRALRLLARSRPLVRAPAAALASAPGLGGAAVPSFWPPNAARMGHCTAFRPSRQAKIPSG

SEQ ID NO: 73708 - protein, 49 aa, Homo sapiens
  MOD_RES (1)..(1): Any amino acid
XFLLFQFGLCTFKYDYTDSNHLTSMFSRNPSIDPHQMSNLFVRAPALTF

SEQ ID NO: 73709 - protein, 1786 aa, Homo sapiens
MAKTGAEDHREALSQSSLSLLTEAMEVLQQSSPEGTLDGNTVNPIYKYILNDLPREFMSSQAKAVIKTTDDYLQSQFGPNRLVHSAAVSEGSGLQDCSTHQTASDHSHDEISDLDSYKSNSKNNSCSISASKRNRPVSAPVGQLRVAEFSSLKFQSARNWQKLSQRHKLQPRVIKVTAYKNGSRTVFARVTVPTITLLLEECTEKLNLNMAARRVFLADGKEALEPEDIPHEADVYVSTGEPFLNPFKKIKDHLLLIKKVTWTMNGLMLPTDIKRRKTKPVLSIRMKKLTERTSVRILFFKNGMGQDGHEITVGKETMKKVLDTCTIRMNLNLPARYFYDLYGRKIEDISKVPLLEKCLQNSITPLRGLLWVSKGEGFSPSGAKMYIQGVLLALYQRLKSAKKYYKQLNLVMNEQKEKITEKVILSMTAKEHHKEQEEVSRLIDELQTAIKSNIGHLCKLGPQLQAEQEQFSSYVYQHIKSLPANTLVPGGLQLKVFENGKNTGEISVGISKKDLGSDSPIQTDHMMERLLLKIHQRLQGSSINPPGLNYSSMRLFDENGQEIKNPLSLKNEQKIWVSYGRAYRSPLNLALGLTFDRVSAFARGDIMVAYKTFLDPNAVLLPGCGNWEVCEGFPINFNCTSQQIPDQFEKVDLENHFLQNKVDPNIVLHASVSIGKWSFSGSEASSRSQIAPSILWPVASVWLITKTGMILSRAITQGCLAIGHPIRVKAAEGTSLEGYKLILQKRHSGDDSQKWVFGTDGCIYSKAYPQFVLTYLEELNAQVDVTQTEYHIHHGAWTTAHQEHGRNLAEEVLQESASNLGLKQLPEPSDTHLMPEGSLEETGELTVALVRKLEEKHPKASAQRWAIKHEGTSKPGQWKHSRVENPLWNKLTYMWPVLPSGQLNEEFDWPIQGLLVPSSPPMKKPICKTTEPYAPVRLRVLQNGEKNKNRSVTILGPDISPGRKTQCTEILNLPSAARRLYNEKGKEIFALKDLQRDELVYVSCGELWINPDLSIAQQKKQIFLRNLESDIAKIQIFCSTHKIEALVLEVQSDIVSGSKLAVHKPVAIFGEEKQVTEPEEKQMQEDPLTTENASSEILDSHVRAHLRMKACHTLPRYAWQETSHDFDEDDSLPKKTEKGLFENVEPQKKHSCSPKHSKLHKHCHQQFEYRDGQIISHAAPQLVLGVQGPNLRSGMEVVLVEKKSDGSHQRWIHQEDSRTFHLVSNPDLVLAVSMTKTRNEVCGYPVIVQKYKPYNNGAANQKWHYMKNIKALVAFHSTALDKEITSANYAGVCTSSVIKEENIDQPGYCYLSPDGKRKTMLCLACGQSMRTEKGLKQLLPGVPFLCISGTKTQKPFLQGPFKVISVAEVDLSCDKAEKTLSYYQARLLSLRMKTCTQAASHSGMAATHQKAVKIIAYKNGDGYRNGKLIVAGTFPMLLTECTEQLGLARAASKVYTKDGTPIFTLRDLVLWALDESFLQRDSEKQKQDAAPVGKEQIIVESMEENPRMKVKNRLFAKSVTSDSLDGIDKSLLTLILRNPIAIWVSCGEPFLPPNALQKAEKLEKQNWLKKDRILADLDTMRHKMRQLKGRRVAACQPATMVPTKSPVQPVVVEGGWTEQTQQEIKLMELIRHTEAHLSEIQEMESKINFPIATKRIAVKPSNLYKQPNTKRVWIYLNGGRPEDGTYAWGKTISELLQDCSSRLKMTHPARALYTPSGEPIQSWDDIERDMVICVSMGHGFKTPKELKQLMEIRANYARIRRQQGPQATDIVVSPSTKLLSLAHLHN

SEQ ID NO: 73710 - protein, 334 aa, Homo sapiens
MNSVSPAAAQYRSSSPEDARRRPEARRPRGPRGPDPNGLGPSGASGPALGSPGAGPSEPDEVDKFKAKFLTAWNNVKYGWVVKSRTSFSKISSIHLCGRRYRFEGEGDIQRFQRDFVSRLWLTYRRDFPPLPGGCLTSDCGWGCMLRSGQMMLAQGLLLHFLPRDWTWAEGMGLGPPELSGSASPSRYHGPARWMPPRWAQGAPELEQERRHRQIVSWFADHPRAPFGLHRLVELGQSSGKKESRGELLRRHPPGGVRFSGLHSVQGGCGTPGGQARPHSRVEVCGHPGARATGWRDSQPRVCALREGTPALRAVPGHHGWETATLTVLHWLPR

SEQ ID NO: 73711 - protein, 152 aa, Homo sapiens
MTSMSAGTINTLKRSFEVEEVETPNSTPPRRVQTPLLRATVASSTQKFQDLGVKNSEPSARHVDSLSQRSPKASLRRVELSGPKAAEPVSRRTELSIDISSKQVENAGAIGPSRFGLKRAEVLGHKTPEPAPRRTEITIVKPQESAHRRMEP

SEQ ID NO: 73712 - protein, 894 aa, Homo sapiens
MNRADSPKPPVAPKPKTTSPLTPVTAPKFPSSARPESLHSPNSMFRGPKPPIAPKPRLTAPNEWRASVYLNDSLNKCSNGRLPCVDRGLDEGPRSIPKCSESETDEDYIVVPRVPLREDEPKDEGSVGNKALVSPESSAEEEEEREEGGEACGLEGTGAGEDSVAPAAPGAGALSREGEEGTDLALEDEGEGCADEPGTLEQVSRSEEEEKLVQPHRECSLEDSGPWAGEGVFQSDLLLPHIHGEDQEPPDTPGEAEEDDEEGCASTDPAGADEGSGPDRPTEDMGQDAEDTSEEPPEKEELAGVQEAETATDCPEVLEEGCEEATGVTGGEQVDLSEPPDHEKKTNQEVAAATLEDHAQDESAEESCQIVPFENDCMEDFVTSLTGSPYEFFPTESTSFCSESCSPLSESAKGLESEQAPKLGLRAEENPMVGALCGQCGSLQGGAAEGPAAPDVVVVLEEEALDDALANPYVMGVGLPGQAAPGEGGQAASDALGGYGSKEELNCEAEGGLVPADRKNTSTRVRPHSGKVAGYVPETVPEETGPEAGSSAPGIGGAAEEVGKTLLSLEGKPLEASRALPAKPRAFTLYPRSFSVEGREIPVSVYQEPEGSGLDDHRIKRKEDNLSLSCVIGSSGSFSQRNHLPSSGTSTPSSMVDIPPPFDLACITKKPITKSSPSLLIESDSPDKYKKKKSSFKRFLALTFKKKTENKLHVDVNVSSSRSSSESSYHGPSRILEVDRRSLSNSPQLKSRTGKLRASESPSSLIFYRDGKRKGVPFSRTVSRVESFEDRSRPPFLPLPLTKPRSISFPSADTSDYENIPAMNSDYENIQIPPRRPARAGAFTKLFEDQSRALSTANENDGYVDMSSFNAFESKQQSADQDAERYLTFYFLSC

SEQ ID NO: 73713 - protein, 398 aa, Homo sapiens
  MOD_RES (1)..(1): Any amino acid
XPPLDFKHLLAFHFNGAAPLSLFPNFSTMDPVQKAVISHTFGVPSPLKKKLFISCNICHLRFNSANQAEAHYKGHKHARKLKAVEAAKSKQRPHTQAQDGAVVSPIPTLASGAPGEPQSKVPAAPPLGPPLQPPPTPDPTCREPAHSELLDAASSSSSSSCPPCSPEPGREAPGPEPAAAAVGSSMSGEGRSEKGHLYCPTCKVTVNSASQLQAHNTGAKHRWMMEGQRGAPRRSRGRPVSRGGAGHKAKRVTGGRGGRQGPSPAFHCALCQLQVNSETQLKQHMSSRRHKDRLAGKTPKPSSQHSKLQKHAALAVSILKSKLALQKQLTKTLAARFLPSPLPTAATAICALPGPLALRPAPTAATTLFPAPILGPALFRTPAGAVRPATGPIVLAPY

SEQ ID NO: 73714 - protein, 192 aa, Homo sapiens
  MOD_RES (1)..(1): Any amino acid
XVESDKSQGQSSQGENDLNGSGKVVYKRCRGIMFSKRKLRYTEMTMDEKYVNSIWDLLKNAIQEIQRKNNSGLSFEELYRNAYTMVLHKHGEKLYTGLREVVTEHLINKVREDVLNSLNNNFLQTLNQAWNDHQTAMVMIRDILMYMDRVYVQQNNVENVYNLGLIIFRDQVVRYGCIRDHLRQTLLDMIAR

SEQ ID NO: 73715 - protein, 289 aa, Homo sapiens
MSAFSEAALEKKLSELSNSQQSVQTLSLWLIHHRKHSRPIVTVWERELRKAKPNRKLTFLYLANDVIQNSKRKGPEFTKDFAPVIVEAFKHVSSETDESCKKHLGRVLSIWEERSVYENDVLEQLKQALYGDKKPRKRTYEQIKVDENENCSSLGSPSEPPQTLDLVRALQDLENAASGDAAVHQRIASLPVEVQEVSLLDKITDKESGERLSKMVEDACMLLADYNGRLAAEIDDRKQLTRMLADFLRCQKEALAEKEHKLEILDMGVSSNDVVTISIFFLLKINIKP

SEQ ID NO: 73716 - protein, 241 aa, Homo sapiens
MAEPLKEEDGEDGSAEPPGPVKAEPAHTAASVAAKNLALLKARSFDVTFDVGDEYEIIETIGNGAYGVVSSARRRLTGQQVAIKKIPNAFDVVTNAKRTLRELKILKHFKHDNIIAIKDILRPTVPYGEFKSVYVVLDLMESDLHQIIHSSQPLTLEHVRYFLYQLLRGLKYMHSAQVIHRDLKPSNLLVNENCELKIGDFGMARGLCTSPAEHQYFMTEYVATRWYRAPELMLSLHEYTQ

SEQ ID NO: 73717 - protein, 2259 aa, Homo sapiens
MSLRSGGRRRADPGADGEASRDDGATSSVSALKRLERSQWTDKMDLRFGFERLKEPGEKTGWLINMHPVALPYKPYFYIATRKGCEREVSSFLSKKFQGKIAKVETVPKEDLDLPNHLVGLKRNYIRLSFHTVEDLVKVRKEISPAVKKNREQDHASDAYTALLSSVLQRGGVITDEEETSKKIADQLDNIVDMREYDVPYHIRLSIDLKIHVAHWYNVRYRGNAFPVEITRRDDLVERPDPVVLAFDIETTKLPLKFPDAETDQIMMISYMIDGQGYLITNREIVSEDIEDFEFTPKPEYEGPFCVFNEPDEAHLIQRWFEHVQETKPTIMVTYNGDFFDWPFVEARAAVHGLSMQQEIGFQKDSQGEYKAPQCIHMDCLRWVKRDSYLPVGSHNLKAAAKAKLGYDPVELDPEDMCRMATEQPQTLATYSVSDAVATYYLYMKYVHPFIFALCTIIPMEPDEVLRKGSGTLCEALLMVQAFHANIIFPNKQEQEFNKLTDDGHVLDSETYVGGHVEALESGVFRSDIPCRFRMNPAAFDFLLQRVEKTLRHALEEEEKVPVEQVTNFEEVCDEIKSKLASLKDVPSRIECPLIYHLDVGAMYPNIILTNRLQPSAMVDEATCAACDFNKPGANCQRKMAWQWRGEFMPASRSEYHRIQHQLESEKFPPLFPEGPARAFHELSREEQAKYEKRRLADYCRKAYKKIHITKVEERLTTICQRENSFYVDTVRAFRDRRYEFKGLHKVWKKKLSAAVEVGDAAEVKRCKNMEVLYDSLQLAHKCILNSFYGYVMRKGARWYSMEMAGIVCFTGANIITQARELIEQIGRPLELDTDGIWCVLPNSFPENFVFKTTNVKKPKVTISYPGAMLNIMVKEGFTNDQYQELAEPSSLTYVTRSENSIFFEVDGPYLAMILPASKEEGKKLKKRYAVFNEDGSLAELKGFEVKRRGELQLIKIFQSSVFEAFLKGSTLEEVYGSVAKVADYWLDVLYSKAANMPDSELFELISENRSMSRKLEDYGEQKSTSISTAKRLAEFLGDQMVKDAGLSCRYIISRKPEGSPVTERAIPLAIFQAEPTVRKHFLRKWLKSSSLQDFDIRAILDWDYYIERLGSAIQKIITIPAALQQVKNPVPRVKHPDWLHKKLLEKNDVYKQKKISELFTLEGRRQVTMAEASEDSPRPSAPDMEDFGLVKLPHPAAPVTVKRKRVLWESQEESQDLTPTVPWQEILGQPPALGTSQEEWLVWLRFHKKKWQLQARQRLARRKRQRLESAEGVLRPGAIRDGPATGLGSFLRRTARSILDLPWQIVQISETSQAGLFRLWALVGSDLHCIRLSIPRVFYVNQRVAKAEEGASYRKVNRVLPRSNMVYNLYEYSVPEDMYQEHINEINAELSAPDIEGVYETQVPLLFRALVHLGCVCVVNKQLVRHLSGWEAETFALEHLEMRSLAQFSYLEPGSIRHIYLYHHAQAHKALFGIFIPSQRRASVFVLDTVRSNQMPSLGALYSAEHGLLLEKVGPELLPPPKHTFEVRAETDLKTICRAIQRFLLAYKEERRGPTLIAVQSSWELKRLASEIPVLEEFPLVPICVADKINYGVLDWQRHGARRMIRHYLNLDTCLSQAFEMSRYFHIPIGNLPEDISTFGSDLFFARHLQRHNHLLWLSPTARPDLGGKEADDNCLVMEFDDQATVEINSSGCYSTVCVELDLQNLAVNTILQSHHVNDMEGADSMGISFDVIQQASLEDMITGGQAASAPASYDETALCSNTFRILKSMVVGWVKEITQYHNIYADNQVMHFYRWLRSPSSLLHDPALHRTLHNMMKKLFLQLIAEFKRLGSSVIYANFNRIILCTKKRRVEDAIAYVEYITSSIHSKETFHSLTISFSRCWEFLLWMDPSNYGGIKGKVSSRIHCGLQDSQKAGGAEDEQENEDDEEERDGEEEEEAEESNVEDLLENNWNILQFLPQAASCQNYFLMIVSAYIVAVYHCMKDGLRRSAPGSTPVRRRGASQLSQEAEGAVGALPGMITFSQDYVANELTQSFFTITQKIQKKVTGSRNSTELSEMFPVLPGSHLLLNNPALEFIKYVCKVLSLDTNITNQVNKLNRDLLRLVDVGEFSEEAQFRDPCRSYVLPEVICRSCNFCRDLDLCKDSSFSEDGAVLPQWLCSNCQAPYDSSAIEMTLVEVLQKKLMAFTLQDLVCLKCRGVKETSMPVYCSCAGDFALTIHTQVFMEQIGIFRNIAQHYGMSYLLETLEWLLQKNPQLGH

SEQ ID NO: 73718 - protein, 56 aa, Homo sapiens
MASVLSYESLVHAVAGAVLDFDFRLMRKENPKLHTWCSWRSLKKKDSWHHIEGGFQ

SEQ ID NO: 73719 - protein, 151 aa, Homo sapiens
MADTPRDAGLKQAPASRNEKAPVDFGYVGIDSILEQMRRKAMKQGFEFNIMVVGQSGLGKSTLINTLFKSKISRKSVQPTSEERIPKTIEIKSITHDIEEKGVRMKLTVIDTPGFGDHINNENCWQPIMKFINDQYEKYLQEEVNINRKKR

SEQ ID NO: 73720 - protein, 80 aa, Homo sapiens
MATSFRTASCWGLLSFKDISMEFTWDEWQLLDSTQKYLYRDVILENYHNLISVDGWEEWYQNNQDELESIERSYACSVLG

SEQ ID NO: 73721 - protein, 63 aa, Homo sapiens
MEELSQALASSFSVSQDLNSTAAPHPRLSQYKSKYSSLEQSERRRRLLELQKSKRLDYVNHAR

SEQ ID NO: 73722 - protein, 298 aa, Homo sapiens
MGLLVFVRNLLLALCLFLVLGFLYYSAWKLHLLQWEEDSKYDRLGFLLNLDSKLPAELATKYANFSEGACKPGYASALMTAIFPRFSKPAPMFLDDSFRKWARIREFVPPFGIKGQDNLIKAILSVTKEYRLTPALDSLRCRRCIIVGNGGVLANKSLGSRIDDYDIVVRLNSAPVKGFEKDVGSKTTLRITYPEGAMQRPEQYERDSLFVLAGFKWQDFKWLKYIVYKERVARFCCVHRVHRMASGNLWPLECPRSPLRFESSTHISSRRPPSPSLACPSTMASWAGGTSLPLAVWQ

SEQ ID NO: 73723 - protein, 134 aa, Homo sapiens
MAEEKKLKLSNTVLPSESMKVVAESMGIAQIQEETCQLLTDEVSYRIKEIAQDALKFMHMGKRQKLTTSDIDYALKLKNVEPLYGFHAQEFIPFRFASGGGRELYFYEEKEVDLSDIINTPLPRVPLDVCLKAH

SEQ ID NO: 73724 - protein, 482 aa, Homo sapiens
MYFPSWLSQLYRGLSRPIRRTTQPIWGSLYRSLLQSSQRRIPEFSSFVVRTNTCGELRSSHLGQEVTLCGWIQYRRQNTFLVLRDFDGLVQVIIPQDESAASVKKILCEAPVESVVQVSGTVISRPAGQENPKMPTGEIEIKVKTAELLNACKKLPFEIKNFVKKTEALRLQYRYLDLRSFQMQYNLRLRSQMVMKMREYLCNLHGFVDIETPTLFKRTPGGAKEFLVPSREPGKFYSLPQSPQQFKQLLMVGGLDRYFQVARCYRDEGSRPDRQPEFTQIDIEMSFVDQTGIQSLIEGLLQYSWPNDKDPVVVPFPTMTFAEVLATYGTDKPDTRFGMKIIDISDVFRNTEIGFLQDALSKPHGTVKAICIPEGAKYLKRKDIESIRNFAADHFNQEILPVFLNANRNWNSPVANFIMESQRLELIRLMETQEEDVVLLTAGEHNKAKKFQSSASKLNVIPRLPFPYNSKMKKAIYFQILL

SEQ ID NO: 73725 - protein, 375 aa, Homo sapiens
MEEPEEPADSGQSLVPVYIYSPEYVSMCDSLAKIPKRASMVHSLIEAYALHKQMRIVKPKVASMEEMATFHTDAYLQHLQKVSQEGDDDHPDSIEYGLGYDCPATEGIFDYAAAIGGATITAAQCLIDGMCKVAINWSGGWHHAKKDEASGFCYLNDAVLGILRLRRKFERILYVDLDLHHGDEDAFSFTSKVMTVSLHKFSPGFFPGTGDVSDVGLGKGRYYSVNVPIQDGIQDEKYYQICESVLKEVYQAFNPKAVVLQLGADTIAGDPMCSFNMTPVGIGKCLKYILQWQLATLILGGGGYNLANTARCWTYLTGVILGKTLSSEIPDHEFFTAYGPDYVLEITPSCRPDRNEPHRIQQILNYIKGNLKHVV

SEQ ID NO: 73726 - protein, 131 aa, Homo sapiens
MASSLNEDPEGSRITYVKGDLFACPKTDSLAHCISEDCRMGAGIAVLFKKKFGGVQELLNQQKKSGEVAVLKRDGRYIYYLITKKRASHKPTYENLQKSLEAMKSHCLKNGVTDLSMPRIGCGLDRLQWEN

SEQ ID NO: 73727 - protein, 104 aa, Homo sapiens
  MOD_RES (1)..(1): Any amino acid
XPGGERAEGAGRPGAPTMASKCPKCDKTVYFAEKVTSLGKDWHRPCLRCERCGKTLTPGGHAEHDGQPYCHKPCYGILFGPKGVNTGAVGSYIYDRDPEGKVQP

SEQ ID NO: 73728 - protein, 355 aa, Homo sapiens
MEEGERSPLLSQETAGQKPLSVHRPPTSGCLGPVPREDQAEAWGCSCCPPETKHQALSGTPKKGPAPSLSPGSSCVKYLIFLSNFPFSLLGLLALAIGLWGLAVKGSLGSDLGGPLPADPMLGLALGGLVVSAVSLAGYLGALCENTCLLRGFSGGILAFLVLEAVAGALVVALWGPLQDSLEHTLRVAIAHYQDDPDLRFLLDQVQLGLRCCGAASYQDWQQNLYFNCSSPGVQACSLPASCCIDPREDGASVNDQCGFGVLRLDADAAQRVVYLEGCGPPLRRWLRANLAASGGYAIAVVLLQGAELLLAARLLGALAARRGAAYGPGARGEDRAGPQSPSPGAPPAAKPARG

SEQ ID NO: 73729 - protein, 65 aa, Homo sapiens
MPKSKELVSSSSSGSDSDSEVDKKLKRKKQVAPEKPVKKQKTGETSRALSSSKQSSSSRDDNMFQ

SEQ ID NO: 73730 - protein, 839 aa, Homo sapiens
MTSRLRALGGRINNIRTSELPKEKTRSEVICSIHFLDGVVQTFKVTKQDTGQVLLDMVHNHLGVTEKEYFGLQHDDDSVDSPRWLEASKAIRKQLKGGFPCTLHFRVRFFIPDPNTLQQEQTRHLYFLQLKMDICEGRLTCPLNSAVVLASYAVQSHFGDYNSSIHHPGYLSDSHFIPDQNEDFLTKVESLHEQHSGLKQSEAESCYINIARTLDFYGVELHSGRDLHNLDLMIGIASAGVAVYRKYICTSFYPWVNILKISFKRKKFFIHQRQKQAESREHIVAFNMLNYRSCKNLWKSCVEHHTFFQAKKLLPQEKNVLSQYWTMGSRNTKKSVNNQYCKKVIGGMVWNPAMRRSLSVEHLETKSLPSRSPPITPNWRSPRLRHEIRKPRHSSADNLANEMTYITETEDVFYTYKGSLAPQDSDSEVSQNRSPHQESLSENNPAQSYLTQKSSSSVSPSSNAPGSCSPDGVDQQLLDDFHRVTKGGSTEDASQYYCDKNDNGDSYLVLIRITPDEDGKFGFNLKGGVDQKMPLVVSRINPESPADTCIPKLNEGDQIVLINGRDISEHTHDQVVMFIKASRESHSRELALVIRRRAVRSFADFKSEDELNQLFPEAIFPMCPEGGDTLEGSMAQLKKGLESGTVLIQFEQLYRKKPGLAITFAKLPQNLDKNRYKDVLPYDTTRVLLQGNEDYINASYVNMEIPAANLVNKYIATQGPLPHTCAQFWQVVWDQKLSLIVMLTTLTERGRTKCHQYWPDPPDVMNHGGFHIQCQSEDCTIAYVSREMLVTNTQVSRSLRGTVEGQVLNQRPLSSQVVTLLGVHSVCTWQACQPGKNTQ

SEQ ID NO: 73731 - protein, 63 aa, Homo sapiens
MPDNRQPRNRQPRIRSGNEPRSAPAMEPDGRGAWAHSRAALDRLEKLLRCSRWGKSMSTKKSM

SEQ ID NO: 73732 - protein, 1106 aa, Homo sapiens
MRKPRRKSRQNAEGRRSPSPYSLKCSPTRETLTYAQAQRIVEVDIDGRLHRISIYDPLKIITEDELTAQDITECNSNKENSEQPQFPGKSKKPSSKGKKKESCSKHASGTSFHLPQPSFRMVDSGIQPEAPPLPAAYYRYIEKPPEDLDAEVEYDMDEEDLAWLDMVNEKRRVDGHSLVSADTFELLVDRLEKESYLESRSSGAQQSLIDEDAFCCVCLDDECHNSNVILFCDICNLAVHQECYGVPYIPEGQWLCRCCLQSPSRPVDCILCPNKGGAFKQTSDGHWAHVVCAIWIPEVCFANTVFLEPIEGIDNIPPARWKLTCYICKQKGLGAAIQCHKVNCYTAFHVTCAQRAGLFMKIEPMRETSLNGTIFTVRKTAYCEAHSPPGAATARRKGDSPRSISETGDEEGLKEGDGEEEEEEEVEEEEQEAQGGVSGSLKGVPKKSKMSLKQKIKKEPEEAGQDTPSTLPMLAVPQIPSYRLNKICSGLSFQRKNQFMQRLHNYWLLKRQARNGVPLIRRLHSHLQSQRNAEQREQDEKTSAVKEELKYWQKLRHDLERARLLIELIRKREKLKREQVKVQQAAMELELMPFNVLLRTTLDLLQEKDPAHIFAEPVNLSEVPDYLEFISKPMDFSTMRRKLESHLYRTLEEFEEDFNLIVTNCMKYNAKDTIFHRAAVRLRDLGGAILRHARRQAENIGYDPERGTHLPESPKLEDFYRFSWEDVDNILIPENRAHLSPEVQLKELLEKLDLVSAMRSSGARTRRVRLLRREINALRQKLAQPPPPQPPSLNKTVSNGELPAGPQGDAAVLEQALQEEPEDDGDRDDSKLPPPPTLEPTGPAPSLSEQESPPEPPTLKPINDSKPPSRFLKPRKVEEDELLEKSPLQLGNEPLQRLLSDNGINRLSLMAPDTPAGTPLSGVGRRTSVLFKKAKNGVKLQRSPDRVLENGEDHGVAGSPASPASIEEERHSRKRPRSRSCSESEGERSPQQEEETGMTNGFGKHTESGSDSECSLGLSGGLAFEACSGLTPPKRSRGKPALSRVPFLEGVNGDSDYNGSDHRSQDAPGGPPAQWRSHPCPPAGRAEAGRAETGRGWREALPCPLL

SEQ ID NO: 73733 - protein, 70 aa, Homo sapiens
  MOD_RES (1)..(1): Any amino acid
XCKVEHESFEKPQLLTVNLTVYYPPEVSISGYDNNWYLGQNEATLTCDARSNPEPTGYNWSTYRACQRLS

SEQ ID NO: 73734 - protein, 14 aa, Homo sapiens
MMARRDPKPGAKRL

SEQ ID NO: 73735 - protein, 77 aa, Homo sapiens
MLALEAAQLDGPHFSCLYPDGVFYDLDSCKHSSYPDSEGAPDPGSPGICPVPQPCAIRGGRLTVGQPCPGGLGQRVG

SEQ ID NO: 73736 - protein, 43 aa, Homo sapiens
  MOD_RES (1)..(1): Any amino acid
XAAEWGKYGMRFNVIQPGPIKTKECVWGREVCCGTNPDNAECH

SEQ ID NO: 73737 - protein, 120 aa, Homo sapiens
MITSQGSVSFRDVTVGFTQEEWQHLDPAQRTLYRDVMLENYSHLVSVGYCIPKPEVILKLEKGEEPWILEEKFPSQSHLGCINCWGDQTQHQAMGSMKSGGIKGMRKDKLREKVGPGGQC

SEQ ID NO: 73738 - protein, 205 aa, Homo sapiens
VTISSLVFSMDSQFLCASSNTETVHIFKLEQVTNSRPEEPSTWSGYMGKMFMAATNYLPTQVSDMMHQDRAFATARLNFSGQRNICTLSTIQKLPRLLVASSSGHLYMYNLDPQDGGECVLIKTHSLLGSGTTEENKENDLRPSLPQSYAATVARPSASSASTVPGYSEDGGALRGEVIPEHEFATGPVCLDDENEFPPVSIRNP

SEQ ID NO: 73739 - protein, 392 aa, Homo sapiens
EQTYSMVKTGAPTVTVTNLKPATRYVFQIRAASPGPSWEAQSFNPSIEVQTLGEAASGSRDQSPAIVVTVVTISALLVLGSVMSVLAIWRRPCSYGKGGGDAHDEEELYFHFKVPTRRTFLDPQSCGDLLQAVHLFAKELDAKSVTLERSLGGGRFGELCCGCLQLPGRQELLVAVHMLRDSASDSQRLGFLAEALTLGQFDHSHIVRLEGVVTRGSTLMIVTEYMSHGALDGFLRRHEGQLVAGQLMGLLPGLASAMKYLSEMGYVHRGLAARHVLVSSDLVCKISGFGRGPRDRSEAVYTTMSGRSPALWAAPETLQFGHFSSASDVWSFGIIMWEVMAFGERPYWDMSGQDVIKAVEDGFRLPPPRNCPNLLHRLMLDCWQKDPGLPPH

SEQ ID NO: 73740 - protein, 55 aa, Homo sapiens
KTNHSNIMDDPFIREHIEELLRNIRTQVLIKLIKPYTRIHIPFISKMESRSCCLG

SEQ ID NO: 73741 - protein, 100 aa, Homo sapiens
MVRMNVLADALKSINNAEKRGKRQVLIRPCSKVIVRFLTVMMKHGYIGEFEIIDDHRAGKIVVNLTGRLNKCGVISPRFDVQLKDLEKWQNNLLPSRQFG

SEQ ID NO: 73742 - protein, 153 aa, Homo sapiens
MHYMYRPRSRSPRICHRFISRYRSRSRSRSPYRIRNPFRGSPKCFRSVSPERMSRRSVRSSDRKKALEDVVQRSGHGTEFNKQKHLEAADKGHSPAQKPKTSSGTKPSVKPTSATKSDSNLGGHSIRCKSKNLEDDTLSECKQVSDKAVSLQR

SEQ ID NO: 73743 - protein, 330 aa, Homo sapiens
  MOD_RES (1)..(1): Any amino acid
XIGFFIAFGIAMGKMGDQAKLMVDFFNILNEIVMKLVIMIMWYSPLGIACLICGKIIAIKDLEVVARQLGMYMVTVIIGLIIHGGIFLPLIYFVVTRKNPFSFFAGIFQAWITALGTASSAGTLPVTFRCLEENLGIDKRVTRFVLPVGATINMDGTALYEAVAAIFIAQMNGVVLDGGQIVTVSLTATLASVGAASIPSAGLVTMLLILTAVGLPTEDISLLVAVDWLLDRMRTSVNVVGDSFGAGIVYHLSKSELDTIDSQHRVHEDIEMTKTQSIYDDMKNHRESNSNQCVYAAHNSVIVDECKVTLAANGKSADCSVEEEPWKREK

SEQ ID NO: 73744 - protein, 83 aa, Homo sapiens
MVACYALLGRTLLAARGPERRRALRVVVALVAAFVVLQLPYSLALLLDTADLLAARERSCPASKRKDVALLVTSGLALARCGL

SEQ ID NO: 73745 - protein, 189 aa, Homo sapiens
  MOD_RES (1)..(1): Any amino acid
XNKSTSSAMSGSHQDLSVIQPIVKDCKEADLSLYNEFRLWKDEPTMDRTCPFLDKIYQEDIFPCLTFSKSELASAVLEAVENNTLSIEPVGLQPIRFVKASAVECGGPKKCALTGQSKSCKHRIKLGDSSNYYYISPFCRYRVSDLTMNFNKACFDMGHLTIHDIFSIWPRSLLYVTFLHTFDTFSRDS

SEQ ID NO: 73746 - protein, 149 aa, Homo sapiens
MALRVVRSVRALLCTLRAVPSPAAPCPPRPWQLGVGAVRTLRTGPALLSVRKFTEKHEWVTTENGIGTVGISNFAQEALGDVVYCSLPEVGTKLNKQDEFGALESVKAASELYSPLSGEVTEINEALAENPGLVNKSCYEDGKDPNILF

SEQ ID NO: 73747 - protein, 129 aa, Homo sapiens
MGEIKVSPDYNWFRGTVPLKKIIVDDDDSKIWSLYDAGPRSIRCPLIFLPPVSGTADVFFRQILALTGWGYRVIALQYPVYWDHLEFCDGFRKLLDHLQLDKLLADACIYAQKNSSWKFFIWPGGPYDG

SEQ ID NO: 73748 - protein, 110 aa, Homo sapiens
MAGAATGSRTPGRSELVEGCGWRCPEHGDRVAELFCRRCRRCVCALCPVLGAHRGHPVGLALEAAVHVQGLEYQPGARSCPEASGIHGHRAGDAAADEPRGAVPSRAPLL

SEQ ID NO: 73749 - protein, 662 aa, Homo sapiens
MTTGTIHWGNSFLSKQQASQVLVRKRRANSLLEETKQGNLERECIEELCNKEEAREVFENDPETDYFYPKYLVCLRSFQTGLFTAARQSTNAYPDLRSCVNAIPDQCSPLPCNEDGYMSCKDGKASFTCTCKPGWQGEKCEFDINECKDPSNINGGCSQICDNTPGSYHCSCKNGFVMLSNKKDCKDVDECSLKPSICGTAVCKNIPGDFECECPEGYRYNLKSKSCEDIDECSENMCAQLCVNYPGGYTCYCDGKKGFKLAQDQKSCEVVSVCLPLNLDTKYELLYLAEQFAGVVLYLKFRLPEISRFSAEFDFRTYDSEGVILYAESIDHSAWLLIALRGGKIEVQLKNEHTSKITTGGDVINNGLWNMVSVEELEHSISIKIAKEAVMDINKPGPLFKPENGLLETKVYFAGFPRKVESELIKPINPRLDGCIRSWNLMKQGASGIKEIIQEKQNKHCLVTVEKGSYYPGSGIAQFHIDYNNVSSAEGWHVNVTLNIRPSTGTGVMLALVSGNNTVPFAVSLVDSTSEKSQDILLSVENTVIYRIQALSLCSDQQSHLEFRVNRNNLELSTPLKIETISHEDLQRQLAVLDKAMKAKVATYLGGLPDVPFSATPVNAFYNGCMEVNINGVQLDLDEAISKHNDIRAHSCPSVWKKTKNS

SEQ ID NO: 73750 - protein, 212 aa, Homo sapiens
MGPVVPEFSRHQRQPRGSCQRSGPLGDQPFAGLLPKNLSREELVDALRAAVVDRKGPLVTLNKPQGLPVTGKPGELTLFSVLPELSQSLGLREQELQVVRASGKESSGLVLLSSCPQTASRLQKYFTHARRAQRPTATYCAVTDGIPAASEGKIQAALKLEHIDGVNLTVPVKAPSRKDILEGVKKTLSHFRVVATGSGCALVQLQPLTGPG

SEQ ID NO: 73751 - protein, 916 aa, Homo sapiens
MLPLGSEPALNELLLRKEEEWRALQAHRTQLQEAALQDTRSQLEEAQGKLRCLQEDFVYNLQVLEERDLELERYDAAFAQAREWEEARRAEVSELKIEAAKLRQALAREARKVEELQQQQQLAFQEHRLELERVHSDKNGEIDHHREQYENLKWTLERKLEELDGELALQRQELLLEFESKMRKREHEFRLQADNMSNTALSRELKVKLLHKELEALKEAGAKAAESLQRAEATNAELERKLQSRAGELQDLEAMSRARVKDLEDKLHSVQLTRKKEEETFKRKHEELDRLAREKDAVLVAVKGAHVEQLQELQTRVLELQAHCETLEAQLRRAEWRQADTAKEKDAAIDQLREDASTVKSAWDAQIAQLSKEMVSRDLQIQTLQEEEVKLKAQVARSQQDIERYKQQLSLAVERERSLERDQVQLGLDWQRRCDDIERDQIQKSEALIQGLSMAKSQVAAKLQETEQALQEQEVVLKAVTLERDQAVQALRMHGLPRPGAQMLLRQHEEEISKDFPSSEIQRLREQNTSLRNAIAQMRKEMEALSHQIPPPIQTAAESTDANQPDPEAGGDAATPDYVLALEAEIRTLKHKFKTLEKHLEDVLDPLKMSSPHAESQPSVRTSTETTGGSAQAGQAGGSVQAGQAGGSVQAGPVSSGLALRKLGDRVQLLNLLVTRLRQKVLREPLEPAALQRELPREVDQVHLEVLELRKQVAELGKHLRIAQHGGAEPSGRKQPPASDAVALGREQDAKSAEDEAPSRHLGKHQPRSAQVGSRLDALQGPKTQHSIHTVTCKSPRQKEDRSPKPPQAPQHPEEHGRQSHSSSSFASGTLQDMWRLLDLGSSPSGVTSQGDSTPELPAPPAADRRPVKMQAGIATPGMKTAAQAKAKTTGASRSHPAKAKGCQRPPKIRNYNIMD

SEQ ID NO: 73752 - protein, 64 aa, Homo sapiens
  MOD_RES (1)..(1): Any amino acid
XSIRPIFGGTVYHSPVSRLPPSGSKPVAASTCSGKKTPRTGRHGANKENLELNGSILSEGSVPL

SEQ ID NO: 73753 - protein, 62 aa, Homo sapiens
MAAAATLRLSAQGTVTFEDVAVNFTWEEWNLLSEAQRCLYRDVTLENLALISSLGKLLTLTL

SEQ ID NO: 73754 - protein, 93 aa, Homo sapiens
MDNRKEPPFFNDDNMGPFYYRLHFCDTMELFIETLTGTCFELRVSPFETVISVKAKIRRLEDPGDPTEVSGWPSPVTTSAHSVMTLEAFVCPK

SEQ ID NO: 73755 - protein, 550 aa, Homo sapiens
MALVRDRRAHYVMSIVIRWVHCFSSSLRGTFGTRWEAMKAKATELRVCCARRKREAREFKPPQMRGSTRLNISDDLKIGFFSTDHATQTDSSEILSVKELSSSTQKLAQMMKSLQVDFGFLKQLLQLKFEDRLKEESLSLFTILHDRILEIEKHYQQNEDKMRKSFNQQLADAIAVIKGMYQQFFEVEEENVSLQDASTVKTNILLRKLKEKEEVIKELKEELDQYKDFGFHKMESFAKETSSPKSNLEKENLEYKVENERLLQIISELEEEIQINLKENSGLEDELISMKEMAEKDHKTIQKLMDSRDRLREELHYEKSLVQDVINKQKEDKEMRKKYGSLSVKVARSAKGREASLSPWPKSPPSTTALRPHSATMSVSSAGAQKAKMPKKALKEDQAVVEDKHGLESQIEALKANLENEKKKVERFRKEADRLNKSWEKRFFILRNSFHVLKNEMFTRHTLFRQFAVLADTSFNYIKVKPLLVQSRTTMTAISSSSHCTSSIDGKHVDVVSDQAALQLSPKGKLSESPKEESLEEPSMRQSSPAETVD

SEQ ID NO: 73756 - protein, 290 aa, Homo sapiens
MYVNSIGPVNAINMEYTIDIFFAQTWYDRRLKFNSTIKVLRLNSNMVGKIWIPDTFFRNSKKADAHWITTPNRMLRIWNDGRVLYTLRLTIDAECQLQLHNFPMDEHSCPLEFSSYGYPREEIVYQWKRSSVEVGDTRSWRLYQFSFVGLRNTTEVVKTTSGDYVVMSVYFDLSRRMGYFTIQTYIPCTLIVVLSWVSFWINKDAVPARTSLGITTVLTMTTLSTIARKSLPKVSYVTAMDLFVSVCFIFVFSALVEYGTLHYFVSNRKPSKDKDKKKKNPVCIIFHWHH

SEQ ID NO: 73757 - protein, 87 aa, Homo sapiens
DGTPISIGDSIFVGDAAGRPANWAPGRKKKDFSCADRLFALNLGLPFATPEEFFLKWPAAGFELPAFDPPGSPPFSRSTSCRPDMST

SEQ ID NO: 73758 - protein, 42 aa, Homo sapiens
MKSVIYHALSQKEANDSDVQVSSWQGVQEQQSLQEHSGPRPS

SEQ ID NO: 73759 - protein, 256 aa, Homo sapiens
EMLRCIWGHFLRVLGGTSPTLSHSSSLLHSLGSVTVLCCVDKQGILSWPNPSPETVLFFSGKVEPPHSSHEDLTDGLSTRSFCHPEVEEEPHERDALLAGSLNNTLHLSNEQERGDWPGEAPKPPEPYSHHKAHGRSKHPSGSNVSFSRDTEGGEEEPSKTQPGMESDPYEAEDFVCDYHLEMLSLSQDQQNPSCIQFDDSNWQLHLTSLKPLGLNVLLNLCDASVTERLCRFSDHLCNIALQESHSAVLPVHVPW

SEQ ID NO: 73760 - protein, 380 aa, Homo sapiens
MDAQCSAKVNARKRRKEAPGPNGATEEDGVPSKVQRCAVGLRQPAPFSDEIEVDFSKPYVRVTMEEASRGTPCERPVRVYADGIFDLFHSGHARALMQAKNLFPNTYLIVGVCSDELTHNFKGFTVMNENERYDAVQHCRYVDEVVRNAPWTLTPEFLAEHRIDFVAHDDIPYSSAGSDDVYKHIKEAGMFAPTQRTEGISTSDIITRIVRDYDVYARRNLQRGYTAKELNVSFINEKKYHLQERVDKVKKKVKDVEEKSKEFVQKVEEKSIDLIQKWEEKSREFIGSFLEMFGPEGALKHMLKEGKGRMLQAISPKQSPSSSPTRERSPSPSFRWPFSGKTSPPCSPANLSRHKAAAYDIRYSYLEQSKFGSHVLLTQV

SEQ ID NO: 73761 - protein, 33 aa, Homo sapiens
METDLNSQDRKDLDKFIKFFALKTVQVIVQARL

SEQ ID NO: 73762 - protein, 201 aa, Homo sapiens
MKIATVSVLLPLALCLIQDAASKNEDQEMCHEFQAFMKNGKLFCPQDKKFFQSLDGIMFINKCATCKMILEKEAKSQKRARHLARAPKATAPTELNCDDFKKGERDGDFICPDYYEAVCGTDGKTYDNRCALCAENAKTGSQIGVKSEGECKSSNPEQFCEPVMVGEGEGRKDLIHVTLVFFQEIGSKLMARTVLCLSSGT

SEQ ID NO: 73763 - protein, 125 aa, Homo sapiens
ATQNAHGTGISKKNALLDPNTTLDQEEVQQHKDGKPPYSYASLITFAINSSPKKKMTLSEIYQWICDNFPYYREAGSGWKNSIRHNLSLNKCFLKVPRSKDDPGKVGFIFLKQLNSSVCHLSCLN

SEQ ID NO: 73764 - protein, 324 aa, Homo sapiens
MESIFHEKQEGSLCAQHCLNNLLQGEYFSPVELSSIAHQLDEEERMRMAEGGVTSEDYRTFLQQPSGNMDDSGFFSIQVISNALKVWGLELILFNSPEYQRLRIDPINERSFICNYKEHWFTVRKLGKQWFNLNSLLTGPELISDTYLALFLAQLQQEGYSIFVVKGDLPDCEADQLLQMIRVQQMHRPKLIGEELAQLKEQRVHKTDLERVLEANDGSGMLDEDEEDLQRALALSRQEIDMEDEEADLRRAIQLSMQGSSRNISQDMTQTSGTNLTSEELRKRREAYFEKPRQADYERQQQQKQQQQQQQQQQGPIRTEFTSM

SEQ ID NO: 73765 - protein, 80 aa, Homo sapiens
  MOD_RES (1)..(1): Any amino acid
XEYYRKLAGLVEEMHAAYGKPVFLIGHSLGCLHLLYFLLRQPQAWKDRFIDGFISLGAPWGGSIKPMLVLASGSGTRAQH

SEQ ID NO: 73766 - protein, 219 aa, Homo sapiens
ESTIKDSTTQKAGLPSKNLTVSQNQSEEFYNGPNRNRLLLKSDEESDKVISWSCKQLFDISLFRNPFFYIFTWSFLLSQLAYFIPTFHLVARAKTLGIDIMDASYLVSVAGILETVSQIISGWVADQNWIKKYHYHKSYLILCGITNLLAPLATTFPLLMTYTICFAIFAGGYLALILPVLVDLCRNSTVNRFLGLASFFAGMAVLSGPPIAGNTFTTF

SEQ ID NO: 73767 - protein, 158 aa, Homo sapiens
MILEGGGVMNLNPGNNLLHQPPAWTDSYSTCNVSSGFFGGQWHEIHPQYWTKYQVWEWLQHLLDTNQLDANCIPFQEFDINGEHLCSMSLQEFTRAAGTAGQLLYSNLQHLKWNGQCSSDLFQSTHNVIVKTEQTEPSIMNTWKDENYLYDTNYGSTV

SEQ ID NO: 73768 - protein, 135 aa, Homo sapiens
MDFSRLHMYSPPQCVPENTGYTYALSSSYSSDALDFETEHKLDPVFDSPRMSRRSLRLATTACTLGDGEAVGADSGTSSAVSLKNRAARTTKQRRSTNKSAFSINHVSRQVTSSGVSHGGTVSLQDAVTRRPPVL

SEQ ID NO: 73769 - protein, 149 aa, Homo sapiens
MVRTQTESSTPPGIPGGSRQGPAMDGTAAEPRPGAGSLQHAQPPPQPRKKRPEDFKFGKILGEGSFSTVVLARELATSREYAIKILEKRHIIKENKVPYVTRERDVMSRLDHPFFVKLYFTFQDDEKLYFGLSYAKNGELLKYIRKIGS

SEQ ID NO: 73770 - protein, 35 aa, Homo sapiens
MPRCISTPGWTRRRWSSTARSKAPGAARSAGRAFL

SEQ ID NO: 73771 - protein, 63 aa, Homo sapiens
MAAVAAASAELLIIGWYIFRVLLQVFLECCIYWVFRYSLQKLAYTVSRTGRQVLGERRQRAPN

SEQ ID NO: 73772 - protein, 350 aa, Homo sapiens
MGHALCVCSRGTVIIDNKRYLFIQKLGEGFLLEPHLGKVSAKWEGHPTPHQEISLGPSHVGDDHGPLLTPLAHSGFSYVDLVEGLHDGHFYALKRILCHEQQDREEAQREADMHRLFNHPNILRLVAYCLRERGAKHEAWLLLPFFKRGTLWNEIERLKDKGNFLTEDQILWLLLGICRGLEAIHAKGYAHRDLKPTNILLGDEGQPVLMDLGSMNQACIHVEGSRQALTLQDWAAQRCTISYRAPELFSVQSHCVIDERTDVWSLGCVLYAMMFGEGPYDMVFQKGDSVALAVQNQLSIPQSPRHSSALRQLLNSMMTVDPHQRPHIPLLLSQLEALQPPAPGQHTTQI

SEQ ID NO: 73773 - protein, 82 aa, Homo sapiens
MTFDLTKITKTSSSFEVRTWDPEGVIFYGDTNPKDDWFMLGLRDGRPEIQLHNHWAQLTVGAGPRLDDGRWHQEKTLPPLFA

SEQ ID NO: 73774 - protein, 101 aa, Homo sapiens
MKDFSDVILCMEATESSKVGVLEGYGQTAASPGSVSSCSPACSSCCLGCWWPSSWPSCRLHPHLGRPIAHCLPEALPRPPPPPPSPPLRQLGPLKGSRSQA

SEQ ID NO: 73775 - protein, 217 aa, Homo sapiens
MWPLTQNEECTVTGFLRDKLQYRSRLQYMKHYFPINYKISVPYEGVFRIANVTRLQRAQVSERELRYLWVLVSLSATESVQDVLLEGHPSWKYLQEVETLLLNVQQGLTDVEVSPKVESVLSLLNAPGPNLKLVRPKALLDNCFRVMELLYCSCCKQSSVLNWQDCEVPSPQSCSPEPSLQYAATQLYPPPPWSPSSPPHSTGSVRPVRAQGEGLLP

SEQ ID NO: 73776 - protein, 184 aa, Homo sapiens
MGQGLWRVVRNQQLQQEGYSEQGYLTREQSRRMAASNISNTNHRKQVQGGIDIYHLLKARKSKEQEGFINLEMLPPELSFTILSYLNATDLCLASCVWQDLANDELLWQGLCKSTWGHCSIYNKNPPLGFSFRKLYMQLDEGSLTFNANPDEGVNYFMSKGILDDSPKEIAKFIFCTRTLNWKK

SEQ ID NO: 73777 - protein, 165 aa, Homo sapiens
MHNPDGSASPTADPGSELQTLGQAARRPPPPRAGHDAPRRTRPSARKPLSCFSRRPMPTREPPKTRGSRGHLHTHPPGPGPPLQGLAPRGLKTSAPRPPCQPQPGPHKAKTKKIVFEDELLSQALLGAKKPIGAIPKGHKPRPHPVPDYELRRPKLQPGFGGSLR

SEQ ID NO: 73778 - protein, 459 aa, Homo sapiens
  MOD_RES (1)..(1): Any amino acid
XCSSTEGPWNGDGTPDAWTSGFLVAKPALISLLEQGEEPGALILQVAEQSVAKASLCTDSRMEAGIMESPLQRKLSRQAGLPGTVWGCLPWGHPVGGHPAPPHPHGGPEDGSDKPTHPRAREHSASPRVLQEDLGRPVGSSAPRYRCVCGKAFRYNSLLLRHQIIHTGAKPFQCTECGKAFKQSSILLRHQLIHTEEKPFQCGECGKAFRQSTQLAAHHRVHTRERPYACGECGKAFSRSSRLLQHQKFHTGEKPFACTECGKAFCRRFTLNEHGRIHSGERPYRCLRCGQRFIRGSSLLKHHRLHAQEGAQDGGVGQGALLGAAQRPQAGDPPHECPVCGRPFRHNSLLLLHLRLHTGEKPFECAECGKAFGRKSNLTLHQKIHTKEKPFACTECGKAFRRSYTLNEHYRLHSGERPYRCRACGRACSRLSTLIQHQKVHGREPGEDTEGRRAPCWAS

SEQ ID NO: 73779 - protein, 78 aa, Homo sapiens
MASSSGSKAEFIVGGKYKLVRKIGSGSFGDIYLAINITNGEEVAVKLESQKARHPQLLYESKLYKILQGGVGIPHIRM

SEQ ID NO: 73780 - protein, 151 aa, Homo sapiens
MVLKGIWGLLIILSVSSSWVGTTQIVKITYKNFYCPFFMTWFSTNWNIMFFPVYYSGHLATAQEKQSPMKKFRECSRIFGEDGLTLKLFLKRTAPFSILWTLTNYLYLLALKKLTATDVSALFCCNKAFVFLLSWIVLKDRFMGVRIAGKP

SEQ ID NO: 73781 - protein, 270 aa, Homo sapiens
MYFLTPILVAILCILVVWIFKNADRSMEKKKGEPRTRAEARPWVDEDLKDSSDLHQAEEDADEWQESEENVEHIPFSHNHYPEKEMVKRSQEFYELLNKRRSVRFISNEQVPMEVIDNVIRTAGTAPSGAHTEPWTFVVVKDPDVKHKIRKIIEEEEEINYMKRMGHRWVTDLKKLRTNWIKEYLDTAPILILIFKQVHGFAANGKKKVHYYNEISVSIACGILLAALQVNNGITMRHQTARHRHLIEGPGRSSEACSKLSSQGCPGFYC

SEQ ID NO: 73782 - protein, 94 aa, Homo sapiens
MAQVSINNDYSEWDLSTDAGERARLLQSPCVDTAPKSEWEASPGGLDRGTTSTLGAIFIVVNACLGAGLLNFPAAFSTAGGVAAGIALQMGMLV

SEQ ID NO: 73783 - protein, 120 aa, Homo sapiens
RWAPRTRPRWTSPCRCPLSSAHLVDEEFFQRVRALCYVISGQDQRKEEGMRAVLDALLASKQHWDRDLQVTLIPTFDSVAMHTWYAETHARHQALGITVLGSNSMVSMQDDAFPACKVEF

SEQ ID NO: 73784 - protein, 51 aa, Homo sapiens
MEFNPSDHPRASTIFLSKSQTDVREKRKSLFINHHPPGQIARKYSSCSTIF

SEQ ID NO: 73785 - protein, 469 aa, Homo sapiens
MLASPATETTVLMSQTEADLALRPPPPLGTAGQPRLGPPPRRARRFSGKAEPRPRSSRLSRRSSVDLGLLSSWSLPASPAPDPPDPPDSAGPGPARSPPPSSKEPPEGTWTEGAPVKAAEDSARPELPDSAVGPGSREPLRVPEAVALERRREQEEKEDMETQAVATSPDGRYLKFDIEIGRGSFKTVYRGLDTDTTVEVAWCELQTRKLSRAERQRFSEEVEMLKGLQHPNIVRFYDSWKSVLRGQVCIVLVTELMTSGTLKTYLRRFREMKPRVLQRWSRQILRGLHFLHSRVPPILHRDLKCDNVFITGPTGSVKIGDLGLATLKRASFAKSVIGTPEFMAPEMYEEKYDEAVDVYAFGMCMLEMATSEYPYSECQNAAQIYRKVTSVHHPGPPGPRLLPRGARCARGTSGGGRRREAGPQALAAHGGRAARGAPTGQPGHRVPVPAGPGRGRGGGTGDGGSGLGL

SEQ ID NO: 73786 - protein, 74 aa, Homo sapiens
MDMWTALLILQALLLPSLADGATPALRFVAVGDWGGVPNAPFHTAREMANAKEIARTVQILGADFILSLGDNFY

SEQ ID NO: 73787 - protein, 2198 aa, Homo sapiens
MVNENTRMYIPEENHQGSNYGSPRPAHANMNANAAAGLAPEHIPTPGAALSWQAAIDAARQAKLMGSAGNATISTVSSTQRKRQQYGKPKKQGSTTATRPPRALLCLTLKNPIRRACISIVEWKPFEIIILLTIFANCVALAIYIPFPEDDSNATNSNLERVEYLFLIIFTVEAFLKVIAYGLLFHPNAYLRNGWNLLDFIIVVVGLFSAILEQATKADGANALGGKGAGFDVKALRAFRVLRPLRLVSGVPSLQVVLNSIIKAMVPLLHIALLVLFVIIIYAIIGLELFMGKMHKTCYNQEGIADVPAEDDPSPCALETGHGRQCQNGTVCKPGWDGPKHGITNFDNFAFAMLTVFQCITMEGWTDVLYWMQDAMGYELPWVYFVSLVIFGSFFVLNLVLGVLSGEFSKEREKAKARGDFQKLREKQQLEEDLKGYLDWITQAEDIDPENEDEGMDEEKPRNMSMPTSETESVNTENVAGGDIEGENCGARLAHRISKSKFSRYWRRWNRFCRRKCRAAVKSNVFYWLVIFLVFLNTLTIASEHYNQPNWLTEVQDTANKALLALFTAEMLLKMYSLGLQAYFVSLFNRFDCFVVCGGILETILVETKIMSPLGISVLRCVRLLRIFKITRYWNSLSNLVASLLNSVRSIASLLLLLFLFIIIFSLLGMQLFGGKFNFDEMQTRRSTFDNFPQSLLTVFQILTGEDWNSVMYDGIMAYGGPSFPGMLVCIYFIILFICGNYILLNVFLAIAVDNLADAESLTSAQKEEEEEKERKKLARTASPEKKQELVEKPAVGESKEEKIELKSITADGESPPATKINMDDLQPNENEDKSPYPNPETTGEEDEEEPEMPVGPRPRPLSELHLKEKAVPMPEASAFFIFSSNNRFRLQCHRIVNDTIFTNLILFFILLSSISLAAEDPVQHTSFRNHILFYFDIVFTTIFTIEIALKMTAYGAFLHKGSFCRNYFNILDLLVVSVSLISFGIQSSAINVVKILRVLRVLRPLRAINRAKGLKHVVQCVFVAIRTIGNIVIVTTLLQFMFACIGVQLFKGKLYTCSDSSKQTEAECKGNYITYKDGEVDHPIIQPRSWENSKFDFDNVLAAMMALFTVSTFEGWPELLYRSIDSHTEDKGPIYNYRVEISIFFIIYIIIIAFFMMNIFVGFVIVTFQEQGEQEYKNCELDKNQRQCVEYALKARPLRRYIPKNQHQYKVWYVVNSTYFEYLMFVLILLNTICLAMQHYGQSCLFKIAMNILNMLFTGLFTVEMILKLIAFKPKHYFCDAWNTFDALIVVGSIVDIAITEVNNAEENSRISITFFRLFRVMRLVKLLSRGEGIRTLLWTFIKSFQALPYVALLIVMLFFIYAVIGMQVFGKIALNDTTEINRNNNFQTFPQAVLLLFRCATGEAWQDIMLACMPGKKCAPESEPSNSTEGETPCGSSFAVFYFISFYMLCAFLIINLFVAVIMDNFDYLTRDWSILGPHHLDEFKRIWAEYDPEAKGRIKHLDVVTLLRRIQPPLGFGKLCPHRVACKRLVSMNMPLNSDGTVMFNATLFALVRTALRIKTEGNLEQANEELRAIIKKIWKRTSMKLLDQVVPPAGDDEVTVGKFYATFLIQEYFRKFKKRKEQGLVGKPSQRNALSLQAGLRTLHDIGPEIRRAISGDLTAEEELDKAMKEAVSAASEDDIFRRAGGLFGNHVSYYQSDGRSAFPQTFTTQRPLHINKAGSSQGDTESPSHEKLVDSTFTPSSYSSTGSNANINNANNTALGRLPRPAGYPSTVSTVEGHGPPLSPAIRVQEVAWKLSSNRMHCCDMLDGGTFPPALGPRRAPPCLHQQLQGSLAGLREDTPCIVPGHASLCCSSRVGEWLPAGCTAPQHARCHSRESQAAMAGQEETSQDETYEVKMNHDTEACSEPSLLSTEMLSYQDDENRQLTLPEEDKRDIRQSPKRGFLRSASLGRRASFHLECLKRQKDRGGDISQKTVLPLHLVHHQALAVAGLSPLLQRSHSPASFPRPFATPPATPGSRGWPPQPVPTLRLEGVESSEKLNSSFPSIHCGSWAETTPGGGGSSAARRVRPVSLMVPSQAGAPGRQFHGSASSLVEAVLISEGLGQFAQDPKFIEVTTQELADACDMTIEEMESAADNILSGGAPQSPNGALLPFVNCRDAGQDRAGGEEDAGCVRARGRPSEEELQDSRVYVSSL

SEQ ID NO: 73788 - protein, 151 aa, Homo sapiens
MAALTLRGVRELLKRVDLATVPRRHRYKKKWAATEPKFPAVRLALQNFDMTYSVQFGDLWPSIRVSLLSEQKYGALVNNFAAWDHVSAKLEQLSAKDFVNEAISHWELQSEGGQSAAPSPASWACSPNLRCFTFDRGDISRFPPARQSCCQ

SEQ ID NO: 73789 - protein, 227 aa, Homo sapiens
  MOD_RES (1)..(1): Any amino acid
XEKKIIADIKKMAKQGQMDAVRIMAKDLVRTRRYVRKFVLMRANIQAVSLKIQTLKSNNSMAQAMKGVTKAMGTMNRQLKLPQIQKIMMEFERQAEIMDMKEEMMNDAIDDAMGDEEDEEESDAVVSQVLDELGLSLTDELSSECSKSWTPFPTQGPATAPSPPFPCITPLRCLTPPAQTPTFSADLPSTGGSLSVAAGGKKAEAAASALADADADLEERLKNLRRD

SEQ ID NO: 73790 - protein, 520 aa, Homo sapiens; identical to SEQ ID NO: 4446

SEQ ID NO: 73791 - protein, 623 aa, Homo sapiens
  MOD_RES (1)..(1): Any amino acid
XCGDPEKQRQDKMREEGLQLVSMIREGEAAGACPEEIFSALQYSGTEVPLQWLRSELPYVLEMVAELAGQQDPGLGAFSCQEARRAWLDRHGNLDEAVEECVRTRRRKVQELQSLGFGPEEGSLQALFQHGGDVSRALTELQRQRLEPFRQRLWDSGPEPTPSWDGPDKQSLVRRLLAVYALPSWGRAELALSLLQETPRNYELGDVVEAVRHSQDRAFLRRLLAQECAVCGWALPHNRMQALTSCECTICPDCFRQHFTIALKEKHITDMVCPACGRPDLTDDTQLLSYFSTLDIQLRESLEPDAYALFHKKLTEGVLMRDPKFLWCAQCSFGFIYEREQLEATCPQCHQTFCVRCKRQWEEQHRGRSCEDFQNWKRMNDPEYQAQGLAMYLQENGIDCPKCKFSYALARGGCMHFHCTQCRHQFCSGCYNAFYAKNGFLRGQDPNSLQLPLSHLGFCQKCPEPNCRVKKSLHGHHPRDCLFYLRDWTALRLQKLLQDNNVMFNTEPPAGARAVPGGGCRVIEQKEVPNGLRDEACGKETPAGYAGLCQAHYKEYLVSLINAHSLDPATLYEVEELETATERYLHVRPQPLAGEDPPAYQARLLQKLTEEVPLGQSIPRRRK

SEQ ID NO: 73792 - protein, 81 aa, Homo sapiens
MLVSGRRRLLTVLLQAQKWPFQPSRDMRLVQFRAPHLVGPHLGLETGNGGGVINLNAFDPTLPKTMTQFLEQGEATLSVAR

SEQ ID NO: 73793 - protein, 582 aa, Homo sapiens
MRYRLAWLLHPALPSTFRSVLGARLPPPERLCGFQKKTYSKMNNPAIKRIGNHITKSPEDKREYRGLELANGIKVLLISDPTTDKSSAALDVHIGSLSDPPNIAGLSHFCEHMLFLGTKKYPKENEYSQFLSEHAGSSNAFTSGEHTNYYFDVSHEHLEGALDRFAQFFLCPLFDESCKDREVNAVDSEHEKNVMNDAWRLFQLEKATGNPKHPFSKFGTGNKYTLETRPNQEGIDVRQELLKFHSAYYSSNLMAVCVLGRESLDDLTNLVVKLFSEVENKNVPLPEFPEHPFQEEHLKQLYKIVPIKDIRNLYVTFPIPDLQKYYKSNPGHYLGHLIGHEGPGSLLSELKSKGWVNTLVGGQKEGARGFMFFIINVDLTEEGLLHVEDIILHMFQYIQKLRAEGPQEWVFQECKDLNAVAFRFKDKERPRGYTSKIAGILHYYPLEEVLTAEYLLEEFRPDLIEMVLDKLRPENVRVAIVSKSFEGKTDRTEEWYGTQYKQEAIPDEVIKKWQNADLNGKFKLPTKNEFIPTNFEILPLEKEATPYPALIKDTAMSKLWFKQDDKFFLPKACLNFEFFSFQ

SEQ ID NO: 73794 - protein, 494 aa, Homo sapiens
MVPQDIYSSMPEAQPVETNSPKALLVLGELSNTDNDINESVFIWGISDKAAQRKTISVDEGLFHLQQEKQQQQQQQQRLEPVHRLGRGKGRLRLPHRLLFKDRHFTCSKIIGRRFACFAQRLSHRRKQSQCDLLNESTGQLPTTCSSAASNSINWNCRVKMTQQMQNLHLCQSKKHSAPSSPNAAKRLYRNLSEKLKGSHSSFDEAYFRTRTDRLSLRKTSVNFQGNEAMFEAVEQQDMDAVQILLYQYTPEELDLNTPNSEGLTPLDIAIMTNNVPIARILLRTGARESPHFVSLESRAMHLNTLVQEAQERVSELSAQVENEGFTLDNTEKEKQLKAWEWRYRLYRRMKTGFEHARAPEMPTNVCLMVTSSTSLTVSFQEPLSVNAAVVTRYKVEWSMSEDFSPLAGEIIMDNLQTLRCTITGLTMGQQYFVQVSAYNMKGWGPAQTTTPACASPSNWKDYDDREPRHKGQSEVLEGLLQQVRALHQHYSCR

SEQ ID NO: 73795 - protein, 182 aa, Homo sapiens
  MOD_RES (1)..(1): Any amino acid
XSTIIISGISKDHDAALMQGYTASVDSTHQEDAPSHPERAAASAPPEEAESAQASLAPKPQEDELDSWDLEKEPQAAAWSSQVLLDPDGDELSESSMSVLEPGTAKKHKGGILRKGAKLFFRRRHQQKDPGMSQSHNDLVFLEQPEGSRRKGITLTRILNKKLLSRHRNKNTMNGAPVEPCT

SEQ ID NO: 73796 - protein, 56 aa, Homo sapiens
MRFLRTDSASADPDNLKYSSSRDRGGSSSYGLQPSNSAVVSRQRHDDTRVHADIQN

SEQ ID NO: 73797 - protein, 112 aa, Homo sapiens
MSAHLQWMVVRNCSSFLIKRNKQTYSTEPNNLKARNSFRYNGLIHRKTVGVEPAADGKGVVVVIKRRSGRKSGNCHRGGHPWRQGVGLGTGFPLGRLVSSVSRARLSPCPHL

SEQ ID NO: 73798 - protein, 137 aa, Homo sapiens
MESGQPARRIAMAPLLEYERQLVLELLDTDGLVVCARGLGADRLLYHFLQLHCHPACLVLVLNTQPAEEEYFINQLKIEGVEHLPRRVTNEITSNSRYEVYTQGGVIFATSRILVVDFLTDRIPSDLITGRVLKIDR

SEQ ID NO: 73799 - protein, 109 aa, Homo sapiens
  MOD_RES (1)..(1): Any amino acid
XEKYFQDVEKVTQKLDGLQGKIMVLMNSAFLHLGQNNFAEAHRFFTEILRMDPRNAVQMLSASHPTGKEPSPKDAEEHPEGHRDSAEPGPARPMVPQRAPPGPALCAQP

SEQ ID NO: 73800 - protein, 188 aa, Homo sapiens
LEPATEYMARVRCADASHFWKWSEWSGQNFTTLEAAPSEAPDVWRIVSLEPGNHTVTLFWKPLSKLHANGKILFYNVVVENLDKPSSSELHSIPAPANSTKLILDRCSYQICVIANNSVGASPASVIVISADPENSVSTCFSGTVPSVWGEGDFSHGSGHFCPGDSSTYMGNYLKFIQVTATLTNSHH

SEQ ID NO: 73801 - protein, 93 aa, Homo sapiens
MSTEKVDQKEEAGEKEVCGDQIKGPDKEEEPPAAASHGQGWRPGGRAARNARPEPGARHPALPAMVNDPPVPALLWAQEVGQVLAGRARRLLL

SEQ ID NO: 73802 - protein, 289 aa, Homo sapiens
MSPALVDVHPEDTQLEENEERTMIDPTSKEDPKFKELVKVLLDWINDVLVEERIIVKQLEEDLYDGQVLQKLLEKLAGCKLNVAEVTQSEIGQKQKLQTVLEAVHDLLRPRGWALRWSVDSIHGKNLVAILHLLVSLAMHFRAPIRLPEHVTVQVVVVRKREGLLHSSHISEELTTTTEMMMGRFERDAFDTLFDHAPDKLSVVKKFADGVYLVLLMGLLEDYFVPLHHFYLTPESFDQKVHNVSFAFELMLDGGLKKPKARPEDVVNLDLKSTLRVLYNLFTKYKNVE

SEQ ID NO: 73803 - protein, 219 aa, Homo sapiens
MGSAKSVPVTPARPPPHNKHLARVADPRSPSAGILRTPIQVESSPQPGLPAGEQLEGLKHAQDSDPRSPTLGIARTPMKTSSGDPPSPLVKQLSEVFETEDSKSNLPPEPVLPPEAPLSSELDLPLGTQLSVEEQMPPWNQTEFPSKQVFSKEEARQPTETPVASQSSDKPSRDPETPRSSASSVPDFEEAVPGTCGHSHPVSCDSQAAHPVIVAREDA

SEQ ID NO: 73804 - protein, 175 aa, Homo sapiens
MRGLHPCNLGWLSYGALKGDGILIVVNTVGAALQTLYILAYLHYCPRKRVVLLQTATLLGVLLLGYGYFWLLVPNPEARLQQLGLFCSVFTISMYLSPLADLAKVIQTKSTQCLSYPLTIATLLTSASWCLYGFRLRDPYIMVSNFPGIVTSFIRFWLFWKYPQEQDRNYWLLQT

SEQ ID NO: 73805 - protein, 42 aa, Homo sapiens
MASLLKVDQEVKLKTASDTGGREGRGRTEETGRCCPQSPAFF

SEQ ID NO: 73806 - protein, 241 aa, Homo sapiens
MATDDKTSPTLDSANDLPRSPTSPSHLTHFKPLTPDQDEPPFKSAYSSFVNLFRFNKERAEGGQGEQQPLSGSWTSPQLPSRTQSVRSPTPYKKQLNEELQRRSSALADNSLQHPQENTDTRRKAEPTFGGHDPRTAVQLRSLSTVLKRLKEIMEGKSQDSDLKQYWMPDSQCKECYDCSEKFTTFRRRHHCRLCGQIFCSRCCNQEIPGKFMGYTGDLRACTYCRKIALSYAHSTDSNSI

SEQ ID NO: 73807 - protein, 212 aa, Homo sapiens
MDPAGRARGQGATAGGLLLRAAAAAKGLREDLWGAAALPWRSLSRIPKREGLGEEDTAVAGHELLLPNERSFQNAAKSNNLDLMEKLFEKKVNINVVNNHGLTVIHLAAWSGSLEVMLMLVKAGADQRAKNQDGMSALHFATQSNHVRIVEYLIQDLHLKDLNQPDEKGRKPFLLAAERGHVEMIEKLTFLNLHTSEKDKGGNTALHLAAKH

SEQ ID NO: 73808 - protein, 405 aa, Homo sapiens
MAAVVENVVKLLGEQYYKDAMEQCHNYNARLCAERSVRLPFLDSQTGVAQSNCYIWMEKRHRGPGLASGQLYSYPARRWRKKRRAHPPEDPRLSFPSIKPDTDQTLKKEGLISQDGSSLEALLRTDPLEKRGAPDPRVDDDSLGEFPVTNSRARKRILEPDDFLDDLDDEDYEEDTPKRRGKGKSKGKGVGSARKKLDASILEDRDKPYACDNSFKQKHTSKAPQRVCGKRYKNRPGLSYHYAHSHLAEEEGEDKEDSQPPTPVSQRSEEQKSKKGPDGLALPNNYCDFCLGDSKINKKTGQPEELVSCSDCGRSGHPSCLQFTPVMMAAVKTYRWQCIECKCCNICGTSENDDQLLFCDDCDRGYHMYCLTPSMSEPPEGSWSCHLCLDLLKEKASIYQNQNSS

SEQ ID NO: 73809 - protein, 261 aa, Homo sapiens
  MOD_RES (1)..(1): Any amino acid
XAFGAVHAQMHAAVGQLGRARAETEELIRERVRQVVAHVRAQERELLEAVDARYQRDYEEMASRLGRLDAVLQRIRTGSALVQRMKCYASDQEVLDMHGFLRQALCRLRQEEPQSLQAAVRTDGFDEFKVRLQDLSSCITQGKDAAVSKKASPEAASTPRDPIDVDLDVSNTTTAQKRKCSQTQCPRKVIKMESEEGKEARLARSSPEQPRPSTSKAVSPPHLDGPPSPRSPVIGSEVFLPNSNHVASGAGEAGRERNALW

SEQ ID NO: 73810 - protein, 90 aa, Homo sapiens
MTTFKEAVTFKDVAVVFTEEELGLLDPAQRKLYRDVMLENFRNLLSVGHQPFHQDTCHFLREEKFWMMGTATQREGNSGGKIQTELESVP

SEQ ID NO: 73811 - protein, 288 aa, Homo sapiens
MNEYPKKRKRKTLHPSRYSDSSGISRIADGFNGIFSDHCYSVCSMRQPDLKYFDNKDDDSDTETSNDLPKFADGIKARNRNQNYLVPSPVLRILDHTAFSTEKSADIVICDEECDSPESVNQQTQEESPIEVHTAEDVPIAVEVHAISEDYDIETENNSSESLQDQTDEEPPAKLCKILDKSQALNVTAQQKWPLLRANSSGLYKCELCEFNSKYFSDLKQHMILKHKRTDSNVCRVCKESFSTNMLLIEHAKLHEEDPYICKYCDYKTVIFENLSQHIADTHFSDHL

SEQ ID NO: 73812 - protein, 142 aa, Homo sapiens
MATSHRVAKLVASSLQTPVNPITGARVAQYEREDPLKALAAAEAILEDEEEEKVAQPAGASADLNTSFSGVDEHAPISYEDFVNFPDIHHSNEEYFKKVEELKAAHIETMAKLEKMYQDKLHLKEVQPVVIREDSLSDSSRA

SEQ ID NO: 73813 - protein, 84 aa, Homo sapiens
MALVRGGWLWRQSSILRRWKRNWFALWLDGTLGYYHDETAQDEEDRVLIHFNVRDIKIGPECHDVQPPEGRSRDGLLTVNLREG

SEQ ID NO: 73814 - protein, 23 aa, Homo sapiens
  MOD_RES (1)..(1): Any amino acid
XKEEQKSNTAGSQSQIRKPRLRS

SEQ ID NO: 73815 - protein, 218 aa, Homo sapiens
  MOD_RES (1)..(1): Any amino acid
XPFKKGAAFELVFIVLAEHYKVVVNGNPFYEYGHRLPLQMVTHLQVDGDLQLQSINFIGGQPLRPQGPPMMPPYPTMEGPPTFNPPVPYFGRLQGGLTARRTIIIKGYVPPTGKSFAINFKVGSSGDIALHINPRMGNGTVVRNSLLNGSWGSEEKKITHNPFGPGQFFDLSIRCGLDRFKVYANGQHLFDFAHRLSAFQRVDTLEIQGDVTLSYVQI

SEQ ID NO: 73816 - protein, 547 aa, Homo sapiens
MDVLQRTPGSNAEESSILETVTAVAAGKPLSCPNHDGNVLQSQLDTLLQGQESIKSCSNFTAQALNHGTETEVLLVKKQMSEKLNELADQDFPLHPRENDQLDFIVETEGLKKSIHNLGTILTTNAVASETVATGEGLRQTIIGQPMSVTITTKDKDGELCKTGNAYLTAELSTPDGSVADGEILDNKNGTYEFLYTVQKEGDFTLSLRLYDQHIRGSPFKLKVIRSADVSPTTEGVKRRVKSPGSGHVKQKAVKRPASMYSTGKRKENPIEDDLIFRVGTKGRNKGEFTNLQGVAASTNGKILIADSNNQCVQIFSNDGQFKSRFGIRGRSPGQLQRPTGVAVHPSGDIIIADYDNKWVSIFSSDGKFKTKIGSGKLMGPKGVSVDRNGHIIVVDNKACCVFIFQPNGKIVTRFGSRGNGDRQFAGPHFAAVNSNNEIIITDFHNHSVKVFNQEGEFMLKFGSNGEGNGQFNAPTGVAVDSNGNIIVADWGNSRIQVFDGSGSFLSYINTSADPLYGPQGLALTSDGHVVVADSGNHCFKVYRYLQ

SEQ ID NO: 73817 - protein, 155 aa, Homo sapiens
MESCCTNQAGLELLASRDPLTTLASQITRITGMGIFVSFLRSETQHRGSAPHSESDLPEQEEEILGSDDDEQEDPNDYCKGGYHLVKIGDLFNGRYHVIRKLGWGHFSTVWLSWDIQGKKFVAMKVVKSAEHYTETALDEIRLLKSVRNSDPNDP

SEQ ID NO: 73818 - protein, 180 aa, Homo sapiens
MDNRFATAFVIACVLSLISTIYMAASIGTDFWYEYRSPVQENSSDLNKSIWDEFISDEADEKTYNDALFRYNGTVGLWRRCITIPKNMHWYSPPERTESFDVVTKCVSFTLTEQFMEKFVDPGNHNSGIDLLRTYLWRCQFLLPFVSLGLMCFGALIGLCACICRSLYPTIATGILHLLA

SEQ ID NO: 73819 - protein, 826 aa, Homo sapiens
MASQVASPSTSLHTTSSSTTLSTPALSPSSPSQLSPDDLELLAKLEEQNRLLETDSKSLRSVNGSRRNSGSSLVSSSSASSNLSHLEEDSWILWGRIVNEWEDVRKKKEKQVKELVHKGIPHHFRAIVWQLLCSAQSMPIKDQYSELLKMTSPCEKLIRRDIARTYPEHNFFKEKDSLGQEVLFNVMKAYSLVDREVGYCQGSAFIVGLLLMQMPEEEAFCVFVKLMQDYRLRELFKPSMAELGLCMYQFECMIQEHLPELFVHFQSQSFHTSMYASSWFLTIFLTTFPLPIATRIFDIFMSEGLEIVFRVGLALLQMNQAELMQLDMEGMLQHFQKVIPHQFDGVPDKLIQAAYQVKYNSKKMKKLEKEYTTIKTKEMEEQVEIKRLRTENRLLKQRIETLEKESASLADRLIQGQVTRAQEAEENYLIKRELATIKQQSDEASAKLEQAENTIRKLQHQQQWHKCSSNYNEDFVLQLEKELVQARLSEAESQCALKEMQDKVLDIEKRNNSLPDENNIARLQEELIAVKLREAEAIMGLKELRQQVKDLEEHWQRHLARTTGRWKDPPKKNAMNELQDELMTIRLREAETQAEIREIKQRMMEMETQNQINSNHLRRAEQEVISLQEKVQYLSAQNKGLLTQLSEAKRKQAEIECKNKEEVMAVRLREADSIAAVAELRQHIAELEIQKEEGKLQGQLNKSDSNQYIGELKDQIAELNHELRCLKGQRGFSGQPPFDGIHIVNHLIGDDESFHSSDEDFIDNSLQETGVGFPLHGKSGSMSLDPAVADGSESETEDSVLETRESNQVVQKERPPRRRESYSTTV

SEQ ID NO: 73820 - protein, 1714 aa, Homo sapiens; identical to SEQ ID NO: 66294

SEQ ID NO: 73821 - protein, 65 aa, Homo sapiens
MVMAEQSLLGGDMDMGNPGTLSPTKPGSQYYQYSSNNPRRRPLHSSAMEVQTKKVRKVPPGLPSS

SEQ ID NO: 73822 - protein, 163 aa, Homo sapiens
MSFSLAPFLSPQSWPPPLPPAQSEIMKVVNLKQAILQAWKERWSDYQWAINMKKFFPKGATWDILNLADALLEQAMIGPSPNPLILSYLKYAISSQMVSYSSVLTAISKFDDFSRDLCVQALLDIMDMFCDRLSCHGKAEECIGLCRALLSALHWLLRCTAAS

SEQ ID NO: 73823 - protein, 109 aa, Homo sapiens
MNGKRPAEPGPARVGKKGKKEVMAEFSDAVTEETLKKQVAEAWSRRTPFSHEVIVMDMDPFLHCVIPNFIQSQDFLEGLQKELMNLDFHEKYNDLYKFQQEIPFFSLFS

SEQ ID NO: 73824 - protein, 194 aa, Homo sapiens
MIGNYMWDPTTNKSFDIGVNKDSLMPLWWNGSEPLWVTLTKAKRKVYMYYWPGCEVEILGVRPTYCLEYKNVPTDINFANAVSDALDSFKSGRADLAAIYHERIDVEGHHYGPASPQRKDALKAVDTVLKYMTKWIQERGLQDRLNVIIFSDHGMTDIFWMDKVIELNKYISLNDLQQVKDRGPVVSLWPAPGK

SEQ ID NO: 73825 - protein, 199 aa, Homo sapiens
MYSIICFVGLLGNGLVVLTYIYFKRLKTMTDTYLLNLAVADILFLLTLPFWAYSAAKSWVFGVHFCKLIFAIYKMSFFSGMLLLLCISIDRYVAIVQAVSAHRHRARVLLISKLSCVGIWILATVLSIPELLYSDLQRSSSEQAMRCSLITEHVEAFITIQVAQMVIGFLVPLLAMSFCYLVIIRTLLQARNFERNKAI

SEQ ID NO: 73826 - protein, 211 aa, Homo sapiens
MPASMPGTLPNPTMPGSSAVLMPMERQMSVNSSIMGMQGPNLSNPCASPQVQPMHSEAKMRLKAALTHHPAAMSNGNMNTMGHMMEMMGSRQDQTPHHHMHSHPHQHQTLPPHHPYPHQHQHPAHHPHPQPHHQQNHPHHHSHSHLHAHPAHHQTSPHPPLHTGNQAQVSPATQQMQPTQTIQPPQPTGGRRRRVVDEDPDERRRKFLERN

SEQ ID NO: 73827 - protein, 95 aa, Homo sapiens
MKPDRDTLDEYFEYDAEEFLVSLALLITEGRTPECSVKGRTESFHCPPAQSCYPVTTKHECSDKLAQCRQARRTRSEVTLLWKNNLPIMVEMMLL

SEQ ID NO: 73828 - protein, 519 aa, Homo sapiens
MMEGLKKRTRKAFGIRKKEKDTDSTGSPDRDGIKKSNGAPNGFYAEIDWERYNSPELDEEGYSIRPEEPGSTKGKHFYSSSESEEEEESHKKFNIKIKPLQSKDILKNAATVDELKASIGNIALSPSPVGAIKRNLSSEEVARPRRSTPTPELISKKPPDDTTALAPLFGPPLESAFDEQKTEVLLDQPEIWGSGQPINPSMESPKLTRPFPTGTPPPLPPKNVPATPPRTGSPLTIGPGNDQSATEVKIEKLPSINDLDSIFGPVLSPKSVAVNAEEKWVHFSDTSPEHVTPELTPREKVVSPPATPDNPADSPAPGPLGPPGPTGPPGPPGPPRNVLSPLNLEEVQKKVAEQTFIKDDYLETISSPKDFGLGQRATPPPPPPPTYRTVVSSPGPGSGPGPGTTSGASSPARPATPLVPCRSTTPPPPPPRPPSRPKLPPGKPGVGDVSRPFSPPIHSSSPPPIAPLARAESTSSISSTNSLSAATTPTVVSEDDVFYDKLPSFERRCETPAGMVLAK

SEQ ID NO: 73829 - protein, 631 aa, Homo sapiens
MAPPLSLGLPGHGAPQTEPTKVEVKPVPASPHPKHKVSALVQSPQMKALACVSAEGVTVEEPASERLKPETQETRPREKPPLPATKAVPTPRQSTVPKLPAVHPARLRKLSFLPTPRTQGSEDVVQAFISEIGIEASDLSSLLEQFEKSEAKKECPPPAPADSLAVGNSGGVDIPQEKRPLDRLQAPELANVAGLTPPATPPHQLWKPLAAVSLLAKAKSPKSTAQEGTLKPEGVTEAKHPAAVRLQEGVHGPSRVHVGSGDHDYCVRSRTPPKKMPALVIPEVGSRWNVKRHQDITIKPVLSLGPAAPPPPCIAASREPLDHRTSSEQADPSAPCLAPSSLLSPEASPCRNDMNTRTPPEPSAKQRSMRCYRKACRSASPSSQGWQGRRGRNSRSVSSGSNRTSEASSSSSSSSSSSRSRSRSLSPPHKRWRRSSCSSSGRSRRCSSSSSSSSSSSSSSSSSSSSRSRSRSPSPRRRSDRRRRYSSYRSHDHYQRQRVLQKERAIEERRVVFIGKIPGRMTRSELKQRFSVFGEIEECTIHFRVQGDNYGFVTYRYAEEAFAAIESGHKLRQADEQPFDLCFGGRRQFCKRSYSDLDSNREDFDPAPVKSKFDSLDFDTLLKQAQKNLRR

SEQ ID NO: 73830 - protein, 368 aa, Homo sapiens
MNPAAEAEFNILLATDSYKVTHYKQYPPNTSKVYSYFECREKKTENSKLRKVKYEETVFYGLQYILNKYLKGKVVTKEKIQEAKDVYKEHFQDDVFNEKGWNYILEKYDGHLPIEIKAVPEGFVIPRGNVLFTVENTDPECYWLTNWIETILVQSWYPITVATNSREQKKILAKYLLETSGNLDGLEYKLHDFGYRGVSSQETAGIGASAHLVNFKGTDTVAGLALIKKYYGTKDPVPGYSVPAAEHSTITAWGKDHEKDAFEHIVTQFSSVPVSVVSDSYDIYNACEKIWGEDLRHLIVSRSTQAPLIIRPDSGNPLDTVLKVLEILGKKFPVTENSKGYKLLPPYLRVIQGDGVDINTLQEVCVLY

SEQ ID NO: 73831 - protein, 98 aa, Homo sapiens
MIHTNLKKKFSCCVLVFLLFAVICVWKEKKKGSYYDSFKLQTKEFQVLKSLGKLAMGSDSQSVSSSSTQDPHRGRQTLGSLRGLAKAKPEASFQVWNK

SEQ ID NO: 73832 - protein, 148 aa, Homo sapiens
MSMAVETFGFFMATVGLLMLGVTLPNSYWRVSTVHGNVITTNTIFENLWFSCATDSLGVYNCWEFPSMLALSGICGMVAISWYAFNITRDFFDPLYPGTKYELGPALYLGWSASLISILGGLCLCSACCCGSDEDPAASARRPYQAPV

SEQ ID NO: 73833 - protein, 75 aa, Homo sapiens
MEALGDLEGPRAPGGDDPAGSAGETPGWLSREQVFVLISAASVNLGSMMCYSILGPFFPKEENVECQGSISHLCC

SEQ ID NO: 73834 - protein, 318 aa, Homo sapiens
MDVDEKNQVLTTNIWLQMSWTDHYLQWNVSEYPGVKTVRFPDGQIWKPDILLYNSADERFDATFHTNVLVNSSGHCQYLPPGIFKSSCYIDVRWFPFDVQHCKLKFGSWSYGGWSLDLQMQEADISGYIPNGEWDLVGIPGKRSERFYECCKEPYPDVTFTVTMRRRTLYYGLNLLIPCVLISALALLVFLLPADSGEKISLGITVLLSLTVFMLLVAEIMPATSDSVPLIDQSHPSELVRVVPANEEARGGQGAPGLPAQAAALQPGQCGDERRGAAARQQREPAVHRLPRPGRRALCPDPRLWGSVWPHGLLPHAR

SEQ ID NO: 73835 - protein, 117 aa, Homo sapiens
MDLCHPEPAELSSGETEELQRIKWHRKQLLEDIQKLKDEIADVFAQIDCFESAEESRMAQKEKELCIGRKKFNMDPAKGIQYFIEHKLLTPDVQDIARFLYKGEGLNKTAIGTYLGE

SEQ ID NO: 73836 - protein, 101 aa, Homo sapiens
MEEPTAVEGQVQLPSPHQGSLRKAVAAALALDGESTMGHRKKKRKESRPESIIIYRSDNEKTDEEPGESEGGDQPKEEEGDDFLDYPVDDDMWNLPLDSRY

SEQ ID NO: 73837 - protein, 87 aa, Homo sapiens
MRPLLCALTGLALLRAAGSLAAAEPFSPPRGDSAQSTACDRHMAVQRRLDVMEEMASEPWSWSPAVGGGAPARQRPQNQPCPLDFLP

SEQ ID NO: 73838 - protein, 68 aa, Homo sapiens
MKIATVSVLLPLALCLIQDAASKNEDQDKKFFQSLDGIMFINKCATCKMILEKEAKSQKRARHLARAP

SEQ ID NO: 73839 - protein, 129 aa, Homo sapiens
MHEQIENEYIIGLLQQRSQTIYNVHSDNKLSEMLSLFEKGLKNVKNEYEQLNYAKQLKERLEAFTRDFLPHMKEEEEVFQPMLMEYFTYEELKDIKKKVIAQHCSQKDTAELLRGLSLWNHAEERQKFF

SEQ ID NO: 73840 - protein, 527 aa, Homo sapiens
MLTFMASDSEEEVCDERTSLMSAESPTPRSCQEGRQGPEDGENTAQWRSQENEEDGEEDPDRYVCSGVPGRPPGLEEELTLKYGAKHVIMLFVPVTLCMIVVVATIKSVRFYTEKNGQLIYTPFTEDTPSVGQRLLNSVLNTLIMISVIVVMTIFLVVLYKYRCYKFIHGWLIMSSLMLLFLFTYIYLGEVLKTYNVAMDYPTLLLTVWNFGAVGMVCIHWKGPLVLQQAYLIMISALMALVFIKYLPEWSAWVILGAISVYDLVAVLCPKGPLRMLVETAQERNEPIFPALIYSSAMVWTVGMAKLDPSSQGALQLPYDPEMEEDSYDSFGEPSYPEVFEPPLTGYPGEELEEEEERGVKLGLGDFIFYSVLVGKAAATGSGDWNTTLACFVAILIFPEPQDRPKRAVLAKQMAEWSWPEASVRGDSKRAPDSRWRHCRMERGMPADRCQRRGLAVLPRLDLNSWPEVILPPWPPKVLGLQMASHSCCPGWSAMVRFGSLWPLPPGFKRFSCLSLPYQFNFFRFHV

SEQ ID NO: 73841 - protein, 22 aa, Homo sapiens
MAPIGLKAVVGERRGLIRILNP

SEQ ID NO: 73842 - protein, 76 aa, Homo sapiens
MWKSVVGHDVSVSVETQGDDWDTDPDFVNDISEKEQRWGAKTIEGSGRTEHIKIDEPWSCGFFQHPPAEEQSIRGA

SEQ ID NO: 73843 - protein, 311 aa, Homo sapiens
  MOD_RES (1)..(1): Any amino acid
XGPNGIPSDTLHPIIAPTGVTFHPDQYKGEKGSEGEPGIRGISLKGEEGIMGFPGLRGYPGLSGEKGSPGQKGSRGLDGYQGPDGPRGPKGEAGDPGPPGLPAYSPHPSLAKGARGDPGFPGAQGEPGSQGEPGDPGLPGPPGLSIGDGDQRRGLPGEMGPKGFIGDPGIPALYGGPPGPDGKRGPPGPPGLPGPPGPDGFLFGLKGAKGRAGFPGLPGSPGARGPKGWKGDAGECRCTEGDEAIKGLPGLPGPKGFAGINGEPGRKGDRGDPGQHGLPGFPGLKVRSNFIMKLARHSEASPGVPFLPFIS

SEQ ID NO: 73844 - protein, 152 aa, Homo sapiens
MCVCLNKEVTCKREKCPVLSRDCALAIKQRGACCEQCKGCTYEGNTYNSSFKWQSPAEPCVLRQCQEGVVTESGVRCVVHCKNPLEHLGMCCPTCPGCVFEGVQYQEGEEFQPEGSKCTKCSCTFSAVPSSALKGQLMTLIMFPISAFRLIE

SEQ ID NO: 73845 - protein, 71 aa, Homo sapiens
MNKAPQSTGPPPAPSPGLPQPAFPPGQTAPVVFSTPQATQMNTPSQPRQLAPTIQPKGCSSFPLAWPPPQF

SEQ ID NO: 73846 - protein, 116 aa, Homo sapiens
GDMWRLKKSLVSTCAYITQKVEFAGIRAQAGELWVKNEKVMCGYISEDTRVVFRSTSAMVYIFIQMSCEMWDFDIYGDLYFEKAVNGFLADLFTKWKVHFFLHTKSHYVNITQSDF

SEQ ID NO: 73847 - protein, 14 aa, Homo sapiens
ADLHIFDCKYRNYI

SEQ ID NO: 73848 - protein, 145 aa, Homo sapiens
  MOD_RES (1)..(1): Any amino acid
XGETLGIIGLGRVGQAVALRAKAFGFNVLFYDPYLSDGVERALGLQRVSTLQDLLFHSDCVTLHCGLNEHNHHLINDFTVKQMRQGAFLVNTARGGLVDEKALAQALKEGRIRGAALDVHESEPFRCPHGQCRPPALPCPPSCRP

SEQ ID NO: 73849 - protein, 138 aa, Homo sapiens
  MOD_RES (1)..(1): Any amino acid
XGDLRRIKNAIGVARKVLEHTTHTLLVGESATTFAQSMGFINEDLSTTASQALHSDWLARNCQPNYWRNVIPDPSKYCGPYKPPGILKQDIPIHKETEDDRGHDTIGMVVIHKTGHIAAGTSTNGDSPIPGAGAYADD

SEQ ID NO: 73850 - protein, 280 aa, Homo sapiens
  MOD_RES (1)..(1): Any amino acid
XISVPGPPGPPGPPGPPGTMGASSGVRLWATRQAMLGQVHEVPEGWLIFVAEQEELYVRVQNGFRKVQDNEVAALQPPVVQLHDSNPYPRREHPHPTARPWRADDILASPPRLPEPQPYPGAPHHSSYVHLRPARPTSPPAHSHRDFQPVLHLVALNSPLSGGMRGIRGADFQCFQQARAVGLAGTFRAFLSSRLQDLYSIVRRADRAAVPIVNLKDELLFPSWEALFSGSEGPLKPGARIFSFDGKDVLRHPTWPQKSVWHGSDPNGRRLTESYCETWR

SEQ ID NO: 73851 - protein, 71 aa, Homo sapiens
  MOD_RES (1)..(1): Any amino acid
XDDDHPDSIEYGLGYDCPATEGIFDYAAAIGGATITAAQCLIDGMCKVAINWSGGWHHAKKLLENRWRLVT

SEQ ID NO: 73852 - protein, 1690 aa, Homo sapiens
MLSATPLYGNVHSWMNSERVRMCGASEDRKILVNDGDASKARLELREENPLNHNVVDASTAHRIDGLAALSMDRTGLIREGLRVPGNIVYSSLCGLGSEKGREAATSTLGGLGFSSERNPEMQFKPNTPETVEASAVSGKPPNGFSAIYKTPPGIQKSAVATAEALGLDRPASDKQSPLNINGASYLRLPWVNPYMEGATPAIYPFLDSPNKYSLNMYKALLPQQSYSLAQPLYSPVCTNGERFLYLPPPHYVGPHIPSSLASPMRLSTPSASPAIPPLVHCADKSLPWKMGVSPGNPVDSHAYPHIQNSKQPRVPSAKAVTSGLPGDTALLLPPSPRPSPRVHLPTQPAADTYSEFHKHYARISTSPSVALSKPYMTVSSEFPAARLSNGKYPKAPEGGEGAQPVPGHARKTAVQDRKDGSSPPLLEKQTVTKDVTDKPLDLSSKVVDVDASKADHMKKMAPTVLVHSRAGSGLVLSGSEIPKETLSPPGNGCAIYRSEIISTAPSSWVVPGPSPNEENNGKSMSLKNKALDWAIPQQRSSSCPRMGGTDAVITNVSGSVSSAGRPASASPAPNANADGTKTSRSSVETTPSVIQHVGQPPATPAKHSSSTSSKGAKASNPEPSFKANENGLPPSSIFLSPNEAFRSPPIPYPRSYLPYPAPEGIAVSPLSLHGKGPVYPHPVLLPNGSLFPGHLAPKPGLPYGLPTGRPEFVTYQDALGLGMVHPMLIPHTPIEITKEEKPERRSRSHERARYEDPTLRNRFSEILETSSTKLHPDVPTDKNLKPNPNWNQGKTVVKSDKLVYVDLLREEPDAKTDTNVSKPSFAAESVGQSAEPPKPSVEPALQQHRDFIALREELGRISDFHETYTFKQPVFTVSKDSVLAGTNKENLGLPVSTPFLEPPLGSDGPAVTFGKTQEDPKPFCVGSAPPSVDVTPTYTKDGADEAESNDGKVLKPKPSKLAKRIANSAGYVGDRFKCVTTELYADSSQLSREQRALQMEGLQEDSILCLPAAYCERAMMRFSELEMKEREGGHPATKDSEMCKFSPADWERLKGNQDKKPKSVTLEEAIAEQNESERCEYSVGNKHRDPFEAPEDKDLPVEKYFVERQPVSEPPADQVASDMPHSPTLRVDRKRKVSGDSSHTETTAEEVPEDPLLKAKRRRVSKGLHPKKQRHLLHLRERWEQQVSAADGKPGRQSRKEVTQATQPEAIPQGTNITEEKPGRKRAEAKGNRSWSEESLKPSDNEQGLPVFSGSPPMKSLSSTSAGGKKQAQPSCAPASRPPAKQQKIKENQKTDVLCADEEEDCQAASLLQKYTDNSEKPSGKRLCKTKHLIPQESRRGLPLTGEYYVENADGKVTVRRFRKRPEPSSDYDLSPAKQEPKPFDRLQQLLPASQSTQLPCSSSPQETTQSRPMPPEARRLIVNKNAGETLLQRAARLGYEEVVLYCLENKICDVNHRDNAGYCALHEACARGWLNIVRHLLEYGADVNCSAQDGTRPLHDAVENDHLEIVRLLLSYGADPTLATYSGRTIMKMTHSELMEKFLTDYLNDLQGRNDDDASGTWDFYGSSVCEPDDESGYDVLANPPGPEDQDDDDDAYSDVFEFEFSETPLLPCYNIQVSVAQGPRNWLLLSDVLKKLKMSSRIFRCNFPNVEIVTIAEAEFYRQVSASLLFSCSKDLEAFNPERSPLK

SEQ ID NO: 73853 - protein, 255 aa, Homo sapiens
MAPPPPPLAASTPLLHGEFGSYPARGPRFALTLTSQALHIQRLRPKPEARPRGGLVPLAEVSGCCTLRSRSPSDSAAYFCIYTYPRGRRGARRRATRTFRADGAATYEENRAEAQRWATALTCLLRGLPLPGDGEITPDLLPRPPRLLLLVNPFGGRGLAWQWCKNHVLPMISEAGLSFNLIQTERQNHARELVQGLSLSEWDGIVTVSGDGLLHEVLNGLLDRPDWEEAVKMPVGILPCGSGNALAGAVNQHGG

SEQ ID NO: 73854 - protein, 191 aa, Homo sapiens
MAAVGAGGSTAAPGPGAVSAGALEPGTASAAHRRLKYISLAVLVVQNASLILSIRYARTLPGDRFFATTAVVMAEVLKGNVKHLVLFLHEAVLVQYVDTLKLAVPSLIYTLQNNLQYVAISNLPAATFQVTYQLKILTTALFSVLMLNRSLSRLQWASLLLLFTGVAIVQAQQAGGGGPRPLDQNPGAGLA

SEQ ID NO: 73855 - protein, 1198 aa, Homo sapiens
MRTTKVYKLVIHKKGFGGSDDELVVNPKVFPHIKLGDIVEIAHPNDEYSPLLLQVKSLKEDLQKETISVDQTVTQVFRLRPYQDVYVNVVDPKDVTLDLVELTFKDQYIGRGDMWRLKKSLVSTCAYITQKVEFAGIRAQAGELWVKNEKVMCGYISEDTRVVFRSTSAMVYIFIQMSCEMWDFDIYGDLYFEKAVNGFLADLFTKWKEKNCSHEVTVVLFSRTFYDAKSVDEFPEINRASIRQDHKGRFYEDFYKVVVQNERREEWTSLLVTIKKLFIQYPVLVRLEQAEGFPQGDNSTSAQGNYLEAINLSFNVFDKHYINRNFDRTGQMSVVITPGVGVFEVDRLLMILTKQRMIDNGIGVDLVCMGEQPLHAVPLFKLHNRSAPRDSRLGDDYNIPHWINHSFYTSKSQLFCNSFTPRIKLAGKKPASEKAKNGRDTSLGSPKESENALPIQVDYDAYDAQVFRLPGPSRAQCLTTCRSVRERESHSRKSASSCDVSSSPSLPSRTLPTEEVRSQASDDSSLGKSANILMIPHPHLHQYEVSSSLGYTSTRDVLENMMEPPQRDSSAPGRFHVGSAESMLHVRPGGYTPQRALINPFAPSRMPMKLTSNRRRWMHTFPVGPSGEAIQIHHQTRQNMAELQGSGQRDPTHSSAELLELAYHEAAGRHSNSRQPGDGMSFLNFSGTEELSVGLLSNSGAGMNPRTQNKDSLEDSVSTSPDPILTLSAPPVVPGFCCTVGVDWKSLTTPACLPLTTDYFPDRQGLQNDYTEGCYDLLPEADIDRRDEDGVQMTAQQVFEEFICQRLMQGYQIIVQPKTQKPNPAVPPPLSSSPLYSRGLVSRNRPEEEDQYWLSMGRTFHKVTLKDKMITVTRYLPKYPYESAQIHYTYSLCPSHSDSEFVSCWVEFSHERLEEYKWNYLDQYICSAGSEDFSLIESLKFWRTRFLLLPACVTATKRITEGEAHCDIYGDRPRADEDEWQLLDGFVRFVEGLNRIRRRHRSDRMMRKGTAMKGLQMTGPISTHSLESTAPPVGKKGTSALSALLEMEASQKCLGEQQAAVHGGKSSAQSAESSSVAMTPTYMDSPRKDGAFFMEFVRSPRTASSAFYPQVSVDQTATPMLDGTSLGICTGQSMDRGNSQTFGNSQNIGEQGYSSTNSSDSRKWRLFLIFVLLTAYVPSCFADLTPCVTALSSWWQAP

SEQ ID NO: 73856 - protein, 674 aa, Homo sapiens
MDRSKRNSIAGFPPRVERLEEFEGGGGGEGNVSQVGRVWPSSYRALISAFSRLTRLDDFTCEKIGSGFFSEVFKVRHRASGQVMALKMNTLSSNRANMLKEVQLMNRLSHPNILRFMGVCVHQGQLHALTEYINSGNLEQLLDSNLHLPWTVRVKLAYDIAVGLSYLHFKGIFHRDLTSKAIMRKPRAAVGSGHRKQAASQEGRQKHAKNNSQAKPSACDACAGMIAECPGAPAGLARQPEEVVLQASVSSYHLFRDVAEVTAFRGSLLSWYDQEKRDLPWRRRAEDEMDLDRRAYAVWVSEVMLQQTQVATVINYYTGWMQKWPTLQDLASASLEEVNQLWAGLGYYSRGRRLQEGARKVVEELGGHMPRTAETLQQLLPGVGRYTAGAIASIAFGQATGVVDGNVARVLCRVRAIGADPSSTLVSQQLWGLAQQLVDPARPGDFNQAAMELGATVCTPQRPLCSQCPVESLCRARQRVEQEQLLASGSLSGSPDVEECAPNTGQCHLCLPPSEPWDQTLGVVNFPRKASRKPPREESSATCVLEQPGALGAQILLVQRPNSGLLAGLWEFPSVTWEPSEQLQRKALLQELQRWAGPLPATHLRHLGEVVHTFSHIKLTYQVYGLALEGQTPVTTVPPGARWLTQEEFHTAAVSTAMKKVFRVYQGQQPGTCM

SEQ ID NO: 73857 - protein, 177 aa, Homo sapiens
MAQETNHSQVPMLCSTGCGFYGNPRTNGMCSVCYKEHLQRQNSSNGRISPPATSVSSLSESLPVQCTDGSVPEAQSALDSTSSSMQPSPVSNQSLLSESVASSQLDSTSVDKAVPETEDVQASVSDTAQQPSEEQSKSLEKPKQKKNRCFMCRKKVGLTGKDLNQMFKIKMMFYNNA

SEQ ID NO: 73858 - protein, 29 aa, Homo sapiens
MPPKKDVPVKKPAGPSISKPAAKPAAAGA

SEQ ID NO: 73859 - protein, 37 aa, Homo sapiens
MKKVKKKRASDSRRPAFLLLCHLPLQLRLLASSGAMP

SEQ ID NO: 73860 - protein, 39 aa, Homo sapiens
MPEGPELHLASQFVNEACRALVFGGCVEKSSVSRNPEVP

SEQ ID NO: 73861 - protein, 17 aa, Homo sapiens
MSSVAVLTQESFAEHRS

SEQ ID NO: 73862 - protein, 368 aa, Homo sapiens
MSYFGKFYLVGLDARKAADWLFSADVSRPPGSTVYTCMLNHRGGTESDLTVSRLAPSHQASPLAPAFEGDGYYLAMGGAVAQHNWSHITTVLQDQKSQCQLIDSSEDLGMISIQGPASRAILQEVLDADLSNEAFPFSTHKLLRAAGHLVRAMRLSFVGELGWELHIPKASCVPVYRAVMAAGAKHGLINAGYRAIDSLSIEKGYRHWHADLRPDDSPLEAGLAFTCKLKSPVPFLGREALEQQRAAGLRRRLVCFTMEEPLWTRPHPAVSGAPAFSTASSSKVPMFGLEAIWRNGQVVGHVRRADFGFAIDKTIAYGYIHDPSGGPVSLDFVKSGDYALERMGVTYGAQAHLKSPFDPNNKRVKGIY

SEQ ID NO: 73863 - protein, 75 aa, Homo sapiens
MNTDSGGCARKRAAMSVTLTSVKRVQSSPNLLAAGRDSQSPDSAKGFRSVRPNLQDKRSPTQSQITVNGNSGGAV

SEQ ID NO: 73864 - protein, 579 aa, Homo sapiens
MGDRCQEECPFGSFGFQCSQHCDCHNGGQCSPTTGACECEPGYKGPRCQERLCPEGLHGPGCTLPCPCDADNTISCHPVTGACTCQPGWSGHHCNESCPVGYYGDGCQLPCTCQNGADCHSITGGCTCAPGFMGEVCAVSCAAGTYGPNCSSICSCNNGGTCSPVDGSCTCKEGWQGLDCTLPCPSGTWGLNCNESCTCANGAACSPIDGSCSCTPGWLGDTCELPCPDGTFGLNCSEHCDCSHADGCDPVTGHCCCLAGWTGIRCDSTCPPGRWGPNCSVSCSCENGGSCSPEDGSCECAPGFRGPLCQRICPPGFYGHGCAQPCPLCVHSSRPCHHISGICECLPGFSGALCNQVCAGGYFGQDCAQLCSCANNGTCSPIDGSCQCFPGWIGKDCSQACPPGFWGPACFHACSCHNGASCSAEDGACHCTPGWTGLFCTQRKPHLLASQPLRIPCCGLLATVGIVQTSREGGMQAAPGLVVPDSCPTRTEELCRGSSRPDWIQGIDKPKVLEGQGCKAAQQHFLGRTVGAYASVRMAPAVTTSVASAPAAQASPGNTVSRDVPQEPLAMGVSSYVSA

SEQ ID NO: 73865 - protein, 1007 aa, Homo sapiens
MPAIMTMLADHAARQLLDFSQKLDINLLDNVVNCLYHGEGAQQRMAQEVLTHLKEHPDAWTRVDTILEFSQNMNTKYYGLQILENVIKTRWKILPRNQCEGIKKYVVGLIIKTSSDPTCVEKEKVYIGKLNMILVQILKQEWPKHWPTFISDIVGASRTSESLCQNNMVILKLLSEEVFDFSSGQITQVKSKHLKDSMCNEFSQIFQLCQFVMENSQNAPLVHATLETLLRFLNWIPLGYIFETKLISTLIYKFLNVPMFRNVSLKCLTEIAGVSVSQYEEQFVTLFTLTMMQLKQMLPLNTNIRLAYSNGKDDEQNFIQNLSLFLCTFLKEHDQLIEKRLNLRETLMEALHYMLLVSEVEETEIFKICLEYWNHLAAELYRESPFSTSASPLLSGSQHFDVPPRRQLYLPMLFKVRLLMVSRMAKPEEVLVVENDQGEVVREFMKDTDSINLYKNMRETLVYLTHLDYVDTERIMTEKLHNQVNGTEWSWKNLNTLCWAIGSISGAMHEEDEKRFLVTVIKDLLGLCEQKRGKDNKAIIASNIMYIVGQYPRFLRAHWKFLKTVVNKLFEFMHETHDGVQDMACDTFIKIAQKCRRHFVQVQVGEVMPFIDEILNNINTIICDLQPQQVHTFYEAVGYMIGAQTDQTVQEHLIEKYMLLPNQVWDSIIQQATKNVDILKDPETVKQLGSILKTNVRACKAVGHPFVIQLGRIYLDMLNVYKCLSENISAAIQANGEMVTKQPLIRSMRTVKRETLKLISGWVSRSNDPQMVAENFVPPLLDAVLIDYQRNVPAAREPEVLSTMAIIVNKLGGHITAEIPQIFDAVFECTLNMINKDFEEYPEHRTNFFLLLQAVNSHCFPAFLAIPPTQFKLVLDSIIWAFKHTMRNVADTGLQILFTLLQNVAQEEAAAQSFYQTYFCDILQHIFSVVTDTSHTAGLTMHASILAYMFNLVEEGKISTSLNPGNPVNNQIFLQEYVANLLKSAFPHLQENLQVKTLLICFWKREK

SEQ ID NO: 73866 - protein, 74 aa, Homo sapiens
MSAVCGGAARMLRTPGRHGYAAEFSPYLPGRLACATAQHYGIAGCGTLLILDPDEAGLRLFRSVALTGMMVCLM

SEQ ID NO: 73867 - protein, 516 aa, Homo sapiens
METPSQRRATRSGAQASSTPLSPTRITRLQEKEDLQELNDRLAVYIDRVRSLETENAGLRLRITESEEVVSREVSGIKAAYEAELGDARKTLDSVAKERARLQLELSKVREEFKELKARNTKKEGDLIAAQARLKDLEALLNSKEAALSTALSEKRTLEGELHDLRGQVAKLEAALGEAKKQLQDEMLRRVDAENRLQTMKEELDFQKNIYSEELRETKRRHETRLVEIDNGKQREFESRLADALQELRAQHEDQVEQYKKELEKTYSAKLDNARQSAERNSNLVGAAHEELQQSRIRIDSLSAQLSQLQKQLAAKEAKLRDLEDSLARERDTSRRLLAEKEREMAEMRARMQQQLDEYQELLDIKLALDMEIHAYRKLLEGEEERLRLSPSPTSQRSRGRASSHSSQTQGGGSVTKKRKLESTESRSSFSQHARTSGRVAVEEVDEEGKFVRLRNKSNEVGSCSGSKGIQLHQGESGKTEGWHVERGTSLPSEGGPGTSPWAIGRSSARMEMIPC

SEQ ID NO: 73868 - protein, 708 aa, Homo sapiens
MQKMIPASQRAVTSPGQALSTVVKPLLQNTVDKILEALQRVFPHAEFRTNKTLDSDISCPLLESDLAYSDDDVPSVYENGLSQKSSHKAKDNFNFLHLNRNACYQPMSFRPRILIVGEPGFGQGSHLAPAVIHALEKFTVYTLDIPVLFGVSTTSPEETCAQVIREAKRTAPSIVYVPHIHVWWEIVGPTLKATFTTLLQNIPSFAPVLLLATSDKPHSALPEEVQELFIRDYGEIFNVQLPDKEERTKFFEDLILKQAAKPPISKKKAVLQALEVLPVAPPPEPRSLTAEEVKRLEEQEEDTFRELRIFLRNVTHRLAIDKRFRVFTKPVDPDEVPDYVTVIKQPMDLSSVISKIDLHKYLTVKDYLRDIDLICSNALEYNPDRDPGDRLIRHRACALRDTAYAIIKEELDEDFEQLCEEIQESRKKRGCSSSKYAPSYYHVMPKQNSTLVGDKRSDPEQNEKLKTPSTPVACSTPAQLKRKIRKKSNWYLGTIKKRRKISQAKDDSQNAIDHKIESDTEETQDTSVDHNETGNTGESSVEENEKQQNASESKLELRNNSNTCNIENELEDSRKTTACTELRDKIACNGDASSSQIIHISDENEGKEMCVLRMTRARRSQVEQQQLITVEKALAILSQPTPSLVVDHERLKNLLKTVVKKSQNYNIFQLENLYAVISQCIYRHRKDHDKTSLIQKMEQEVENFSCSR

SEQ ID NO: 73869 - protein, 274 aa, Homo sapiens
MPLSRWLRSVGVFLLPAPYWAPRERWLGSLRRPSLVHGYPVLAWHSARCWCQAWTEEPRALCSSLRMNGDQNSDVYAQEKQDFVQHFSQIVRVLTEDEMGHPEIGDAIARLKEVLEYNAIGGKYNRGLTVVVAFRELVEPRKQDADSLQRAWTVGWCVELLQAFFLVADDIMDSSLTRRGQICWYQKPGVGLDAINDANLLEACIYRLLKLYCREQPYYLNLIELFLQSSYQTEIGQTLDLLTAPQGNVDLVRFTEKRYKSIVKYKTAFYSFYL

SEQ ID NO: 73870 - protein, 167 aa, Homo sapiens
MTSTGQDSTTTRQRRSRQNPQSPPQDSSVTSKRNIKKGAVPRSIPNLAEVKKKGKMKKLGQAMEEDLIVGLQGMDLNLEAEALAGTGLVLDEQLNEFHCLWDDSFPEGPERLHAIKEQLIQEGLLDRCVSFQARFAEKEELMLVHSLEYIDLMETTQYMNEGELRVL

SEQ ID NO: 73871 - protein, 141 aa, Homo sapiens
  MOD_RES (1)..(1): Any amino acid
XTRPPSVQVAKTTPFNTREPVMLACYVWGFYPAEVTITWRKNGKLVMPHSSAHKTAQPNGDWTYQTLSHLALTPSYGDTYTCVVEHIGAPEPILRDWTPGLSPMQTLKVSVSAVTLGLGLIIFSLGVISWRRAGHSRWHIS

SEQ ID NO: 73872 - protein, 1240 aa, Homo sapiens
  MOD_RES (1)..(1): Any amino acid
XAPAPGKVGDVTPQVKGGALPPAKRAKKPEEESESSEEGSESEEEAPAGTRSQVKASEKILQVRAASAPAKGTPGKGATPAPPGKAGAVASQTKAGKPEEDSESSSEESSDSEEETPAAKALLQAKASGKTSQVGAASAPAKESPRKGAAPAPPGKTGPAVAKAQAGKREEDSQSSSEESDSEEEAPAQAKPSGKAPQVRAASAPAKESPRKGAAPAPPRKTGPAAAQVQVGKQEEDSRSSSEESDSDREALAAMNAAQVKPLGKSPQVKPASTMGMGPLGKGAGPVPPGKVGPATPSAQVGKWEEDSESSSEESSDSSDGEVPTAVAPAQEKSLGNILQAKPTSSPAKGPPQKAGPVAVQVKAEKPMDNSESSEESSDSADSEEAPAAMTAAQAKPALKIPQTKACPKKTNTTASAKVAPVRVGTQAPRKAGTATSPAGSSPAVAGGTQRPAEDSSSSEESDSEEEKTGLAVTVGQAKSVGKGLQVKAASVPVKGSLGQGTAPVLPGKTGPTVTQVKAEKQEDSESSEEESDSEEAAASPAQVKTSVKKTQAKANPAAARAPSAKGTISAPGKVVTAAAQAKQRSPSKVKPPVRNPQNSTVLARGPASVPSVGKAVATAAQAQTGPEEDSGSSEEESDSEEEAETLAQVKPSGKTHQIRAALAPAKESPRKGAAPTPPGKTGPSAAQAGKQDDSGSSSEESDSDGEAPAAVTSAQKDSNSKPARSKTLAPAPPERNTEGSSESSEEELPLTQVIKPPLIFVDPNRSPAGPAATPAQAQAASTPRKARASESTARSSSSESEDEDVIPATQCLTPGIRTNVVTMPTAHPRIAPKASMAGASSSKESSRISDGKKQEGPATQVSKKNPASLPLTQAALKVLAQKASEAQPPVARTQPSSGVDSAVGTLPATSPQSTSVQAKGTNKLRKPKLPEVQQATKAPESSDDSEDSSDSSSGSEEDGEGPQGAKSAHTLVGPTPSRTETLVEETAAESSEDDVVAPSQSLLSGYMTPGLTPANSQASKATPKLDSSPSVSSTLAAKDDPDGKQEAKPQQAAGMLSPKTGGKEAASGTTPQKSRKPKKGAGNPQASTLALQSNITQCLLGQPWPLNEAQVQASVVKVLTELLEQERKKVVDTTKESSRKGWESRKRKLSGDQPAARTPRSKKKKKLGAGEGGEASVSPEKTSTTSKGKAKRDKASGDVKEKKGKGSLGSQGAKDEPEEELQKGMGTVEGGDQSNPKSK

SEQ ID NO: 73873 - protein, 181 aa, Homo sapiens; identical to SEQ ID NO: 66396
  MOD_RES (1)..(1): Any amino acid

SEQ ID NO: 73874 - protein, 172 aa, Homo sapiens
MASEGTNIPSPVVRQIDKQFLICSICLERYKNPKVLPCLHTFCERCLQNYIPAHSLTLSCPVCRQTSILPEKGVAALQNNFFITNLMDVLQRTPGSNAEESSILETVTAVAAGKPLSCPNHDGNDLAPIPRLECSGTIMAHCNLELRSSSNPPTSASQVAGTTGDGILLPVL

SEQ ID NO: 73875 - protein, 116 aa, Homo sapiens
  MOD_RES (1)..(1): Any amino acid
XSHLLPGNPRHLHILIGTSVVIILFILLFFLLHRWCSNKKNAAVMDQESAGNRTANSEDSDEQDPQEVTYTQLNHCVFTQRKITRPSQRPKTPPTDIIVYTELPNAESRSKVVSCP

SEQ ID NO: 73876 - protein, 27 aa, Homo sapiens
DEERDPLLHSFGHLKEVLNSITEMALI

SEQ ID NO: 73877 - protein, 90 aa, Homo sapiens
  MOD_RES (1)..(1): Any amino acid
XKRSLCSEGRQAPGNEDELHLAPELLWLSPLTEGAPRTREETRDLVHAPLPLTWKRSSLCGDSSTTPISGPGSEDLEEPHAQGLLHTTCN

SEQ ID NO: 73878 - protein, 13 aa, Homo sapiens
  MOD_RES (1)..(1): Any amino acid
XPTVNGSRPTSCP

SEQ ID NO: 73879 - protein, 234 aa, Homo sapiens
ALGVSVTDYTFEDCQLALAEGQLRLPADTCLLEFARLVRGLGLKPEKLEKDLDRYSERARMKGGEKIGIAEFAASLEVPVSDLLEDMFSLFDESGSGEVDLRECVVALSVVCRPARTLDTIQLAFKMYGAQEDGSVGEGDLSCILKTALGVAELTVTDLFRAIDQEEKGKITFADFHRFAEMYPAFAEEYLYPDQTHFESCAETSPAPIPNGFCADFSPENSDAGRKPVRKKLD

SEQ ID NO: 73880 - protein, 124 aa, Homo sapiens; identical to SEQ ID NO: 43774
  MOD_RES (1)..(1): Any amino acid

SEQ ID NO: 73881 - protein, 127 aa, Homo sapiens
  MOD_RES (1)..(1): Any amino acid
XTTDIATKGPFPTSRDPLPSVPPTTTNSSRGTNSTLAKITTSAKTTMKPPTATPTTARTRPTTDMSAGENGGFLLLRLSVASPEDLTDPRVAERLMQQLMTQGTHSAHVPSMVGVNPLPIVPGGFQY

SEQ ID NO: 73882 - protein, 226 aa, Homo sapiens; identical to SEQ ID NO: 69466

SEQ ID NO: 73883 - protein, 695 aa, Homo sapiens
MALLLVSLLAFLSLGSGCHHRICHCSNRVFLCQESKVTEIPSDLPRNAIELRFVLTKLRVIQKGAFSGFGDLEKIEISQNDVLEVIEADVFSNLPKLHEIRIEKANNLLYINPEAFQNLPNLQYLLISNTGIKHLPDVHKIHSLQKVLLDIQDNINIHTIERNSFVGLSFESVILWLNKNGIQEIHNCAFNGTQLDELNLSDNNNLEELPNDVFHGASGPVILDISRTRIHSLPSYGLENLKKLRARSTYNLKKLPTLEKLVALMEASLTYPSHCCAFANWRRQISELHPICNKSILRQEVDYMTQARGQRSSLAEDNESSYSRGFDMTYTEFDYDLCNEVVDVTCSPKPDAFNPCEDIMGYNILRVLIWFISILAITGNIIVLVILTTSQYKLTVPRFLMCNLAFADLCIGIYLLLIASVDIHTKSQYHNYAIDWQTGAGCDAAGFFTVFASELSVYTLTAITLERWHTITHAMQLDCKVQLRHAASVMVMGWIFAFAAALFPIFGISSYMKVSICLPMDIDSPLSQLYVMSLLVLNVLAFVVICGCYIHIYLTVRNPNIVSSSSDTRIAKRMAMLIFTDFLCMAPISFFAISASLKVPLITVSKAKILLVLFHPINSCANPFLYAIFTKNFRRDFFILLSKCGCYEMQAQIYRTETSSTVHNTHPRNGHCSSAPRVTSGSTYILVPLSHLAQN

SEQ ID NO: 73884 - protein, 123 aa, Homo sapiens
MQEELAWETDGLLPLERQLHEAARQNNVGRMQELIGRRVNTRARNHVGRVALHWAAGAGHEQAVRLLLEHEAAVDEEDAFGMNALLLSAWFGHLRILQILVNSGAKIHCESKPKKAMCLCWRS

SEQ ID NO: 73885 - protein, 78 aa, Homo sapiens
MRVVVIGAGVIGLSTALCIHERYHSVLQPLDIKVYADRFTPLTTTDVAAGLWQPYLSDPNNPQEATLPGRTQFWDFGS

SEQ ID NO: 73886 - protein, 94 aa, Homo sapiens
MAYKAIMRKPRAAVGSGHRKQAASQEGRQKHAKNNSQAKPSACDGLARQPEEVVLQASVSSYHLFRDVAEVTAFRGSLLSWYDQEKRDLPWRRR

SEQ ID NO: 73887 - protein, 84 aa, Homo sapiens
  MOD_RES (1)..(1): Any amino acid
XLPERGGSLDIQGLSPTPVQTTMVLSKPGGSLASHVARNLWAFTGPRGLLMPPSTCEPGHEASLKQGFQPDAIDPQNLTWKSRH

SEQ ID NO: 73888 - protein, 88 aa, Homo sapiens
MNNHVSSKPSTMKLKHTINPILLYFIHFLISLYTILTYIPFYFFSESRQEKSNRIKAKPVNSKPDSAYRSVNSLDGLASVLYPGCDTL

SEQ ID NO: 73889 - protein, 480 aa, Homo sapiens
  MOD_RES (1)..(1): Any amino acid
XAMDEFHPFIEALLPHVRAIAYTWFNLQARKRKYFKKHEKRMSKDEERAVKDELLSEKPEIKQKWASRLLAKLRKDIRQEYREDFVLTVTGKKHPCCVLSNPDQKGKIRRIDCLRQADKVWRLDLVMVILFKGIPLESTDGERLMKSPHCTNPALCVQPHHITVSVKELDLFLAYYVQEQDSGQSGSPSHNDPAKNPPGYLEDSFVKSGVFNVSELVRVSRTPITQGTGVNFPIGEIPSQPYYHDMNSGVNLQRSLSSPPSSKRPKTISIDENMEPSPTGDFYPSPSSPAAGSRTWHERDQDMSSPTTMKKPEKPLFSSASPQDSSPRLSTFPQHHHPGIPGVAHSVISTRTPPPPSPLPFPTQAILPPAPSSYFSHPTIRYPPHLNPQDTLKNYVPSYDPSSPQTSQLRICDWTMNQNGRHLYPSTSEDTLGITWQSPGTWASLVPFQVSNRTPILPANVQNYGLNIIGEPFLQAETSN

SEQ ID NO: 73890 - protein, 79 aa, Homo sapiens
MYHSLSETRHPLQPEEQEVGIDPLSSYSNKSGGDSNKNGRRTSSTLDSEGTFNSYRKEWEELFVNNNYLATIRQKGING

SEQ ID NO: 73891 - protein, 33 aa, Homo sapiens
MHHQWLLLAACFWVIFMFMVASKFITLTFKDPD

SEQ ID NO: 73892 - protein, 155 aa, Homo sapiens
MVNSCCGSVCSDQGCGQDLCQETCCCPSCCQTTCCRTTCYRPSYSVSCCCRPQCCQSVCCQPTCCRPSCCVPTCCHPSCCISSCCRPSCCVSSCCKPQCCQSVCCQPNCCRPSCCRPCCCLRPVCGRVSCHTTCYRPACVISTCPRPVCCASSCC

SEQ ID NO: 73893 - protein, 334 aa, Homo sapiens
MQLKPSTSSHLLKTVKPRVWKPGDWSREQLNETTVLAPHETIFRAEDLSVILKAYVLVTSLTPLRAFIHSTGTVWNPPKKKRFTVKLQTFFETFLRASSPQQAFDIMKEAIGKLLLAAEVFSETSTLGPKTFHRCRFCFQLLTFDIGYGSFMYPVVLQVHEHLNFQDYDNMDFEDQNTEEFLLNDTFNFLFPNESSLSIFSEIFQRLYRSDVFKGENYQKELNQCLSLEEINSIMTFIKELGSLGQFQLLFPSTTPGIQSLMHEFYDVANPVGNPGSVLTQYWSLLNVFEQFQFMNKKTQPHPLEWNSFTEDKNIEKPQVPFDAIENKKAAVPQ

SEQ ID NO: 73894 - protein, 207 aa, Homo sapiens
MSLRSGGRRRADPGADGEASRDDGATSSVSALKRLERSQWTDKMDLRFGFERLKEPGEKTGWLINMHPTEILDEDKRLGSAVDYYFIQDDGSRFKVALPYKPYFYIATRKGCEREVSSFLSKKFQGKIAKVETVPKEDLDLPNHLVGLKRNYIRLSFHTVEDLVKVRKEISPAVKKNREQDHASDAYTALLSRVLLCCPGWSAVVQS

SEQ ID NO: 73895 - protein, 1146 aa, Homo sapiens
LRDNIAGEELELSKSLNELGIKELYAWDNRRETFRKSSLGNDETDKEKKKFLGFFKVNKRSNSKAEQLVLSGADSDEDTSRAAPGRGLNGCLTTPNSPSMHSRSLTLGPSLSLGSISGVSVKSEMKKRRAPPPPGSGPPVQDKASEKVSLGSQIDLQKKKRRAPAPPPPQPPPPSPLIPNRTEDKEENRKSTMGGGRQVPQKPPRGTARGPPQLVLPPPPPYPPPDTDVVEPLSFPGEGAGSEASDPIPKLSLPLGSGSHCSPDGAPQVLSEAEETVSVGSCFASEDTTEDSGVMSSPSDIVSLDSQQDSMKYKDKWATDQEDCSDQDLAGTPDLGPQKSPLWEKNGSENSHLRTEKAVTASNDEEDLLIAGEFRKTLAELDEDLEEMEDSYETDTSSLTSSIHGASNHCPQDAMIPHGDTDAIPVTFIGEVSDDPVDSGLFSNRNNNAGSFDSEGVASRRDSLAPLQAEHSQPHEKAREEVPALHPASHDVGKGIRVALSNISKDGNLMETAPRVTSFASNLHTDNLNAKVKDKVYGCADGERTQATERVNSQPVNEKDSNDKNAALAPTSWHQRGQNPGKSYRLKHGLTTYKIIPPKSEMRCYDRDVSLSTGAIKIDELGNLVSPHATGIRIISLSSSVPEAESQPIGKVREFWRCNSVEKHLGRPSESSARGPPSTPVPTQTQNPESRLQADPKPISPQQKSAHHEGRNPLGEGRNQPPTMGMGHVRVPAAHTTEVTFLKPQRRTSSQYVASAIAKRIGAPKVHADVVRPHGYAEKGYAGKAPVLAAPPVTVKDDRTSSPHSETQGWKDGAQWPCVTPPNNHGEDLAVGAPPRGEVIGPHRKLSTQDRPAAIHRSSCFSLVQSSQRDRVSVGQSCGFSGKQSTSSQEASSASEPRRAPDGTDPPPPHTSDTQACSRELVNGSVRAPGHGEPSHPPGGSGTESHILLEREEKPSVFSTDGNETDSIWPPSIFGPKKKFKPVVQRPVPKDTSLHSALMEAIHSAGGKDRLRKTAEHTGEGRPAKLSYTEAEGERSALLAAIRGHSGTCSLRKVASSASEELQSFRDAALSAQGSESPLLEDLGLLSPPAIPPPPPPPSQALSAPRTASRFSTGTLSNTADARQALMDAIRSGTGAARLRKVPLLV

SEQ ID NO: 73896 - protein, 65 aa, Homo sapiens
  MOD_RES (1)..(1): Any amino acid
XAYAPKKELINIKGISEAKADKILTESRSVARLECNSVILVYCTLRLSGSSDSPASASRVVGTTG

SEQ ID NO: 73897 - protein, 73 aa, Homo sapiens
GQNLIRSIQINITRLAGTFGDVAVGLRISSDHKEQPIVTENAERQLVVKDGATYKVDVVPIKNQVVGCQSLPW

SEQ ID NO: 73898 - protein, 85 aa, Homo sapiens
MAQLGKLLKEQKYDRQLRLWGDHGQEALESAHVCLINATATGTEILKNLVLPGIGSFTIIDGNQVSGEDAGNKTELKLPWNSYKN

SEQ ID NO: 73899 - protein, 146 aa, Homo sapiens
MAESSESFTMASSPAQRRRGNDPLTSSPGRSSRRTDALTSSPGRDLPPFEDESEGLLGTEGPLEEEEDGEELIGDGMERDYRAIPELDAYEAEGLALDDEDVEELTASQREAAERAMRQRDREAGRGLGRMRRGLLYGVSCLPRQR

SEQ ID NO: 73900 - protein, 367 aa, Homo sapiens
GRGSGFPGKRRPRGAGLSGRGGRGRSKLKSGIGAVVLPGVSTADISSNKDDEENSMHNTVVLFSSSDKFTLNQDMCVVCGSFGQGAEGRLLACSQCGQCYHPYCVSIKITKVVLSKGWRCLECTVCEACGKATDPGRLLLCDDCDISYHTYCLDPPLQTVPKGGWKCKWCVWCRHCGATSAGLRCEWQNNYTQCAPCASLSSCPVCYRNYREEDLILQCRQCDRWMHAVCQNLNTEEEVENVADIGFDCSMCRPYMPASNVPSSDCCESSLVAQIVTKVKELDPPKTYTQDGVCLTESGMTQLQSLTVTVPRRKRSKPKLKLKIINQNSVAVLQTPPDIQSEHSRDGEMDDSRGNTNLFSMKYVCKN

SEQ ID NO: 73901 - protein, 107 aa, Homo sapiens
MRYGNFIDKLRLFTRGGSGGMGYPRLGGEGGKGGDVWVVAQNRMTLKQLKDRYPRKRFVAGVGANSKISALKGSKGKDCEIPVPVGISVTDENGKIIDSQMLENPLC

SEQ ID NO: 73902 - protein, 342 aa, Homo sapiens
MGLGPVFLLLAGIFPFAPPGAAAEPHSLRYNLTVLSWDGSVQSGFLAEVHLDGQPFLRYDRQKCRAKPQGQWAEDVLGNKTWDRETRDLTGNGKDLRMTLAHIKDQKEVPQSSRAQTLAMNVRNFLKEDAMKTKTHYHAMHADCLQELRRYLESSVVLRRRVPPMVNVTRSEASEGNITVTCRASSFYPRNITLTWRQDGVSLSHDTQQWGDVLPDGNGTYQTWVATRICQGEEQRFTCYMEHSGNHSTHPVPSGKVLVLQSHWQTFHVSAVAAAAAAIFVIIIFYVRCCKKKTSAAEGPELVSLQVLDQHPVGTSDHRDATQLGFQPLMSALGSTGSTEGA

SEQ ID NO: 73903 - protein, 144 aa, Homo sapiens
MQLFLLLCLVLLSPQGASLHRHHPREMKKRVEDLHVGATVAPSSRRDFTFDLYRALASAAPSQSIFFSPVSISMSLAMLSLGAGSSTKMQILEGLGLNLQKSSEKELHRGFQQLLQELNQPRDGFQLSLGNALFTDLVVDLQDT

SEQ ID NO: 73904 - protein, 255 aa, Homo sapiens
RNATDIASQIKYKQSAEMEKANFTSVVDTPEIIHAQQVKNLSSQLQYQCDLKNSKGKITVVQDTPEILRVKENQKNFSSVLYKEDVSPGTAIGKTPEMMRVKQTQDHISSVKYKEAIGQGTPIPDLPEVKRVKETQKHISSVMYKENLGTGIPTTVTPEIERVKRNQENFSSVLYKENLGKGIPTPITPEMERVKRNQENFSSVLYKENMGKGTPLPVTPEMERVKHNQENISSVLYKENMGKGTPLAVTPEMER

SEQ ID NO: 73905 - protein, 127 aa, Homo sapiens
MRRWTWKASWSRWLAFELEDLQKKPPPYLRNLSSDDANVLVWHALLLPDQPPYHLKAFNLRISFPPEYPFKPPMIKFTTKIYHPNVDENGQICLPIISSENWKPCTKTCQVLEALNVLVNRPNIREP

SEQ ID NO: 73906 - protein, 121 aa, Homo sapiens
MRLKISLLKEPKHQELVSCVGWTTAEELYSCSDDHQIVKWNLLTSETTQIVKLPDDIYPIDFHWFPKSLGVKKQTQAESFVLTSSDGKFHLISKLGRVEKSVEAHCGAVLAGRWNYEGTAL

SEQ ID NO: 73907 - protein, 101 aa, Homo sapiens
  MOD_RES (1)..(1): Any amino acid
XKEIPMERVIAAAKQAQLHDFVMSLPEKYETNVGSQGSQLSRGEKQRIAIARAIVRDPKILLLDEATSALDTESEKQPCCDHLDKSHTPQMAEQEDIQPDS

SEQ ID NO: 73908 - protein, 123 aa, Homo sapiens
  MOD_RES (1)..(1): Any amino acid
XRVKKGGGKKSGKKSYLSGGAGAAGGGGADPGNKKWEQKQVQIKTLEGEFSVTMWSSDEKKDIDHETVVEEQIIGENSPPDYSEYMTGKKLPPGGIPGIDLSDPKQLAEFARAAQRCSGITRP

SEQ ID NO: 73909 - protein, 77 aa, Homo sapiens
MGKQNSKLRPEVMQDLLESTDFTEHEIQEWYKGFLRDCPSGHLSMEEFKKIYGNFFPYGDASKFAEHVFRTFDANGD

SEQ ID NO: 73910 - protein, 806 aa, Homo sapiens
  MOD_RES (1)..(1): Any amino acid
XTDLSNIPGLLAIDQVLPEESQKAESQNTFEETELELKKCFPSDETCEKPVDETTKLTQTSSTEQLNVLETETEVLNKEAVEVKGGGDVLEPVSSDSLSTKDFAAVEEVAPAKPPRHLTPEPDIVASTKKPVPARPPPPTNFPPPRPPPPSRPAPPPRKRKSELEFETLKTPDIDVPKENITSDSLLTASMASESTVKDSQPSLDLASATSGDKIVTAQENGKAPDGQTVAGEVMGPQRPRSNSGRELTDEEILASVMIKNLDTGEEIPLSLAEEKLPTGINPLTLHIMRRTKEYVSNDAAQSDDEEKLQSQPTDTDGGRLKQKTTQLKKFLGKSVKRAKHLAEEYGERAINKVKSVRDEVFHTDQDDPSSSDDEGMPYTRPVKFKAAHGFKGPYDFDQIKVVQDLSGEHMGAVWTMKFSHCGRLLASAGQDNVVRIWALKNAFDYFNNMRMKYNTEGRVSPSPSQESLSSSKSDTDTGVCSGTDEDPDDKNAPFRQRPFCKYKGHTADLLDLSWSKNYFLLSSSMDKTVRLWHISRRECLCCFQHIDFVTAIAFHPRDDRYFLSGSLDGKLRLWNIPDKKVALWNEVDGQTKLITAANFCQNGKYAVIGTYDGRCIFYDTEHLKYHTQIHVRSTRGRNKVGRKITGIEPLPGENKILVTSNDSRIRLYDLRDLSLSMKYKGYVNSSSQIKASFSHDFTYLVSGSEDKYVYIWSTYHDLSKFTSVRRDRNDFWEGIKAHNAVVTSAIFAPNPSLMLSLDVQSEKSEGNEKSEDAEVLDATPSAMSSRYVAQAGLELLASKRYYEDR

SEQ ID NO: 73911 - protein, 73 aa, Homo sapiens
MVCTSFWFKFPGTSSKIEHFISILGKCFDSPWTTRALSEVSGENQKGPAATERAAATIVAMAGTGPGKAGEGE

SEQ ID NO: 73912 - protein, 41 aa, Homo sapiens
MATDSWALAVDEQEAAAESLSNLHLKEEKIKPDTNGLYKNF

SEQ ID NO: 73913 - protein, 101 aa, Homo sapiens
MRPADGIRWERRIDWGLRPRGPGLEFASDAVEPPESEKVEGKNSIILTFRQLMAEEGPWGLMKGLSARIISATPSTIVIVVGYESLKKLSLRPELVDSRHW

SEQ ID NO: 73914 - protein, 685 aa, Homo sapiens
MEKRLGVKPNPASWILSGYYWQTSAKWLRSLYLFYTCFCFSVLWLSTDASESRCQQGKTQFGVGLRSGGENHLWLLEGTPSLQSCWAACCQDSACHVFWWLEGMCIQADCSRPQSCRAFRTHSSNSMLVFLKKFQTADDLGFLPEDDVPHLLGLGWNWASWRQSPPRAALRPAVSSSDQQSLIRKLQKRGSPSDVVTPIVTQHSKVNDSNELGGLTTSGSAEVHKAITISSPLTTDLTAELSGGPKNVSVQPEISEGLATTPSTQQVKSSEKTQIAVPQPVAPSYSYATPTPQASFQSTSAPYPVIKELVVSAGESVQITLPKNEVQLNAYVLQEPPKGETYTYDWQLITHPRDYSGEMEGKHSQILKLSKLTPGLYEFKVIVEGQNAHGEGYVNVTVKPEPRKNRPPIAIVSPQFQEISLPTTSTVIDGSQSTDDDKIVQYHWEELKGPLREEKISEDTAILKLSKLVPGNYTFSLTVVDSDGATNSTTANLTVNKAVDYPPVANAGPNQVITLPQNSITLFGNQSTDDHGITSYEWSLSPSSKGKVVEMQGVRTPTLQLSAMQEGDYTYQLTVTDTIGQQATAQVTVIVQPENNKPPQADAGPDKELTLPVDSTTLDGSKSSDDQKIISYLWEKTQGPDGVQLENANSSVATVTGLQVGTYVFTLTVKDERNLQSQSSVNVIV

SEQ ID NO: 73915 - protein, 729 aa, Homo sapiens
MWKRSEQMKIKSGKCNMAAAMETEQLGVEIFETADCEENIESQDRPKLEPFYVERYSWSQLKKLLADTRKYHGYMMAKAPHDFMFVKRNDPDGPHSDRIYYLAMSGENRENTLFYSEIPKTINRAAVLMLSWKPLLDLFQATLDYGMYSREEELLRERKRIGTVGIASYDYHQGSGTFLFQAGSGIYHVKDGGPQGFTQQPLRPNLVETSCPNIRMDPKLCPADPDWIAFIHSNDIWISNIVTREERRLTYVHNELANMEEDARSAGVATFVLQEEFDRYSGYWWCPKAETTPSGGKILRILYEENDESEVEIIHVTSPMLETRRADSFRYPKTGTANPKVTFKMSEIMIDAEGRIIDVIDKELIQPFEILFEGVEYIARAGWTPEGKYAWSILLDRSQTRLQIVLISPELFIPVEDDVMERQRLIESVPDSVTPLIIYEETTDIWINIHDIFHVFPQSHEEEIEFIFASECKTGFRHLYKITSILKESKYKRSSGGLPAPSDFKCPIKEEIAITSGEWEVLGRHGSNIQVDEVRRLVYFEGTKDSPLEHHLYVVSYVNPGEVTRLTDRGYSHSCCISQHCDFFISKYSNQKNPHCVSLYKLSSPEDDPTCKTKEFWATILDSAGPLPDYTPPEIFSFESTTGFTLYGMLYKPHDLQPGKKYPTVLFIYGGPQVQLVNNRFKGVKYFRLNTLASLGYVVVVIDNRGSCHRGLKFEGAFKYKMEALNATF

SEQ ID NO: 73916 - protein, 72 aa, Homo sapiens
EVGLDGTETYLPPLSMSQNLARLAQRIDFSQGSGSEEEEAAGTEGDAQEWPGAGSSADQDDEEESSDVAIDI

SEQ ID NO: 73917 - protein, 97 aa, Homo sapiens
MSSGNAKIGHPAPNFKATADEGISFRGLFIIDDKGILRQITVNDLPVGRSVDETLRLVQAFQFTDKHGEVCPAGWKPGSDTIKPDVQKSKEYFSKQK

SEQ ID NO: 73918 - protein, 105 aa, Homo sapiens
MVSLTAPYVSGFLAFREVPFLLELVQQLREKEPGLMPQVLLVDGNGVLHHRGFGVACHLGVLTDLPCVGVAKKLLQVDGLENNALHKEKLSGACMEKLLNKNLLS

SEQ ID NO: 73919 - protein, 13 aa, Homo sapiens
MDPLETPIKDGIL

SEQ ID NO: 73920 - protein, 98 aa, Homo sapiens
MESDKDKVSLTKTPKLERGDGGKEVRERASKRKLPFTAGANGEQKDSDTEKQGPERKRIKKEPVTRKAGLLFGMGLSGIRAGYPLSERQQVALLMQMT

SEQ ID NO: 73921 - protein, 231 aa, Homo sapiens
MGADGMYDKLRMLNGQTGSWGTRPGWYPGTSVPGQPTQDGCQQQEGGGENTNSISSNGEDSDEAQMRLQLKRKLQRNRTSFTQEQIEALEKEFERTHYPDVFARERLAAKIDLPEARIQVWFSNRRAKWRREEKLRNQRRQASNTPSHIPISSSFSTSVYQPIPQPTTPVSSFTSGSMLGRTDTALTNTYSALPPMPSFTMANNLPMQPPVPSQTSSYSCMLPTSPSVNGR

SEQ ID NO: 73922 - protein, 74 aa, Homo sapiens
MKASEDLKKHGATVLTALGGILKKKGHHEAEIKPLAQSHATKHKIPVKYLEFISECIIQVLQSKHPGDFGADAQ

SEQ ID NO: 73923 - protein, 316 aa, Homo sapiens
MKRRRRRRPVAPATAARGGDFRAEDGAGLEAREEKVVYSRSQLSLADSTKALGDAFKLFMPRSTEFMSSDAELWSFLCSLKHQFSPHILRSKDVYGYSPYSPRPGAPAGSARSGQEEAPRSPGGRCPQEEAPAATPTAAAPRGELPGQARGPRALLRGPHLGGDLEGGHPDADHLPHHPRRQRRVGRAQPGGSAAQGAPGPASEPGTHGEAPPLPGAPGMRCGLQGASCRPRPWDRPSARRNEQVSVECLQIRPGPRPPMHFTREEVAGWLSLSRAAARSSWTLGQVCPLLPPVPGLRREGTAGPAGEVPFFLTTD

SEQ ID NO: 73924 - protein, 188 aa, Homo sapiens
  MOD_RES (1)..(1): Any amino acid
XITEWSWSMRSLPYNQPGTCYTLVALPKEDPTAVACTFSCMMKFTVKDCDPTTGETDDEGYEDEYVLEDLEVTVADHIQKVMKLNFEAAWDEVGDEFEKEETFTLSTIKTLEEAVGNIVKFLGMHPCERSDKVPDNKNTHTLLLAGVFRGGHDILVRSRLLLLDTVTMQVTARSLEELPVDIILASVG

SEQ ID NO: 73925 - protein, 474 aa, Homo sapiens
MVLADLGRKITSALRSLSNATIINEEVLNAMLKEVCTALLEADVNIKLVKQLRENLVDPGVKAWTPTKGKQNVIMFVGLQGSGKTTTCSKLAYYYQRKGWKTCLICADTFRAGAFDQLKQNATKARIPFYGSYTEMDPVIIASEGVEKFKNENFEIIIVDTSGRHKQEDSLFEEMLQVANAIQPDNIVYVMDASIGQACEAQAKAFKDKVDVASVIVTKLDGHAKGGGALSAVAATKSPIIFIGTGEHIDDFEPFKTQPFISKLLGMGDIEGLIDKVNELKLDDNEALIEKLKHGQFTLRDMYEQFQNIMKMGPFSQILGMIPGFGTDFMSKGNEQESMARLKKLMTIMDSMNDQELDSTDGAKVFSKQPGRIQRVARGSGVSTRDVQELLTQYTKFAQMVKKMGGIKGLFKGGDMSKNVSQSQMAKLNQQMAKMMDPRVLHHMGGMAGLQSMMRQFQQGAAGNMKGMMGFNNM

SEQ ID NO: 73926 - protein, 81 aa, Homo sapiens
MASPGKPGADEAQEEEGELEGGSAGPRAAILEQAEELFLLCDKEAKGFITKHDLQGLQSDLPLTPEQLEAVFESLDRAHTG

SEQ ID NO: 73927 - protein, 289 aa, Homo sapiens
MAARAGFQSVAPSGGAGASGGAGAAAALGPGGTPGPPVRMGPAPGQGLYRSPMPGAAYPRPGMLPGSRMTPQGPSMGPPGYGGNPSVRPGLAQSGMDQSRKRPAPQQIQQVQQQAVQNRNHNAKKKKMADKILPQRIRELVPESQAYMDLLAFERKLDQTIMRKRLDIQEALKRPIKWHRTATTQETDGFQVKRPGDVNVRCTVLLMLDYQPPQFKLDPRLARLLGIHTQTRPVIIQALWQYIKTHKLQDPHEREFVICDKYLQQIFESQRMKFSEIPQRLHALLMPPE

SEQ ID NO: 73928 - protein, 154 aa, Homo sapiens
IRAVGRLKRERSMSENAVRQNGQLVRNDSLVTPSPQQARVCPPHMLPEDGANLSSARGILSLIQSSTRRAYQQILDVLDENRRYGISNIDTTIEGTSDDLTVVDAASLRRQIIKLNRRLQLLEEENKERAKREMVMYSITVAFWLLNSWLWFRR

SEQ ID NO: 73929 - protein, 99 aa, Homo sapiens
MEPFVVLVLCLSFMLLFSLWRQSCRRRKLPPGPTPLPIIGNMLQIDVKDICKSFTNVSLPYVPPANCKGNHFQQWKEMEGDPAFLPHNLAEFWDGEEEH

SEQ ID NO: 73930 - protein, 206 aa, Homo sapiens
MDKFWWHAAWGLCLVPLSLAQIDLNITCRFAGVFHVEKNGRYSISRTEAADLCKAFNSTLPTMAQMEKALSIGFETCRYGFIEGHVVIPRIHPNSICGANTTSGPIRTPQIPEWLIILASLLALALILAVCIAVNSRRRCGQKKKLVINSGNGAVEDRKPSGLNGEASKSQEMVHLVNKESSETPDQFMTADETRNLQNVDMKIGV

SEQ ID NO: 73931 - protein, 300 aa, Homo sapiens
MVRTKTWTLKKHFVGYPTNSDFELKTAELPPLKNGEVLLEALFLTVDPYMRVAAKRLKEGDTMMGQQVAKVVESKNVALPKGTIVLASPGWTTHSISDGKDLEKLLTEWPDTIPLSLALGTVGMPGLTAYFGLLEICGVKGGETVMVNAAAGAVGSVVGQIAKLKGCKVVGAVGSDEKVAYLQKLGFDVVFNYKTVESLEETLKKASPDGYDCYFDNVGGEFSNTVIGQMKKFGRIAICGAISTYNRTGPLPPGPPPEIVIYQELRMEAFVVYRWQGDARQKALKDLLKWVLELPYFVID

SEQ ID NO: 73932 - protein, 886 aa, Homo sapiens
MGRAAATAGGGGGARRWLPWLGLCFWAAGTAAARGTDNGEALPESIPSAPGTLPHFIEEPDDAYIIKSNPIALRCKARPAMQIFFKCNGEWVHQNEHVSEETLDESSGLKVREVFINVTRQQVEDFHGPEDYWCQCVAWSHLGTSKSRKASVRIAYLRKNFEQDPQGREVPIEGMIVLHCRPPEGVPAAEVEWLKNEEPIDSEQDENIDTRADHNLIIRQARLSDSGNYTCMAANIVAKRRSLSATVVVYVDGSWEVWSEWSVCSPECEHLRIRECTAPPPRNGGKFCEGLSQESENCTDGLCILGIENASDIALYSGLGAAVVAVAVLVIGVTLYRRSQSDYGVDVIDSSALTGGFQTFNFKTVRQGNSLLLNSAMQPDLTVSRTYSGPICLQDPLDKELMTESSLFNPLSDIKVKVQSSFMVSLGVSERAEYHGKNHSRTFPHGNNHSFSTMHPRNKMPYIQNLSSLPTRTELRTTGVFGHLGGRLVMPNTGVSLLIPHGAIPEENSWEIYMSINQGEPSLQSDGSEVLLSPEVTCGPPDMIVTTPFALTIPHCADVSSEHWNIHLKKRTQQGKWEEVMSVEDESTSCYCLLDPFACHVLLDSFGTYALTGEPITDCAVKQLKVAVFGCMSCNSLDYNLRVYCVDNTPCAFQEVVSDERHQGGQLLEEPKLLHFKGNTFSLQISVLDIPPFLWRIKPFTACQEVPFSRVWCSNRQPLHCAFSLERYTPTTTQLSCKICIRQLKGHEQILQVQTSILESERETITFFAQEDSTFPAQTGPKAFKIPYSIRQRICATFDTPNAKGKDWQMLAQKNSINRNLSYFATQSSPSAVILNLWEARHQHDGDLDSLACALEEIGRTHTKLSNISESQLDEADFNYSRQNGL

SEQ ID NO: 73933 - protein, 190 aa, Homo sapiens
MHIRKATKYLKDVTLQKQCVPFRRYNGGVGRCAQAKQWGWTQGRWPKKSAEFLLHMLKNAESNAELKGLDVDSLVIEHIQVNKAPKMRRRTYRAHGRINPYMSSPCHIEMILTEKEQIVPKPEEEVAQKKKLRSSSLGKWCAFLVSSFQFCSGSTKNSWSHIYTLWFPPSLVVYGLRKQYKNPMIQTKAK

SEQ ID NO: 73934 - protein, 87 aa, Homo sapiens
MAANLSRNGPALQEAYVRVVTEKSPTDWALFTYEGNSNDIRVAGTGDRRGRERCAEGSLCQPRQHHGQLPEGGPCDHQRTGRGGCGA

SEQ ID NO: 73935 - protein, 78 aa, Homo sapiens
MALKRINKELSDLARDPPAQCSAGPVGDDMFHWQATIMGPNDSPYQGGVFFLTIHFPTDYPFKPPKVAFTTRIYHPNI

SEQ ID NO: 73936 - protein, 74 aa, Homo sapiens
MATHSPQKSHQCAHCEKTFNRKDHLKNHLQTHDPNKMAFGCEECGKKYNTMLGYKRHLALHAASSGDLTCGVCA

SEQ ID NO: 73937 - protein, 58 aa, Homo sapiens
MNVTSLFSFTSPAVKRLLGWKQGDEEEKWAEKAVDALVKKLKKKKGAMEELEKALSCP

SEQ ID NO: 73938 - protein, 62 aa, Homo sapiens
MASRGATRPNGPNTGNKICQFKLVLLGESAVGKSSLVLRFVKGQFHEFQESTIGVLFFQLLF

SEQ ID NO: 73939 - protein, 186 aa, Homo sapiens
MLMPKKNRIAIYELLFKEGVMVAKKDVHMPKHPELADKNVPNLHVMKAMQSLKSRGYVKEQFAWRHFYWYLTNEGIQYLRDYLHLPPEIVPATLRRSRPETGRPRPKGLEGERPARLTRGEADRDTYRRSAVPPGADKKAEAGAGSATEFQFQNLQRSNQSAAHADVMCFLLQRGGFGRGRGQPPQ

SEQ ID NO: 73940 - protein, 126 aa, Homo sapiens
MRANDALQVLGLLFSLARGSEVGNSQAVCPGTLNGLSVTGDAENQYQTLYKLYERCEVVMGNLEIVLTGHNADLSFLQWIREVTGYVLVAMNEFSTLPLPNLRVVRGTQVYDGKFAIFVMLNYNTN

SEQ ID NO: 73941 - protein, 48 aa, Homo sapiens
MREYKLVVLGSGGVGKSALTVQFVQGIFVEKYDPTIEDSYRKQVEVDA

SEQ ID NO: 73942 - protein, 176 aa, Homo sapiens
MEYDEKLARFRQAHLNPFNKQSGPRQHEQGPGEEVPDVTPEEALPELPPGEPEFRCPERVMDLGLSEDHFSRPVGLFLASDVQQLRQAIEECKQVILELPEQSEKQKDAVVRLIHLRLKLQELKRCQAKGFVCELCREGDVLFPFDSHTSVCADCSAVFHRDCYYDNSTTCPKCAR

SEQ ID NO: 73943 - protein, 28 aa, Homo sapiens
MVFKAQLFALTGVQPARQKVMVKGGTLK

SEQ ID NO: 73944 - protein, 160 aa, Homo sapiens
FLPDNFSPAKPKPSKDLKPLLGSAVLGLLLVLAAVVAWCYYSVSLRKAERLRAELLDLKAGGFSIRNQKGEQEPQPFVTSDVYSSDAAFGGILERYWLSSRAAAIKVNDSVPFHLGWNSTERSLRLQARYHDTPYKPPAGRAAAPELSYRVCVGSDVTSI

SEQ ID NO: 73945 - protein, 122 aa, Homo sapiens
MNRLRNAKIYVERAVKQKKIFTIQGCYPVIRCLLRRRGWVEKKMVHRSGPTLLPPQKDLDSSAMGDSDTTEDEDEDEDEEFQPSQLFDFDDLLKFDDLDGTHALMSRMVQNEIPYFIWTTRR

SEQ ID NO: 73946 - protein, 797 aa, Homo sapiens [sequence omitted]

SEQ ID NO: 73947 - protein, 36 aa, Homo sapiens
MYHCHSGSKPTEKGANEYAYAKWKLCSASAICFIFM

SEQ ID NO: 73948 - protein, 444 aa, Homo sapiens
  MOD_RES (1)..(1): Any amino acid
XRDGLAAQPQPPRPARPACGSSPMAEQLALVIGGTIGGLLLLLLIGASCCLWRRFCATLTYEELPGTPAMATTAASSGQRDRPCQPHARTQLSRPPAVPFVVPPTLQGRDWVPLHSGEWADAPWDPCPASELLPHTSSGGLGDACMVGAINPELYKFPEDKSETDFPDGCLGRLWFSVEYEQEAERLLVGLIKAQHLQAPSETCSPLVKLYLLPDERRFLQSKTKRKTSNPQFDEHFIFQVSSKTITQRVLKFSVYHVDRQRKHQLLGQVLFPLKNETLVGDCRRVIWRDLEAESLEPPSEFGDLQFCLSYNDYLSRLTVVVLRAKGLRLQEDRGIVSVFVKVSLMNHNKFVKCKKTSAVLGSINPVYNETFSFKADATELDTASLSLTVVQNMEGDKSQQLGRVVVGPYMYTRGRELEHWDEMLSKPKELVKRWHALCRTTEP

SEQ ID NO: 73949 - protein, 142 aa, Homo sapiens
MTQDRPLLAVQEALKKCFPVVEEQQGLWQSALRDCQPLLSSLSNLAEQLQAAQNLRFEDVPALRAFPDLKERLRRKQLVAGDIVLDKLGERLAILLKVRDMVSSHVERVFQIYEQHADTVGIDAVLQPSAVSPSVADMLEWL

SEQ ID NO: 73950 - protein, 36 aa, Homo sapiens
MNKRIHYYSRLTTPADKALIAPDHVVPAPEECYVYS

SEQ ID NO: 73951 - protein, 506 aa, Homo sapiens
MKQRKGQGSGGSRGRKKRGLSDISPSTSLPPLVEGQLRCFLKLTVNRVIWKIAKPPTCVLVRVRWWGETSDGTLFCPRDALQTEPKAVRTTTRYAIRCGPKQFTSYLTDMAVLVLEVITKLDGLPIGRVQINGLAQLSPTHQINGFFTIVSSTSKKLGELQVSLALEPLSETYDSYHPLPTTDMTENVLLSKQGFRENTEPSSTQFQVPSRPRDIHTIKIDGKELAANSSRSTTPRGKDHVCFAENPDTIKDSSFGLQHSLNSGQSLESVTLKGRAPRKQMSLLNSSEFQPQIRTVAKSHSDSCILSSNNLPTKDLLSALLEQGNKLRNAMVISAMKSSPETSMLLDQVHPPINEDSLRASTQIRAFSRNRFKDHIEDHLLPSTENTFWRHDTKADTRAIQLLLGSLGLTRCRDCRRSLVHAVLNGAQAGVQWRDIGSLQPPPPSRLPWPPKVPRLQPLPGRHPVWEVRSVSAWPPIVWDVRIPSAWLPSLESEERLCPPAIPSRK

SEQ ID NO: 73952 - protein, 213 aa, Homo sapiens
MYQVSGQRPSGCDAPYGAPSAAPGPAQTLSLLPGLEVVTGSTHPAEAAPEEGSLEEAATPMPQGNGPGIPQGLDSTDLDVPTEAVTCQPQGNPLGCTPLLPNDSGHPSELGGTRRAGNGALGGPKAHRKLQTHPSLASQGSKKSKSSSKSTTSQIPLQAQEDCCVHCILSCLFCEFLTLCNIVLDCATCGSCSSEDSCLCCCCCGSGECADCD

SEQ ID NO: 73953 - protein, 45 aa, Homo sapiens
  MOD_RES (1)..(1): Any amino acid
XYELNGKDLCGERVIVEHARGPRRDGSYGSGRKSFEAKMTACSIC

SEQ ID NO: 73954 - protein, 131 aa, Homo sapiens
MTLKASEGESGGSMHTALSDLYLEHLLQKRSRPEAVSHPLNTVTEDMYTNGSPAPGSPAQVKGQEGITLKLNEKQSCTVARILHGGMIHRQGSLHVGDEILEINGTNVTNHSVDQLQKAMKETKGMISLKV

SEQ ID NO: 73955 - protein, 154 aa, Homo sapiens
MFEAIGFLAIKLGVIPSDFSYAGLKDKKAITYQAMVVRKVTPERLKNIEKEIEKKRMNVFNIRSVDDSLRLGQLKGNHFDIVIRNLKKQINDSANLRERIMEAIENVKKKGFVNYYGPQRFGKGRKVHTDQIGLALLKNEMMKAIKLFLTPEDL

SEQ ID NO: 73956 - protein, 151 aa, Homo sapiens
APAASQPSGCGKHNSPERKVYMDYNATTPLEPEVIQAMTKAMWEAWGNPSSPYSAGRKAKDIINAARESLAKMIGGKPQDIIFTSGGTESNNLVIHSVVKHFHANQTSKGHTGGHHSPVKGAKPHFITSSVEHDSIRLPLEHLVEEQVAGE

SEQ ID NO: 73957 - protein, 3961 aa, Homo sapiens
MTTMLQKSDSNASFLRAARAGNLDKVVEYLKGGIDINTCNQNGLNALHLAAKEGHVGLVQELLGRGSSVDSATKKGNTALHIASLAGQAEVVKVLVKEGANINAQSQNGFTPLYMAAQENHIDVVKYLLENGANQSTATEDGFTPLAVALQQGHNQAVAILLENDTKGKVRLPALHIAARKDDTKSAALLLQNDHNADVQSKMMVNRTTESGFTPLHIAAHYGNVNVATLLLNRGAAVDFTARNGITPLHVASKRGNTNMVKLLLDRGGQIDAKTRDGLTPLHCAARSGHDQVVELLLERGAPLLARTKNGLSPLHMAAQGDHVECVKHLLQHKAPVDDVTLDYLTALHVAAHCGHYRVTKLLLDKRANPNARALNGFTPLHIACKKNRIKVMELLVKYGASIQAITESGLTPIHVAAFMGHLNIVLLLLQNGASPDVTNIRGETALHMAARAGQVEVVRCLLRNGALVDARAREEQTPLHIASRLGKTEIVQLLLQHMAHPDAATTNGYTPLHISAREGQVDVASVLLEAGAAHSLATKKGFTPLHVAAKYGSLDVAKLLLQRRAAADSAGKNGLTPLHVAAHYDNQKVALLLLEKGASPHATAKNGYTPLHIAAKKNQMQIASTLLNYGAETNIVTKQGVTPLHLASQEGHTDMVTLLLDKGANIHMSTKSGLTSLHLAAQEDKVNVADILTKHGADQDAHTKLGYTPLIVACHYGNVKMVNFLLKQGANVNAKTKNGYTPLHQAAQQGHTHIINVLLQHGAKPNATTANGNTALAIAKRLGYISVVDTLKVVTEEVTTTTTTITEKHKLNVPETMTEVLDVSDEEGDDTMTGDGGEYLRPEDLKELGDDSLPSSQFLDGMNYLRYSLEGGRSDSLRSFSSDRSHTLSHASYLRDSAVMDDSVVIPSHQVSTLAKEAERNSYRLSWGTENLDNVALSSSPIHSGFLVSFMVDARGGAMRGCRHNGLRIIIPPRKCTAPTRVTCRLVKRHRLATMPPMVEGEGLASRLIEVGPSGAQFLGPVIVEIPHFAALRGKERELVVLRSENGDSWKEHFCDYTEDELNEILNGMDEVLDSPEDLEKKRICRIITRDFPQYFAVVSRIKQDSNLIGPEGGVLSSTVVPQVQAVFPEGALTKRIRVGLQAQPMHSELVKKILGNKATFSPIVTLEPRRRKFHKPITMTIPVPKASSDVMLNGFGGDAPTLRLLCSITGGTTPAQWEDITGTTPLTFVNECVSFTTNVSARFWLIDCRQIQESVTFASQVYREIICVPYMAKFVVFAKSHDPIEARLRCFCMTDDKVDKTLEQQENFAEVARSRDVEVLEGKPIYVDCFGNLVPLTKSGQHHIFSFFAFKENRLPLFVKVRDTTQEPCGRLSFMKEPKSTRGLVHQAICNLNITLPIYTKESESDQEQEEEIDMTSEKNDETESTETSVLKSHLVNEVPVLASPDLLSEVSEMKQDLIKMTAILTTDVSDKAGSIKVKELVKAAEEEPGEPFEIVERVKEDLEKVNEILRSGTCTRDESSVQSSRSERGLVEEEWVIVSDEEIEEARQKAPLEITEYPCVEVRIDKEIKGKVEKDSTGLVNYLTDDLNTCVPLPKEQLQTVQDKAGKKCEALAVGRSSEKEGKDIPPDETQSTQKQHKPSLGIKKPVRRKLKEKQKQKEEGLQASAEKAELKKGSSEESLGEDPGLAPEPLPTVKATSPLIEETPIGSIKDKVKALQKRVEDEQKGRSKLPIRVKGKEDVPKKTTHRPHPAASPSLKSERHAPGSPSPKTERHSTLSSSAKTERHPPVSPSSKTEKHSPVSPSAKTERHSPASSSSKTEKHSPVSPSTKTERHSPVSSTKTERHPPVSPSGKTDKRPPVSPSGRTEKHPPVSPGRTEKRLPVSPSGRTDKHQPVSTAGKTEKHLPVSPSGKTEKQPPVSPTSKTERIEETMSVRELMKAFQSGQDPSKHKTGLFEHKSAKQKQPQEKGKVRVEKEKGPILTQREAQKTENQTIKRGQRLPVTGTAESKRGVRVSSIGVKKEDAAGGKEKVLSHKIPEPVQSVPEEESHRESEVPKEKMADEQGDMDLQISPDRKTSTDFSEVIKQELEDNDKYQQFRLSEETEKAQLHLDQVLTSPFNTTFPLDYMKDEFLPALSLQSGALDGSSESLKNEGVAGSPCGSLMEGTPQISSEESYKHEGLAETPETSPESLSFSPKKSEEQTGETKESTKTETTTEIRSEKEHPTTKDITGGSEERGATVTEDSETSTESFQKEATLGSPKDTSPKRQDDCTGSCSVALAKETPTGLTEEAACDEGQRTFGSSAHKTQTDSEVQESTATSDETKALPLPEASVKTDTGTESKPQGVIRSPQGLELALPSRDSEVLSAVADDSLAVSHKDSLEASPVLEDNSSHKTPDSLEPSPLKESPCRDSLESSPVEPKMKAGIFPSHFPLPAAVAKTELLTEVASVRSRLLRDPDGSAEDDSLEQTSLMESSGKSPLSPDTPSSEEVSYEVTPKTTDVSTPKPAVIHECAEEDDSENGEKKRFTPEEEMFKMVTKIKMFDELEQEAKQKRDYKKEPKQEESSSSSDPDADCSVDVDEPKHTGSGEDESGVPVLVTSESRKVSSSSESEPELAQLKKGADSGLLPEPVIRVQPPSPLPSSMDSNSSPEEVQFQPVVSKQYTFKMNEDTQEEPGKSEEEKDSESHLAEDRHAVSTEAEDRSYDKLNRDTDQPKICDGHGCEAMSPSSSAAPVSSGLQSPTGDDVDEQPVIYKESLALQGTHEKDTEGEELDVSRAESPQADCPSESFSSSSSLPHCLVSEGKELDEDISATSSIQKTEVTKTDETFENLPKDCPSQDSSITTQTDRFSMDVPVSDLAENDEIYDPQITSPYENVPSQSFFSSEESKTQTDANHTTSFHSSEVYSVTITSPVEDVVVASSSSGTVLSKESNFEGQDIKMESQQESTLWEMQSDSVSSSFEPTMSATTTVVGEQISKVIITKTDVDSDSWSEIREDDEAFEARVKEEEQKIFGLMVDRQSQGTTPDTTPARTPTEEGTPTSEQNPFLFQEGKLFEMTRSGAIDMTKRSYADESFHFFQIGQESREETLSEDVKEGATGADPLPLETSAESLALSESKETVDDEADLLPDDVSEEVEEIPASDAQLNSQMGISASTETPTKEAVSVGTKDLPTVQTGDIPPLSGVKQISCPDSSEPAVQVQLDFSTLTRSVYSDRGDDSPDSSPEEQKSVIEIPTAPMENVPFTESKSKIPVRTMPTSTPAPPSAEYESSVSEDFLSSVDEENKADEAKPKSKLPVKVPLQRVEQQLSDLDTSVQKTVAPQGQDMASIAPDNRSKSESDASSLDSKTKCPVKTRSYTETETESRERAEELELESEEGATRPKILTSRLPVKSRSTTSSCRGGTSPTKESKEHFFDLYRNSIEFFEEISDEASKLVDRLTQSEREQEIVSDDESSSALEVSVIENLPPVETEHSVPEDIFDTRPIWDESIETLIERIPDENGHDHAEDPQDEQERIEERLAYIADHLGFSWTELARELDFTEEQIHQIRIENPNSLQDQSHALLKYWLERDGKHATDTNLVECLTKINRMDIVHLMETNTEPLQERISHSYAEIEQTITLDHSEGFSVLQEELCTAQHKQKEEQAVSKESETCDHPPIVSEEDISVGYSTFQDGVPKTEGDSSATALFPQTHKEQVQQDFSGKMQDLPEESSLEYQQEYFVTTPGTETSETQKAMIVPSSPSKTPEEVSTPAEEEKLYLQTPTSSERGGSPIIQEPEEPSEHREESSPRKTSLVIVESADNQPETCERLDEDAAFEKGDDMPEIPPETVTEEEYIDEHGHTVVKKVTRKIIRRYVSSEGTEKEEIMVQGMPQEPVNIEEGDGYSKVIKRVVLKSDTEQSEVTLCEPSILSSTSQFQAEPVEGRRVSKVVKTTVVLGERMEKHLGDSSLATDLPSAKDDFEEV

SEQ ID NO: 73958 - protein, 67 aa, Homo sapiens
MQPRTPLVLCVLLSQVLLLTSAEDLDCTPGFQQKVFHINQPAEFIEDQSILNCKQCHSKMLLDSSHI

SEQ ID NO: 73959 - protein, 87 aa, Homo sapiens
  MOD_RES (1)..(1): Any amino acid
XASLPSGPSSSPGSVPATVPMQMPKPSRVQQALAGATPKPEPEPEQVIKNYTEELKVPPDESVESMRKIWTASSAWRSCPQRLDTAM

SEQ ID NO: 73960 - protein, 725 aa, Homo sapiens
MGRSNSRSHSSRSKSRSQSSSRSRSRSHSRKKRYSSRSRSRTYSRSRSRDRMYSRDYRRDYRNNRGMRRPYGYRGRGRGYYQGGGGRYHRGGYRPVWNRRHSRSPRRGRSRSRSPKRRSVSSQRSRSRSRRSYRSSRSPRSSSSRSSSPYSKSPVSKRRGSQEKQTKKAEGEPQEESPLKSKSQEEPKDTFEHDPSESIDEFNKSSATSGDIWPGLSAYDNSPRSPHSPSPIATPPSQSSSCSDAPMLSTVHSAKNTPSQHSHSIQHSPERSGSGSVGNGSSRYSPSQNSPIHHIPSRRSPAKTIAPQNAPRDESRGRSSFYPDGGDQETAKTGKFLKRFTDEESRVFLLDRGNTRDKEASKEKGSEKGRAEGEWEDQEALDYFSDKESGKQKFNDSEGDDTEETEDYRQFRKSVLADQGKSFATASHRNTEEEGLKYKSKVSLKGNRESDGFREEKNYKLKETGYVVERPSTTKDKHKEEDKNSERITVKKETQSPEQVKSEKLKDLFDYSPPLHKNLDAREKSTFREESPLRIKMIASDSHRPEVKLKMAPVPLDDSNRPASLTKDRLLASTLVHSVKKEQEFRSIFDHIKLPQASKSTSESFIQHIVSLVHHVKEQYFKSAAMTLNERFTSYQKATEEHSTRQKSPEIHRIDISPSTLRKHTRLAGEERVFKEENQKGDKKLRCDSADLRHDIDRRRKERSKERGDSKGSRESSGSRKQEKT

SEQ ID NO: 73961 - protein, 261 aa, Homo sapiens
  MOD_RES (1)..(1): Any amino acid
XVRAWHLGAQAVDRGDWARALHLFSGVPAPPARLCFNAGCVHLLAGDPEAALRAFDQAVTKDTCMAVGFFQRGVANFQLARFQEALSDFWLALEQLRGHAAIDYTQLGLRFKLQAWEVLHNVASAQCQLGLWTEAASSLREAMSKWPEGSLNGLDSALDQVQVVASAIPDDQGWGVRPQQPQGPGANHDARSLIMDSPRAGTHQGPLDAETEVGADRCTSTAYQEQRPQVEQVGKQAPLSPGLPAMGGPGPGPCEDPAGAG

SEQ ID NO: 73962 - protein, 156 aa, Homo sapiens
MWQLYSPEISTIRHLHVACRLIGDRYSGENGDNFNRTPASSSEMDDGPSRRDHFMKSGFASGRNFGNRDAGECNKRDNTSTMGGFGVGKSFGNRGFSNSRFEDGDSSGFWRESSNDCEDNPTRNRGFSKRGGYRDGNNSEASGPYRRGGRGSFRGC

SEQ ID NO: 73963 - protein, 63 aa, Homo sapiens
MSSRKLSGPKGRRLRSPMSVCRGSSYWSLPSISICPISRFCLLNPPPLACLGTGGTKVESTSA

SEQ ID NO: 73964 - protein, 92 aa, Homo sapiens
MDQPNSFPVCRCHLEFFQLPMMGGAFMDSPNEDFSTEYSLFNSSANVHAAANGQGQPEDPPRSSNDAVLLWIAIIATLGNIVVVGVVYAFTF

SEQ ID NO: 73965 - protein, 207 aa, Homo sapiens
  MOD_RES (1)..(1): Any amino acid
XTVFLFGLLSFSRSVALFRGYHGPLDLYPEFYRIATDPTIHTVPEGRPVNVCVGKEWYRFPSSFLLPDNWQLQFIPSEFRGQLPKPFAEGPLATRIVPTDMNDQNLEEPSRYIDISKCHYLVDLDTMRETPREPKYSSNKEEWISLAYRPFLDASRSSKLLRAFYVPFLSDQYTVYVNYTILKPRKAKQIRKKSGDRRRAEPTYRKN

SEQ ID NO: 73966 - protein, 244 aa, Homo sapiens
  MOD_RES (1)..(1): Any amino acid
XNPDGSASPTADPGSELQTLGQAARRPPPPRAGHDAPRRTRPSARKPLSCFSRRPMPTREPPKTRGSRGHLHTHPPGPGPPLQGLAPRGLKTSAPRPPCQPQPGPHKAKTKKIVFEDELLSQALLGAKKPIGAIPKGHKPRPHPVPDYELKYPPVSSERERSRYVAVFQDQYGEFLELQHEVGCAQAKLRQLEALLSSLPPPQSQKEAQVAARVWREFEMKRMLPLPGVAFSWIANASSVWTQL

SEQ ID NO: 73967 - protein, 619 aa, Homo sapiens
MAKNRRDRNSWGGFSEKTYEWSSEEEEPVKKAGPVQVLIVKDDHSFELDETALNRILLSEAVRDKEVVAVSVAGAFRKGKSFLMDFMLRYMYNQESVDWVGDYNEPLTGFSWRGGSERETTGIQIWSEIFLINKPDGKKVAVLLMDTQGTFDSQSTLRDSATVFALSTMISSIQVYNLSQNVQEDDLQHLQLFTEYGRLAMEETFLKPFQSLIFLVRDWSFPYEFSYGADGGAKFLEKRLKVSGNQHEELQNVRKHIHSCFTNISCFLLPHPGLKVATNPNFDGKLKEIDDEFIKNLKILIPWLLSPESLDIKEINGNKITCRGLVEYFKAYIKIYQGEELPHPKSMLQATAEANNLAAVATAKDTYNKKMEEICGGDKPFLAPNDLQTKHLQLKEESVKLFRGVKKMGGEEFSRRYLQQLESEIDELYIQYIKHNDSKNIFHAARTPATLFVVIFITYVIAGVTGFIGLDIIASLCNMIMGLTLITLCTWAYIRYSGEYRELGAVIDQVAAALWDQDIYFSFFFLICLCHREVQMRLCTSFTVQQQPTDICIIKLSLHQSRNLLNNQKRKKCNANFKKYRCMTNCQLNIQFYVSMQTFKVLPSERSKILNTSEDCKLD

SEQ ID NO: 73968 - protein, 1141 aa, Homo sapiens [sequence omitted]

SEQ ID NO: 73969 - protein, 68 aa, Homo sapiens
MPNKNKKEKESPKAGKSGKSSKEGQDTVESECYCLRAGATELEITTENTEMLGPSLLPHKDTRGNLAY

SEQ ID NO: 73970 - protein, 195 aa, Homo sapiens
MMTEKHEDHCLKSCSGHSYIRKNWLGCIVFPFSALLQQSEISGTFQVTIPPVLLGYTWSNTYVFPKEDSNEQNLKECTFLNIFATIEPQISYVTCNPTLDKFLDQTEVLQRAQIFKKNCKAMFPNRRIVTTVFNDEGIQFLVTRYIKALNPPQQLLDIFLHNSNATFDLIARFVSLIPFVPNTPDENDGSDIWMT

SEQ ID NO: 73971 - protein, 65 aa, Homo sapiens
  MOD_RES (1)..(1): Any amino acid
XLFAALMSRWKATRIFSYGYGRIEILSGFINGLFLIVIAFFVFMESVARLIDPPELDTHMLTPCP

SEQ ID NO: 73972 - protein, 121 aa, Homo sapiens
MASSTPSSSATSSNAGADPNTTNLRPTTYDTWCGVAHGCTRKLGLKICGFLQRTNSLEEKSRLVSAFKERQSSKNLLSCENSDRDARFRRTETDFSNLFARDLLPAKNGEEQTVQFLLEVV

SEQ ID NO: 73973 - protein, 313 aa, Homo sapiens
KRAAVPRFVQQKLYLFLQHCFGHWPLDASFRAVLEMWLSYLQPWRYAPDKQAPGSDSQPRCVSEKWAPFVQENLLMYTKLFVGFLNRALRTDLVSPKHALMVFRVAKVFAQPNLAEMIQKGEQLFLEPELVIPHRQHRLFTAPTFTGSFLSPWPPAVTDASFKVKSHVYSLEGQDCKYTPMFGPEARTLVLRLAQLITQAKHTAKSISDQCAESPAGHSFLSWLGFSSMDTNGSYTANDLDEMGQDSVRKTDEYLEKALEYLRQIFRFAGQMAALCSRDDFLGSFCRYHLTEPGLASRHLLSPVGRRQVAGHT

SEQ ID NO: 73974 - protein, 101 aa, Homo sapiens
MTKSNGEEPKMGGRMERFQQGVRKRTLLAKKKVQNITKEDVKSYLFRNAFVLLTVTAVIVGTILGFTLRPYRMSYREVKYFSFPGELLMRMLQMLVLPLII

SEQ ID NO: 73975 - protein, 166 aa, Homo sapiens
MGQTSVSTLSPQPGSVLERKISTRQSREELIRRGVLKELPDQDGDVTVNFENSNGHMIPIGEESTREENVVKSEEGNGSVSEKTPPLEEQAEDKKAGSSHSKKTTGSKASASPSTSSTSSRPKASKETVSSKAGTVGTTKGKRKTDKQPITSHLSSDTTTSGTSDL

SEQ ID NO: 73976 - protein, 648 aa, Homo sapiens
MLNIWGVMLFIRLSWIVGEAGIGLGVLIILLSTMVTSITGLSTSAIATNGFVRGGGAYYLISRSLGPEFGGSIGLIFAFANAVAVAMYVVGFAETVVDLLKESDSMMVDPTNDIRIIGSITVVILLGISVAGMEWEAKAQVILLVILLIAIANFFIGTVIPSNNEKKSRGFFNYQASIFAENFGPRFTKGEGFFSVFAIFFPAATGILAGANISGDLEDPQDAIPRGTMLAIFITTVAYLGVAICVGACVVRDATGNMNDTIISGMNCNGSAACGLGYDFSRCRHEPCQYGLMNNFQVMSMVSGFGPLITAGIFSATLSSALASLVSAPKVFQALCKDNIYKALQFFAKGYGKNNEPLRGYILTFLIAMAFILIAELNTIAPIISNFFLASYALINFSCFHASYAKSPGWRPAYGIYNMWVSLFGAVLCCAVMFVINWWAAVITYVIEFFLYVYVTCKKPDVNWGSSTQALSYVSALDNALELTTVEDHVKNFRPQCIVLTGGPMTRPALLDITHAFTKNSGLCICCEVFVGPRKLCVKEMNSGMAKKQAWLIKNKIKAFYAAVAADCFRDGVRSLLQASGLGRMKPNTLVIGYKKNWRKAPLTEIENYVGIIHDAFDFEIGVVIVRISQGFDISQVLQVQEELERLE

SEQ ID NO: 73977 - protein, 272 aa, Homo sapiens
MNPTLILAAFCLGIASATLTFDHSLEAQWTKWKAMHNRLYGMNEEGWRRAVWEKNMKMIELHNQEYREGKHSFTMAMNAFGDMTSEEFRQVMNGFQNRKPRKGKVFQEPLFYEAPRSVDWREKGYVTPVKNQGQCGSCWAFSATGALEGQMFRKTGRLISLSEQNLVDCSGPQGNEGCNGGLMDYAFQYVQDNGGLDSEESYPYEATEESCKYNPKYSVANDTGFVDIPKQEKALMKAVATVGPISVAIDAGHESFLFYKEAGVKNGAWVAT

SEQ ID NO: 73978 - protein, 11 aa, Homo sapiens
MYPSTTMANAP

SEQ ID NO: 73979 - protein, 136 aa, Homo sapiens
METNFSTPLNEYEEVSYESAGYTVLRILPLVVLGVTFVLGVLGNGLVIWVAGFRMTRTVTTICYLNLALADFSFTATLPFLIVSMAMGEKWPFGWFLCKLIHIVVDINLFGSVFLIGFIALDRCICVLHPVWAQNH

SEQ ID NO: 73980 - protein, 85 aa, Homo sapiens
  MOD_RES (1)..(1): Any amino acid
XLSLPPSTGFPLQASGVPSPYLSSLASSRYPPFPSDYLALQLPEPSPLRPKREKRPRLPRKLKMFSDAGSGDDALDGDDDLVIDI

SEQ ID NO: 73981 - protein, 124 aa, Homo sapiens
MRCLTTPMLLRALAQAARAGPPGGRSLHSSAVAATYKYVNMQDPEMDMKSVTDRAARTLLWTELFRGLGMTLSYLFREPATINYPFEKGPLSPRFRGEHALRRYPSGEERCIACKLCEAICPAQ

SEQ ID NO: 73982 - protein, 123 aa, Homo sapiens
  MOD_RES (1)..(1): Any amino acid
XEEAIIIVEDEDEDERESMRSSRRRRRRRRRKQRKVKRESRERNAERMESILQALEDIQLDLEAVNIKAGKAFLRLKRKFIQMRRPFLERRDLIIQHIPGFWVKALHSSVPQPPQNFNFDQPT

SEQ ID NO: 73983 - protein, 212 aa, Homo sapiens
MMGGFCEPFSNPLAPDGHDVDDPHSFHQSKLTNEDFRKLLMTPRAAPTSAPPSKSRHHEMPREYNEDEDPAARRRKKKSYYAKLRQQEIERERELAEKYRDRAKERRDGVNKDYEETELISTTANYRAVGPTAEADKSAAEKRRQLIQESKFLGGDMEHTHLVKGLDFALLQKVRAEIASKEKEEEELMEKPQKETKKDEDPENKIEFKTRL

SEQ ID NO: 73984 - protein, 174 aa, Homo sapiens
MKATIILLLLAQVSWAGPFQQRGLFDFMLEDEASGIGPEVPDDRDFEPSLGPVCPFRCQCHLRVVQCSDLGLDKVPKDLPPDTTLLDLQNNKITEIKDGDFKNLKNLHALILVNNKISKVSPGAFTPLVKLERLYLSKNQLKELPEKMPKTLQELRAHENEITKVRKVTFNGLN

SEQ ID NO: 73985 - protein, 114 aa, Homo sapiens
MRQTFSPFGQIMEIRVFPDKGYSFVRFNSHESAAHAIVSVNGTTIEGHVVKCYWGKETLDMINPVQQQNQIGYPQPYGQWGQWYGNAQQIGQYMPNGWQVPAYGMYGQAWNQQG

SEQ ID NO: 73986 - protein, 316 aa, Homo sapiens
MAAAMPLALLVLLLLGPGGWCLAEPPRDSLREELVITPLPSGDVAATFQFRTRWDSELQREGVSHYRLFPKALGQLISKYSLRELHLSFTQGFWRTRYWGPPFLQAPSGAELWVWFQDTVTEPLSPSDTDHYFLRYAVLPREVVCTENLTPWKKLLPCSSKAGLSVLLKADRLFHTSYHSQAVHIRPVCRNARCTSISWELRQTLSVVFDAFITGQGKKDWSLFRMFSRTLTEPCPLASESRVYVDITTYNQDNETLEVHPPPTTTYQDVILGTRKTYAIYDLLDTAMINNSRNLNIQLKWKRPPENEAPPVPFLH

SEQ ID NO: 73987 - protein, 63 aa, Homo sapiens
SLTRDPLVIELGQKQVIPGLEQSLLDMCVGWKNSCFGCEDSGGFAEGASAGLRLLAYLSCLWL

SEQ ID NO: 73988 - protein, 238 aa, Homo sapiens
MMAAVPPGLEPWNRVRIPKAGNRSAVTVQNPGAALDLCIAAVIKECHLVILSLKSQTLDAETDVLCAVLYSNHNRMGRHKPHLALKQVEQCLKRLKNMNLEGSIQDLFELFSSKVLYKGVLKRLILLYEPLFGLLQEVARIQPMPYFKDFTFPSDITEFLGQPYFEAFKKKMPIAFAAKGINKLLNKLFLINEQSPRASEETLLGISKKAKQMKINVQNNVDLGQPVKNKRVFKGDQF

SEQ ID NO: 73989 - protein, 170 aa, Homo sapiens
MRIRSLHPVQQTEPTTCTEAKKHCWYFEGLYPTYYICRSYEDCCGSRCCVRALSIQRLWYFWFLLMMGVLFCCGAGFFIRRRMYPPPLIEEPAFNVSYTRQPPNPGPGAQQPGPPYYTDPGGPGMNPVGNSMAMAFQVPPNSPQGSVACPPPPAYCNTPPPPYEQVVKAK

SEQ ID NO: 73990 - protein, 481 aa, Homo sapiens
MAPWLQLLSLLGLLPGAVAAPAQPRAASFQAWGPPSPELLAPTRFALEMFNRGRAAGTRAVLGLVRGRVRRGSLYSLEATLEEPPCNDPMVCRLPVSKKTLLCSFQVLDELGRHVLLRKDCGPVDTKVPGAGEPKSAFTQGSAMISSLSQNHPDNRNETFSSVISLLNEDPLSQDLPVKMASIFKNFVITYNRTYESKEEARWRLSVFVNNMVRAQKIQALDRGTAQYGVTKFSDLTEEEFRTIYLNTLLRKEPGNKMKQAKSVGDLAPPEWDWRSKGAVTKVKDQGMCGSCWAFSVTGNVEGQWFLNQGTLLSLSEQELLDCDKMDKACMGGLPSNAYSAIKNLGGLETEDDYSYQGHMQSCNFSAEKAKVYINDSVELSQNEQKLAAWLAKRGPISVAINAFGMQFYRHGISRPLRPLCSPWLIDHAVLLVGYGNRSDVPFWAIKNSWGTDWGEKGYYYLHRGSGACGVNTMASSAVVD

SEQ ID NO: 73991 - protein, 366 aa, Homo sapiens
MHLRIHARRSPPRRPAWTLGIWFLFWGCIVSSVWSSSNVASSSSTSSSPGSHSQHEHHFHGSKHHSVPISIYRSPVSLRGGHAGATYIFGKSGGLILYTWPANDRPSTRSDRLAVGFSTTVKDGILVRIDSAPGLGDFLQLHIEQGKIGVVFNIGTVDISIKEERTPVNDGKYHVVRFTRNGGNATLQVDNWPVNEHYPTGNTDNERFQMVKQKIPFKYNRPVEEWLQEKGRQLTIFNTQAQIAIGGKDKGRLFQGQLSGLYYDGLKVLNMAAENNPNIKINGSVRLVGEVPSILGTTQTTSMPPEMSTTVMETTTTMATTTTRKNRSTASIQPTSDDLVSSAECSSDDEDFVECEPSTDILLKSF

SEQ ID NO: 73992 - protein, 186 aa, Homo sapiens
MQRWTLWAAAFLTLHSAQAFPQTDISISPALPELPLPSLCPLFWMEFKGHCYRFFPLNKTWAEADLYCSEFSVGRKSAKLASIHSWEENVFVYDLVNSCVPGIPADVWTGLHDHRQEGQFEWTDGSSYDYSYWDGSQPDDGVHADPEEEDCVQIWYRPTSALRSWNDNTCSRKFPFVCKIPSLTIH

SEQ ID NO: 73993 - protein, 84 aa, Homo sapiens
MSGRVGDLSPRQKEALAKFRENVQDVLPALPNPDDYFLLRWLRARSFDLQKSEAMLRKHVEFRKQKDIDNIISWQPPEPPNRTC

SEQ ID NO: 73994 - protein, 193 aa, Homo sapiens
EHKSCEEKSVKNTSIRVADFGSATFDHEHHTTIVATRHYRPPEVILELGWAQPCDVWSIGCILFEYYRGFTLFQTHENREHLVMMEKILGPIPSHMIHRTRKQKYFYKGGLVWDENSSDGRYVKENCKPLKVSFWLPPAELMPRRDPRHWADIQQRQARPLKAASLIQLYGRRHPRLLGAGNGASCKLPQRGP

SEQ ID NO: 73995 - protein, 359 aa, Homo sapiens
MRPPQCLLHTPSLASPLLLLLLWLLGGGVGAEGREDAELLVTVRGGRLRGIRLKTPGGPVSAFLGIPFAEPPMGPRRFLPPEPKQPWSGVVDATTFQSVCYQYVDTLYPGFEGTEMWNPNRELSEDCLYLNVWTPYPRPTSPTPVLVWIYGGGFYSGASSLDVYDGRFLVQAERTVLVSMNYRVGAFGFLALPGSREAPGNVGLLDQRLALQWVQENVAAFGGDPTSVTLFGESAGAASVGMHLLSPPSRGLFHRAVLQSGAPNGPWATVGMGEARRRATQLAHLVGCPPGGTGGNDTELVACLRTRPAQVLVNHEWHVLPQESVFRFSFVPVVDGDFLSDTPEALINAGDFHGLQGSQ

SEQ ID NO: 73996 - protein, 86 aa, Homo sapiens
  MOD_RES (1)..(1): Any amino acid
XKEAPEAQMQGSLLPRLECSGTITAASISQAQENSWKPRLPPHAHCLTRATLHSGELLGLLSVPPRGELIAKAKQVETLDPRALRV

SEQ ID NO: 73997 - protein, 116 aa, Homo sapiens
MEANDHFNFTGLPPAPAASGLKPSPSSGEGLYTNGSPMNFPQQGKSLNGDVNVNGLSTVSHTTTSGILNSAPHSSSTSHLHHPSVAYDCLWNYSQYPSANPGSNLKDPPLLSQFSG

SEQ ID NO: 73998 - protein, 32 aa, Homo sapiens
MEIQCSRILLSSLRFSVSRLLTLSRWRRCWRV

SEQ ID NO: 73999 - protein, 106 aa, Homo sapiens
MSGSDGGLEEEPELSITLTLRMLMHGKEVGSIIGKKGETVKRIREQSSARITISEGSCPERITTITGSTAAVFHAVSMIAFKLDEDLCAAPANGGNVSRPPVTLRL

SEQ ID NO: 74000 - protein, 265 aa, Homo sapiens
FILVDRYLSWFLPTEGSVPPPLSSSPGGTSPSPPPRTPAIPFASYGLHHTSLLKRHISHQTSVNADPASHEIWRSETLLQVFVEMWLHHYSLEMYQKMQSPHAKESFTPTEEHVLVVRLLLKHLHAFANSLKPEQASPSAHSHATSPLEEFKRAAVPRFVQQKLYLFLQHCFGHWPLDASFRAVLEMWLSYLQPWRYAPDKQAPGSDSQPRAPFVQENLLMYTKLFVGFLNRALRTDLVSPKHALMVFRVAKVFAQPNLAEMIQK

SEQ ID NO: 74001 - protein, 305 aa, Homo sapiens
MATAAETSASEPEAESKAGPKADGEEDEVKAARTRRKVLSRAVAAATYKTMGPAWDQQEEGVSESDGDEYAMASSAESSPGEYEWEYDEEEEKNQLEIERLEEQLSINVYDYNCHVDLIRLLRLEGELTKVRMARQKMSEIFPLTEELWLEWLHDEISMAQDGLDREHVYDLFEKAVKDYICPNIWLEYGQYSVGGIGQKGGLEKVRSVFERALSSVGLHMTKGLALWEAYREFESAIVEAARLEKVHSLFRRQLAIPLYDMEATFAEYEEWSEDPIPESVIQNYNKALQQLEKYKPYEEALVKK

SEQ ID NO: 74002 - protein, 322 aa, Homo sapiens
MSRFKFIDIGINLTDPMFRGIYRGVQKHQDDLQDVIGRAVEIGVKKFMITGGNLQDSKDALHLAQTNGMFFSTVGCHPTRCGEFEKNNPDLYLKELLNLAENNKGKVVAIGECGLDFDRLQFCPKDTQLKYFEKQFELSEQTKLPMFLHCRNSHAEFLDIMKRNRDRCVGGVVHSFDGTKEAAAALIDLDLYIGFNALCIHIHVISDYGRTVYSVTVIHLCSQRNRGSKKLGNSSLKTEANLEVLKSIPSEKLMIETDAPWCGVKSTHAGSKYIRTAFPTKKKWESGHCLKDRNEPCHIIQILEIMSAVRDEDPLELANTLY

SEQ ID NO: 74003 - protein, 52 aa, Homo sapiens
MEENLISMREDHSFHVRYRMEASCLELALEGERLCKSGDCRAGVSFFEAAVQ

SEQ ID NO: 74004 - protein, 149 aa, Homo sapiens
MAGIFYFALFSCLFGICDAVTGSRVYPANEVTLLDSRSVQGELGWIASPLEGGWEEVSIMDEKNTPIRTYQVCNVMEPSQNNWLRTDWITREGAQRVYIEIKFTLRDCNSLPGVMGTCKETFNLYYYESDNDKERFIRENQFVKIDTIA

SEQ ID NO: 74005 - protein, 75 aa, Homo sapiens
MAAEWASRFWLWATLLIPAAAVYEDQVGKFDWRQQYVGKVKFASLEFSPGSKKLVVATEKNVIAALNSRTGEICE

SEQ ID NO: 74006 - protein, 117 aa, Homo sapiens
MLLVDADQPEPMRSGARELALFLTPEPGAEAKEVEETIEGMLLRLEEFCSLADLIRSDTSQILEENIPVLKAKLTEMRGIYAKVDRLEKSPAPVPVTYELPTLYRTEDYFPVDAGEA

SEQ ID NO: 74007 - protein, 116 aa, Homo sapiens
MRGNLALVGVLISLAFLSLLPSGHPQPAGDDACSVQILVPGLKGDAGEKGDKGAPGRPGRVGPTGEKGDMGDKGQKGSVGRHGKIGPIGSKGEKGDSGDIGPPGPNGEPAPSAPQR

SEQ ID NO: 74008 - protein, 255 aa, Homo sapiens
MAQNLKDLAGRLPAGPRGMGTALKLLLGAGAVAYGVRESVFTVEGGHRAIFFNRIGGVQQDTILAEGLHFRIPWFQYPIIYDIRARPRKISSPTGSKDLQMVNISLRVLSRPNAQELPSMYQRLGLDYEERVLPSIVNEVLKSVVAKFNASQLITQRAQVSLLIRRELTERAKDFSLILDDVAITELSFSREYTAAVEAKQVALSKNPGYIKLRKIRAAQNISKTIATSQNRIYLTADNLVLNLQDESFTRRVQS

SEQ ID NO: 74009 - protein, 911 aa, Homo sapiens
  MOD_RES (1)..(1): Any amino acid
XVEMCVDARTFGNDARFIRRSCTPNAEVRHMIADGMIHLCIYAVSAITKDAEVTIAFDYEYSNCNYKVDCACHKGNRNCPIQKRNPNATELPLLPPPPSLPTIGAETRRRKARRKELEMEQQNEASEENNDQQSQEVPEKVTVSSDHEEVDNPEEKPEEEKEEVIDDQENLAHSRRTREDRKVEAIMHAFENLEKRKKRRDQPLEQSNSDVEITTTTSETPVGEETKTEAPESEVSNSVSNVTIPSTPQSVGVNTRRSSQAGDIAAEKLVPKPPPAKPSRPRPKSRISRYRTSSAQRLKRQKQANAQQAELSQAALEEGGSNSLVTPTEAGSLDSSGENRPLTGSDPTVVSITGSHVNRAASKYPKTKKYLVTEWLNDKAEKQECPVECPLRITTDPTVLATTLNMLPGLIHSPLICTTPKHYIRFGSPFIPERRRRPLLPDGTFSSCKKRWIKQALEEGMTQTSSVPQETRTQHLYQSNENSSSSSICKDNADLLSPLKKWKSRYLMEQNVTKLLRPLSPVTPPPPNSGSKSPQLATPGSSHPGEEECRNGYSLMFSPVTSLTTASRCNTPLQFELCHRKDLDLAKVGYLDSNTNSCADRPSLLNSGHSDLAPHPSLGPTSETGFPSRSGDGHQTLVRNSDQAFRTEFNLMYAYSPLNAMPRADGLYRGSPLVGDRKPLHLDGGYCSPAEGFSSRYEHGLMKDLSRGSLSPGGERACEGVPSAPQNPPQRKKVSLLEYRKRKQEAKENSAGGGGDSAQSKSKSAGAGQGSSNSVSDTGAHGVQGSSARTPSSPHKKFSPSHSSMSHLEAVSPSDSRGTSSSHCRPQENISSRWMVPTSVERLREGGSIPKVLRSSVRVAQKGEPSPTWESNITEKDSDPADGEGPETLSSALSKGATVYSPSRYSYQICD

SEQ ID NO: 74010 - protein, 77 aa, Homo sapiens
MATACKRSGEPQSDDIEASRMKRAAAKHLIERYYHQLTEGCGNEACTNEFCASCPTFLRMDNNAAAIKALELYKINA

SEQ ID NO: 74011 - protein, 146 aa, Homo sapiens
  MOD_RES (1)..(1): Any amino acid
XSDPFVQLTLEPRHEFPELAARETQKHKKDLHPLFDETFEFLVPAEPCRKAGACLLLTVLDYDTLGADDLEGEAFLPLREVPGLSGSEEPGEVPQTRLPLTYPAPNGDPILQLLEGRKGDREAQVFVRLRRHRAKQASQHALRPAP

SEQ ID NO: 74012 - protein, 926 aa, Homo sapiens
MAQCVQSVQELIPDSFVPCVAALCSDEAERLTRLNHLSFAELLKPFSRLTSEVHMRDPNNQLHVIKNLKIAVSNIVTQPPQPGAIRKLLNDVVSGSQPAEGLVANVITAGDYDLNISATTPWFESYRETFLQSMPALDHEFLNHYLACMLVASSSEAEPVEQFSKLSQEQHRIQHNSDYSYPKWFIPNTLKYYVLLHDVSAGDEQRAESIYEEMKQKYGTQGCYLLKINSRTSNRASDEQIPDPWSQYLQKNSIQNQESYEDGPCTITSNKNSDNNLLSLDGLDNEVKDGLPNNFRAHPLQLEQSSDPSNSIDGPDHLRSASSLHETKKGNTGIIHGACLTLTDHDRIRQFIQEFTFRGLLPHIEKTIRQLNDQLISRKGLSRSLFSATKKWFSGSKVPEKSINDLKNTSGLLYPPEAPELQIRKMADLCFLVQHYDLAYSCYHTAKKDFLNDQAMLYAAGALEMAAVSAFLQPGAPRPYPAHYMDTAIQTYRDICKNMVLAERCVLLSAELLKSQSKYSEAAALLIRLTSEDSDLRSALLLEQAAHCFINMKSPMVRKYAFHMILAGHRFSKAGQKKHALRCYCQAMQVYKGKGWSLAEDHINFTIGRQSYTLRQLDNAVSAFRHILINESKQSAAQQGAFLREYLYVYKNVSQLSPDGPLPQLPLPYINSSATRVFFGHDRRPADGEKQAATHVSLDQEYDSESSQQWRELEEQVVSVVNKGVIPSNFHPTQYCLNSYSDNSRFPLAVVEEPITVEVAFRNPLKVLLLLTDLSLLWKFHPKDFSGKDNEEVKQLVTSEPEMIGAEVISEFLINGEESKVARLKLFPHHIGELHILGVVYNLGTIQGSMTVDGIGALPGCHTGKYSLSMSVRGKQDLEIQGPRLNNTKEEKTSVKYGPDRRLDPIITEEMPLLETLALAQEVNQR

SEQ ID NO: 74013 - protein, 132 aa, Homo sapiens
MSSPQAPEDGQGCGDRGDPPGDLRSVLVTTVLNLEPLDEDLFRGRHYWVPAKRLFGGQIVGQALVAAAKSVSEDVHVHSLHCYFVRAEQMPSCVLRRSPAEKSLWTFTGTRSCQYCTKWSGHEQGRASRCAL

SEQ ID NO: 74014 - protein, 568 aa, Homo sapiens
MFLFQEKVQKDSLRPEAARYLERLIKLGRRNGLHLPRETQENIKRIKKKLSLLCIDFNKNLNEDTTFLPFTLQELGGLPEDFLNSLEKMEDGKLKVTLKYPHYFPLLKKCHVPETRRKVEEAFNCRCKEENCAILKELVTLRAQKSRLLGFHTHADYVLEMNMAKTSQTVATFLDELAQKLKPLGEQERAVILELKRAECERRGLPFDGRIRAWDMRYYMNQVEETRYCVDQNLLKEYFPVQVVTHGLLGIYQELLGLAFHHEEGASAWHEDVRLYTARDAASGEVVGKFYLDLYPREGKYGHAACFGLQPGCLRQDGSRQIAIAAMVANFTKPTADAPSLLQHDEVETYFHEFGHVMHQLCSQAEFAMFSGTHVERDFVEAPSQMLENWVWEQEPLLRMSRHYRTGSAVPRELLEKLIESRQANTGLFNLRQIVLAKVDQALHTQTDADPAEEYARLCQEILGVPATPGTNMPATFGHLAGGYDAQYYGYLWSEVYSMDMFHTRFKQEGVLNSKVGMDYRSCILRPGGSEDASAMLRRFLGRDPKQDAFLLSKGLQVGGCEPEPQVC

SEQ ID NO: 74015 - protein, 389 aa, Homo sapiens
MSDDKPFLCTAPGCGQRFTNEDHLAVHKHKHEMTLKFGPARNDSVIVADQTPTPTRFLKNCEEVGLFNELASPFENEFKKASEDDIKKMPLDLSPLATPIIRSKIEEPSVVETTHQDSPLPHPESTTSDEKLVRPVTMVPSVPGIPGPSSPQPVQSEAKMRLKAALTQQHPPVTNGDTVKGHGSGLVRTQSEESRPQSLQQPATSTTETPASPAHTTPQTQSTSGRRRRAANEDPDEKRRKFLERNRAAASRCRQKRKVWVQSLEKKAEDLSSLNGQLQSEVTLLRNEVAQLKQLLLAHKDCPVTAMQKKSGYHTADKDDSSEDISVPSSPHTEAIQHSSVSTSNGVSSTSKAEAVATSVLTQMADQSTEPALSQIVMAPSSQSQPSGS

SEQ ID NO: 74016 - protein, 568 aa, Homo sapiens
  MOD_RES (1)..(1): Any amino acid
XISAYCNLHLLGSSDSPASASQVAGTTGMRHHAQGSVTFEDVAVYFSWEEWDLLDEAQKHLYFDVMLENFALTSSLGCWCGVEHEETPSEQRISGERVPQFRTSKEGSSSQNADSCEICCLVLRDILHLAEHQGTNCGQKLHTCGKQFYISANLQQHQRQHITEAPFRSYVDTASFTQSCIVHVSEKPFTCREIRKDFLANMRFLHQDATQTGEKPNNSNKCAVAFYSGKSHHNWGKCSKAFSHIDTLVQDQRILTREGLFECSKCGKACTRRCNLIQHQKVHSEERPYECNECGKFFTYYSSFIIHQRVHTGERPYACPECGKSFSQIYSLNSHRKVHTGERPYECGECGKSFSQRSNLMQHRRVHTGERPYECSECGKSFSQNFSLIYHQRVHTGERPHECNECGKSFSRSSSLIHHRRLHTGERPYECSKCGKSFKQSSSFSSHRKVHTGERPYVCGECGKSFSHSSNLKNHQRVHTGERPVECSECSKSFSCKSNLIKHLRVHTGERPYECSECGKSFSQSSSLIQHRRVHTGKRPYQCSQCGKSFGCKSVLIQHQRVHIGEKP

SEQ ID NO: 74017 - protein, 19 aa, Homo sapiens
MDAIHIGMSSTPLVKHTAG

SEQ ID NO: 74018 - protein, 169 aa, Homo sapiens; identical to SEQ ID NO: 60738

SEQ ID NO: 74019 - protein, 193 aa, Homo sapiens
  MOD_RES (1)..(1): Any amino acid
XQEIQTYTIAVINALFLKAPDERRQVDVESNVDILDCPLTEMANILAQKQLRSIILTHVIRAQRAINNEMAHQLYVLQVLTFNLLEDRMMTKMDPQDQAQRDIIFELRRIAFDAESEPNNSSGSMEKRKSMYTRDYKKLGFINHVNPAMDFTQTPPGMLALDNMLYFAKHHQDAYIRIVLENSSREDKHECPF

SEQ ID NO: 74020 - protein, 700 aa, Homo sapiens
RSTSGAEPESARARGAGAERGEHREGERGAAGIRCVAYNNQSNRLAVSRTDGTVEIYNLSANYFQEKFFPGHESRATEALCWAEGQRLFSAGLNGEIMEYDLQALNIKYAMDAFGGPIWSMAASPSGSQLLVGCEDGSVKLFQITPDKIQFERNFDRQKSRILSLSWHPSGTHIAAGSIDYISVFDVKSGSAVHKMIVDRQYMGVSKRKCIVWGVAFLSDGTIISVDSAGKVQFWDSATGTLVKSHLIANADVQSIAVADQEDSFVVGTAEGTVFHFQLVPVTSNSSEKQWVRTKPFQHHTHDVRTVAHSPTALISGGTDTHLVFRPLMEKVEVKNYDAALRKITFPHRCLISCSKKRQLLLFQFAHHLELWRLGSTVATGKNGDTLPLSKNADHLLHLKTKGPENIICSCISPCGSWIAYSTVSRFFLYRLNYEHDNISLKRVSKMPAFLRSALQILFSEDSTKLFVASNQGALHIVQLSGGSFKHLHAFQPQSGTVEAMCLLAVSPDGNWLAASGTSAGVHVYNVKQLKLHCTVPAYNFPVTAMAIAPNTNNLVIAHSDQQVFEYSIPDKQYTDWSRTVQKQGFHHLWLQRDTPITHISFHPKRPMHILLHDAYMFCIIDKSLPLPNDKTLLYNPFPPTNESDVIRRRTAHAFKISKIYKPLLFMDLLDERTLVAVERPLDDIIAQLPPPIKKKKFGT

SEQ ID NO: 74021 - protein, 96 aa, Homo sapiens
LLDNLPGVRWLTLPLEIKMELDMALSDLEAADFAELGYLICSHLPKDDLIDIAVYCRHYCLLPLAAKQRIGQLIIWREVFPQHHLRPLADSSTEVF

SEQ ID NO: 74022 - protein, 159 aa, Homo sapiens
MCGPAMFPAGPPWPRVRVVQVLWALLAVLLASWRLWAIKDFQECTWQVVLNEFKRVGESGVSDSFFEQEPVDTVSSLFHMLVDSPIDPSEKYLGFPYYLKINYSCEEKTESCAVAQTGVQWRDLGSLQPPPPVFKRCSCLGLPSSWNYSPLRTWCAWAT

SEQ ID NO: 74023 - protein, 686 aa, Homo sapiens
MAACEGRRSGALGSSQSDFLTPPVGGAPWAVATTVVMYPPPPPPPHRDFISVTLSFGENYDNSKSWRRRSCWRKWKQLSRLQRNMILFLLAFLLFCGLLFYINLADHWKALAFRLEEEQKMRPEIAGLKPANPPVLPAPQKADTDPENLPEISSQKTQRHIQRGPPHLQIRPPSQDLKDGTQEEATKRQEAPVDPRPEGDPQRTVISWRGAVIEPEQGTELPSRRAEVPTKPPLPPARTQGTPVHLNYRQKGVIDVFLHAWKGYRKFAWGHDELKPVSRSFSEWFGLGLTLIDALDTMWILGLRKEFEEARKWVSKKLHFEKDVDVNLFESTIRILGGLLSAYHLSGDSLFLRKAEDFGNRLMPAFRTPSKIPYSDVNIGTGVAHPPRWTSDSTVAEVTSIQLEFRELSRLTGDKKFQEAVEKVTQHIHGLSGKKDGLVPMFINTHSGLFTHLGVFTLGARADSYYEYLLKQWIQGGKQETQLLEDYVEAIEGVRTHLLRHSEPSKLTFVGELAHGRFSAKMDHLVCFLPGTLALGVYHGLPASHMELAQELMETCYQMNRQMETGLSPEIVHFNLYPQPGRRDVEVKPADRHNLLRPETVESLFYLYRVTGDRKYQDWGWEILQSFSRFTRDPQKPEPRDKMESFFLGETLKYLFLLFSDDPNLLSLDAYVFNTEAHPLPIWTPA

SEQ ID NO: 74024 - protein, 1654 aa, Homo sapiens
EKIEQNGLALIQNKKEDVSSIVMSTLRELGQTWANLDHMVGQLKILLKSVLDQWSSHKVAFDKINSYLMEARYSLSRFRLLTGSLEAVQVQVDNLQNLQDDLEKQERSLQKFGSITNQLLKECHPPVTETLTNTLKEVNMRWNNLLEEIAEQLQSSKALLQLWQRYKDYSKQCASTVQQQEDRTNELLKAATNKDIADDEVATWIQDCNDLLKGLGTVKDSLFFLHELGEQLKQQVDASAASAIQSDQLSLSQHLCALEQALCKQQTSLQAGVLDYETFAKSLEALEAWIVEAEEILQGQDPSHSSDLSTIQERMEELKGQMLKFSSMAPDLDRLNELGYRLPLNDKEIKRMQNLNRHWSLISSQTTERFSKLQSFLLQHQTFLEKCETWMEFLVQTEQKLAVEISGNYQHLLEQQRAHELFQAEMFSRQQILHSIIIDGQRLLEQGQVDDRDEFNLKLTLLSNQWQGVIRRAQQRRGIIDSQIRQWQRYREMAEKLRKWLVEVSYLPMSGLGSVPIPLQQARTLFDEVQFKEKVFLRQQGSYILTVEAGKQLLLSADSGAEAALQAELAEIQEKWKSASMRLEEQKKKLAFLLKDWEKCEKGIADSLEKLRTFKKKLSQSLPDHHEELHAEQMRCKELENAVGSWTDDLTQLSLLKDTLSAYISADDISILNERVELLQRQWEELCHQLSLRRQQIGERLNEWAVFSEKNKELCEWLTQMESKVSQNGDILIEEMIEKLKKDYQEEIAIAQENKIQLQQMGERLAKASHESKASEIEYKLGKVNDRWQHLLDLIAARVKKLKETLVAVQQLDKNMSSLRTWLAHIESELAKPIVYDSCNSEEIQRKLNEQQELQRDIEKHSTGVASVLNLCEVLLHDCDACATDAECDSIQQATRNLDRRWRNICAMSMERRLKIEETWRLWQKFLDDYSRFEDWLKSSERTAAFPSSSGVIYTVAKEELKKFEAFQRQVHECLTQLELINKQYRRLARENRTDSACSLKQMVHEGNQRWDNLQKRVTSILRRLKHFIGQREEFETARDSILVWLTEMDLQLTNIEHFSECDVQAKIKQLKAFQQEISLNHNKIEQIIAQGEQLIEKSEPLDAAIIEEELDELRRYCQEVFGRVERYHKKLIRLPLPDDEHDLSDRELELEDSAALSDLHWHDRSADSLLSPQPSSNLSLSLAQPLRSERSGRDTPASVDSIPLEWDHDYDLSRDLESAMSRALPSEDEEGQDDKDFYLRGAVGLSDVMIPESPEAYVKLTENAIKNTSGDHSALESQIRQLGKALDDSRFQIQQTENIIRSKTPTGPELDTSYKGYMKLLGECSSSIDSVKRLEHKLKEEEESLPGFVNLHSTETQTAGVIDRWELLQAQALSKELRMKQNLQKWQQFNSDLNSIWAWLGDTEEELEQLQRLELSTDIQTIELQIKKLKELQKAVDHRKAIILSINLCSPEFTQADSKESRDLQDRLSQMNGRWDRVCSLLEEWRGLLQDALMQCQGFHEMSHGLLLMLENIDRRKNEIVPIDSNLDAEILQDHHKQLMQIKHELLESQLRVASLQDMSCQLLVNAEGTDCLEAKEKVHVIGNRLKLLLKEVSRHIKELEKLLDVSSSQQDLSSWSSADELDTSGSVSPTSGRSTPNRQKTVHKRWLRFLPF

SEQ ID NO: 74025 - protein, 75 aa, Homo sapiens
MSSSRAQQMHAFSWIRNTLEEHPETSLPKQEVYDEYKSYCDNLGYHPLSAADFGKIMKNVFPNMKARRLGTRGKS

SEQ ID NO: 74026 - protein, 706 aa, Homo sapiens
MDDLDALLADLESTTSHISKRPVFLSEETPYSYPTGNHTYQEIAVPPPVPPPPSSEALNGTILDPLDQWQPSSSRFIHQQPQSSSPVYGSSAKTSSVSNPQDSVGSPCSRVGEEEHVYSFPNKQKSAEPSPTVMSTSLGSNLSELDRLLLELNAVQHNPPGFPADEANSSPPLPGALSPLYGVPETNSPLGGKAGPLTKEKPKRNGGRGLEDVRPSVESLLDELESSVPSPVPAITVNQGEMSSPQRVTSTQQQTRISASSATRELDELMASLSDFKTSSSTVALSAPGLSSSAPSSYCSLPPSPPPMPSVFLPPTTIPSPRGQGHTPEFPCTEQSGRGLLPPVAPSWLDLAGLGVMPDTFNSRSPSVEGSLWAVGTESQGRDWRHLPTITSELSGAPRCHTVPCAGSTALQEPGEPQGPPASPSCPEEALAATWEQPWASEVFGPERMPPSGAARSFQEVTEPAVVAVDRQAIFPDTWTLTEEHGLQQERPRPEPGRLGSSSPASVTTEQLGAKMTERGSVARPTQGPETPRSPEGTTEAATQDGKEQPELPCAMAMGTPSTTERISTSGQIRSVIRRSWESGHAHPMSREPSPRRRLDPATLSRTPSQEQLIAELQGRLGIQPEAEEPAEAAGPSAQDWLTEGVIITVQPRGKRAGGQLVEKVARRCPWLGLGQSQAPGVRVLPWPQCWPEGRSGERVGVSCLL

SEQ ID NO: 74027 - protein, 221 aa, Homo sapiens
MRPEGSLTYRVPERLRQGFCGVGRAAQALVELEPVNAQARKAFSRQREKMERRRKPHLDRRGAVIQSVPGFWANVIANHPQMSALITDEDEDMLSYMVSLEVEEEKHPVHLCKIMLFFRSNPYFQNKVITKEYLVNITEYRASHSTPIEWYPDYEVEAYRRRHHNSSLNFFNWFSDHNFAGSNKIAEILCKDLWRNPLQYYKRMKPPEEGTETSGEPLVGT

SEQ ID NO: 74028 - protein, 89 aa, Homo sapiens
MSYNGLHQRVFKELKLLTLCSISSPEKWKRNPEDLPVSMQQIYSNLKYNVSVLNTKSNRTWSQCVTNHTLVLTWLEPNTLYCVHVESFV

SEQ ID NO: 74029 - protein, 23 aa, Homo sapiens
MASCAEPSEPSAPLPAGVPPLED

SEQ ID NO: 74030 - protein, 260 aa, Homo sapiens
  MOD_RES (1)..(1): Any amino acid
XEGKYGHAACFGLQPGCLRQDGSRQIAIAAMVANFTKPTADAPSLLQHDEVETYFHEFGHVMHQLCSQAEFAMFSGTHVERDFVEAPSQMLENWVWEQEPLLRMSRHYRTGSAVPRELLEKLIESRQANTGLFNLRQIVLAKVDQALHTQTDADPAEEYARLCQEILGVPATPGGYDAQYYGYLWSEVYSMDMFHTRFKQEGVLNSKVGMDYRSCILRPGGSEDASAMLRRFLGRDPKQDAFLLSKGLQVGGCEPEPQVC

SEQ ID NO: 74031 - protein, 172 aa, Homo sapiens
MWVPVVFLTLAVCGGVLVHPQWVLTAAHCIRNKSVILLGRHSLFHPEDTGQVFQVSHSFPHPLYDMSLLKNRFLRPGDDSSHDLMLLRLSEPAELTDAVKVMDLPTQEPALGTTCYASGWGSIEPEEFLTPKKLQCVDLHVISNDVCAQVHPQKVTKFMLCAGRWTGGKSTC

SEQ ID NO: 74032 - protein, 436 aa, Homo sapiens
MEAFSRRRCEALKLMVQAWPFRRLPLRPLIKMPCLETFQAVLNGLDALLTHGVRPRRWKLQVLDLQDVCENFWMVWSEAMARGCFLNAKRNKKPVQDCPRMRGRQPLTVFVELWLKNRTLDEHLTCLLLWVKQRKDLLHLCCKKLKILGMPFRNIRSILKMVNLDCIQEVEVNCKWVLPILTQFTPYLGHMRNLQKLVLSHMDVSRYVSPEQKKEIVTQFTTQFLKLHCLQKLYMNSVSFLEGHLDQLLSCLKTSLKVLTITNCVLLESDLKHLSQCPSISQLKTLDLSGIRLTNYSLVPLQILLEKVAATLEYLDLDDCGIIDSQVNAILPALSRCFELNTFSFCGNPISMATLENLLSHTIILKNLCLELYPAPRESYGADGTLCWSRFTQIRAELMKRVRDLRHPKRILFGTDYCPDCGNRSFYDLEADQYCC

SEQ ID NO: 74033 - protein, 694 aa, Homo sapiens
MMQESATETISNSSMNQNGMSTLSSQLDAGSRDGRSSGDTSSEVSTVELLHLQQQQALQAARQLLLQQQTSGLKSPKSSDKQRPLQVPVSVAMMTPQVITPQQMQQILQQQVLSPQQLQALLQQQQAVMLQQQQQQQQQQQQQQQQQQQQQQQQQQQQQQQQQQQQQQQQQHPGKQAKEQQQQQQQQQLAAQQLVFQQQLLQMQQLQQQQHLLSLQRQGLISIPPGQAALPVQSLPQAGLSPAEIQQLWKEVTGVHSMEDNGIKHGGLDLTTNNSSSTTSSNTSKASPPITHHSIVNGQSSVLSARRDSSSHEETGASHTLYGHGVCKWPGCESICEDFGQFLKHLNNEHALDDRSTAQCRVQMQVVQQLEIQLSKERERLQAMMTHLHMRPSEPKPSPKPLNLVSSVTMSKNMLETSPQSLPQTPTTPTAPVTPITQGPSVITPASVPNVGAIRRRHSDKYNIPMSSEIAPNYEFYKNADVRPPFTYATLIRQAIMESSDRQLTLNEIYSWFTRTFAYFRRNAATWKNAVRHNLSLHKCFVRVENVKGAVWTVDEVEYQKRRSQKITGSPTLVKNIPTSLGYGAALNASLQAALAESSLPLLSNPGLINNASSGLLQAVHEDLNGSLDHIDSNGNSSPGCSPQPHIHSIHVKEEPVIAEDEDCPMSLVTTANHSPELEDDREIEEEPLSEDLE

SEQ ID NO: 74034 - protein, 117 aa, Homo sapiens
MAKIIKVEMKFYVFETVSLSSDSLFQRAVSLLHTSYLDSSSEHGFQYSQVTLVKNDIFLNEYKTFYQQKKASSYTQEELQDTYGFLLFDTEKQAKLVCQCGLRVGSSAVTTLGDPAK

SEQ ID NO: 74035 - protein, 73 aa, Homo sapiens
MDRLKSHLTVCFLPSVPFLILVSTLATAKSVTNSTLNGTNVVLGSVPVIIARTDHIIVKEGNSALINCSVYGI

SEQ ID NO: 74036 - protein, 84 aa, Homo sapiens
MEGPLLEGLYWDSWYNNQQLYNLKNSSRIYYENILLGVPRVRQLKVRNNTCKVYSSFQSLMSECYGKYTSANEDLSNFGLQINT

SEQ ID NO: 74037 - protein, 262 aa, Homo sapiens
MKCEHCTRKECSKKTKTDDQENVSADAPSPAQENGEKGEFHKLADAKIFLSDCLACDSCMTAEEGVQLSQQNAKDFFRVLNLNKKCDTSKHKVLVVSVCPQSLPYFAAKFNLSVTDASRRLCGFLKSLGWVRYAERVLGRPITAHLCTAKSPQQVMGSLVKDYFARQQNLSPEKIFHVIVAPCYDKKLEALQESLPPALHGSRGADCVLTSGEIAQIMEQGDLSVRDAAVDTLFGDLKEDKVTRHDGASSDGHLAHIFRHAA

SEQ ID NO: 74038 - protein, 229 aa, Homo sapiens
MSPFLFRDDMKDLTVFLNSLTPKFYVALTGTSSLISGLIFIFEWWYFHKHGTSFIEQVSVSHLQPLMGGTESSISEPGSPSRNRENETSRQNLSECKVWRNPLNLFRGAEYRRYTWVTGKEPLTYYDMNLSAQDHQTFFTCDTDFLRPSDTVMQKAWRERNPPARIKAAYQALELNNDCATAYVLLAEEEATTIVDAERLFKQALKAGETIYRQSQQCQHQSPQHEAQL

SEQ ID NO: 74039 - protein, 380 aa, Homo sapiens
  MOD_RES (1)..(1): Any amino acid
XSSSWRWADFTAHPRVLTVGDRTGVKMLDTQGPPGCGLLLFRLGAEASCQKGERVLLTQYLGHSSPKCLPPTLHLVCTQFSLYLVDERLPLVPMLKWNHGLPSPLLLARLLPPPRPSCVQPLLLGGQGGQLQLLHLAGLAAVVPPLPSAPTPGLVLFQLSAAGDVFYQQLRPQVDSSLRRDAGPPGDTQPDCHAPTASWTSQDTAGCSQWLKALLKVPLAPPVWTAPTFTHRQMLGSTELRREEEEGQRLGVLRKAMARGQLLLQRDLGSLPAAEPPPAPESGLEDKLSERLGEAWAGRGAAWWERQQGRTSEPGRQTRRPKRRTQLSSSFSLSGHVDPSEDTSSPHSPEWPPADALPLPPTTPPSQELTPDACAQGVPS

SEQ ID NO: 74040 - protein, 194 aa, Homo sapiens
MQETIRNLDCIRMIWEEQNTEDQYKNPRRNLSHIRVDSGHKPHEYQEYGEKPHTHKQRGKAFSYHHSFQSRGRPHTGKKRYECKECGKTFSSRRNLRRHMVVQGGNRPYKCKLCGKAFFWPSLLRMHERTHTGEKPYECKQCSKAFPFYSSYRRHERMHTGEKPYECKQCSKALPDSSSYIRHERTHTGEKPYT

SEQ ID NO: 74041 - protein, 65 aa, Homo sapiens
MKKNTSKTTMRINKQDALCTPHSHDPRDLQNMLDGGEYAPFVSPPMLESNFIQVNRRGESIYLHN

SEQ ID NO: 74042 - protein, 204 aa, Homo sapiens
MDSQPSCVVVTGFGPFRQHLVNSSWEAVKELSKLGLGNETVVQLRTLELPVDYREAKRRVTGIWEDHQPQLVVHVGMDTAAKAIILEQSGKNQGYRDADIRSFWPEGGVCLPGSPDVLESGVCMKAVCKRVAVEGVDVIFSRDAGRYVCDYTYYLSLHHGKGCAALIHVPPLSRGLPASLLGRALRVIIQEMLEEVGKPKHRAQ

SEQ ID NO: 74043 - protein, 78 aa, Homo sapiens
MSAEVRLRRLQQLVLDPGFLGLEPLLDLLLGVHQELGASELAQDKYVADFLQWAPNPGFSKVWFKNHLHLNLERSPSW

SEQ ID NO: 74044 - protein, 282 aa, Homo sapiens [sequence omitted]

SEQ ID NO: 74045 - protein, 48 aa, Homo sapiens
MVRTKADSVPGTYRKVVAARAPRKVLGSSTSATNSTSVSSRKGYKMFT

SEQ ID NO: 74046 - protein, 52 aa, Homo sapiens
MPKPINVRVTTMDAELEFAIQPNTTGKQLFDQCIGTTQTNKRTVGRKNTELA

SEQ ID NO: 74047 - protein, 14 aa, Homo sapiens
  MOD_RES (1)..(1): Any amino acid
XGYGGGGGGFGGGS

SEQ ID NO: 74048 - protein, 62 aa, Homo sapiens
MDYYRKYAAIFLVTLSVFLHVLHSAPDVQDCPECTLQENPFFSQPGAPILQCMGCCFSRAYP

SEQ ID NO: 74049 - protein, 210 aa, Homo sapiens
MGCCSSSDPRREDDLRAREKLKKTKIIFVVGGPGSGKGTQCEKIVQKYGYTHLSTGDLLRSEVSSGSARGKKLSEIMEKGQLVPLETVLDMLRDAMVAKVNTSKGFLIDGYPREVQQGEEFERRIGQPTLLLYVDAGPETMTQRLLKRGETSGRVDDNEETIKKRLETYYKATEPVIAFYEKRGIVRKVNAEGSVDSVFSQVCTHLDALK

SEQ ID NO: 74050 - protein, 187 aa, Homo sapiens
KETQERYRRLKRDAELIQAGHMDSRLDELCNDIATKKKLEEEEAEVKRKATDAAYQARQAVKTPPRRLPTVMVRSPIDSASPGGDYPLGDLTPTTMEEATSGVNESEMAVASGHLNSTGVLLEVGGVLPMIHGGEIQQTPNTVAASPAASVSQPDNCVPMEAVGDPHTVTVSMDSSEISMIINSIKE

SEQ ID NO: 74051 - protein, 63 aa, Homo sapiens
MAAHHRQNTAGRRKVQVSYVIRDEVEKYNRNGVNALQLDPALNRLFTAGRDSIIRIWSVNQHK

SEQ ID NO: 74052 - protein, 204 aa, Homo sapiens
  MOD_RES (1)..(1): Any amino acid
XKELQQMKDIEKLRLLMNSCSEDKYVTSAYQWMVPFLHRCEKQSPGVANELLKEYLVTLAKGDLKFPLKIFQHSKPDLQQKIIPDQDQLMAIALECIYTCERNDQLCLCYDLLECLPERGYGDKTEATTKLHDMVDQLEQILSVSELLEKHGLEKPISFVKNTQSSSEEARKLMVRLTRHTGRNLFTTSLSVDIWVILSFGFYK

SEQ ID NO: 74053 - protein, 181 aa, Homo sapiens
CRMVQEQCCHSQLEELHCATGISLANEQDRCATPHGDNASLEATFVKRCCHCCLLGRAAQAQGQSCEYSLMVGYQCGQVFQACCVKSQETGDLDVGGLQETGGGPCKQQCRDTGDEVVCSCFVGYQLLSDGVSCEDVNECITGSHSCRLGESCINTVGSFRCQRDSSCGTGYELTEDNSCK

SEQ ID NO: 74054 - protein, 174 aa, Homo sapiens
MAPKGSSKQQSEEDLLLQDFSRNLSAKSSALFFGNAFIVSAIPIWLYWRIWHMDLIQSAVLYSVMTLVSTYLVAFAYKNVKFVLKHKVAQKREDAVSKEVTRKLSEADNRKMSRKEKDERILWKKNEVADYEATTFSIFYNNTLFLVVVIVASFFILKNFNPTVYPFQGTTYCP

SEQ ID NO: 74055 - protein, 1344 aa, Homo sapiens
MKSSGPVERLLRALGRRDSSRAASRPRKAEPHSFREKVFRKKPPVCAVCKVTIDGTGVSCRVCKVATHRKCEAKVTSACQALPPVELRRNTAPVRRIEHLGSTKSLNHSKQRSTLPRSFSLDPLMERRWDLDLTYVTERILAAAFPARPDEQRHRGHLRELAHVLQSKHRDKYLLFNLSEKRHDLTRLNPKVQDFGWPELHAPPLDKLCSICKAMETWLSADPQHVVVLYCKGNKGKLGVIVSAYMHYSKISAGADQALATLTMRKFCEDKVATELQPSQRRYISYFSGLLSGSIRMNSSPLFLHYVLIPMLPAFEPGTGFQPFLKIYQSMQLVYTSGVYHIAGPGPQQLCISLEPALLLKGDVMVTCYHKGGRGTDRTLVFRVQFHTCTIHGPQLTFPKDQLDEAWTDERFPFQASVEFVFSSSPEKIKGSTPRNDPSVSVDYNTTEPAVRWDSYENFNQHHEDSVDGSLTHTRGPLDGSPYAQVQRPPRQTPPAPSPEPPPPPMLSVSSDSGHSSTLTTEPAAESPGRPPPTAAERQELDRLLGGCGVASGGRGAGRETAILDDEEQPTVGGGPHLGVYPGHRPGLSRHCSCRQGYREPCGVPNGGYYRPEGTLERRRLAYGGYEGSPQGYAEASMEKRRLCRSLSEGLYPYPPEMGKPATGDFGYRAPGYREVVILEDPGLPALYPCPACEEKLALPTAALYGLRLEREAGEGWASEAGKPLLHPVRPGHPLPLLLPACGHHHAPMPDYSCLKPPKAGEEGHEGCSYTMCPEGRKLSYEIPTEEGGDRYPLPGHLASAGPLASAESLEPVSWREGPSGHSTLPRSPRDAPCSASSELSGPSTPLHTSSPVQGKESTRRQDTRSPTSAPTQRLSPGEALPPVSQAGTGKAPELPSGSGPEPLAPSPVSPTFPPSSPSDWPQERSPGGHSDGASPRSPVPTTLPGLRHAPWQGPRGPPDSPDGSPLTPVPSQMPWLVASPEPPQSSPTPAFPLAASYDTNGLSQPPLPEKRHLPGPGQQPGPWGPEQASSPARGISHHVTFAPLLSDNVPQTPEPPTQESQSNVKFVQDTSKFWYKPHLSRDQAIALLKDKDPGAFLIRDSHSFQGAYGLALKVATPPPSAQPWKGDPVEQLVRHFLIETGPKGVKIKGCPSEPYFGSLSALVSQHSISPISLPCCLRIPSKDPLEETPEAPVPTNMSTAADLLRQGAACSVLYLTSVETESLTGPQAVARASSAALSCSPRPTPAVVHFKVSAQGITLTDNQRKLFFRRHYPVNSITFSSTDPQDRRWTNPDGTTSKIFGFVAKKPGSPWENVCHLFAELDPDQPAGAIVTFITKVLLGQRK

SEQ ID NO: 74056 - protein, 36 aa, Homo sapiens
MCVRAHQCPNDTKPHGPETGLYQTPKAVFLSWAWVI

SEQ ID NO: 74057 - protein, 140 aa, Homo sapiens
MSRVPAFLSAAEVEEHLRSSSLLIPPLETALANFSSGPEGGVMQPVRTVVPVTKHRGYLGVMPAYSAAEDALTTKLVTFYEDRGITSVVPSHQATVLLFEPSNGTLLAVMDGNVITAKRTAAVSAIATKFLKPPSSEVLC

SEQ ID NO: 74058 - protein, 233 aa, Homo sapiens
MKRCWSNSCCQKSAIFFTPVVKETSMQLNFGILPLGFYFLSAATTSMQSLVAFLPETAFKFKALKKVAQLAVINSLEKAFWNWVENYPDEFTKLYQIPQTDMAECAEKLFDLVDGFAESTKRKAAVWPLQIILLILCPEIIQDISKDVVDENNMNKVRRAKLFPLYLDVKQFILLKVCITLGLLFKQSISGNHLNDHFRFLCLMDLEETYSYIILFGRGKIIPGNEQRFKIIP

SEQ ID NO: 74059 - protein, 15 aa, Homo sapiens
MLYAATRATLKKEFG

SEQ ID NO: 74060 - protein, 270 aa, Homo sapiens
MIQQPHKAATFFGCIGIDKFGEILKRKAAEAHVDAHYYEQNEQPTGTCAACITGDNRSLIANLAAANCYKKEKHLDLEKNWMLVEKARVCYIAGFFLTVSPESVLKVAHHASENNRIFTLNLSAPFISQFYKESLMKVMPYVDILFGNETEAATFAREQGFETKDIKEIAKKTQALPKMNSKRQRIVIFTQGRDDTIMATESEVTAFAVLDQDQKEIIDTNGAGDAFVGGFLSQLVSDKPLTECIRAGHYAASIIIRRTGCTFPEKPDFH

SEQ ID NO: 74061 - protein, 94 aa, Homo sapiens
MMDEPWWEGRVASDVHCTLREKELKLPTFRAHSPLLKSRRFFVDILTLLSSHCQLCPAARHLAVYLLDHFMDRYNVTTSKQLYTVAVSCLLLAT

SEQ ID NO: 74062 - protein, 2171 aa, Homo sapiens
MGVLKVWLGLALALAEFAVLPHHSEGACVYQDSLLADATIWKPDSCQSCRCHGDIVICKPAVCRNPQCAFEKGEVLQIAANQCCPECVLRTPGSCHHEKKIHEHGTEWASSPCSVCSCNHGEVRCTPQPCPPLSCGHQELAFIPEGSCCPVCVGLGKPCSYEGHVFQDGEDWRLSRCAKCLCRNGVAQCFTAQCQPLFCNQDETVVRVPGKCCPQCSARSCSAAGQVYEHGEQWSENACTTCICDRGEVRCHKQACLPLRCGKGQSRARRHGQCCEECVSPAGSCSYDGVVRYQDEMWKGSACEFCMCDHGQVTCQTGECAKVECARDEELIHLDGKCCPECISRNGYCVYEETGEFMSSNASEVKRIPEGEKWEDGPCKVCECRGAQVTCYEPSCPPCPVGTLALEVKGQCCPDCTSVHCHPDCLTCSQSPDHCDLCQDPTKLLQNGWCVHSCGLGFYQAGSLCLACQPQCSTCTSGLECSSCQPPLLMRHGQCVPTCGDGFYQDRHSCAVCHESCAGCWGPTEKHCLACRDPLHVLRDGGCESSCGKGFYNRQGTCSACDQSCDSCGPSSPRCLTCTEKTVLHDGKCMSECPGGYYADATGRCKVCHNSCASCSGPTPSHCTACSPPKALRQGHCLPRCGEGFYSDHGVCKACHSSCLACMGPAPSHCTGCKKPEEGLQVEQLSDVGIPSGECLAQCRAHFYLESTGICEACHQSCFRCAGKSPHNCTDCGPSHVLLDGQCLSQCPDGYFHQEGSCTECHPTCRQCHGPLESDCISCYPHISLTNGNCRTSCREEQFLNLVGYCADCHHLCQHCAADLHNTGSICLRCQNAHYLLLGDHCVPDCPSGYYAERGACKKCHSSCRTCQGRGPFSCSSCDTNLVLSHTGTCSTTCFPGHYLDDNHVCQPCNTHCGSCDSQASCTSCRDPNKVLLFGECQYESCAPQYYLDFSTNTCKECDWSCSACSGPLKTDCLQCMDGYVLQDGACVEQCLSSFYQDSGLCKNCDSYCLQCQGPHECTRCKGPFLLLEAQCVQECGKGYFADHAKHKCTACPQGCLQCSHRDRCHLCDHGFFLKSGLCVYNCVPGFSVHTSNETCSGKIHTPSLHVNGSLILPIGSIKPLDFSLLNVQDQEGRVEDLLFHVVSTPTNGQLVLSRNGKEVQLDKAGRFSWKDVNEKKVRFVHSKEKLRKGYLFLKISDQQFFSEPQLINIQAFSTQAPYVLRNEVLHISRGERATITTQMLDIRDDDNPQDVVIEIIDPPLHGQLLQTLQSPATPIYQFQLDELSRGLLHYAHDGSDSTSDVAVLQANDGHSFHNILFQVKTVPQNDRGLQLVANSMVWVPEGGMLQITNRILQAEAPGASAEEIIYKITQDYPQFGEVVLLVNMPADSPADEGQHLPDGRTATPTSTFTQQDINEGIVWYRHSGAPAQSDSFRFEVSSASNAQTRLESHMFNIAILPQTPEAPKVSLEASLHMTAREDGLTVIQPHSLSFINSEKPSGKIVYNITLPLHPNQGIIEHRDHPHSPIRYFTQEDINQGKVMYRPPPAAPHLQELMAFSFAGLPESVKFHFTVSDGEHTSPEMVLTIHLLPSDQQLPVFQVTAPRLAVSPGGSTSVGLQVVVRDAETAPKELFFELRRPPQHGVLLKHTAEFRRPMATGDTFTYEDVEKNALQYIHDGSSTREDSMEISVTDGLTVTMLEVRVEVSLSEDRGPRLAAGSSLSITVASKSTAIITRSHLAYVDDSSPDPEIWIQLNYLPSYGTLLRISGSEVEELSEVSNFTMEDINNKKIRYSAVFETDGHLVTDSFYFSVSDMDHNHLDNQIFTIMITPAENPPPVIAFADLITVDEGGRAPLSFHHFFATDDDDNLQRDAIIKLSALPKYGCIENTGTGDRFGPETASDLEASFPIQDVLENYIYYFQSVHESIEPTHDIFSFYVSDGTSRSEIHSINITIERKNDEPPRMTLQPLRVQLSSGVVISNSSLSLQDLDTPDNELIFVLTKKPDHGHVLWRQTASEPLENGRVLVQGSTFTYQDILAGLVGYVPSVPGMVVDEFQFSLTDGLHVDTGRMKIYTELPASDTPHLAINQGLQLSAGSVARITEQHLKVTDIDSDDHQVMYIMKEDPGAGRLQMMKHGNLEQISIKGPIRSFTQADISQGQPVLFCLPGFRGLHLH

SEQ ID NO: 74063 - protein, 237 aa, Homo sapiens
  MOD_RES (1)..(1): Any amino acid
XAVQSQGFINYCQKKIDASQTEFEKNVWSFLKVNFEDDSRGKYLELLGYRKEDLGKKHIKEEKEESEFLPSSGGTFNISVSGDIDGLITQALLTGNFESAVDLCLHDNRMADAIILAIAGGQELLARTQKKYFAKSQSKITRLITAVVMKNWKEIVESCDLKNWREALAAVLTYAKPDEFSALCGNVEKLVACWTKAQDGSHPLSLQDLIEKVVILRKAVQLTQAMDTSTVGVLLAA

SEQ ID NO: 74064 - protein, 617 aa, Homo sapiens
MLLRKRYRHRPCRLQFLLLLLMLGCVLMMVAMLHPPHHTLHQTVTAQASKHSPEARYRLDFGESQDWVLEAEDEGEEYSPLEGLPPFISLREDQLLVAVALPQARRNQSQGRRGGSYRLIKQPRRQDKEAPKRDWGADEDGEVSEEEELTPFSLDPRGLQEALSARIPLQRALPEVRHPLCLQQHPQDSLPTASVILCFHDEAWSTLLRTVHSILDTVPRAFLKEIILVDDLSQQGQLKSALSEYVARLEGVKLLRSNKRLGAIRARMLGATRATGDVLVFMDAHCECHPGWLEPLLSRIAGDRSRVVSPVIDVIDWKTFQYYPSKDLQRGVLDWKLDFHWEPLPEHVRKALQSPISPIRSPVVPGEVVAMDRHYFQNTGAYDSLMSLRGGENLELSFKAWLCGGSVEILPCSRVGHIYQNQDSHSPLDQEATLRNRVRIAETWLGSFKETFYKHSPEAFSLSKAEKPDCMERLQLQRRLGCRTFHWFLANVYPELYPSEPRPSFSGKLHNTGLGLCADCQAEGDILGCPMVLAPCSDSRQQQYLQHTSRKEIHFGSPQHLCFAVRQEQVILQNCTEEGLAIHQQHWDFQEDENRANSAAAEAYQRPLTFQQIVNNG

SEQ ID NO: 74065 - protein, 160 aa, Homo sapiens
  MOD_RES (1)..(1): Any amino acid
XFSRKRVSRNLFQNSRDFNPDCLPLCAAGTTGTHQTNLSGKCAQLGFSQICGKTGSVGSDLQFLGTTSSHQEKGENSQEKPPVQLTPALVRSPSSRRGLNGTKPVPPIPRGISLLPDKADLSTVGHKKKEPDDIWKCEKDSLPIDLSELNFKDKDLDQEE

SEQ ID NO: 74066 - protein, 63 aa, Homo sapiens
  MOD_RES (1)..(1): Any amino acid
XARTTEGFGPEREGIITIESQDGGPFPQLGSRAGLFQHPLQSEYSSITTTHTSATEPFLVGEH

SEQ ID NO: 74067 - protein, 170 aa, Homo sapiens
MGFVKVVKNKAYFKRYQVKFRRRREGKTDYYARKRLVIQDKNKYNTPKYRMIVRVTNRDIICQIAYARIEGDMIVCAAYAHELPKYGVKVGLTNYAAAYCTGLLLARRMEEMYKKAHAAIRENPVYEKKPKKEVKKKRWNRPKMSLAQKKDRVAQKKASFLRAQERAAES

SEQ ID NO: 74068 - protein, 129 aa, Homo sapiens
  MOD_RES (1)..(1): Any amino acid
XKQQQMHIVDMLSKEIQELQSKPDRSAEESDRLRKLMLEWQFQKRLQESKQKDEDDEEEEDDDVDTMLIMQRLEAERRARLQDEERRRQQQLEEMRKREAEDRARQEEERRRQEEERTKRDAEEKVMVL

SEQ ID NO: 74069 - protein, 97 aa, Homo sapiens
MVRKKNSLKDCVAVAGPLGVTHFLILSKTETNVYFKLMRLPGGPTLTFQVKKYSLVRDVVSSLRRHRMHEQQFAHPPLLVLNSFGPHGMHVKLMATM

SEQ ID NO: 74070 - protein, 64 aa, Homo sapiens
MPRKIEEIKDFLLTARRKDAKSVKIKKNKDNVKFKVRCSRYLYTLVITDKEKAEKLKQSLPPGE

SEQ ID NO: 74071 - protein, 1731 aa, Homo sapiens
MNVQPCSRCGYGVYPAEKISCIDQIWHKACFHCEVCKMMLSVNNFVSHQKKPYCHAHNPKNNTFTSVYHTPLNLNVRTFPEAISGIHDQEDGEQCKSVFHWDMKSKDKEGAPNRQPLANERAYWTGYGEGNAWCPGALPDPEIVRMVEARKSLGEEYTEDYEQPRGKGSFPAMITPAYQRAKKANQLASQVEYKRGHDERISRFSTVVDTPELLRSKAGAQLQSDVRYTEDYEQQRGKGSFPAMITPAYQIAKRANELASDVRYHQQYQKEMRGMAGPAIGAEGILTRECADQYGQGYPEEYEEHRGKGSFPAMITPAYQNAKKAHELASDIKYRQDFNKMKGAAHYHSLPAQDNLVLKQAQSVNKLVSEVEYKKDLESSRGHSINYCETPQFRNVSKISKFTSDNKYKENYQNHMRGRYEGVGMDRRTLHAMKVGSLASNVAYKADYKHDIVDYNYPATLTPSYQTAMKLVPLKDANYRQSIDKLKYSSVTDTPQIVQAKINAQQLSHVNYRADYEKNKLNYTLPQDVPQLVKAKTNAKLFSEVKYKEGWEKTKGKGFEMKLDAMSLLAAKASGELASNIKYKEEYEKTKGKAMGTADSRLLHSLQIAKMSSEVEYKKGFEESKTRFHLPMDMVNIRHAKKAQTLASDLDYRKKLHEYTVLPEDMKTQWAKKAYGLQSELQYKADLAWMKGVGWLTEGSLNLEQAKKAGQLVSEKNYRQRVDELKFTSVTDSSQMEHAKKSQELQSGVAYKAGNEQSVHQYTISKDEPLFLQARANAANLSEKLYKSSWENQKAKGFELRLDSLTFLAAKAKRDLASEVKYKEDYERSRGKLIGAKDVQGDSQMSHSLQMSKLQSELEYKKGFEDTKSQCHVSLDMVHLVHARKAQHLATDVGYKTAEHHFTALPTDMKVEWAKKAYGLQSDNQYRADVKWMKGMGWVATGSLNVEQAKKAGELISEKKYRQHPDALKFTSIKDTPEMVQARISYTQAVDRLYREQGENIKHHYTPTADLPEVLLAKLNAMNISETRYKESWSKLRDGGYKLRLDALPFQAAKASGEIISDYKYKEAFEKMKGQMLGSRSLEDDISLAHSVYATSLQSDVNYKKGFEHSKAQFHLPLDMAALVHAKKAQTLASNQDYKHPLPQYTSLAEDLRLSCAKKAHKLQSENLYRSDLNFMRGVACVIPGTLEIEGRKKASELISESKYRQHPHSFKYTAVTDTPNLLHAKFSNQITNERLYKAAGEDARHEYTMTLGLPEFIRAKTNAANLSDARYKESWRNLRAQGYKLTIEALPFQAARASGDIASDFLYRHDFVKERGKLIGPQSVRDDPRIQHCRRMGQLQSELQYRRGATSSQAQFHLPMDMVHLVHAKNAQALASDHDYRTQYHKFTALPEDLKMAWAKKAHALQSELRYKSDLIGMKGIGWLALRSPQMESAKKAGELISETKYRKKPDSIKFTTVVDSPDLVHAKNSYMHCNERMYRSGDAESLHRYTLIPDHPDFTRARLNALHLSDKVYRNSWEQTRAGSYDFRLDAIPFQTARASREIASDFRYKEAFLRDRGLQIGYRSVDDDPRMKHFLNVGRLQSDNEYKKDFAKSRSQFHSSTDQPGLLQAKRSQQLASDVHYRQPLPQPTCDPEQLGLRHAQKAHQLQSDVKYKSDLNLTRGVGWTPPGSYKVEMARRAAELANARGLGLQGAYQRGAEAVEAGDHQSGEVNPDATEILHVKKKKALLL

SEQ ID NO: 74072 - protein, 203 aa, Homo sapiens
MLILTKTAGVFFKPSKRKVYEFLRSFNFHPGTLFLHKIVLGIETSCDDTAAAVVDETGNVLGEAIHSQTEVHLKTGGIVPPAAQQLHRENIQRIVQEALSASGVSPSDLSAIATTIKPGLALSLGVGLSFSLQLVGQLKKPFIPIHHMEAHALTIRLTNKVEFPFLVLLISGGHCLLALVQGVSDFLLLGKSLDIAPGDMLDK

SEQ ID NO: 74073 - protein, 96 aa, Homo sapiens
MEMQQNCSISCFWETQPLGCVKISCIFYHSKPRNINGLFLPPSSNITLQKEIQEGIPLQSQSQEPLKPQENISRPIHHPLVLKTNFEEEEEVDEQN

SEQ ID NO: 74074 - protein, 183 aa, Homo sapiens
MAGLEVLFASAAPAITCRQDALVCFLHWEVVTHGYFGLGVGDQPGPNDKKSELLPAGWNNNKDLYVLRYEYKDGSRKLLVKAITVESSMILNVLEYGSQQVADLTLNLDDYIDAEHLGDFHRTYKNSEELRSRIVSGIITPIHEQWEKANVSSPHREFPPATAREVDPLRIPPHHPHTSRQPP

SEQ ID NO: 74075 - protein, 38 aa, Homo sapiens
MPAPPPPLNCPPGLEYLSQIDMILIHQQIELLEVIDSG

SEQ ID NO: 74076 - protein, 135 aa, Homo sapiens
MSVLTSPRGKVEVVHCRRTESQDVYCIKSLIRKFTCKLFGKLNIIYLLEKANLAVTLCNDKEEIMAQATFLDYPNWNVAKQDDWVSVFRELDSDIPCTPLNTLFMHLFVAVDEYSVGCCKEILRTVYKAVPELHF

SEQ ID NO: 74077 - protein, 753 aa, Homo sapiens
MPMDLILVVWFCVCTARTVVGFGMDPDLQMDIVTELDLVNTTLGVAQVSGMHNASKAFLFQDIEREIHAAPHVSEKLIQLFRNKSEFTILATVQQKPSTSGVILSIRELEHRIYERVIDPPDTNLPPGINLWLGQRNQKHGLFKGIIQDGKIIFMPNGYITQCPNLNHTCPTCSDFLSLVQGIMDLQELLAKMTAKLNYAETRLSQLENCHCEKTCQVSGLLYRDQDSWVDGDHCRNCTCKSGAVECRRMSCPPLNCSPDSLPVHIAGQCCKVCRPKCIYGGKVLAEGQRILTKSCRECRGGVLVKITEMCPPLNCSEKDHILPENQCCRVCRGHNFCAEGPKCGENSECKNWNTKATCECKSGYISVQGDSAYCEDIDECAAKMHYCHANTVCVNLPGLYRCDCVPGYIRVDDFSCTEHDECGSGQHNCDENAICTNTVQGHSCTCKPGYVGNGTICRAFCEEGCRYGGTCVAPNKCVCPSGFTGSHCEKDIDECSEGIIECHNHSRCVNLPGWYHCECRSGFHDDGTYSLSGESCIDIDECALRTHTCWNDSACINLAGGFDCLCPSGPSCSGDCPHEGGLKHNGQVWTLKEDRCSVCSCKDGKIFCRRTACDCQNPSADLFCCPECDTRVTSQCLDQNGHKLYRSGDNWTHSCQQCRCLEGEVDCWPLTCPNLSCEYTAILEGECCPRCVSDPCLADNITYDIRKTCLDSYGVSRLSGSVWTMAGSPCTTCKCKNGRVCCSVDFECLQNN

SEQ ID NO: 74078 - protein, 81 aa, Homo sapiens
MGDPFMLQQSTNPAPGILGPPPPSFHLGGPAVGPRGNLGAGNGNLQGPRHMQKGRVETSRVVHIMDFQRGKNLRYQLLQLV

SEQ ID NO: 74079 - protein, 73 aa, Homo sapiens
MSKKISGGSVVEMQGDEMTRIIWELIKEKLIFPYVELDLHSYDLGIENRDATNDQVTKDAAEAIKKHNVGVKC

SEQ ID NO: 74080 - protein, 144 aa, Homo sapiens
MTTLVLDNGAYNAKIGYSHENVSVIPNCQFRSKTARLKTFTANQIDEIKDPSGLFYILPFQKGYLVNWDVQRQVWDYLFGKEMYQVDFLDTNIIITEPYFNFTSIQESMNEILFEEYQFQAVLRVNGSCSVAQARVWWHKHGSL

SEQ ID NO: 74081 - protein, 303 aa, Homo sapiens
  MOD_RES (1)..(1): Any amino acid
XTPEVEKISARPTTVTPETVPRSTKPTTSSALDVSETTLASSEKPWIVPTAKISEDSKVLQPQTATYDVFSSPTTSDEPEISDSYTATSDRILDSIPPKTSRTLEQPRATLAPSETPFVPQKLEIFTSPEMQPTTPAPQQTTSIPSTPKRRPRPKPPRTKPERTTSAGTITPKISKSPEPTWTTPAPGKTQFISLKPKIPLSPEVTHTKPAPEPQTLLPSQSTIGPETPGTKPSTTLAPRKTKRPGRRPRPRPRPKTTPSPEVPKSKPALEPATIQPEPLVPTTASKPSERPKTTHRPDAPQI

SEQ ID NO: 74082 - protein, 86 aa, Homo sapiens
MLVHFERWSHRYDEWIYWDSNRLRPLERPALRKEGLKDEEDFFDFKAGEEVLARWTDCRYYPAKIEAINKEGTFTVQFYDGVIRCL

SEQ ID NO: 74083 - protein, 152 aa, Homo sapiens
  MOD_RES (1)..(1): Any amino acid
XADRRLLRRCRLRLVEELQVDQLWDALLSRELFRPHMIEDIQRAGSGSRRDQARQLIIDLETRGSQALPLFISCLEDTGQDMLASFLRTNRQAAKLSKPTLENLTPVVLRPEIRKPEVLRPETPRPVDIGSGGFGDVGALESLRGNADLTVL

SEQ ID NO: 74084 - protein, 178 aa, Homo sapiens
MEEEAEKLKELQNEVEKQMNMSPPPGNAGPVIMSIEEKMEADARSIYVGNVDYGATAEELEAHFHGCGSVNRVTILCDKFSGHPKGFAYIEFSDKESVRTSLALDESLFRGRQIKVIPKRTNRPGISTTDRGFPRARYRARTTNYNSSRSRFYSGFNSRPRGRVYRGRARATSWYSPY

SEQ ID NO: 74085 - protein, 128 aa, Homo sapiens
MENLKSGVYPLKEASGCPGADRNLLVYSFYEKGPLTFRDVAIEFSLEEWQCLDTAQQDLYRKVMLENYRNLVFLAGIAVSKPDLITCLEQGKEPWNMKRHAMVDQPPESVFLRLDLGLLVSRDLTALA

SEQ ID NO: 74086 - protein, 93 aa, Homo sapiens
MVALPMVLVLLLVLSRGESELDAKIPSTGDATEWRNPHLSMLGSCQPAPSCQKCILSHPSCAWCKQLNFTASGEAEARRCARREELLARGCPL

SEQ ID NO: 74087 - protein, 778 aa, Homo sapiens
MSAVDQKFQGSVSFKDVTVGFTQEEWQHLDPSQRALYRDVMLENYSNLVSVGYCAHKPEVIFRLEQGEEPWRLEEEFPSQSFPEVWTADHLKERSQENQSKHLWEVVFINNEMLTKEQGNVIGIPFNMDVSSFPSRKMFCQYDSRGMSFNTVSELVISKINYLGKKSDEFNACGKLLLNIKHDETHTREKNEVLKNRNTLSHRENTLQHEKIQTLDHNFEYSICQETLLEKAVFNTRKRENAEENNCDYNEFGRTFCDSSSLLFHQIPPSKDSHYEFSDCEKFLCVKSTLSKHDGVPVKHYDCGESGNNFRRKLCLSQLQKGDKGEKHFECNECGKAFWEKSHLTRHQRVHTGEKHFQCNQCGKTFWEKSNLTKHQRSHTGEKPFECNECGKAFSHKSALTLHQRTHTGEKPYQCNACGKTFYQKSDLTKHQRTHTGQKPYECYECGKSFCMNSHLTVHQRTHTGEKPFECLECGKSFCQKSHLTQHQRTHIGDKPYECNACGKTFYHKSVLTRHQIIHTGLKPYECYECGKTFCLKSDLTIHQRTHTGEKPFACPECGKFFSHKSTLSQHYRTHTGEKPYECHECGKIFYNKSYLTKHNRTHTGEKPYECNECGKTFCQKSQLTQHQRIHIGEKPYECNECGKAFCHKSALIVHQRTHTQEKPYKCNECGKSFCVKSGLILHERKHTGEKPYECNECGKSFSHKSSLTVHHRAHTGEKSCQCNECGKIFYRKSDLAKHQRSHTGEKPYECNTCRKTFSQKSNLIVHQRTHIGEKPYE

SEQ ID NO: 74088 - protein, 253 aa, Homo sapiens
MCPKNASYYGNRAATLMMLGRFREALGDAQQSVRLDDSFVRGHLREGKCHLSLGNAMAACRSFQRALELDHKNAQAQQEFKNANAVMEYEKIAETDFEKRDFRKVVFCMDRALEFAPACHRFKILKAECLAMLGRYPEAQSVASDILRMDSTNADALYVRGLCLYYEDCIEKAVQFFVQALRMAPDHEKACIACRNAKALKAKKEDGNKAFKEGNYKLAYELYTEALGIDPNNIKTNAKLYCNRGTVNSKETR

SEQ ID NO: 74089 - protein, 95 aa, Homo sapiens
MSDGDYDYLIKFLALGDSGVGKTSVLYQYTDGKFNSKFITTVGIDFREKRVVYRASGPDGATGRGQRIHLQLWDTAGQERFRSLTTAFFRDAMGF

SEQ ID NO: 74090 - protein, 46 aa, Homo sapiens
MAEVQVLVLDGRGHLLGRLAAIVAKQVLLGKSLLVAPLSWAPAGGQ

SEQ ID NO: 74091 - protein, 141 aa, Homo sapiens
MGAPLLSPGWGAGAAGRRWWMLLAPLLPALLLVRPAGALVEGLYCGTRDCYEVLGVSRSAGKAEIARAYRQLARRYHPDRYRPQPGDEGPGRTPQSAEEAFLLVATAYETLKILVMFQSSCICPRGLGVEWTPAEAPQLFL

SEQ ID NO: 74092 - protein, 180 aa, Homo sapiens
NPIYEHIGYATLLREKVSRRLSRSKNEPRKTNVTHEEHTAVEKVHTFRGPHWCEYCANFMWGLIAQGVRCSDCGLNVHKQCSKHVPNDCQPDLKRIKKVYCCDLTTLVKAHNTQRPMVVDICIREIEARGLKSEGLYRVSGFTEHIEDVKMAFDRDGEKADISANVYPDINIITGALKLY

SEQ ID NO: 74093 - protein, 187 aa, Homo sapiens
  MOD_RES (1)..(1): Any amino acid
XAVKIRELSDYLLQDYPVTVASNLQDEELCGGLWRLVLAQRWMERLKTVAGSKMQGLLERVNTEIHFVTKCAFQETSEQLVALKPWITRQNFSRCLELQCQPGAPRPQSPGPAACGALTWPRPHPGEDTEAHRGESPARGCIAWTQRKLARGRSLPWAPLIPSPEWRQRQNPAPAPFTQLCTKPLSP

SEQ ID NO: 74094 - protein, 91 aa, Homo sapiens
FPYFANAPTGWKNSVRHNLSLNKCFKKVDKERSQSIGKGSLWCIDPEYRQNLIQALKKTPYHPHPHVFNTPPTCPQAYQRDGVSPSWPGWS

SEQ ID NO: 74095 - protein, 729 aa, Homo sapiens
  MOD_RES (1)..(1): Any amino acid
XYLTMDETRKLLLLLESDPKVYSLPLVGIWLSGITHIYSPQVWACCLRYIFNSSVQERVFSESGNFIIVLYSMTHKEPEFYECFPCDGKIPDFRFQLLTSKETLHLFKNVEPPDKNPIRCELSAESQNAETEFFSKASKNFSIKRSSQKLSSGKMPIHDHDSGVEDEDFSPRPIPSPHPVSQKISKIQPSVPELSLVLDGNFIESNPLPTPLEMVNNENPPLINHLEHLKPLQPQLYDEKHSPEVEAGEPSLRGIPNQLNQDKPALLRHCKVRQPPAYKKGNPHTRNSIKPSSHNGPSHDIFEKLQTVSAGNVQNEEYPIRPSTLNSRQSSLAPQSQPHDFVFSPHNSGRPMELQIPTPPLPSYCSTNVCRCCQHHSHIQYSPLNSWQGANTVGSIQDVQSEALQKHSLFHPSGCPALYCNAFCSSSSPIALRPQGDMGSCSPHSNIEPSPVARPPSHMDLCNPQPCTVCMHTPKTESDNGMMGLSPDAYRFLTEQDRQLRLLQAQIQRLLEAQSLMPCSPKTTAVEDTVQAGRQMELVSVEAQSSPGLHMRKGVSIAVSTGASLFWNAAGEDQEPDSQMKQDDTKISSEDMNFSVDINNEVTSLPGSASSLKAVDIPSFEESNIAVEEEFNQPLSVSNSSLVVRKEPDVPVFFPSGQLAESVSMCLQTGPTGGASNNSETSEEPKIEHVMQPLLHQPSDNQKIYQDLLCVGMHQPRSSDLWIKLHVIC

SEQ ID NO: 74096 - protein, 143 aa, Homo sapiens
MAFEVRASYSDGKLKAPPKPCAGNQGTQITVEDLFYNIATRRKALKNPSEEYGKILEVVGRYSVHNAGISFSVKKQGETVADVRTLPNASTVDNIRSIFGNAVSRELIEIGCEDKTLAFKMNGYISNANYSVKKCIFLLFINL

SEQ ID NO: 74097 - protein, 164 aa, Homo sapiens
MARRLLGADSATVFNIQEPEEETANQEYKVSSCEQRLISEIEYRLERSPVDESGDEVQYGDVPVENGMAPFFEMKLKHYKIFEGMPVTFTCRVAGNPKPKIYWFKDGKQISPKSDHYTIQRDLDGTCSLHTTASTLDDDGNYTIMAANPQGRISCTGRLMVQAV

SEQ ID NO: 74098 - protein, 53 aa, Homo sapiens
NNNLERALDWIFSHPEFEEDSDFVIEMENNANANIISEAKPEGPRVKDGSGNG

SEQ ID NO: 74099 - protein, 93 aa, Homo sapiens
MAGNCGARGALSAHTLLFDLPPALLGELCAVLDSCDGALGWRGLVSKNKLCENGVLILQGFWHVVVCKYKDSKYGCVALFEKTPSETYLHMET

SEQ ID NO: 74100 - protein, 261 aa, Homo sapiens
MVSPQLAKYPEIKSLMKPDPNLIWIIIMMVLTQLGAFYIVKDLDWKWVIFGAYAFGSCINHSMTLAIHEIAHNAAFGNCKAMWNRWFGMFANLPIGIPYSISFKRYHMDHHRYLGADGVDVDIPTDFEGWFFCTAFRKFIWVILQPLFYAFRPLFINPKPITYLEVINTVAQVTFDILIYYFLGIKSLVYMLAASLLGLGLHPISGHFIAEHYMFLKGHETYSYYGPLNLLTFNVGYHNEHHDFPNIPGKSLPLVRKIAAE

SEQ ID NO: 74101 - protein, 570 aa, Homo sapiens
MEKYENLGLVGEGSYGMVMKCRNKDTGRIVAIKKFLESDDDKMVKKIAMREIKLLKQLRHENLVNLLEVCKKKKRWYLVFEFVDHTILDDLELFPNGLDYQVVQKYLFQIINGIGFCHSHNIIHRDIKPENILVSQSGVVKLCDFGFARTLAAPGEVYTDYVATRWYRAPELLVGDVKYGKAVDVWAIGCLVTEMFMGEPLFPGDSDIDQLYHIMMCLGNLIPRHQELFNKNPVFAGVRLPEIKEREPLERRYPKLSEVVIDLAKKCLHIDPDKRPFCAELLHHDFFQMDGFAERFSQELQLKVQKDARNVSLSKKSQNRKKEKEKDDSLVEERKTLVVQDTNADPKIKDYKLFKIKGSKIDGEKAEKGNRASNASCLHDSRTSHNKIVPSTSLKDCSNVSVDHTRNPSVAIPPLTHNLSAVAPSINSGMGTETIPIQGYRVDEKTKKCSIPFVKPNRHSPSGIYNINVTTLVSSEKNLFWASKKRREYSRTDVRLPELNYNHLPELRALGGIARNSRLTKKESKILSESRIPSLAAIDLHTPSITLHQVSGPPLSDDSGADLPQMEHQH

SEQ ID NO: 74102 - protein, 423 aa, Homo sapiens [sequence omitted]

SEQ ID NO: 74103 - protein, 135 aa, Homo sapiens
WIASIFAFATCGGFKGQTEIQVNCPPAVTENKTVTATFGYPFRLNEASFQPPPGVNICDVNWKDYVLIGDYSSSAQFYVTFAVFVFLYCIAALLLYVGYTSLYLDSRKLPMINGNGLCCYTCCHFFVVGEHFSLG

SEQ ID NO: 74104 - protein, 96 aa, Homo sapiens
  MOD_RES (1)..(1): Any amino acid
XQEADKMFFLIELKILSTKKLKNMKSSIEARSFWDLSTTRHLRSSCISTSSSWWSPPLACSRKPWKLSSKLSLTWPKNILANFSTLTKLFRARLKT

SEQ ID NO: 74105 - protein, 141 aa, Homo sapiens; identical to SEQ ID NO: 73871
  MOD_RES (1)..(1): Any amino acid

SEQ ID NO: 74106 - protein, 115 aa, Homo sapiens
LKNYPGSCGLSRKRDWTGSYQIGRGRCKALTGYEPGEKDELNFYQGESIEIIGFVIPGLQWFIGKSTSSGQVGFVPTRNIDPDSYSPINVGVQITINKEDHSLSSWRGMENYRDL

SEQ ID NO: 74107 - protein, 829 aa, Homo sapiens
EEEEEEEEEEEEEEAAPDVIFQEDTSHTSAQKAPELRGPESPSPKPEYSVIVEVRSDDDKDEDTHSRKSTVTDESEMQDMMTRGNLGLLEQAIALKAEQVRTVCEPGCPPAEQSQLGLGEPGKAAKPLDTVRKSYYSKDPSRAEKREIKCPTPGCDGTGHVTGLYPHHRSLSGCPHKDRIPPEILAMHENVLKCPTPGCTGQGHVNSNRNTHRSLSGCPIAAAEKLAKSHEKQQPQTGDPSKSSSNSDRILRPMCFVKQLEVPPYGSYRPNVAPATPRANLAKELEKFSKVTFDYASFDAQVFGKRMLAPKIQTSETSPKAFQCFDYSQDAEAAHMAATAILNLSTRCWEMPENLSTKPQDLPSKSVDIEVDENGTLDLSMHKHRKRENAFPSSSSCSSSPGVKSPDASQRHSSTSAPSSSMTSPQSSQASRQDEWDRPLDYTKPSRLREEEPEESEPAAHSFASSEADDQEVSEENFEERKYPGEVTLTNFKLKFLSKDIKKELLTCPTPGCDGSGHITGNYASHRSLSGCPLADKSLRNLMAAHSADLKCPTPGCDGSGHITGNYASHRSLSGCPRAKKSGVKVAPTKDDKEDPELMKCPVPGCVGLGHISGKYASHRSASGCPLAARRQKEGSLNGSSFSWKSLKNEGPTCPTPGCDGSGHANGSFLTHRSLSGCPRATFAGKKGKLSGDEVLSPKFKTSDVLENDEEIKQLNQEIRDLNESNSEMEAAMVQLQSQISSMEKNLKNIEEENKLIEEQNEALFLELSGLSQALIQSLANIRLPHMEPICEQNFDAYVSTLTDMYSNQDPENKDLLESIKQAVRGIQV

SEQ ID NO: 74108 - protein, 1149 aa, Homo sapiens
  MOD_RES (1)..(1): Any amino acid
XMTTPSLKTDGGRRTATSPPPTTSQTIISTIPSTAMHTRSTAAPIPILPERGVSLFPYGADAGDLEFVRRTVDFTSPLFKPATGFPLGSSLRDSLYFTDNGQIIFPESDYQIFSYPNPLPTGFTGRDPVALVAPFWDDADFSTGRGTTFYQEYETFYGEHSLLVQQAESWIRKITNNGGYKARWALKVTWVNAHAYPAQWTLGSNTYQAILSTDGSRSYALFLYQSGGMQWDVAQRSGKPVLMGFSSGDGYFENSPLMSQPVWERYRPDRFLNSNSGLQGLQFYRLHREERPNYRLECLQWLKSQPRWPSWGWNQVSCPCSWQQGRRDLRFQPVSIGRWGLGSRQLCSFTSWRGGVCCSYGPWGEFREGWHVQRPWQLAQELEPQSWCCRWNDKPYLCALYQQRRPHVGCATYRPPQPAWMFGDPHITTLDGVSYTFNGLGDFLLVGAQDGNSSFLLQGRTAQTGSAQATNFIAFAAQYRSSSLGPVTVQWLLEPHDAIRVLLDNQTVTFQPDHEDGGGQETFNATGVLLSRNGSEVSASFDGWATVSVIALSNILHSSASLPPEYQNRTEGLLGVWNNNPEDDFRMPNGSTIPPGSPEEMLFHFGMTWQINGTGLLGKRNDQLPSNFTPVFYSQLQKNSSWAEHLISNCDGDSSCIYDTLALRNASIGLHTREVSKNYEQANATLNQYPPSINGGRVIEAYKGQTTLIQYTSNAEDANFTLRDSCTDLELFENGTLLWTPKSLEPFTLEILARSAKIGLASALQPRTVVCHCNAESQCLYNQTSRVGNSSLEVAGCKCDGGTFGRYCEGSEDACEEPCFPSVHCVPGKGCEACPPNLTGDGRHCAALGSSFLCQNQSCPVNYCYNQGHCYISQTLGCQPMCTCPPAFTDSRCFLAGNNFSPTVNLELPLRVIQLLLSEEENASMAEVNASVAYRLGTLDMRAFLRNSQVERIDSAAPASGSPIQHWMVISEFQYRPRGPVIDFLNNQLLAAVVEAFLYHVPRRSEEPRNDVVFQPISGEDVRDVTALNVSTLKAYFRCDGYKGYDLVYSPQSGFTCVSPCSRGYCDHGGQCQHLPSGPRCSCVSFSIYTAWGEHCEHLSMKLDAFFGIFFGALGGLLLLGVGTFVVLRFWGCSGARFSYFLNSAEALP

SEQ ID NO: 74109 - protein, 41 aa, Homo sapiens
MAAGGSGCTSSAGGGGRGVNPRRTGRCGLKVFLKGCLDLHY

SEQ ID NO: 74110 - protein, 6450 aa, Homo sapiens
MKGARWRRVPWVSLSCLCLCLLPHVVPGTTEDTLITGSKTPAPVTSTGSTTATLEGQSTAASSRTSNQDISASSQNHQTKSTETTSKAQTDTLTQMMTSTLFSSPSVHNVMETVTQETAPPDEMTTSFPSSVTNTLMMTSKTITMTTSTDSTLGNTEETSTAGTESSTPVTSAVSITAGQEGQSRTTSWRTSIQDTSASSQNHWTRSTQTTRESQTSTLTHRTTSTPSFSPSVHNVTGTVSQKTSPSGETATSSLCSVTNTSMMTSEKITVTTSTGSTLGNPGETSSVPVTGSLMPVTSAALVTVDPEGQSPVTFSRTSTQDTTAFSKNHQTQSVETTRVSQINTLNTLTPVTTSTVLSSPSGFNPSGTVSQETFPSGETTISSPSSVSNTFLVTSKVFRMPISRDSTLGNTEETSLSVSGTISAITSKVSTIWWSDTLSTALSPSSLPPKISTAFHTQQSEGAETTGRPHERSSFSPGVSQEIFTLHETTTWPSSFSSKGHTTWSQTELPSTSTGAATRLVTGNPSTGAAGTIPRVPSKVSAIGEPGEPTTYSSHSTTLPKTTGAGAQTQWTQETGTTGEALLSSPSYSVTQMIKTATSPSSSPMLDRHTSQQITTAPSTNHSTIHSTSTSPQESPAVSQRGHTQAPQTTQESQTTRSVSPMTDTKTVTTPGSSFTASGHSPSEIVPQDAPTISAATTFAPAPTGDGHTTQAPTTALQAAPSSHDATLGPSGGTSLSKTGALTLANSVVSTPGGPEGQWTSASASTSPDTAAAMTHTHQAESTEASGQTQTSEPASSGSRTTSAGTATPSSSGASGTTPSGSEGISTSGETTRFSSNPSRDSHTTQSTTELLSASASHGAIPVSTGMASSIVPGTFHPTLSEASTAGRPTGQSSPTSPSASPQETAAISRMAQTQRTRTSRGSDTISLASQATDTFSTVPPTPPSITSSGLTSPQTQTHTLSPSGSGKTFTTALISNATPLPVTYASSASTGHTTPLHVTDASSVSTGHATPLPVTDTSSESTGHATPLPVTSPSSVSTGHTTPLPVTDTSSESTGHVTPLPVTSLSSASTGDSTPLPVTDTSSASTGHVTPLPVTSLSSASTGDTTPLPVTDTSSASTGHATSLPVTDTSSVSTGHTTPLPVTDTSSASTGHATSLPVTDTSSVSTAHATPLPVTGLSSASTDDTTRLPVTDVSSASTGQAIPLPVTSPSSASTGDTTPLPVTDASSASTGDTTSLPVTIPSSASSGHTTSLPVTDASSVSTGHATSLLVTDASSVSTGDTTPLPVTDTNSASTGDTTPLHVTDASSVSTGHATSLPVTSLSSASTGDTTPLPVTSPSSASSGHTTPLPVTDASSVPTGHATSLPVTDASSVSTGHATPLPVTDASSVSTGHATPLPVTDTSSVSTGQATPLPVTSLSSASTGDTTPLPVTDTSSASTGQDTPLPVTSLSSVSTGDTTPLPVTSPSSASTGHATPLLVTDASSVSTGHATSLLVTDASSVSTGHATALHVTDASSLSTGDTTPLPVTSPSSASTGDTTPLPVTDTSSASTGHATSLPVTDTSSASTGHATPLPVTDTSSASTGQATPLPVTGPSSASTGHAIPLLVTDTSSASTGQATPLPVTSLSSASTGDTTPLPVTDASSVSTGHATSLPVTSLSSVSTGDTTPLPVTSPSSASSGHTTPLPVTDASSVSTGDTTPLPVTSPSSASSGHTTPLPVTSPSSASSGHTTPLPVTDASSASTGDTTPLPVTDTSSASTGHATHLPVTGLSSASTGDTTRLPVTNVSSASTGHATPLPVTSTSSASTGDTTPLPGTDTSSVSTGHTTPLLVTDASSVSTGDTTRLPVTSPSSASTGHTTPLPVTDTPSASTGDTTPLPVTNASSLSTRHTTSLHVTSPSSASTGHATSLPVTDTSSVSTGHATPLHVTSPSSASTGDTTPLPVTDTYSASTGQATPLPVTDTSSASTGDTTPLPVTDTSSASTGHATPLPVTNTSSVSTGHATPLHVTSPSSASTGHTTPLPVTDASSVSTGHATSLPVTDASSVFTGHATSLPVTIPSSASSGHTTPLPVTDASSVSTGHATSLPVTDASSVSTGHATPLPVTDASSVSTGHATPLPVTDTSSVSTGHATPLPLTSLSSVSTGDTTPLPVTDTSSASTGQATPLPVTSLSSVSTGDTTPLPVTDTSSASTGHATSLPVTDTSSASTGHATPLPDTDTSSASTGHATPLPVTDTSSASTGHATLLPVTDTSSASIGHATPLPVTDTSSISTGHATPLHVTSPSSASTGHATPLPVTDTSSASTGHANPLHVTSPSSASTGHATPLPVTDTSSASTGHATPLPVTSLSSVSTGDTTPLPVTSPSSASTGHTTPLPVTDTSSASTGQATALPVTSTSSASTGDTTPLPVTDTSSASTGQATPLPVTSLSSVSTGDTTPLPVTSPSSASTGHATPLLVTDASSASTGQATPLPVTDTSSAYTGDTTSLPVTDTSSSSTGDTTPLLVTETSSASTGHATPLHVTSPSSASTGDTTPVPVTDTSSVSTGHATPLPVTGLSSASTGDTTRLPVTDISSASTGQATPLPVTNTSSASTGHATPLPVTGLSSASTGDTTRLPVTDISSASTGQATPLPVTNTSSVSTGDTMPLPVTSPSSASTGHATPLPVTSTSSASTGHATPVPVTSTSSASTGHTTPLPVTDTSSASTGDTTPLPVTSPSSASTGHTTPLHVTIPSSASTGDTSTLPVTGASSASTGHATPLPVTDTSSVSTGHATPLPVTSFSSVSTGDTTPLPVTDTSSVSTGHATPLPVTSFSSVSTGDTTPLPVTDASSASTGHATPLPVTDTSSVSTGHATPLPLTSLSSVSTGDTTTLPVTDTSSVSTGHATPLPVTSFSSVSTGDTTPLPVTDASSASTGHATPLPVTDTSSVSTGHATPLPVTSLSSVSTGDTTPLPVTDASSASTGQATPLPVTSLSSVSTGDTTPLPVTIPSSASSGHTTSLPVTDTSSASTGQATPLPVTSLSSVSTGDTTPLLVTDASSVSTGHATPLPVTDTSSASTGDTTRLPVTDTSSASTGQATPLPVTSLSSVSTGDTTPLLVTNTSSVSRGHATSLPVTIPSSSSSGHTTPLPVTSTSSVSTGHVTPLPVTSTSSASTGHATSLPVTDTSSVSTGHATSLPVTDTSSVSTGHATPLPVTDASSVSTGHATPLPVTDASSASTGDTTPLPVTNTSSASTGQATPLPVTSLSSVSTGDTMPLPVTSPSSASTGHATPLPVTGLSSASTGDTTPLPVTDTSSASTGHVTPLPVTSLSSASTGDSTPLPVTDTSSASTGHVTPLPVTSLSSASTGDTTPLPVTDTSSASTGHATPLHVTDASSASTGQATLLPVTSLSSVSTGDTTPLPVTSPSSASTGHATPLLVTDTSSASTGHATPLPVTDASSVSTGHATSLPVTIRSSGSTGHTTPLPVTDTSSASTGQATSLLVTDTSSVSTGDTTPLPVTSTSSASTGHVTPLHVTSPSSASTGHATPLPVTSLSSASTGDTMPLPVTSPSSASTGDTTPLPVTDASSVSTGHTTPLPVTSPSSASTGHTTPLPVTDTTSASKGDTTPLPVTSPSSASTGHTTPLPVTDTSSASTGDTTPLPVTSPSSASTGHATPLPVTNASSLSTGHATPLHVTSPSSASTGHATPLPVTSTSSASTGHATSLPVTSTSSASTGHATPLPVTDNSSVSTGHATPLPVTGLSSATTDDTTRLPVTDVSSASTGQATPLPVTSLSSVSTGDTTPLPVTSPSSASTGHASPLLVTDASSASTGQATPLPVTDTSSVSTAHATPLPVTGLSSASTDDTTRLPVTDVSSASTGQAIPLPVTSPSSASTGDTTPLPVTDASSASTGDTTSLPVTIPSSASSGHTTSLPVTDASSVSTGHATSLLVTDASSVSTGDTTPLPVTDTNSASTGDTTPLHVTDASSVSTGHATSLPVTSLSSASTGDTTPLPVTSPSSASSGDTTPLPVTDTSSASTGHATHLPVTGLSSASTGDTTRLPVTNVSSASTGHATPLPVTSTSSASTGDTTPLPGTDTSSVSTGHTTPLLVTDASSVSTGDTTRLPVTSPSSASTGHTTPLHVTDASSVSTGHTTPLPVTDTSSASTGQATSLLVTDTSSVSTGDTTPLPVTSTSSASTGHVTPLHVTSPSSASTGHATPLPVTSLSSASTGDTTPLPVTDTSSVSTGHTTPLPVTSPSSASTGHTTPLPVTDTSSASKGDTTPLPVTSPSSASTGHTTPLPVTDTSSASTGDTTPLPVTNASSLSTGHATPLHVTSPSSASTGHATPLPVTSTSSASTGHATPLPVTSTSSASTGHATPLPVTDNSSVSTGHATPLPVTGLSSATTDDTTRLPVTDVSSASTGQATPLPVTSLSSVSTGDTTPLPVTSPSSASTGHASPLLVTDASSASTGQATPLPVTDTSSVSTAHATPLPVTGLSSASTDDTTRLPVTDVSSASTGQAIPLPVTSPSSASTGDTTPLPVTDASSASTGDTTSLPVTIPSSASSGHTTSLPVTDASSVSTGHATSLLVTDASSVSTGDTTPLPVTDTNSASTGDTTPLHVTDASSVSTGHATSLPVTSLSSASTGDTTPLPVTSPSSASSGHTTSLPVTDASSVSTGHATSLPVTIPSSASSGHTTPLPVTDASSVPTGHATSLPVTDASSVSTGHATPLPVTDASSVSTGHATPLPVTDTSSVSTGQATPLPVTSLSSASSTGDTTPLPVTDTSSASTGQDTPLPVTSLFSVSTGDTTPLPVTSPSSASTGHATHLLVTDASSVSTGHATSLLVTDASSVSTGHATALHVTDASSLSTGDTTPLPVTSPSSASTGDTTPLPVTDTSSVSTGHATSLPVTDTSSASTGHATSLPVTDTSSASTGQATPLPVTSPSSASTGHAIPLLVTDTSSASTGQATPLPVTSLSSASTGDTTPLPVTDASSVSTGHATSLPVTSLSSVSTGDTTPLPVTSPSSASTGHATPLHVTSPSSASTGHATPLPVTSLSSASTGDTTPLPVTSPSSASTGHATPLHVTDASSVSTGDTTPLPVTSPSSASSGHTTPLPVTDASSASTGDTTPLPVTDTSSASTGHATHLPVTGLSSASTGDTTRLPVTDVSSASTGHATPLPVTSTSSASTGDTTPLPGTDTSSVSTGHTTPLLVTDASSVSTGDTTRLPVTSPSSASTGHTTPLPVTDTPSASTGDTTPLPVTNASSLSTRHATSLHVTSPSSASTGHATPLPVTDTSAASTGHATPLPVTSTSSASTGDTTPLPVTDTSSASTGHATPLPVTNTSSVSTGHATPLHVTSPSSASTGHTTPLPVTDASSVSTGHATSLPVTDASSVSTGHATPLPVTDASSVSTGHATPLPLTSLSSVSTGDTTPLPVTDTSSASTGQATPLPVTSLSSVSTGDTTPLPVTDTSSASTGHATSLPVTDTSSASTGHATPLPVTDTSSISTGHATPLHVTSPSSASTGHATPLPVTDTSSASTGHATPLPVTSLSSVSTGDTTPLPVTSPSSASTGHATPLLVTDASSASTGQATPLPVTSLSSVSTGDTTPLPVTSPSSASTGHATSLPVTDTSSASTGDTTSLPVTDTSSAYTGDTTSLPVTDTSSSSTGDTTPLLVTETSSASTGDTTPVPVTDTSSVSTGHATPLPVTGLSSASTGDTTRLPVTDISSASTGQATPLPVTNTSSVSTGDTMPLPVTSPSSASTGHATPLPVTSTSSASTGHATPVPVTSTSLASTGHTTPLPVTSPSSASTGHTTPLPVTDTSSASTGDTTPLPVTNASSLSTGHTTPLHVTIPSSASTGDTSTLPVTGASSASTGHATPLPVTDTSSVSTGHATPLPVTSFSSVSTGDTTPLPVTDASSASTGHATPLPVTDTSSASTGDTTPLPVTDASSASTGQATPLPVTSLSSVSTGDTTPLPVTIPSSASSGHTTSLPVSDTSSASTGQATPLPVTSLSSVSTGDTTPLLVTDASSVSTGHATPLPVTDTSSASTGDTTRLPVTDTSSASTGQATPLPVTSLSSVSTGDTTPLLVTNTSSVSTGHATSLPVTIPSSSSSGHTTPLPVTSTSSVSTGHVTPLHVTSPSSSSTGQATPLPVTSTSSVSTGHVTPLHVTSPSSASTGHATPLPVTSTSSASTGHATPLPVTDASSVSTGHATPLPVTDTSSASTGDTTPLPVTDTSSASTGQATPLPVTSLSSVSTGHATPLAVSSATSASTVSSDSPLKMETSGMTTPSLKTDGGRRTATSPPPTTSQTIISTIPSTAMHTRSTAAPIPILPERGVSLFPYGADAGDLEFVRRTVDFTSPLFKPATGFPLGSSLRDSLYASQAGTLWPWWLRSGTMLTSPLVGGPHFIRATPTKPSSPRTGAGPMPCFSTRAVGCSGTWPSAQWRWLFRKQPTDVPASVGEVSP

SEQ ID NO: 74111 - protein, 6448 aa, Homo sapiens
MKGARWRRVPWVSLSCLCLCLLPHVVPGTTEDTLITGSKTPAPVTSTGSTTATLEGQSTAASSRTSNQDISASSQNHQTKSTETTSKAQTDTLTQMMTSTLFSSPSVHNVMETVTQETAPPDEMTTSFPSSVTNTLMMTSKTITMTTSTDSTLGNTEETSTAGTESSTPVTSAVSITAGQEGQSRTTSWRTSIQDTSASSQNHWTRSTQTTRESQTSTLTHRTTSTPSFSPSVHNVTGTVSQKTSPSGETATSSLCSVTNTSMMTSEKITVTTSTGSTLGNPGETSSVPVTGSLMPVTSAALVTVDPEGQSPVTFSRTSTQDTTAFSKNHQTQSVETTRVSQINTLNTLTPVTTSTVLSSPSGFNPSGTVSQETFPSGETTISSPSSVSNTFLVTSKVFRMPISRDSTLGNTEETSLSVSGTISAITSKVSTIWWSDTLSTALSPSSLPPKISTAFHTQQSEGAETTGRPHERSSFSPGVSQEIFTLHETTTWPSSFSSKGHTTWSQTELPSTSTGAATRLVTGNPSTGAAGTIPRVPSKVSAIGEPGEPTTYSSHSTTLPKTTGAGAQTQWTQETGTTGEALLSSPSYSVTQMIKTATSPSSSPMLDRHTSQQITTAPSTNHSTIHSTSTSPQESPAVSQRGHTQAPQTTQESQTTRSVSPMTDTKTVTTPGSSFTASGHSPSEIVPQDAPTISAATTFAPAPTGDGHTTQAPTTALQAAPSSHDATLGPSGGTSLSKTGALTLANSVVSTPGGPEGQWTSASASTSPDTAAAMTHTHQAESTEASGQTQTSEPASSGSRTTSAGTATPSSSGASGTTPSGSEGISTSGETTRFSSNPSRDSHTTQSTTELLSASASHGAIPVSTGMASSIVPGTFHPTLSEASTAGRPTGQSSPTSPSASPQETAAISRMAQTQRTRTSRGSDTISLASQATDTFSTVPPTPPSITSSGLTSPQTQTHTLSPSGSGKTFTTALISNATPLPVTYASSASTGHTTPLHVTDASSVSTGHATPLPVTDTSSESTGHATPLPVTSPSSVSTGHTTPLPVTDTSSESTGHVTPLPVTSLSSASTGDSTPLPVTDTSSASTGHVTPLPVTSLSSASTGDTTPLPVTDTSSASTGHATSLPVTDTSSVSTGHTTPLPVTDTSSASTGHATSLPVTDTSSVSTAHATPLPVTGLSSASTDDTTRLPVTDVSSASTGQAIPLPVTSPSSASTGDTTPLPVTDASSASTGDTTSLPVTIPSSASSGHTTSLPVTDASSVSTGHATSLLVTDASSVSTGDTTPLPVTDTNSASTGDTTPLHVTDASSVSTGHATSLPVTSLSSASTGDTTPLPVTSPSSASSGHTTPLPVTDASSVPTGHATSLPVTDASSVSTGHATPLPVTDASSVSTGHATPLPVTDTSSVSTGQATPLPVTSLSSASTGDTTPLPVTDTSSASTGQDTPLPVTSLSSVSTGDTTPLPVTSPSSASTGHATPLLVTDASSVSTGHATSLLVTDASSVSTGHATALHVTDASSLSTGDTTPLPVTSPSSASTGDTTPLPVTDTSSASTGHATSLPVTDTSSASTGHATPLPVTDTSSASTGQATPLPVTGPSSASTGHAIPLLVTDTSSASTGQATPLPVTSLSSASTGDTTPLPVTDASSVSTGHATSLPVTSLSSVSTGDTTPLPVTSPSSASSGHTTPLPVTDASSVSTGDTTPLPVTSPSSASSGHTTPLPVTSPSSASSGHTTPLPVTDASSASTGDTTPLPVTDTSSASTGHATHLPVTGLSSASTGDTTRLPVTNVSSASTGHATPLPVTSTSSASTGDTTPLPGTDTSSVSTGHTTPLLVTDASSVSTGDTTRLPVTSPSSASTGHTTPLPVTDTPSASTGDTTPLPVTNASSLSTRHTTSLHVTSPSSASTGHATSLPVTDTSSVSTGHATPLHVTSPSSASTGDTTPLPVTDTYSASTGQATPLPVTDTSSASTGDTTPLPVTDTSSASTGHATPLPVTNTSSVSTGHATPLHVTSPSSASTGHTTPLPVTDASSVSTGHATSLPVTDASSVFTGHATSLPVTIPSSASSGHTTPLPVTDASSVSTGHATSLPVTDASSVSTGHATPLPVTDASSVSTGHATPLPVTDTSSVSTGHATPLPLTSLSSVSTGDTTPLPVTDTSSASTGQATPLPVTSLSSVSTGDTTPLPVTDTSSASTGHATSLPVTDTSSASTGHATPLPDTDTSSASTGHATPLPVTDTSSASTGHATLLPVTDTSSASIGHATPLPVTDTSSISTGHATPLHVTSPSSASTGHATPLPVTDTSSASTGHANPLHVTSPSSASTGHATPLPVTDTSSASTGHATPLPVTSLSSVSTGDTTPLPVTSPSSASTGHTTPLPVTDTSSASTGQATALPVTSTSSASTGDTTPLPVTDTSSASTGQATPLPVTSLSSVSTGDTTPLPVTSPSSASTGHATPLLVTDASSASTGQATPLPVTDTSSAYTGDTTSLPVTDTSSSSTGDTTPLLVTETSSASTGHATPLHVTSPSSASTGDTTPVPVTDTSSVSTGHATPLPVTGLSSASTGDTTRLPVTDISSASTGQATPLPVTNTSSASTGHATPLPVTGLSSASTGDTTRLPVTDISSASTGQATPLPVTNTSSVSTGDTMPLPVTSPSSASTGHATPLPVTSTSSASTGHATPVPVTSTSSASTGHTTPLPVTDTSSASTGDTTPLPVTSPSSASTGHTTPLHVTIPSSASTGDTSTLPVTGASSASTGHATPLPVTDTSSVSTGHATPLPVTSFSSVSTGDTTPLPVTDTSSVSTGHATPLPVTSFSSVSTGDTTPLPVTDASSASTGHATPLPVTDTSSVSTGHATPLPLTSLSSVSTGDTTTLPVTDTSSVSTGHATPLPVTSFSSVSTGDTTPLPVTDASSASTGHATPLPVTDTSSVSTGHATPLPVTSLSSVSTGDTTPLPVTDASSASTGQATPLPVTSLSSVSTGDTTPLPVTIPSSASSGHTTSLPVTDTSSASTGQATPLPVTSLSSVSTGDTTPLLVTDASSVSTGHATPLPVTDTSSASTGDTTRLPVTDTSSASTGQATPLPVTSLSSVSTGDTTPLLVTNTSSVSRGHATSLPVTIPSSSSSGHTTPLPVTSTSSVSTGHVTPLPVTSTSSASTGHATSLPVTDTSSVSTGHATSLPVTDTSSVSTGHATPLPVTDASSVSTGHATPLPVTDASSASTGDTTPLPVTNTSSASTGQATPLPVTSLSSVSTGDTMPLPVTSPSSASTGHATPLPVTGLSSASTGDTTPLPVTDTSSASTGHVTPLPVTSLSSASTGDSTPLPVTDTSSASTGHVTPLPVTSLSSASTGDTTPLPVTDTSSASTGHATPLHVTDASSASTGQATLLPVTSLSSVSTGDTTPLPVTSPSSASTGHATPLLVTDTSSASTGHATPLPVTDASSVSTGHATSLPVTIRSSGSTGHTTPLPVTDTSSASTGQATSLLVTDTSSVSTGDTTPLPVTSTSSASTGHVTPLHVTSPSSASTGHATPLPVTSLSSASTGDTMPLPVTSPSSASTGDTTPLPVTDASSVSTGHTTPLPVTSPSSASTGHTTPLPVTDTTSASKGDTTPLPVTSPSSASTGHTTPLPVTDTSSASTGDTTPLPVTSPSSASTGHATPLPVTNASSLSTGHATPLHVTSPSSASTGHATPLPVTSTSSASTGHATSLPVTSTSSASTGHATPLPVTDNSSVSTGHATPLPVTGLSSATTDDTTRLPVTDVSSASTGQATPLPVTSLSSVSTGDTTPLPVTSPSSASTGHASPLLVTDASSASTGQATPLPVTDTSSVSTAHATPLPVTGLSSASTDDTTRLPVTDVSSASTGQAIPLPVTSPSSASTGDTTPLPVTDASSASTGDTTSLPVTIPSSASSGHTTSLPVTDASSVSTGHATSLLVTDASSVSTGDTTPLPVTDTNSASTGDTTPLHVTDASSVSTGHATSLPVTSLSSASTGDTTPLPVTSPSSASSGDTTPLPVTDTSSASTGHATHLPVTGLSSASTGDTTRLPVTNVSSASTGHATPLPVTSTSSASTGDTTPLPGTDTSSVSTGHTTPLLVTDASSVSTGDTTRLPVTSPSSASTGHTTPLHVTDASSVSTGHTTPLPVTDTSSASTGQATSLLVTDTSSVSTGDTTPLPVTSTSSASTGHVTPLHVTSPSSASTGHATPLPVTSLSSASTGDTTPLPVTDTSSVSTGHTTPLPVTSPSSASTGHTTPLPVTDTSSASKGDTTPLPVTSPSSASTGHTTPLPVTDTSSASTGDTTPLPVTNASSLSTGHATPLHVTSPSSASTGHATPLPVTSTSSASTGHATPLPVTSTSSASTGHATPLPVTDNSSVSTGHATPLPVTGLSSATTDDTTRLPVTDVSSASTGQATPLPVTSLSSVSTGDTTPLPVTSPSSASTGHASPLLVTDASSASTGQATPLPVTDTSSVSTAHATPLPVTGLSSASTDDTTRLPVTDVSSASTGQAIPLPVTSPSSASTGDTTPLPVTDASSASTGDTTSLPVTIPSSASSGHTTSLPVTDASSVSTGHATSLLVTDASSVSTGDTTPLPVTDTNSASTGDTTPLHVTDASSVSTGHATSLPVTSLSSASTGDTTPLPVTSPSSASSGHTTSLPVTDASSVSTGHATSLPVTIPSSASSGHTTPLPVTDASSVPTGHATSLPVTDASSVSTGHATPLPVTDASSVSTGHATPLPVTDTSSVSTGQATPLPVTSLSSASSTGDTTPLPVTDTSSASTGQDTPLPVTSLFSVSTGDTTPLPVTSPSSASTGHATHLLVTDASSVSTGHATSLLVTDASSVSTGHATALHVTDASSLSTGDTTPLPVTSPSSASTGDTTPLPVTDTSSVSTGHATSLPVTDTSSASTGHATSLPVTDTSSASTGQATPLPVTSPSSASTGHAIPLLVTDTSSASTGQATPLPVTSLSSASTGDTTPLPVTDASSVSTGHATSLPVTSLSSVSTGDTTPLPVTSPSSASTGHATPLHVTSPSSASTGHATPLPVTSLSSASTGDTTPLPVTSPSSASTGHATPLHVTDASSVSTGDTTPLPVTSPSSASSGHTTPLPVTDASSASTGDTTPLPVTDTSSASTGHATHLPVTGLSSASTGDTTRLPVTDVSSASTGHATPLPVTSTSSASTGDTTPLPGTDTSSVSTGHTTPLLVTDASSVSTGDTTRLPVTSPSSASTGHTTPLPVTDTPSASTGDTTPLPVTNASSLSTRHATSLHVTSPSSASTGHATPLPVTDTSAASTGHATPLPVTSTSSASTGDTTPLPVTDTSSASTGHATPLPVTNTSSVSTGHATPLHVTSPSSASTGHTTPLPVTDASSVSTGHATSLPVTDASSVSTGHATPLPVTDASSVSTGHATPLPLTSLSSVSTGDTTPLPVTDTSSASTGQATPLPVTSLSSVSTGDTTPLPVTDTSSASTGHATSLPVTDTSSASTGHATPLPVTDTSSISTGHATPLHVTSPSSASTGHATPLPVTDTSSASTGHATPLPVTSLSSVSTGDTTPLPVTSPSSASTGHATPLLVTDASSASTGQATPLPVTSLSSVSTGDTTPLPVTSPSSASTGHATSLPVTDTSSASTGDTTSLPVTDTSSAYTGDTTSLPVTDTSSSSTGDTTPLLVTETSSASTGDTTPVPVTDTSSVSTGHATPLPVTGLSSASTGDTTRLPVTDISSASTGQATPLPVTNTSSVSTGDTMPLPVTSPSSASTGHATPLPVTSTSSASTGHATPVPVTSTSLASTGHTTPLPVTSPSSASTGHTTPLPVTDTSSASTGDTTPLPVTNASSLSTGHTTPLHVTIPSSASTGDTSTLPVTGASSASTGHATPLPVTDTSSVSTGHATPLPVTSFSSVSTGDTTPLPVTDASSASTGHATPLPVTDTSSASTGDTTPLPVTDASSASTGQATPLPVTSLSSVSTGDTTPLPVTIPSSASSGHTTSLPVSDTSSASTGQATPLPVTSLSSVSTGDTTPLLVTDASSVSTGHATPLPVTDTSSASTGDTTRLPVTDTSSASTGQATPLPVTSLSSVSTGDTTPLLVTNTSSVSTGHATSLPVTIPSSSSSGHTTPLPVTSTSSVSTGHVTPLHVTSPSSSSTGQATPLPVTSTSSVSTGHVTPLHVTSPSSASTGHATPLPVTSTSSASTGHATPLPVTDASSVSTGHATPLPVTDTSSASTGDTTPLPVTDTSSASTGQATPLPVTSLSSVSTGHATPLAVSSATSASTVSSDSPLKMETSGMTTPSLKTDGGRRTATSPPPTTSQTIISTIPSTAMHTRSTAAPIPILPERGVSLFPYGADAGDLEFVRRTVDFTSPLFKPATGFPLGSSLRDSLYASQAGTLWPWWLRSGTMLTSPLVGGPHFIRATPTKPSSPRTGAGPMPCFSTRAVGCSGTWPSAQATRCSWASLVEMAISKTAH

SEQ ID NO: 74112 - protein, 1664 aa, Homo sapiens
MDDRCYPVIFPDERNFRPFTSDSLAAIEKRIAIQKEKKKSKDQTGEVPQPRPQLDLKASRKLPKLYGDIPRELIGKPLEDLDPFYRNHKTFMVLNRKRTIYRFSAKHALFIFGPFNSIRSLAIRVSVHSLFSMFIIGTVIINCVFMATGPAKNSNSNNTDIAECVFTGIYIFEALIKILARGFILDEFSFLRDPWNWLDSIVIGIAIVSYIPGITIKLLPLRTFRVFRALKAISVVSRLKVIVGALLRSVKKLVNVIILTFFCLSIFALVGQQLFMGSLNLKCISRDCKNISNPEAYDHCFEKKENSPEFKMCGIWMGNSACSIQYECKHTKINPDYNYTNFDNFGWSFLAMFRLMTQDSWEKLYQQTLRTTGLYSVFFFIVVIFLGSFYLINLTLAVVTMAYEEQNKNVAAEIEAKEKMFQEAQQLLKEEKEALVAMGIDRSSLTSLETSYFTPKKRKLFGNKKRKSFFLRESGKDQPPGSDSDEDCQKKPQLLEQTKRLSQNLSLDHFDEHGDPLQRQRALSAVSILTITMKEQEKSQEPCLPCGENLASKYLVWNCCPQWLCVKKVLRTVMTDPFTELAITICIIINTVFLAMEHHKMEASFEKMLNIGNLVFTSIFIAEMCLKIIALDPYHYFRRGWNIFDSIVALLSFADVMNCVLQKRSWPFLRSFRVVLNLFIALLLNSFSNEERNGNLEGEARKTKVQLALDRFRRAFCFVRHTLEHFCHKWCRKQNLPQQKEVAGGCAAQSKDIIPLVMEMKRGSETQEELGILTSVPKTLGVRHDWTWLAPLAEEEDDVEFSGEDNAQRITQPEPEQQAYELHQENKKPTSQRVQSVEIDMFSEDEPHLTIQDPRKKSDVTSILSECSTIDLQDGFGWLPEMVPKKQPERCLPKGFGCCFPCCSVDKRKPPWVIWWNLRKTCYQIVKHSWFESFIIFVILLSSGALIFEDVHLENQPKIQELLNCTDIIFTHIFILEMVLKWVAFGFGKYFTSAWCCLDFIIVIVSVTTLINLMELKSFRTLRALRPLRALSQFEGMKVVVNALIGAIPAILNVLLVCLIFWLVFCILGVYFFSGKFGKCINGTDSVINYTIITNKSQCESGNFSWINQKVNFDNVGNAYLALLQVATFKGWMDIIYAAVDSTEKEQQPEFESNSLGYIYFVVFIIFGSFFTLNLFIGVIIDNFNQQQKKLGGQDIFMTEEQKKYYNAMKKLGSKKPQKPIPRPLNKCQGLVFDIVTSQIFDIIIISLIILNMISMMAESYNQPKAMKSILDHLNWVFVVIFTLECLIKIFALRQYYFTNGWNLFDCVVVLLSIVSTMISTLENQEHIPFPPTLFRIVRLARIGRILRLVRAARGIRTLLFALMMSLPSLFNIGLLLFLIMFIYAILGMNWFSKVNPESGIDDIFNFKTFASSMLCLFQISTSAGWDSLLSPMLRSKESCNSSSENCHLPGIATSYFVSYIIISFLIVVNMYIAVILENFNTATEESEDPLGEDDFDIFYEVWEKFDPEATQFIKYSALSDFADALPEPLRVAKPNKYQFLVMDLPMVSEDRLHCMDILFAFTARVLGGSDGLDSMKAMMEEKFMEANPLKKLYEPIVTTTKRKEEERGAAIIQKAFRKYMMKVTKGDQGDQNDLENGPHSPLQTLCNGDLSSFGVAKGKVHCD

SEQ ID NO: 74113 - protein, 31 aa, Homo sapiens
VHFDQFKEALILILSRTLSNEEHFQEPVIIP

SEQ ID NO: 74114 - protein, 93 aa, Homo sapiens
MSTDDQQKIQAAAFDKGDDRRLGKKPIFSSSQYPICDMVPRDTKDEESTGSASDLYNLIQLPKEKKNRLHTYIKNDNRTGAVAHTCNPSTLGG

SEQ ID NO: 74115 - protein, 536 aa, Homo sapiens
MAWSQNNAKFAVCTVDRVVLLYDEHGERRDKFSTKPADMKYGRKSYMVKGMAFSPDSTKIAIGQTDNIIYVYKIGEDWGDKKVICNKFIQTSAVTCLQWPAEYIIVFGLAEGKVRLANTKTNKSSTIYGTESYVVSLTTNCSGKGILSGHADGTIVRYFFDDEGSGESQGKLVNHPCPPYALAWATNSIVAAGCDRKIVAYGKEGHMLQTFDYSRDPQEREFTTAVSSPGGQSVVLGSYDRLRVFNWIPRRSIWEEAKPKEITNLYTITALAWKRDGSRLCVGTLCGGVEQFDCCLRRSIYKNKFELTYVGPSQVIVKNLSSGTRVVLKSHYGYEVEEVKILGKERYLVAHTSETLLLGDLNTNRLSEIAWQGSGGNEKYFFENENVCMIFNAGELTLVEYGNNDTLGSVRTEFMNPHLISVRINERCQRGTEDNKKLAYLIDIKTIAIVDLIGGYNIGTVSHESRVDWLELNETGHKLLFRDRKLRWVPGSDVLVAQNRNSLCVWYNIEAPERVTMFTIRVLFCFGPSSKSSIPA

SEQ ID NO: 74116 - protein, 244 aa, Homo sapiens
  MOD_RES (1)..(1): Any amino acid
XSSAFQASLEGGLARITQGQPLEVAFGSQVTLRNVFGKPVPCWLHSHQDTYPMIYENGRGSSHQQQVTCYPFKDVNNWWIVKDPRRHDVAAPLSPHSQEVSCYIDYNISMPAQNLWRLEIVNRGSDTDVWKTILSEVRFVHVNTSAVLKLSGAHLPDWGYRQLEIVGEKLSRGYHGSTVWNVEEHRYGASQEQRERERELHSPAQVDVSRNLSFMARFSELQWRMLALRSDDSEHKYSSSPLEW

SEQ ID NO: 74117 - protein, 52 aa, Homo sapiens
MAAGFGRCCRTESCSVTQAGMQWCSLGSLQPPPSGFKRFSCLSVPSSWDYRS

SEQ ID NO: 74118 - protein, 141 aa, Homo sapiens; identical to SEQ ID NO: 65428
  MOD_RES (1)..(1): Any amino acid

SEQ ID NO: 74119 - protein, 12 aa, Homo sapiens
  MOD_RES (1)..(1): Any amino acid
XPSMPTPTAGYQ

SEQ ID NO: 74120 - protein, 26 aa, Homo sapiens
  MOD_RES (1)..(1): Any amino acid
XKEQEKEKKSVWEDARSGLCSSVGMV

SEQ ID NO: 74121 - protein, 165 aa, Homo sapiens
MDNGMFSGFIMIKNLLLFCISMNLSSHFGFSQMPTSSVKDETNDNITIFTRILDGLLDGYDNRLRPGLGERITQVRTDIYVTSFGPVSDTEMEYTIDVFFRQSWKDERLRFKGPMQRLPLNNLLASKIWTPDTFFHNGKKSIAHNMTTPNKLLRLEDDGTLLYTM

SEQ ID NO: 74122 - protein, 73 aa, Homo sapiens
MASADKNGGSVSSVSSSRLQSRKPPNLSITIPPPEKETQAPGEQDSMLPERKNPAYLKSVSLQEPRSRWQESS

SEQ ID NO: 74123 - protein, 195 aa, Homo sapiens
MSILKIHAREIFDSRGNPTVEVDLFTSKGLFRAAVPSGASTGIYEALELRDNDKTRYMGKGVSKAVEHINKTIAPALVSKKLNVTEQEKIDKLMIEMDGTENKSKFGANAILGVSLAVCKAGAVEKGVPLYRHIADLAGNSEVILPVPAFNVINGGSHAGNKLAMQEFMILPVGAANFREAMRIGAEVYHNLKNV

SEQ ID NO: 74124 - protein, 149 aa, Homo sapiens
MVTTPTGYKYEGVKFEKGNCGVSIMRSGEAMEQGLRDCCRSIRIGKILIQSDEETQRAKVYYAKFPPDIYRRKVLLMYPILSTGNTVIEAVKVLIEHGVQPSVIILLSLFSTPHGAKSIIQEFPEITILTTEVHPVAPTHFGQKYFGTD

SEQ ID NO: 74125 - protein, 104 aa, Homo sapiens
MEESPLSRAPSRGGVNFLNVARTYIPNTKVECHYTLPPGTMPSASDWIGIFKVEAACVRDYHTFVWSSVPESTTDGSPIHTSVQFQASYLPKPGAQLYQFRYVN

SEQ ID NO: 74126 - protein, 118 aa, Homo sapiens
MNLPVPDPILLTNSHDGLDGPTYKKRRLDECEEAFQGTKVFVMPNGMLKSNQQLVDIIEKVKPEIRLLIEKCNTVKMWVQLLIPRIEDGNNFGVSIQEETVAELRTVESEAASYLDQI

SEQ ID NO: 74127 - protein, 294 aa, Homo sapiens
  MOD_RES (1)..(1): Any amino acid
XPKTASETETDICAEWEIKTITSALKTYLRMLPGPLMMYQFQRSFIKAAKLENQESRVSEIHSLVHRLPEKNRQMLQLLMNHLANVANNHKQNLMTVANLGVVFGPTLLRPQEETVAAIMDIKFQNIVIEILIENHEKIFNTVPDMPLTNAQLHLSRKKSSDSKPPSCSERPLTLFHTVQSTEKQEQRNSIINSSLESVSSNPNSILNSSSSLQPNMNSSDPDLAVVKPTRPNSLTPFRKAKALYACKAEHDSELSFTAGTVFDNVHPSQEPGWLEGTLNGKTGLIPENYVEFL

SEQ ID NO: 74128 - protein, 1008 aa, Homo sapiens
MADNLDEFIEEQKARLAEDKAELESDPPYMEMKGKLSAKLSENSKILISMAKENIPPNSQQTRGSLGIDYGLSLPLGEDYERKKHKLKEELRQDYRRYLTQERLKLERNKEYNQFLRGKEESSEKFRQVEKSTEPKSQRNKKPIGQVKPDLTSQIQTSCENSEGPRKDVLTPSEAYEELLNQRRLEEDRYRQLDDEIELRNRRIIKKANEEVGISNLKHQRFASKAGIPDRRFHRFNEDRVFDRRYHRPDQDPEVSEEMDERFRYESDFDRRLSRVYTNDRIAPLPPPPLLPPLATNYRTPYDDAYYFYGSRNTFDPSLAYYGSGMMGVQPAAYVSAPVTHQLAQPVVNTVGQNELKITSDQVINSGLIFEDKPKPSKQSLQSYQEALQQQIREREERRKKEREEKEEYEAKLEAEMRTYNPWGKGGGGAPLRDAKGNLITDLNRMHRQNIDAYHNPDARTYEDKRAVVSLDPNLATSNAENLEDAANKSSGHMQTQSSPFARGNVFGEPPTELQIKQQELYKNFLRFQIEEKKQREEAERERLRIAEEKEERRLAEQRARIQQEYEEEQEKKREKEEEQRLKNEEHIRLAEERQKEAERKKKEEEEKYNLQLQHYCERDNLIGEETKHMRQPSPIVPALQNKIASKLQRPPSVDSIIRSFIHESSMSRAQSPPVPARKNQLRAEEEKKNVIMELSEMRKQLRSEERRLQERLLHMDSDDEIPIRKKERNPMDIFDMARHRLQAPVRRQSPKGLDAATFQNVHDFNELKDRDSETRVDLKFMYLDPPRDHHTLEIQQQALLREQQKRLNRIKMQEGAKVDLDAIPSAKVREQRMPRDDTSDFLKNSLLESDSAFIGAYGETYPAIEDDVLPPPSQLPSARERRRNKWKGLDIDSSRPNVAPDGLSLKSISSVNVDELRVRNEERMRRLNEFHNKPINTDDESSLVDPDDIMKHIGDDGSNSVATEPWLRPGTSETLKRFMAEQLNQEQQQIPGKPGTFTWQGLSTAHG

SEQ ID NO: 74129 - protein, 176 aa, Homo sapiens
SLESSPDAPDHTSETSHSPLYADPYTPPATSHRRVTDVRGLEEFLSAMQSARGPTPSSPLPSVPVSVPASDPRSCSSGPAGPYLLSKKGALQSRAAQRHRGSAKDGGPQPPDAPQLVSSAREGSPEPWLPLTDGRSPRRSRDPGYDHLWDETLSSSHQKCPQLGGPEASGGLVQWI

SEQ ID NO: 74130 - protein, 102 aa, Homo sapiens
MSYGSITFGDVAIDFSHQEWEYLSLVQKTLYQEVMMENYDNLVSLGHSVSKPDLITLLEQGKEPWMIVREETRGECTAELQSKNCGFQLRDLQDSLHLRKNC

SEQ ID NO: 74131 - protein, 1047 aa, Homo sapiens
MAEGRRREDEEEELRERRELGGQRRARGRALSGHSAADRNERNKPEHRSSSQGPLSSIRAVIKRSSRTSIQSELHRDRRRPEITIVAAEPLRPASWFPGTPPPGLGFPTSSAAGSWRPNELVPAELPPSYEQVIKEINQVQVNTTNNNNAAATPRHTITSATQTDFSEEIDNDLPQTLQAPLKPLQPFSAVSSGNLPTNVAPLIVFDISEEPNCPENPSATRCPVPKPRSKSNLRPIPRDSHIKEQSQQKISPAAVGEESSPGRPQSLLDNASTSDSQAVMNIMNTEQSQNSIVSRIKVFEGQTNIETSGLPKKPEITPRSLPPKPTVSSGKPSVAPKPAANRASGEWDSGTENRLKVTSKEGLTPYPPLQEAGSIPVTKPELPKKPNPGLIRSVNPEIPGRGPLAESSDSGKKVPTPAPRPLLLKKSVSSENPTYPSAPLKPVTVPPRLAGASQAKAYKSLGEGPPANPPVPVLQSKPLVDIDLISFDDDVLPTPSGNLAEESVGSEMVLDPFQLPAKTEPIKERAVQPAPTRKPTVIRIPAKPGKCLHEDPQSPPPLPAEKPIGNTFSTVSGKLSNVERTRNLESNHPGQTGGFVRVPPRLPPRPVNGKTIPTQQPPTKVPPERPPPPKLSATRRSNKKLPFNRSSSDMDLQKKQSNLATGLSKAKSQVFKNQDPVLPPRPKPGHPLYSKYMRGDVLVMLKQTENNYLECQKGEDTGRVHLSQMKIITPLDEHLRSRPNDPSHAQKPVDSGAPHAVVLHDFPAEQVDDLNLTSGEIVYLLEKIDTDWYRGNCRNQIGIFPANYVKVIIDIPEGGNGKRECVSSHCVKGSRCVARFEYIGEQKDELSFSEGEIIILKEYVNEEWARGEVRGRTGIFPLNFVEPVEDYPTSGANVLSTKVPLKTKKEDSGSNSQVNSLPAEWCEALHSFTAETSDDLSFKRGDRIQILERLDSDWCRGRLQDREGIFPAVFVRPCPAEAKSMLAIVPKGRKAKALYDFRGENEDELSFKAGDIITELESVDDDWMSGELMGKSGIFPKNYIQFLQIS

SEQ ID NO: 74132 - protein, 110 aa, Homo sapiens
MQTAGALFISPALPSYSNFPLQVARREFQTSVVSRDIDTAAKFIGAGAATVGVAGSGAGIGTVFGSLIIGYARNPSLKQQLFSYAILGFALSEAMGLFCLMVAFLILFAM

SEQ ID NO: 74133 - protein, 253 aa, Homo sapiens
  MOD_RES (1)..(1): Any amino acid
XICLLLASLLSLVSAVSACRVFKLWPLSFLGSKLSTCEQLRHRLEHLTLIFSTRKAENPAQLMRKANTVASVLLDVALGLMLLSWLHGRSRIGHLADALVPVADHVAEELQHLLQWLMGAPAGLKMNRALDQVLGRFFLYHIHLWISYIHLMSPFVEHILWHVGLSACLGLTVALSLLSDIIALLTFHIYCFYVYGARSGTFCASAWTPVPMTWTSCSSGLCSSPSCSSSCLPQPCTTWCSPCSGSWWSPCRA

SEQ ID NO: 74134 - protein, 162 aa, Homo sapiens
MERLQKAKMDNQVLGYKDLAAIPKDKAILDIERPDLMIYEPHFTYSLLEHVELPRSRERSLSPKSTSPPPSPEVWADSRSPGIISQASAPRTTGTPRTSLPHFHHPETSRPDSNIYKKPPIYKQRESVGGSPQTKHLIEDLIIESSKFPAAQPPDPNQPAKI

SEQ ID NO: 74135 - protein, 998 aa, Homo sapiens
MKSRFSTIDLRAVLAELNASLLGMRVNNVYDVDNKTYLIRLQKPDFKATLLLESGIRIHTTEFEWPKNMMPSSFAMKGNIVLTDYEYVILNILRFRTDEADDVKFAVRERYPLDHARAAEPLLTLERLTEIVASAPKGELLKRVLNPLLPYGPALIEHCLLENGFSGNVKVDEKLETKDIEKVLVSLQKAEDYMKTTSNFSGKGYIIQKREIKPSLEADKPVEDILTYEEFHPFLFSQHSQCPYIEFESFDKAVDEFYSKIEGQKIDLKALQQEKQALKKLDNVRKDHENRLEALQQAQEIDKLKGELIEMNLQIVDRAIQVVRSALANQIDWTEIGLIVKEAQAQGDPVASAIKELKLQTNHVTMLLRNPYLLSEEEDDDVDGDVNVEKNETEPPKGKKKKQKNKQLQKPQKNKPLLVDVDLSLSAYANAKKYYDHKRYAAKKTQKTVEAAEKAFKSAEKKTKQTLKEVQTVTSIQKARKVYWFEKFLWFISSENYLIIGGRDQQQNEIIVKRYLTPGDIYVHADLHGATSCVIKNPTGEPIPPRTLTEAGTMALCYSAAWDARVITSAWWVYHHQVSKTAPTGEYLTTGSFMIRGKKNFLPPSYLMMGFSFLFKVDESCVWRHQGERKVRVQDEDMETLASCTSELISEEMEQLDGGDTSSDEDKEEHETPVEVELMTQVDQEDITLQSGRDELNEELIQEESSEDEGEYEEVRKDQDSVGEMKDEGEETLNYPDTTIDLSHLQPQRSIQKLASKEESSNSSDSKSQSRRHLSAKERREMKKKKLPSDSGDLEALEGKDKEKESTVHIETHQNTSKNVAAVQPMKRGQKSKMKKMKEKYKDQDEEDRELIMKLLGSAGSNKEEKGKKGKKGKTKDEPVKKQPQKPRGGQRVSDNIKKETPFLEVITHELQDFAVDDPHDDKEEQDLDQQGNEENLFDSLTGQPHPEDVLLFAIPICAPYTTMTNYKYKVKLTPGVQKKGKAAKTALNSFMHSKEAT

SEQ ID NO: 74136 - protein, 116 aa, Homo sapiens
MDSVRSGPFGQLFRPDNFIFGQTGAGNNWAKGHYTEGAELVDAVLDVVRKECEHCDCLQGFQLTHSLGGGTGSGMGTLLISKIREEFPDRIMNTFSVMPSPKVSDTVVEPYNATLS

SEQ ID NO: 74137 - protein, 199 aa, Homo sapiens
MEEKDYSEADGLSERTTPSKAQKSPQKIAKKYKSAICRVTLLDASEYECEVEKHGRGQVLFDLVCEHLNLLEKDYFGLTFCDADSQKNWLDPSKEIKKQIRSSPWNFAFTVKFYPPDPAQLTEDITRYYLCLQLRADIITGRLPCSFVTHALLGSYAVQAELGDYDAEEHVGNYVSELRFAPNQTRELEERIMELHKTY

SEQ ID NO: 74138 - protein, 1024 aa, Homo sapiens
MARHGPPWSRLDAQQERDVRELVRGVAGLQDEADPNFQLALNFAWSNFRFHRFLDVNSHKIEKTIEGIYEKFVIHSDLSKAASWKRLTEEFLNAPLPSIKEIKTDAHYSILSLLLCLSDSPSNSSYVETPRNKEVEKKDDFDWGKYLMEDEEMDIGPYMDTPNWSEESEEENDQQPLSREDSGIQVDRTPLEEQDQNRKLDPCISWKDEPDDRSWLEHHVVHQYWTARPSHFPHSLHLHSNLAAVWDQHLYSSDPLYVPDDRVLVTETQVIRETLWLLSGVKKLFIFQLIDGKVTVRNNIIVTHLTHSCLRSVLEQIAAYGQVVFRLQEFIDEVMGHSSESMLPGSGSVPKKSTEAPFRTYQAFMWALYKYFISFKEELAEIEKCIINNDTTITLAIVVDKLAPRLSQLKVLHKVFSTGVAEVPPDTRNVVRASHLLNTLYKAILEYDNVGEASEQTVSLLFSLWVETVRPYLQTVDEWIVHGHLWDGAREFIIQRNKNVPVNHRDFWYATYTLYSVSEKTENEEKMSDNASASSGSDQGPSSRQHTMVSFLKPVLKQIIMAGKSMQLLKNLQCAESTTCQAGARDAERKSLYTLFLESVQSRLRHGEDSTPQVLTEQQATKENLMKMQSIAESHLELDDVHDPLLAINFARMYLEQSDFHEKFAGGDVCVDRSSESVTCQTFELTLRSCLYPHIDKQYLDCCGNLMQTLKKDYRLVEYLQAMRNFFLMEGGDTMYDFYTSIFDKIREKETWQNVSFLNVQLQEAVGQRYPEDSSRLSISFENVDTAKKKLPVHILDGLTLSYKVPWPVDIVISLECQKIYNQVFLLLLQIKWAKYSLDVLLFGELVSTAEKPRLKEGLIHEQDTVAQFGPQKEPVRQQIHRMFLLRVKLMHFVNSLHNYIMTRILHSTGLEFQHQVEEAKDLDQLIKIHYRYLSTIHDRCLLREKVSFVKEAIMKVLNLALMFADGWQAGLGTWRMESIEKMESDFKNCHMFLVTILNKAVCRGSFPHCEYIMLKYFYLCISL

SEQ ID NO: 74139 - protein, 254 aa, Homo sapiens
MAGLRNESEQEPLLGDTPGSREWDILETEEHYKSRWRSIRILYLTMFLSSVGFSVVMMSIWPYLQKIDPTADTSFLGWVIASYSLGQMVASPIFGLWSNYRPRKEPLIVSILISVAANCLYAYLHIPASHNKYYMLVARGLLGIGAGNVAVVRSYTAGATSLQERTSSMANISMCQALGFILGPGCIHGLVNSIWKWSPDSWAYVHQPSVCSLGTTMGIQPGVWNNSAHHHPPGSGLQKTHCSFCKIWEDSGIN

SEQ ID NO: 74140 - protein, 345 aa, Homo sapiens [sequence omitted]

SEQ ID NO: 74141 - protein, 167 aa, Homo sapiens
MKSSVSEDLGCRRGDFSRKHYGSVELLISSDADGAIQRAGRFRVENGSSDENATALPGTWRRTDVHLENPEYHTRWYFKYFLGQVHQNYIGNDAEKSPFFLSVTLSDQNNQRVPQYRAILWRKTGTQKICLPYSPTKTLSVKSILSAMNLDKFEKGPREIFHPEIQK

SEQ ID NO: 74142 - protein, 53 aa, Homo sapiens
MGDSKVKVAVRIRPMNRRDLTVRSQLIQYGQIPLSSGFKKLSWTSGPEEVKRD

SEQ ID NO: 74143 - protein, 148 aa, Homo sapiens
AVLHVWGRLWNSTFLEEYSAVKSLEVIVRANITVKSSIKNLMLRDASTVIPVMVYLDPMAVVAEGVPWWVILLAVLAGLLVLALLVLLLWKCGFFHRSSQSSSFPTNYHRACLAVQPSAMEVGGPGTVGWDSSNGRSTPRPPCPSTMR

SEQ ID NO: 74144 - protein, 278 aa, Homo sapiens
MEKYHVLEMIGEGSFGRVYKGRRKYSAQVVALKFIPKLGRSEKELRNLQREIEIMRGLRHPNIVHMLDSFETDKEVVVVTDYAEGELFQILEDDGKLPEDQVQAIAAQLVSALYYLHSHRILHRDMKPQNILLAKGGGIKLCDFGFARAMSTNTMVLTSIKGTPLYMSPELVEERPYDHTADLWSVGCILYELAVGTPPFYATSIFQLVSLILKDPVRWPSTISPCFKNFLQGLLTKDPRQRLSWPDLLYHPFIAGHVTIITEPAGPDLGTPFTSRLP

SEQ ID NO: 74145 - protein, 245 aa, Homo sapiens
MGKRRCVPPLEPKLAAGCCGVKKPKLSGSGTHSHGNQSTTVPGSSSGPLQNHQHVDSSSGRENVSDLTLGPGNSPITRMNPASGALSPLPRPNGTANTTKNLVVTAEMCCYCFDVLYCHLYGFPQPRLPRFTNDPYPLFVTWKTGRDKRLRGCIGTFSAMNLHSGLREYTLTSALKDSRFPPLTREELPKLFCSVSLLTNFEDASDYLDWEGSMGFELNSLMKKVSNAQPHIYLRLLRNKIIILG

SEQ ID NO: 74146 - protein, 527 aa, Homo sapiens
MDLTKMGMIQLQNPSHPTGLLCKANQMRLAGTLCDVVIMVDSQEFHAHRTVLACTSKMFEILFHRNSQHYTLDFLSPKTFQQILEYAYTATLQAKAEDLDDLLYAAEILEIEYLEEQCLKMLETIQASDDNDTEATMADGGAEEEEDRKARYLKNIFISKHSSEESGYASVAGQSLPGPMVDQSPSVSTSFGLSAMSPTKAAVDSLMTIGQSLLQGTLQPPAGPEEPTLAGGGRHPGVAEVKTEMMQVDEVPSQDSPGAAESSISGGMGDKVEERGKEGPGTPTRSSVITSARELHYGREESAEQVPPPAEAGQAPTGRPEHPAPPPEKHLGIYSVLPNHKADAVLSMPSSVTSGLHVQPALAVSMDFSTYGGLLPQGFIQRELFSKLGELAVGMKSESRTIGEQCSVCGVELPDNEAVEQHRKLHSGMKTYGCELCGKRFLDSLRLRMHLLAHSAGAKAFVCDQCGAQFSKEDALETHRQTHTDGVSLCRQAGVQCLDLGSLQPPPPGFKRFSCLSLPSSWDYYRH

SEQ ID NO: 74147 - protein, 36 aa, Homo sapiens
MEGDDDIEVFRLQAPVWEFKYGDLLGHLLLYLAPGR

SEQ ID NO: 74148 - protein, 72 aa, Homo sapiens
  MOD_RES (1)..(1): Any amino acid
XLSKPIDKRIYKGTQPTCHDFNHLTATAESVSLLVGFSAGQVQLIDPIKKETSKLFNEEAFEGRYATFSPFV

SEQ ID NO: 74149 - protein, 124 aa, Homo sapiens
MAQSKLDCRSPVGLDCCNCCLDLAHRSGLQRGSSGENNNPGSPTVSNFRQLQEKLVFENLNTDKLNSIMRQDSLEPVLRDPCYLINEGICNRNIDQTMLSILLFFHSASGASVVAIDNKIEQAM

SEQ ID NO: 74150 - protein, 88 aa, Homo sapiens
MLRKARRKLIYEKAKHYHKEYRQMYRTEIRMARMARKAGNFYVPAEPKLAFVIRIRGINGVSPKVRKVLQLLRLRQIFNGTFVKLNKA

SEQ ID NO: 74151 - protein, 28 aa, Homo sapiens
MAGRVPSLLVLLVFPSSCLAFRSPLSVF

SEQ ID NO: 74152 - protein, 377 aa, Homo sapiens
MEPWPLLLLFSLCSAGLVLGSEHETRLVAKLFKDYSSVVRPVEDHRQVVEVTVGLQLIQLINVDEVNQIVTTNVRLKQQWVDYNLKWNPDDYGGVKKIHIPSEKIWRPDLVLYNNADGDFAIVKFTKVLLQYTGHITWTPPAIFKSYCEIIVTHFPFDEQNCSMKLGTWTYDGSVVAINPESDQPDLSNFMESGEWVIKESRGWKHSVTYSCCPDTPYLDITYHFVMQRLPLYFIVNVIIPCLLFSFLTGLVFYLPTDSGEKMTLSISVLLSLTVFLLVIVELIPSTSSAVPLIGKYMLFTMVFVIASIIITVIVINTHHRSPSTHVMPNWVRKAAAEWKYVAMVMDHILLGVFMLVCIIGTLAVFAGRLIELNQQG

SEQ ID NO: 74153 - protein, 246 aa, Homo sapiens
MASVGRREGTAGGGAGPGEPRREEGRAGLSPSSPPGSHSMRYFYTAMSRPGRGEPRFITVGYVDDTLFVRFDSDATSPRKEPRAPWIEQEGPEYWDRETQISKTNTQTYRENLRTALRYYNQSEAGSHIIQRMYGCDVGPDGRLLRGYDQDAYDGKDYIALNEDLSSWTAADTAAQITQRKWEAARVAEQLRAYLEGLCVESLRRYLENGKETLQRADPPKTHVTHHPISDHEVTLRCWALGFYPA

SEQ ID NO: 74154 - protein, 926 aa, Homo sapiens
MWRCGGRQGLCVLRRLSGGHAHHRAWRWNSNRACERALQYKLGDKIHGFTVNQVTSVPELFLTAVKLTHDDTGARYLHLAREDTNNLFSVQFRTTPMDSTGVPHILEHTVLCGSQKYPCRDPFFKMLNRSLSTFMNAFTASDYTLYPFSTQNPKDFQNLLSVYLDATFFPCLRELDFWQEGWRLEHENPSDPQTPLVFKGVVFNEMKGAFTDNERIFSQHLQNRLLPDHTYSVVSGGDPLCIPELTWEQLKQFHATHYHPSNARFFTYGNFPLEQHLKQIHEEALSKFQKIEPSTVVPAQTPWDKPREFQITCGPDSFATDPSKQTTISVSFLLPDITDTFEAFTLSLLSSLLTSGPNSPFYKALIESGLGTDFSPDVGYNGYTREAYFSVGLQGIAEKDIETVRSLIDRTIDEVVEKGFEDDRIEALLHKIEIQMKHQSTSFGLMLTSYIASCWNHDGDPVELLKLGNQLAKFRQCLQENPKFLQEKVKQYFKNNQHKLTLSMRPDDKYHEKQAQVEATKLKQKVEALSPGDRQQIYEKGLELRSQQSKPQDASCLPALKVSDIEPTIPVTELDVVLTAGDIPVQYCAQPTNGMVYFRAFSSLNTLPEELRPYVPLFCSVLTKLGCGLLDYREQAQQIELKTGGMSASPHVLPDDSHMDTYEQGVLFSSLCLDRNLPDMMQLWSEIFNNPCFEEEEHFKVLVKMTAQELANGIPDSGHLYASIRAGRTLTPAGDLQETFSGMDQVRLMKRIAEMTDIKPILRKLPRIKKHLLNGDNMRCSVNATPQQMPQTEKAVEDFLRSIGRSKKERRPVRPHTVEKPVPSSSGGDAHVPHGSQVIRKLVMEPTFKPWQMKTHFLMPFPVNYVGECIRTVPYTDPDHARNSRKRRCLWWRRKTQPQWDFHPLLLQGPKYNRDAPVFWEGCRLG

SEQ ID NO: 74155 - protein, 100 aa, Homo sapiens
  MOD_RES (1)..(1): Any amino acid
XRPGRRAGTQGGSKADHRPPQADTLKERYQKIGDTKRATPIEVLCENFPEEMATYLRYVRRLDFFEKPDYDYLRKLFTDLFDRSGFVFDYEYDWAGKPLP

SEQ ID NO: 74156 - protein, 752 aa, Homo sapiens
MGSGARFPSGTLRVRWLLLLGLVGPVLGAARPGFQQTSHLSSYEIITPWRLTRERREAPRPYSKQVSYVIQAEGKEHIIHLERNKDLLPEDFVVYTYNKEGTLITDHPNIQNHCHYRGYVEGVHNSSIALSDCFGLRGLLHLENASYGIEPLQNSSHFEHIIYRMDDVYKEPLKCGVSNKDIEKETAKDEEEEPPSMTQLLRRRRAVLPQTRYVELFIVVDKERYDMMGRNQTAVREEMILLANYLDSMYIMLNIRIVLVGLEIWTNGNLINIVGGAGDVLGNFVQWREKFLITRRRHDSAQLVLKKGFGGTAGMAFVGTVCSRSHAGGINVFGQITVETFASIVAHELGHNLGMNHDDGRDCSCGAKSCIMNSGASGSRNFSSCSAEDFEKLTLNKGGNCLLNIPKPDEAYSAPSCGNKLVDAGEECDCGTPKECELDPCCEGSTCKLKSFAECAYGDCCKDCRFLPGGTLCRGKTSECDVPEYCNGSSQFCQPDVFIQNGYPCQNNKAYCYNGMCQYYDAQCQVIFGSKAKAAPKDCFIEVNSKGDRFGNCGFSGNEYKKCATGNALCGKLQCENVQEIPVFGIVPAIIQTPSRGTKCWGVDFQLGSDVPDPGMVNEGTKCGAGKICRNFQCVDASVLNYDCDVQKKCHGHGVCNSNKNCHCENGWAPPNCETKGYGGSVDSGPTYNEMNTALRDGLLVFFFLIVPLIVCAIFIFIKRDQLWRSYFRKKRSQTYDNCIFQVRWQKSSKPF

SEQ ID NO: 74157 - protein, 268 aa, Homo sapiens
MPCSSKRNFCRQTMPSFIHEDDKNGRLIEKASVNRKPQLPQHFVDAYLDEMDQGKNDPSSTFSKENLIFSVGELIIAGTETTTNVLRWAILFMALYPNIQGQVQKEIDLIMGPNGKPSWDDKCKMPYTEAVLHEVLRFCNIVPLGIFHATSEDAVVRGYSIPKGTTVITNLYSVHFDEKYWRDPEVFHPERFLDSSGYFAKKEALVPFSLGRRHCLGEHLARMEMFLFFTALLQRFHLHFPHELVPDLKPRLGMTLQPQPYLICAERR

SEQ ID NO: 74158 - protein, 159 aa, Homo sapiens
  MOD_RES (1)..(1): Any amino acid
XLPQTLQPPLQHTTPQAQAQSLSRPAQVSQPFRGLIPAGTQHSMIATTGKMSEMELKAFGSGIDIKPGTPPIAGRSTTPTSSPFRATSTSPNSQSSKMNSIVYQKQFQSAPATVRMTQPFPTQFAPQKRAVGRGLSHKTFGPRCKAESRGSSVHATVLL

SEQ ID NO: 74159 - protein, 246 aa, Homo sapiens
MFLGTGEPALDTGDDSLSAVTFDSDVETKAKRKAFHKPPPTSPKSPYLSKPRKVASWRSLRTAGSMPLGGRASLTPQKLWLGTAKPGSLTQALNSPLTWEHAWTGVPGGTPDCLTDTFRVKRPHLRRSASNVSFFLETESRCVAQAGLKFLDSSDPLTLASQNPGITGHVPGTPVYREKEDMYDEIIELKKSLHVQKSDVDLMRTKLRRLEEENSRKDRQIEQLLDPSRGTDFVRTLAEKRPDASW

SEQ ID NO: 74160 - protein, 25 aa, Homo sapiens
  MOD_RES (1)..(1): Any amino acid
XGMVCRIWRAILAQRAGSTPVTSGP

SEQ ID NO: 74161 - protein, 1351 aa, Homo sapiens
  MOD_RES (1)..(1): Any amino acid
XFVCPGTLKAIVDSPCIYEAEQKAGAWCKDPLQAADKIYFMPWTPYRTDTLIEYASLEDFQNSRQTTTYKLPNRVDGTGFVVYDGAVFFNKERTRNIVKFDLRTRIKSGEAIINYANYHDTSPYRWGGKTDIDLAVDENGLWVIYATEQNNGMIVISQLNPYTLRFEATWETVYDKRAASNAFMICGVLYVVRSVYQDNESETGKNSIDYIYNTRLNRGEYVDVPFPNQYQYIAAVDYNPRDNQLYVWNNNFILRYSLEFGPPDPAQVPTTAVTITSSAELFKTIISTTSTTSQKGPMSTTVAGSQEGSKGTKPPPAVSTTKIPPITNIFPLPERFCEALDSKGIKWPQTQRGMMVERPCPKGTRGTASYLCMISTGTWNPKGPDLSNCTSHWVNQLAQKIRSGENAASLANELAKHTKGPVFAGDVSSSVRLMEQLVDILDAQLQELKPSEKDSAGRSYNKLQKREKTCRAYLKAIVDTVDNLLRPEALESWKHMNSSEQAHTATMLLDTLEEGAFVLADNLLEPTRVSMPTENIVLEVAVLSTEGQIQDFKFPLGIKGAGSSIQLSANTVKQNSRNGLAKLVFIIYRSLGQFLSTENATIKLGADFIGRNSTIAVNSHVISVSINKESSRVYLTDPVLFTLPHIDPDNYFNANCSFWNYSERTMMGYWSTQGCKLVDTNKTRTTCACSHLTNFAILMAHREIAYKDGVHELLLTVITWVGIVISLVCLAICIFTFCFFRGLQSDRNTIHKNLCINLFIAEFIFLIGIDKTKYAIACPIFAGLLHFFFLAAFAWMCLEGVQLYLMLVEVFESEYSRKKYYYVAGYLFPATVVGVSAAIDYKSYGTEKACWLHVDNYFIWSFIGPVTFIILLNIIFLVITLCKMVKHSNTLKPDSSRLENINNYRVCDGYYNTDLPGYEDNKPFIKSWVLGAFALLCLLGLTWSFGLLFINEETIVMAYLFTIFNAFQGVFIFIFHCALQKKVRKEYGKCFRHSYCCGGLPTESPHSSVKASTTRTSARYSSGTQSRIRRMWNDTVRKQSESSFISGDINSTSTLNQGMTGNYLLTNPLLRPHGTNNPYNTLLAETVVCNAPSAPVFNSPGHSLNNARDTSAMDTLPLNGNFNNSYSLHKGDYNDSVQVVDCGLSLNDTAFEKMIISELVHNNLRGSSKTHNLELTLPVKPVIGGSSSEDDAIVADASSLMHSDNPGLELHHKELEAPLIPQRTHSLLYQPQKKVKSEGTDSYVSQLTAEAEDHLQSPNRDSLYTSMPNLRDSPYPESSPDMEEDLSPSRRSENEDIYYKSMPNLGAGHQLQMCYQISRGNSDGYIIPINKEGCIPEGDVREGQMQLVTSL

SEQ ID NO: 74162 - protein, 225 aa, Homo sapiens
MGPVPTSFGKRRGGPQTLPASPGGMIKRFLEDTTDDGELSKFVKDFSGNASCHPPEAKTWASRPQVPEPRPQAPDLYDDDLEFRPPSRPQSSDNQQYFCAPAPLSPSARPRSPWGKLDPYDSSEDDKEYVGFATLPNQVHRKSVKKGFDFTLMVAGESGLGKSTLVNSLFLTDLYRDRKLLGAEERIMQTVEITKHAVDIEEKGVRLRLTIVDTPGFGDAVNNTE

SEQ ID NO: 74163 - protein, 27 aa, Homo sapiens
  MOD_RES (1)..(1): Any amino acid
XARAAVPLPPRARPGRPAKNKRRKLAP

SEQ ID NO: 74164 - protein, 1060 aa, Homo sapiens
  MOD_RES (1)..(1): Any amino acid
XFFDLQMQLLDKFPIEGGQKDPKQRIIPFLPGKILFRRSHIRDVAVKRLKPIDEYCRALVRLPPHISQCDEVFRFFEARPEDVNPPKEDYGSSKRKSVWLSSWAESPKKDVTGADATAEPMILEQYVVVSNYKKQENSELSLQAGEVVDVIEKNESGWWFVSTSEEQGWVPATYLEAQNGTRDDSDINTSKTGEEEKYVTVQPYTSQSKDEIGFEKGVTVEVIRKNLEGWWYIRYLGKEGWAPASYLKKAKDDLPTRKKNLAGPVEIIGNIMEISNLLNKKASGDKETPPAEGEGHEAPIAKKEISLPILCNASNGSAVGVPDRTVSRLAQGSPAVARIAPQRAQISSPNLRTRPPPRRESSLGFQLPKPPEPPSVEVEYYTIAEFQSCISDGISFRGGQKAEVIDKNSGGWWYVQIGEKEGWAPASYIDKRKKPNLSRRTSTLTRPKVPPPAPPSKPKEAEEGPTGASESQDSPRKLKYEEPEYDIPAFGFDSEPELSEEPVEDRASGERRPAQPHRPSPASSLQRARFKVGESSEDVALEEETIYENEGFRPYAEDTLSARGSSGDSDSPGSSSLSLTRKNSPKSGSPKSSSLLKLKAEKNAQAEMGKNHSSASFSSSITINTTCCSSSSSSSSSLSKTSGDLKPRSASDAGIRGTPKVRAKKDADANAGLTSCPRAKPSVRPKPFLNRAESQSQEKMDISTLRRQLRPTGQLRGGLKGSKSEDSELPPQTASEAPSEGSRRSSSDLITLPATTPPCPTKKEWEGPATSYMTCSAYQKVQDSEISFPAGVEVQVLEKQESGWWYVRFGELEGWAPSHYLVLDENEQPDPSGKELDTVPAKGRQNEGKSDSLEKIERRVQALNTVNQSKKATPPIPSKPPGGFGKTSGTPAVKMRNGVRQVAVRPQSVFVSPPPKDNNLSCALRRNESLTATDGLRGVRRNSSFSTARSAAAEAKGRLAERAASQGSDSPLLPAQRNSIPVSPVRPKPIEKSQFIHNNLKDVYVSIADYEGDEETAGFQEGVSMEVLERNPNGWWYCQILDGVKPFKGWVPSNYLEKKN

SEQ ID NO: 74165 - protein, 110 aa, Homo sapiens
MAARRRRSTGGGRARALNESKRVNNGNTAPEDSSPAKKTRRCQRQESKKMPVAGGKANKDRTEDKQDESVKALLLKGKAPVDPECTAKVGKAHVYCEGNDVYDVMLNQIP

SEQ ID NO: 74166 - protein, 61 aa, Homo sapiens
MDALEDYVWPRATSELILLPVTGLECVGDRLLAGWSAVARSRLPATSASQVQVILLPQPPE

SEQ ID NO: 74167 - protein, 47 aa, Homo sapiens
MATKCGNCGPGYSTPLEAMKGHPPAAHAQPEGRAASLRMEHLQQLLR

SEQ ID NO: 74168 - protein, 162 aa, Homo sapiens
MIFLYQVVHFILFTSVSGECVTQLLKDTCFEGGDITTVFTPSAKYCQVVCTYHPRCLLFTFTAESPSEDPTRWFTCVLKDSVTETLPRVNRTAAISGYSFKQCSHQISACNKDIYVDLDMKGINYNSSVAKSAQECQERCTDDVHCHFFTYATRQFPSLEHR

SEQ ID NO: 74169 - protein, 460 aa, Homo sapiens
MCASVKYNIRGPALIPRMKTKHRIYYITLFSIVLLGLIATGMFQFWPHSIESSNDWNVEKRSIRDVPVVRLPADSPIPERGDLSCRMHTCFDVYRCGFNPKNKIKVYIYALKKYVDDFGVSVSNTISREYNELLMAISDSDYYTDDINRACLFVPSIDVLNQNTLRIKETAQAMAQLSRWDRGTNHLLFNMLPGGPPDYNTALDVPRDRALLAGGGFSTWTYRQGYDVSIPVYSPLSAEVDLPEKGPGPRQYFLLSSQVGLHPEYREDLEALQVKHGESVLVLDKCTNLSEGVLSVRKRCHKHQVFDYPQVLQEATFCVVLRGARLGQAVLSDVLQAGCVPVVIADSYILPFSEVLDWKRASVVVPEEKMSDVYSILQSIPQRQIEEMQRQARWFWEAYFQSIKAIALATLQIINDRIYPYAAISYEEWNDPPAVQAVRCPVGWLTVLSANLCTCRSACP

SEQ ID NO: 74170 - protein, 114 aa, Homo sapiens
MIQRINKCCEDIKENKVTICRIHETINATDEEIDHYCKHSEEIKDNCRNWKPTCDVFRKHEDYMQDQFTVYQGTVEKDKEMYHDYICQYKEVLKQYQLKYSETPFSREYYEKKR

SEQ ID NO: 74171 - protein, 54 aa, Homo sapiens
MQRRSRGINTGLILLLSQIFHVGINNIPPVTLATLALNIWFFLNPQKPLYSSCL

SEQ ID NO: 74172 - protein, 139 aa, Homo sapiens
  MOD_RES (1)..(1): Any amino acid
XAITALRQTPQKVRLVVYRDEAHYRDEENLEIFPVDLQKKAGRGLGLSIVGKRNGSGVFISDIVKGGAADLDGRLIQGDQILSVNGEDMRNASQETVATILKCAQGLVQLEIGRLRAGSWTSARTTSQNSQVVDGFSSD

SEQ ID NO: 74173 - protein, 104 aa, Homo sapiens
  MOD_RES (1)..(1): Any amino acid
XLRGHALLHGCHGMDSRPAMAIFELLDYIVNEPPPKLPNGVFTPDFQEFVNKCLIKNPAERADLKMLTNHTFIKRSEVEEVDFAGWLCKTLRLNQPGTPTRTAV

SEQ ID NO: 74174 - protein, 63 aa, Homo sapiens
MNRPAPVEISYENMRFLITHNPTNATLNKFTEELKKYGVTTLVRVCDATYDKAPVEKEGIHVL

SEQ ID NO: 74175 - protein, 151 aa, Homo sapiens
MPSLSPTMEEGNIVKWLKKEGEAVSAGDALCEIETDKAVVTLDASDDGILAKIVVEEGSKNIRLGSLIGLIVEEGEDWKHVEIPKDVGPPPPVSKPSEPRPSPEPQISIPVKKEHIPGTLRFRLSPAARNILEKHSLDASQGTATGPRGIF

SEQ ID NO: 74176 - protein, 153 aa, Homo sapiens
MLLLWVSVVAALALAVLAPGAGEQRRRAAKAPNVVLVVSDSFDGRLTFHPGSQVVKLPFINFMKTRGTSFLNAYTNSPICCPSRAAMWSGLFTHLTESWNNFKGLDPNYTTWMDVMERHGYRTQKFGKLDYTSGHHSIRHSERGSTNQRSEKV

SEQ ID NO: 74177 - protein, 21 aa, Homo sapiens
MTVTKNQNIILQSISRSEEFD

SEQ ID NO: 74178 - protein, 50 aa, Homo sapiens
VEAGKGLEMRKLVLSGFLASEEIYINQLEALLLPMKPLKATATTSQPVLT

SEQ ID NO: 74179 - protein, 841 aa, Homo sapiens
MPHTELGTKPLQAPGFREKPLFTRDASQLKGTFLSTTLKKSNMGFGFTIIGGDEPDEFLQVKSVIPDGPAAQDGKMETGDVIVYINEVCVLGHTHADVVKLFQSVPIGQSVNLVLCRGYPLPFDPEDPANSMVPPLAIMERPPPVMVNGRHNYETYLEYISRTSQSVPDITDRPPHSLHSMPTDGQLDGTYPPPVHDDNVSMASSGATQAELMTLTIVKGAQGFGFTIADSPTGQRVKQILDIQGCPGLCEGDLIVEINQQNVQNLSHTEVVDILKDCPIGSETSLIIHRGGFFSPWKTPKPIMDRWENQGSPQTSLSAPAIPQNLPFPPALHRSSFPDSTEAFDPRKPDPYELYEKSRAIYESPDYKELDVHLRRMESGFGFRILGGDEPGQPILIGAVIAMGSADRDGRLHPGDELVYVDGIPVAGKTHRYVIDLMHHAARNGQVNLTVRRKVLCGGEPCPENGRSPGSVSTHHSSPRSDYATYTNSNHAAPSSNASPPEGFASHSLQTSDVVIHRKENEGFGFVIISSLNRPESGSTITVPHKIGRIIDGSPADRCAKLKVGDRILAVNGQSIINMPHADIVKLIKDAGLSVTLRIIPQEELNSPTSAPSSEKQSPMAQQSPLAQQSPLAQPSPATPNSPIAQPAPPQPLQLQGHENSYRSEVKARQDVKPDIRQPPFTDYRQPPLDYRQPPGGDYQQPPPLDYRQPPLLDYRQHSPDTRQYPLSDYRQPQDFDYFTVDMEKGAKGFGFSIRGGREYKMDLYVLRLAEDGPAIRNGRMRVGDQIIEINGESTRDMTHARAIELIKSGGRRVRLLLKRGTGQVPEYEHILPARRGGSHL

SEQ ID NO: 74180 - protein, 166 aa, Homo sapiens
  MOD_RES (1)..(1): Any amino acid
XLAMKEVNLHNPAFGKDKKDRDSSVRNIVSELTIIKEQLYHPNIVRYYKTFLENDRLYIVMELIEGAPLGEHFSSLKEKHHHFTEERLWKIFIQLCLALRYLHKEKRIVHRDLTPNNIMLGDKDKVTVTDFGLAKQKQENSKLTSVVGTILYSCGFMRRCKETVAG

SEQ ID NO: 74181 - protein, 1484 aa, Homo sapiens
MRTTKVYKLVIHKKGFGGSDDELVVNPKVFPHIKLGDIVEIAHPNDEYSPLLLQVKSLKEDLQKETISVDQTVTQVFRLRPYQDVYVNVVDPKVSTCAYITQKVEFAGIRAQAGELWVKNEKVMCGYISEDTRVVFRSTSAMVYIFIQMSCEMWDFDIYGDLYFEKAVNGFLADLFTKWKEKNCSHEVTVVLFSRTFYDAKSVDEFPEINRASIRQDHKGRFYEDFYKVVVQNERREEWTSLLVTIKKLFIQYPVLVRLEQAEGFPQGDNSTSAQGNYLEAINLSFNVFDKHYINRNFDRTGQMSVVITPGVGVFEVDRLLMILTKQRMIDNGIGVDLVCMGEQPLHAVPLFKLHNRSAPRDSRLGDDYNIPHWINHSFYTSKSQLFCNSFTPRIKLAGKKPASEKAKNGRDTSLGSPKESENALPIQVDYDAYDAQVFRLPGPSRAQCLTTCRSVRERESHSRKSASSCDVSSSPSLPSRTLPTEEVRSQASDDSSLGKSANILMIPHPHLHQYEVSSSLGYTSTRDVLENMMEPPQRDSSAPGRFHVGSAESMLHVRPGGYTPQRALINPFAPSRMPMKLTSNRRRWMHTFPVGPSGEAIQIHHQTRQNMAELQGSGQRDPTHSSAELLELAYHEAAGRHSNSRQPGDGMSFLNFSGTEELSVGLLSNSGAGMNPRTQNKDSLEDSVSTSPDPILTLSAPPVVPGFCCTVGVDWKSLTTPACLPLTTDYFPDRQGLQNDYTEGCYDLLPEADIDRRDEDGVQMTAQQVFEEFICQRLMQGYQIIVQPKTQKPNPAVPPPLSSSPLYSRGLVSRNRPEEEDQYWLSMGRTFHKVTLKDKMITVTRYLPKYPYESAQIHYTYSLCPSHSDSEFVSCWVEFSHERLEEYKWNYLDQYICSAGSEDFSLIESLKFWRTRFLLLPACVTATKRITEGEAHCDIYGDRPRADEDEWQLLDGFVRFVEGLNRIRRRHRSDRMMRKGTAMKGLQMTGPISTHSLESTAPPVGKKGTSALSALLEMEASQKCLGEQQAAVHGGKSSAQSAESSSVAMTPTYMDSPRKDGAFFMEFVRSPRTASSAFYPQVSVDQTATPMLDGTSLGICTGQSMDRGNSQTFGNSQNIGEQGYSSTNSSDSSSQQLVASSLTSSSTLTEILEAMKHPSTGVQLLSEQKGLSPYCFISAEVVHWLVNHVEGIQTQAMAIDIMQKMLEEQLITHASGEAWRTFIYGFYFYKIVTDKEPDRVAMQQPATTWHTAGVDDFASFQRKWFEVAFVAEELVHSEIPAFLLPWLPSRPASYASRHSSFSRSFGGRSQAAALLAATVPEQRTVTLDVDVNNRTDRLEWCSCYYHGNFSLNAAFEIKLHWMAVTAAVLFEMVQGWHRKATSCGFLLVPVLEGPFALPSYLYGDPLRAQLFIPLNISCLLKEGSEHLFDSFEPETYWDRMHLFQEAIAHRFGFVQDKYSASAFNFPAENKPQYIHVTGTVFLQ

SEQ ID NO: 74182 - protein, 151 aa, Homo sapiens; identical to SEQ ID NO: 56456

SEQ ID NO: 74183 - protein, 581 aa, Homo sapiens
NIEIILTETETLRFFDLPTVMVSVESEEAEKVTQRNKNYEVLCRNRLGNDLYVERMMQTFNGAPKNKDVQCDKIIMEDKGIMSTAWDLYDSYNAMELVSLSVKQSVVESSSKANVLPKDQDQRLPGSTTEKNSETSSLMDIENVILAKIHEDEEDHSDAILKSDKFHQDLFFMERVLMENIFQPKLAAYRQLPVLKEPEPEEPEDVLESAKHEEVEEESKKEEEEEIHAEESTIPANLERLWSFSCDLTKGLNVSSLAWNKTNPDLLAVGYGHFGFKEQKRGLACCWSIKNPMWPERIYQSPYGVTAVDFSIGAPNLLAVGYHNGTIAIYNVRSNSNVPVLDSSESPQKHLGPVWQLQWIEQDRGTTGDGKREILVSISADGRISKWVIRKGLDCYDLMRLKRTTAASNKKGGEKEKKDEALISRQAPGMCFAFHPKGPVYKVTWNPFCHDVFLSCSADWGVIIWQQENVKPSLSFYPATSVVYDVAWSPKSSYIFAAANENRVEIWDLHISTLDPLIVNTANPGIKFTTILFAKQTDCLLVGDSDGQVSVYELRNMPTVLETGRGDIMDTLLGSKSNQSA

SEQ ID NO: 74184 - protein, 54 aa, Homo sapiens
MSPSVRPGAGWAPVGRPGRPIQVLIHSYTALAADLRRCVPGTLVQFRPHPACRP

SEQ ID NO: 74185 - protein, 91 aa, Homo sapiens
MDEDEFELQPQEPNSFFDGIGADATHMDGDQIVVEIQEAVFVSNIVDSDITVHNFVPDDPDSVVIQDVVEDVVIEEDVQCSDILEEADVSE

SEQ ID NO: 74186 - protein, 188 aa, Homo sapiens
  MOD_RES (1)..(1): Any amino acid
XVEMSYPGEQMILACLFGAEPCNYRNFTSIFYPHYGNCYIFNWGMTEKALPSANPGTEFGLKLILDIGQEDYVPFLASTAGVRLMLHEQRSYPFIRDEGIYAMSGTETSIGVLVDKLQRMGEPYSPCTVNGSEVPVQNFYSDYNTTYSIQVGRWCTPHAPGPLSGFMGPRPQYSGRAGPSKSGSAGPL

SEQ ID NO: 74187 - protein, 191 aa, Homo sapiens
MINQHLIRTRSTASRDERNTFSTDPVNFPNKAEGLEKKQIHGEICTDLFQRSLSPSSSAESSVKGDFYCNEKYSSGDDCTHQPSEETTSNMGEIKPSLGDTSSDELVQLHTGSKEVLDDNANPAHGNGTVQIPCPSSDQLMAGNLNKKHEGGAKNIEVKDLGCLRRDFHSDTSACLKESTEEGSSKEDYYG

SEQ ID NO: 74188 - protein, 290 aa, Homo sapiens
MVTSSFPISVAVFALITLQVGTQDSFIAAVYEHAVILPNKTETPVSQEDALNLMNENIDILETAIKQAAEQGARIIVTPEDALYGWKFTRETVFPYLEDIPDPQVNWIPCQDPHRFGHTPVQARLSCLAKDNSIYVLANLGDKKPCNSRDSTCPPNGYFQYNTNVVYNTEGKLVARYHKYHLYSEPQFNVPEKPELVTFNTAFGRFGIFTCFDIFFYDPGVTLVKDFHVDTILFPTAWMNVLPLLTAIEFHSAWAMGMGVNLLVANTHHVSLNMTVVFMHQMVPKCIIMT

SEQ ID NO: 74189 - protein, 88 aa, Homo sapiens
KRQEPEPEQPPRPEPHELGPLNGDTAITVQLCASEEAERHQKDITRILQQHEEEKKKWAQQSSGPHMNRRKKRLPTLSGRPVLPSRRP

SEQ ID NO: 74190 - protein, 16 aa, Homo sapiens
  MOD_RES (1)..(1): Any amino acid
XVTKLIPWVQKILAAN

SEQ ID NO: 74191 - protein, 138 aa, Homo sapiens
STPARRRLMRDFKRLQEDPPVGVSGAPSENNIMQWNAVIFGPEGTPFEDGTFKLVIEFSEEYPNKPPTVRFLSKMFHPNVYADGSICLDILQNRWSPTYDVSSILTSIQCLALLPRLECNGTILAHRNLCLPGSISAG

SEQ ID NO: 74192 - protein, 163 aa, Homo sapiens
MSLSFCGNNISSYNINDGVLQNSCFVDALNLVPHVFLLFITFPILFIGWGSQSSKVQIHHNTWLHFPGHNLRWILTFALLFVHVCEIAEGIVSDSRRESRHLHLFMPAVMGFVATTTSIVYYHNIETSNFPKLLLGKYDHFCCFSLKRYLFFPPKGYFSFSSG

SEQ ID NO: 74193 - protein, 156 aa, Homo sapiens
MGGRVFLGCARWCPQNSSCVNATACRCNPGFSSFSEIITTPTETCDDINECATPSKVSCGKFSDCWNTEGSYDCVCSPGYEPVSGAKTFKNESENTCQDVDECSSGQHQCDSSTVCFNTVGSYSCRCRPGWKPRHGIPNNQKDTVCEDMTFSTWTP

SEQ ID NO: 74194 - protein, 262 aa, Homo sapiens
AFEAQNPDPKAPVVLLSEPACAHALDTGKTQDEGARAGRLRARRRYLVERARDARVVGLLAGTLGVAQHREALAHLRNLTQAAGKRSYVLALGRPTPAKLANFPEVDVFVLLACPLGALAPQLSGSFFQPILAPCELEAACNPAWPPPGLAPHLTHYADLLPGSPFHVALPPPESELWETPDVSLITGDLRPPPAWKSSNDHGSLALTPRPQLELAESSPAASFLSSRSWQGLEPRLGQTPVTEAVSGRRGIAIAYEDEGSG

SEQ ID NO: 74195 - protein, 347 aa, Homo sapiens
  MOD_RES (1)..(1): Any amino acid
XADLGATKDRIISEINRLQQEATEHATESEERFRGLEEGQAQAGQCPSLEGRLGRLEGVCERLDTVAGGLQGLREGLSRHVAGLWAGLRETNTTSQMQAALLEKLVGGQAGLGRRLGALNSSLQLLEDRLHQLSLKDLTGEGTKGPAGEAGPPGPPGLQGPPGPAGPPGSPGKDGQEGPIGPPGPQGEQGVEGAPAAPVPQVAFSAALSLPRSEPGTVPFDRVLLNDGGYYDPETGVFTAPLAGRYLLSAVLTGHRHEKVEAVLSRSNQGVARVDSGGYEPEGLENKPVAESQPSPGTLGVFSLILPLQAGDTVCVDLVMGQLAHSEEPLTIFSGALLYGDPELEHA

SEQ ID NO: 74196 - protein, 103 aa, Homo sapiens
MLRNLLFHTCCPGWSAMARSQLTATSASQVQAILLPQPPKYLGLQALRQIGQRTISTASRRHFKNKVPEKQKLFQEDDEIPLYLKGGVADALLYRATMILTVG

SEQ ID NO: 74197 - protein, 317 aa, Homo sapiens
MAFVTRQFMRSVSSSSTASASAKKIIVKHVTVIGGGLMGAGIAQVAAATGHTVVLVDQTEDILAKSKKGIEESLRKVAKKKFAENLKAGDEFVEKTLSTIATSTDAASVVHSTDLVVEAIVENLKVKNELFKRLDKFAAEHTIFASNTSSLQITSIANATTRQDRFAGLHFFNPVPVMKLVEVIKTPMTSQKTFESLVDFSKALGKHPVSCKDTPGFIVNRLLVPYLMEAIRLYERVSDGDASKEDIDTAMKLGAGYPMGPFELLDYVGLDTTKFIVDGWHEMDAENPLHQPSPSLNKLVAENKFGKKTGEGFYKYK

SEQ ID NO: 74198 - protein, 67 aa, Homo sapiens
MRCSQCHRWPPSGHSQDSPAGWRWLRKHPQLHPRGVQEGEYVRLLQGHVLPPRQHCRLQLRGVWGLQ

SEQ ID NO: 74199 - protein, 41 aa, Homo sapiens
MWTPELAILRGFPTEAERQQWKQEGVVGSALIFKRITQCTH

SEQ ID NO: 74200 - protein, 98 aa, Homo sapiens
MTSFQEVPLQTSNFAHVIFQNVAKSYLPNAHLECHYTLTPYIHPHPKDWVGIFKVGWSTARDYYTFLWSPMPEHYVEGSTVNCVLAFQGYYLPNDDGE

SEQ ID NO: 74201 - protein, 146 aa, Homo sapiens
MEAVLFVNAEAAAPRQSGRPRDLNGNNITRITKTDFAGLRHLRVLQLMENKISTIERGAFQDLKELERLRLNRNHLQLFPELLFLGTAKLYRLDLSENQIQAIPRKAFRGAVDIKNLQLDYNQISCIEDGAFRALRDLEVLTLNNN

SEQ ID NO: 74202 - protein, 248 aa, Homo sapiens
MLRREARLRREYLYRKAREEAQRSAQERKERLRRALEENRLIPTELRREALALQGSLEFDDAGGEGVTSHVDDEYRWAGVEDPKVMITTSRDPSSRLKMFAKELKLVFPGAQRMNRGRHEVGALVRACKANGVTDLLVVHEHRGTPVGLIVSHLPFGPTAYFTLCNVVMRHDIPDLGTMSEAKPHLITHGFSSRLGKRVSDILRYLFPVPKDDSHRVITFANQDDYISFRHHVYKKTDHRNVELTECT

SEQ ID NO: 74203 - protein, 895 aa, Homo sapiens
MGVQGFQEFLEKRCPGAVVPVDLLKLARTVSRQQQQQHLHRQLPPTAALAPGAPRAARGSVPLQPPLPPAALGAYSGGAGPTRHHHPAHHFHHHGQAQPGLHPPLPPPPPPQLPGARVLVDAGSALPRLYGGYQTDWVCGGQWNAMLGYLSALCQACAYPGGDGLELVVMFPGGLGKDRLAEWGRRCQAERQTAQLIVGHVGNKGTPPPRAWFLPPACLSHCVRLALIRFRVKVFQSLEDHHLEVVAFFRENGFHGLLAHDSEYALYNIPSYYSSHALKLSWNGKNLTTNQFLMQEVAKQLGLKRMNFPIFAALLGNHILPDEDLAAFHWSLLGPEHPLASLKVRAHQLVLPPCDVVIKAVSEYVSSIKDPSNLDVVGKDVFKQSQSRTEDKIERFKKAVEYYSVTTKLSSLPVGPSFLGFRNNRLGNPPLPRNQVGTISAGKPMFSHQVPQKVKYPPPFPVGPNSSLLFSSHALGESHAFSEDPMLQNSPFANWAVSYDSSASQFPNYLPSKASPPLGPDSSHSSSSDGDEPNGASSDHITEAFHHQPEWGNPNRDRGSWAQPVDTGVSEASLGDGEPHIPSLLSMSTRNHMDITIPPLPPVAPEVLRVAEHRHRRGLMYPYIYHVLTKGEIKIPVCIEDECNMELPPAALLFRSARQYVYGVLFSLAETQRKMERLAMRRRLPVEVPSVILKEWSAYKGKSPQTPELVSALTFREWTCPNLKKLWLGKAVEDKNRRMRAFLACMKSDTPSMLNPANVPTHLLLMCCVLRYMVQWPGGRILHRHELDTFLAQAVSTQLYEPDRLQELKVSIQSHPKEENWRLLGWLWASGLAADPPGAEDPSACKWFLSVGQERGMEKNRLVEDPRDTKKEISKALQMEFLNPWSFIKVGLAPR

SEQ ID NO: 74204 - protein, 59 aa, Homo sapiens
GHMEGEVWGLAAHPLLPICATVSDDKTLRIWELSAQHRMLAVRKLKKGVENMVHGAPSP

SEQ ID NO: 74205 - protein, 483 aa, Homo sapiens
MARGPCNAPRWASLMVLVAIGTAVTAAVNPGVVVRISQKGLDYASQQGTAALQKELKRIKIPDYSDSFKIKHLGKGHYSFYSMDIREFQLPSSQISMVPNVGLKFSISNANIKISGKWKAQKRFLKMSGNFDLSIEGMSISADLKLGSNPTSGKPTITCSSCSSHINSVHVHISKSKVGWLIQLFHKKIESALRNKMNSQVCEKVTNSVSSELQPYFQTLPVMTKIDSVAGINYGLVAPPATTAETLDVQMKGEFYSENHHNPPPFAPPVMEFPAAHDRMVYLGLSDYFFNTAGLVYQEAGVLKMTLRDDMIPKESKFRLTTKFFGTFLPEVAKKFPNMKIQIHVSASTPPHLSVQPTGLTFYPAVDVQAFAVLPNSSLASLFLIGMHTTGSMEVSAESNRLVGELKLDRLLLELKHSNIGPFPVELLQDIMNYIVPILVLPRVNEKLQKGFPLPTPARVQLYNVVLQPHQNFLLFGADVVYK

SEQ ID NO: 74206 - protein, 143 aa, Homo sapiens
MWQLWASLCCLLVLANARSRPSFHPLSDELVNYVNKRNTTWQAGHNFYNVDMSYLKRLCGTFLGGPKPPQRVMFTEDLKLPASFDAREQWPQCPTIKEIRDQGSCGSCWAFGAVEAISDRICIHTNAHVSVEVSAEDLLTCCG

SEQ ID NO: 74207 - protein, 26 aa, Homo sapiens
MADRDSGSEQGGAALGSGGSLGHPGS

SEQ ID NO: 74208 - protein, 44 aa, Homo sapiens
MWMAWCVAALSVVAVCGTSHETNTVLRVTKDVLSNGFSPISWTI

SEQ ID NO: 74209 - protein, 176 aa, Homo sapiens
MGLPVSWAPPALWVLGCCALLLSLWALCTACRRPEDAVAPRKRARRQRARLQGSATAAEAQVGHQTARAAPGPAQQQGPAACQHGSPAPTLAGGVQGHHRTAGSPLCLPTPGAAPGSAGSCSHRRVRWPRGHLFQRGAGGPSRGQPGGQPCGGRVCPRPEAQRDPSQSPRATAGED

SEQ ID NO: 74210 - protein, 105 aa, Homo sapiens
MKHYEVEILDAKTREKLCFLDKVEPHATIAEIKNLFTKTHPQWYPARQSLRLDPKAARGHHGHTVLPGPGGPDQLGDGLPNRVRGAPFHLPALLLPSALHLWPQI

SEQ ID NO: 74211 - protein, 64 aa, Homo sapiens
MFYALAIVCDDFFVPSLEKICERLHLSEDVAGATFMAAGSSTPELFASVIGVFITHGDVGVGTI

SEQ ID NO: 74212 - protein, 173 aa, Homo sapiens
MGSSRLAALLLPLLLIVIDLSDSAGIGFRHLPHWNTRCPLASHTDDSFTGLQRGLFHLLVQKSKKSSTFKFYRRHKMPAPAQRKLLPRRHLSEKSHHISIPSPDISHKGLRSKRTQPSDPETWESLPRLDSQRHGGPEFSFDLLPEARAIRVTISSGPEVSVRLCHQWALECE

SEQ ID NO: 74213 - protein, 107 aa, Homo sapiens
LRWQLLGALDGEPRPGPPSPRPGPARAGEGRRGLPGGRRDRAWALAAALRPRRETHRSGAEGNAGSQERDPNQSLRPQVQEGSARPPSAVACEDCSCRDEKVAPLAP

SEQ ID NO: 74214 - protein, 58 aa, Homo sapiens
MYQPSRGAARRLGPCLRAYQARPQGPDMVHSFTDPLPFPGLELFCTPSFGGFTADPPP

SEQ ID NO: 74215 - protein, 127 aa, Homo sapiens
MVNSCCGSVCSDQGCDQGLCQETCCRPSCCQTTCCCPSCVVSSCCRPSCSQTTCCQTTCCRPSCCHPVCCQTTCRPSCGVSSCCRPLCCQTTCRPSCGVSSCCRPLCCQTTCCRATCCRPSCCGSSC

SEQ ID NO: 74216 - protein, 179 aa, Homo sapiens
MDNCLAAAALNGVDRRSLQRSARLALEVLERAKRRAVDWHALERPKGCMGVLAREAPHLEKQPAAGPQRVLPGEREERPPTLSASFRTMAEFMDYTSSQCGKYYSSVPEEGGATHVYRYHRGESKLHMCLDIGNGQRKDRKKTSLGPGGSYQISEHAPEASQPVSTELLTHWVSPPLQL

SEQ ID NO: 74217 - protein, 228 aa, Homo sapiens
MDLGIPDLLDAWLEPPEDIFSTGSVLELGLHCPPPEVPGLQESEPEDFLKLFIDPNEVYCSEASPGSDSGISEDPCHPDSPPAPRATSSPMLYEVVYEAGALERMQGETGPNVGLISIQLDQWSPAFMVPDSCMVSELPFDAHAHILPRAGTVAPVPCTTLLPCQTLFLTDEEKRLLGQEGVSLPSHLPLTKAEERVLKKVRRKIRNKQSAQDSRRRKKEYIDGLESR

SEQ ID NO: 74218 - protein, 138 aa, Homo sapiens
MLGSTCHTTTLPALVRTPTLMMQPSLDIKPFMSFPVDSSSAVGLFPNFNTKRRGLFETNKFCQMDPVQKAVINHTFGVSIPPKKKQVISCNVCQLRFNSDSQAEAHYKGSKHAKKVKALDATKNKPKMVPSKDSAKAN

SEQ ID NO: 74219 - protein, 573 aa, Homo sapiens
MGKRQHQKDKMYITCAEYTHFYGGKKPDLPQTNFRRLPFDHCSLSLQPFVYPVCTPDGIVFDLLNIVPWLKKYGTNPSNGEKLDGRSLIKLNFSKNSEGKYHCPVLFTVFTNNTHIVAVRTTGNVYAYEAVEQLNIKAKNFRDLLTDEPFSRQDIITLQDPTNLDKFNVSNFYHVKNNMKIIDPDEEKAKQDPSYYLKNTNAETRETLQELYKEFKGDEILAATMKAPEKKKVDKLNAAHYSTGKVSASFTSTAMVPETTHEAAAIDEDVLRYQFVKKKGYVRLHTNKGDLNLELHCDLTPKTCENFIRLCKKHYYDGTIFHRSIRNFVIQGGDPTGTGTGGESYWGKPFKDEFRPNLSHTGRGILSMANSGPNSNRSQFFITFRSCAYLDKKHTIFGRVVGGFDVLTAMENVESDPKTDRPKEEIRIDATTVFVDPYEEADAQIAQERKTQLKVAPETKVKSSQPQAGSQGPQTFRQGVGKYINPAATEQQRKSPQPVPLSPCPRRSPVGVLGTSAPGSSSNLQAVPLPFLFSSITDAEAAGLSPLSPWMLGGASSASLPHPIHCHRLPDDH

SEQ ID NO: 74220 - protein, 655 aa, Homo sapiens
MQQRAGSKTAGPPCQWSRMASEGTNIPSPVVRQIDKQFLICSICLERYKNPKVLPCLHTFCERCLQNYIPAHSLTLSCPVCRQTSILPEKGVAALQNNFFITNLMDVLQRTPGSNAEESSILETVTAVAAGKPLSCPNHDGNVLQSQLDTLLQGQESIKSCSNFTAQALNHGTETEVLLVKKQMSEKLNELADQDFPLHPRENDQLDFIVETEGLKKSIHNLGTILTTNAVASETVATGEGLRQTIIGQPMSVTITTKDKDGELCKTGNAYLTAELSTPDGSVADGEILDNKNGTYEFLYTVQKEGDFTLSLRLYDQHIRGSPFKLKVIRSADVSPTTEGVKRRVKSPGSGHVKQKAVKRPASMYSTGKRKENPIEDDLIFRVGTKGRNKGEFTNLQGVAASTNGKILIADSNNQCVQIFSNDGQFKSRFGIRGRSPGQLQRPTGVAVHPSGDIIIADYDNKWVSIFSSDGKFKTKIGSGKLMGPKGVSVDRNGHIIVVDNKACCVFIFQPNGKIVTRFGSRGNGDRQFAGTLDGPHFAAVNSNNEIIITDFHNHSVKVFNQEGEFMLKFGSNGEGNGQFNAPTGVAVDSNGNIIVADWGNSRIQVFDGSGSFLSYINTSADPLYGPQGLALTSDGHVVVADSGNHCFKVYRYLQ

SEQ ID NO: 74221 - protein, 637 aa, Homo sapiens
MASLGANPRRTPQGPRPGAASSGFPSPAPVPGPREAEEEEVEEEEELAEIHLCVLWNSGYLGIAYYDTSDSTIHFMPDAPDHESLKLLQRVLDEINPQSVVTSAKQDENMTRFLGKLASQEHREPKRPEIIFLPSVDFGLEISKQRLLSGNYSFIPDAMTATEKILFLSSIIPFDCLLTVRALGGLLKFLGRRRIGVELEDYNVSVPILGFKKFMLTHLVNIDQDTYSVLQIFKSESHPSVYKVASGLKEGLSLFGILNRCHCKWGEKLLRLWFTRPTHDLGELSSRLDVIQFFLLPQNLDMAQMLHRLLGHIKNVPLILKRMKLSHTKVSDWQVLYKTVYSALGLRDACRSLPQSIQLFRDIAQEFSDDLHHIASLIGKVVDFEGSLAENRFTVLPNIDPEIDEKKRRLMGLPSFLTEVARKELENLDSRIPSCSVIYIPLIGFLLSIPRLPSMVEASDFEINGLDFMFLSEEKLHYRSARTKELDALLGDLHCEIRDQETLLMYQLQCQVLARAAVLTRVLDLASRLDVLLALASAARDYGYSRPRYSPQVLGVRIQNGRHPLMELCARTFVPNSTECGGDKGRVKVITGPNSSGKSIYLKQLRIHLPWPLHLHDRPQPGGESSEQCHCTVAGPY

SEQ ID NO: 74222 - protein, 298 aa, Homo sapiens
MLSRGVASSDRWCHQALCLPLQLVYPNDFRLTDKEKSSICYLSFPDSHSGCLGDTQFSFRMRQCGGQRSPWHADDRHYNSRAPVALQREPAHYFGYVYFRQVKDSSVKRGYFQKALGSSPTGRHPGSSVLGFLLSNNSGVQVRRSWGSCPVKLVGRATLGQLQSLVLVSRLPFVRLFQALLSLIAPEYFDKLAPCLEAVCSEIDQWPAPAPGQTLNLPVMGVVVQVRIPSRVDKSESSPPKQFDQENLLPAPVVLASVHELDLFRCFRPVLTHMQTLWELMLLGEPLLVLAPSPDVSS

SEQ ID NO: 74223 - protein, 69 aa, Homo sapiens
MRGPNSGTEKGRLVIPEKQGLEYANCGKAFSMDSSRLKSGEDSQELRGGHVTGAEFWCIFGSSSFPAAP

SEQ ID NO: 74224 - protein, 45 aa, Homo sapiens
MKGGNFGGRSSGPYGGGGQYFAKPRNQGGYGGSSSSSSYGSGRRF

SEQ ID NO: 74225 - protein, 77 aa, Homo sapiens
MRDNTSPISVILVSSGSRGNKLLFRYPFQRSQEHPASQTSKPRSRYAASNTGDHADEQDGDSRSPKQILPRRGKHLL

SEQ ID NO: 74226 - protein, 98 aa, Homo sapiens
MCPLPLAAAAVAAPRAPLRLLNRGLAAAMSTAQSLKSVDYEVFGRVQGVCFRMYTEDEARKIGVVGWVKNTSKGTVTGQVQGPEDKVNSMNSSAPEAG

SEQ ID NO: 74227 - protein, 14 aa, Homo sapiens
MPLCPLAHAMQPQS

SEQ ID NO: 74228 - protein, 73 aa, Homo sapiens
MSDSLVVCEVDPELTEKLRKFRFRKETDNAAIIMKVDKDRQMVVLEEEFQVFEIRTTDDLTEAWLQEKLSFFR

SEQ ID NO: 74229 - protein, 27 aa, Homo sapiens
  MOD_RES (1)..(1): Any amino acid
XADYNLSQLIASPAGMRRESIRPRHRG

SEQ ID NO: 74230 - protein, 170 aa, Homo sapiens
PDAFPELSELSVSQLTDMNEQEEVLLEQFLTLPQLKQIITDKDDLVKSIEELARKNLLLEPSLEAKRQTVLDKYELLTQMKSTFEKKMQRQHELSESCSASALQARLKVAAHEAEEESDNIAEDFLEGKMEIDDFLSSFMEKRTICHCRRAKEEKLQQAIAMHSQFHAPL

SEQ ID NO: 74231 - protein, 612 aa, Homo sapiens
  MOD_RES (1)..(1): Any amino acid
XATFKEFKMHEQIENEYIIGLLQQRSQTIYNVHSDNKLSEMLSLFEKGLKNVKVFQPMLMEYFTYEELKDIKKKVIAQHCSQKDTAELLRGLSLWNHAEERQKFFKYSVDEKSDKEAEVSEHSTGITHLPPEVMLSIFSYLNPQELCRCSQVSMKWSQLTKTGSLWKHLYPVHWARGDWYSGPATELDTEPDDEWVKNRKDESRAFHEWDEDADIDESEESAEESIAISIAQMEKRLLHGLIHNVLPYVGTSVKTLVLAYSSAVSSKMVRQILELCPNLEHLDLTQTDISDSAFDSWSWLGCCQSLRHLDLSGCEKITDVALEKISRALGILTSHQSGFLKTSTSKITSTAWKNKDITMQSTKQYACLHDLTNKGIGEEIDNEHPWTKPVSSENFTSPYVWMLDAEDLADIEDTVEWRHRNVESLCVMETASNFSCSTSGCFSKDIVGLRTSVCWQQHCASPAFAYCGHSFCCTGTALRTMSSLPESSAMCRKAARTRLPRGKDLIYFGSEKSDQETGRVLLFLSLSGCYQITDHGLRVLTLGGGLPYLEHLNLSGCLTITGAGLQDLVSACPSLNDEYFYYCDNINGPHADTASGCQNLQCGFRACCRSGE

SEQ ID NO: 74232 - protein, 175 aa, Homo sapiens
MEDSMDMDMSPLRPQNYLFGCELKADKDYHFKVDNDENEHQLSLRTVSLGAGAKDELHIVEAEAMNYEGSPIKVTLATLKMSVQPTVSLGGFEITPPVVLRLKCGSGPVHISGQHLVAVEEDAESEDEEEEDVKLLSISGKRSAPGGGSKVPQKKVKLAADEDDDDDDEEDDDEE

SEQ ID NO: 74233 - protein, 163 aa, Homo sapiens
MEWWASSPLRLWLLLFLLPSAQGRQKESGSKWKVFIDQINRSLENYEPCSSQNCSCYHGVIEEDLTPFRGGISRKMMAEVVRRKLGTHYQITKNRLYRENDCMFPSRCSGVEHFILEVIGRLPDMEMVINVRDYPQVPKWMEPAIPVFSFSKARLWKIGKIYL

SEQ ID NO: 74234 - protein, 24 aa, Homo sapiens
MARHTSTSLQAARPDLVVRQAQSK

SEQ ID NO: 74235 - protein, 116 aa, Homo sapiens
MLLECGMQEEGLFRVAPSASKLKKLKAALDCCVVDVQEYSADPHAIAGALKSYLRELPEPLMTFELYDEWIQASNVQEQDKKLQALWNACEKLPKANHNNIRYLIKFYPSCQNIKM

SEQ ID NO: 74236 - protein, 503 aa, Homo sapiens
MSPAPRPPRCLLLPLLTLGTALASLGSAQSSSFSPEAWLQQYGYLPPGDLRTHTQRSPQSLSAAIAAMQKFYGLQVTGKADADTMKAMRRPRCGVPDKFGAEIKANVRRKRYAIQGLKWQHNEITFCIQNYTPKVGEYATYEAIRKAFRVWESATPLRFREVPYAYIREGHEKQADIMIFFAEGFHGDSTPFDGEGGFLAHAYFPGPNIGGDTHFDSAEPWTVRNEDLNGNDIFLVAVHELGHALGLEHSSDPSAIMAPFYQWMDTENFVLPDDDRRGIQQLYGGESGFPTKMPPQPRTTSRPSVPDKPKNPTYGPNICDGNFDTVAMLRGEMFVFKERWFWRVRNNQVMDGYPMPIGQFWRGLPASINTAYERKDGKFVFFKGDKHWVFDEASLEPGYPKHIKELGRGLPTDKIDAALFWMPNGKTYFFRGNKYYRFNEELRAVDSEYPKNIKVWEGIPESPRGSFMGSDEDVIQWEFCKTQLEPVEEPGEGGLPERRGGGA

SEQ ID NO: 74237 - protein, 88 aa, Homo sapiens
  MOD_RES (1)..(1): Any amino acid
XENVCLDQGPVPGNTPIMYYCHEFSSQNVYYHLTGELYVGQLIAEASASDRCLTDPGKAEKPTLEPCSKAAKNRLHIYWDFKPPTITK

SEQ ID NO: 74238 - protein, 140 aa, Homo sapiens
MENQVQTLTSYLWSRHLPVEPEELQRRARHLEKKFLENPDLSQTEEKLRGAVLHALRKTTYHWQELSYTEGLSLVYMAARLDGGFAAVSRAFHEIRARNPAFQPQTLMDFGSGTGSVTWAAHSIWGQSLREYMCVDRSAA

SEQ ID NO: 74239 - protein, 79 aa, Homo sapiens
MPRPVKVAAVGGQSYLSSILRFFVKSLANKTSDWLGYMRFLIIPLGSHPVAKYLGSVDSKYSSSFLDSGWRDLFSRSEP

SEQ ID NO: 74240 - protein, 348 aa, Homo sapiens
MSLLVVSMACVGFFLLQGAWPHEGVHRKPSLLAHPGRLVKSEETVILQCWSDVMFEHFLLHREGMFNDTLRLIGEHHDGVSKANFSISRMTQDLAGTYRCYGSVTHSPYQVSAPSDPLDIVIIGLYEKPSLSAQLGPTVLAGENVTLSCSSWSSYDMYHLSREGEAHERRLPAGPKVNGTFQADFPLGPATHGGTYRCFGSFHDSPYEWSKSSDPLLVSVTGNPSNSWPSPTEPSSKTGNPRHLHILIGTSVVIILFILLFFLLHRWCSNKKNAAVMDQESAGNRTANSEDSDEQDPQEVTYTQLNHCVFTQRKITRPSQRPKTPPTDIIVYTELPNAESRSKVVSCP

SEQ ID NO: 74241 - protein, 862 aa, Homo sapiens
MQRRGALFGMPGGSGGRKMAAGDIGELLVPHMPTIRVPRSGDRVYKNECAFSYDSPNSEGGLYVCMNTFLAFGREHVERHFRKTGQSVYMHLKRHVREVRGASGGALPKRRNSKIFLDLDTDDDLNSDDYEYEDEAKLVIFPDHYEIALPNIEELPALVTIACDAVLSSKSPYRKQDPDTWENELPVSKYANNLTQLDNGVRIPPSGWKCARCDLRENLWLNLTDGSVLCGKWFFDSSGGNGHALEHYRDMGYPLAVKLGTITPDGADVYSFQEEEPVLDPHLAKHLAHFGIDMLHMHGTENGLQDNDIKLRVSEWEVIQESGTKLKPMYGPGYTGLKNLGNSCYLSSVMQAIFSIPEFQRAYVGNLPRIFDYSPLDPTQDFNTQMTKLGHGLLSGQYSKPPVKSELIEQVMKEEHKPQQNGISPRMFKAFVSKSHPEFSSNRQQDAQEFFLHLVNLVERNRIGSENPSDVFRFLVEERIQCCQTRKVRYTERVDYLMQLPVAMEAATNKDELIAYELTRREAEANRRPLPELVRAKIPFSACLQAFSEPENVDDFWSSALQAKSAGVKTSRFASFPEYLVVQIKKFTFGLDWVPKKFDVSIDMPDLLDINHLRARGLQPGEEELPDISPPIVIPDDSKDRLMNQLIDPSDIDESSVMQLAEMGFPLEACRKAVYFTGNMGAEVAFNWIIVHMEEPDFAEPLTMPGYGGAASAGASVFGASGLDNQPPEEIVAIITSMGFQRNQAIQALRATNNNLERALDWIFSHPEFEEDSDFVIEMENNANANIISEAKPEGPRVKDGSGTYELFAFISHMGTSTMSGHYICHIKKEGRWVIYNDHKVCASERPPKDLGYMYFYRRIPS

SEQ ID NO: 74242 - protein, 10 aa, Homo sapiens
MGIPGVKGQP

SEQ ID NO: 74243 - protein, 43 aa, Homo sapiens
MSEIQGTVEFSVELHKFYNVDLFQRGMQSEFGISRAGDISKSS

SEQ ID NO: 74244 - protein, 253 aa, Homo sapiens
MPLPVQVFNLQQPASSVSGSGGAESQDRMRDSSAPSSASSSVTDLYCTPHSSRSDLVLPGTAGDFSLSASLSACTLLYEGAVEPMQIDVDPQEDPQNAPDVNYVVENPSLDLEQYAASYSGLMRIERLQFIADHCPTLRVEALKMALSFVQRTFNVDMYEEIHRKLSEATRELQNAPDAIPESGVEPPALDTAWVEATRKKALLKLEKLDTDLKNYKGNSIKESIRRGHDDLGDHYLDCGDLSNALKCYSRAR

SEQ ID NO: 74245 - protein, 44 aa, Homo sapiens
MLQPQALLFVAAARARRLGGAAASEPSAGSEAASPKSVQAPSGA

SEQ ID NO: 74246 - protein, 71 aa, Homo sapiens
  MOD_RES (1)..(1): Any amino acid
XTMEWYELFQLGNCTFPHLRPEMDAPFWCNQGAACFFEGIDDVHWKENGTLVQVATISDLTPVQYPLRSLL

SEQ ID NO: 74247 - protein, 413 aa, Homo sapiens
MRLHLLLLLALCGAGTTAAELSYSLRGNWSICNGNGSLELPGAVPGCVHSALFQQGLIQDSYYRFNDLNYRWVSLDNWTYSKEFKIPFEISKWQKVNLILEGVDTVSKILFNEVTIGETDNMFNRYSFDITNVVRDVNSIELRFQSAVLYAAQQSKAHTRYQVPPDCPPLVQKGECHVNFVRKEQCSFSWDWGPSFPTQGIWKDVRIEAYNICHLNYFTFSPIYDKSAQEWNLEIESTFDVVSSKPVGGQVIVAIPKLQTQQTYSIELQPGKRIVELFVNISKNITVETWWPHGHGNQTGYNMTVLFELDGGLNIEKSAKVYFRTVELIEEPIKGSPGLSFYFKINGFPIFLKGSNWIPADSFQDRVTSELLRLLLQSVVDANMNTLRVWGGGIYEQDEFYELCDELGIMVCI

SEQ ID NO: 74248 - protein, 327 aa, Homo sapiens
FPTASSVPEHKGVGFHAWDVRNLRKLRGQVPAGSLPPTDPSLHRWFLAPLPSPEVIGVAELVNKINGPWFSKFDEDLATAFSIYCGISIAHSLLYKKVNEAQYRSHLANEMMMYHMKVSDDEYTKLLHDGIQPVAAIDSNFASFTYTPRSLPEDDTSMAILSMLQDMNFINNYKIDCPTLARFCLMVKKGYRDPPYHNWMHAFSVSHFCYLLYKNLELTNYLEDIEIFALFISCMCHDLDHRGTNNSFQVASKSVLAALYSSEGSVMERHHFAQAIAILNTHGCNIFDHFSRKDYQRMLDLMRDIILATDLAHHLRIFKDLQKMAEG

SEQ ID NO: 74249 - protein, 283 aa, Homo sapiens
MATSEQSICQARASVMVYDDTSKKWVPIKPGQQGFSRINIYHNTASNTFRVVGVKLQDQQVVINYSIVKGLKYNQATPTFHQWRDARQVYGLNFASKEEATTFSNAMLFALNIMNSQEGARKTEPQREEVCTWPKPLPDMTQSGREARMRTCSSSPPVPGSVVGAAWSSRKSACPGAGLRWVCVTLSKSPPPSAGGMTPQARGSSHDTKMPGAWYVAFRAVPHAAPLFVPTSSSFPLNHCRSSQNLLESSCHRLPLLQESRALVALEARPQADGTRPHSGSEF

SEQ ID NO: 74250 - protein, 1468 aa, Homo sapiens
MAPVHGDDCEIGASALSDSGSFVSSRARREKKSKKGRQEALERLKKAKAGEKYKYEVEDFTGVYEEVDEEQYSKLVQARQDDDWIVDDDGIGYVEDGREIFDDDLEDDALDADEKGKDGKARNKDKRNVKKLAVTKPNNIKSMFIACAGKKTADKAVDLSKDGLLGDILQDLNTETPQITPPPVMILKKKRSIGASPNPFSVHTATAVPSGKIASPVSRKEPPLTPVPLKRAEFAGDDVQVESTEEEQESGAMEFEDGDFDEPMEVEEVDLEPMAAKAWDKESEPAEEVKQEADSGKGTVSYLGSFLPDVSCWDIDQEGDSSFSVQEVQVDSSHLPLVKGADEEQVFHFYWLDAYEDQYNQPGVVFLFGKVWIESAETHVSCCVMVKNIERTLYFLPREMKIDLNTGKETGTPISMKDVYEEFDEKIATKYKIMKFKSKPVEKNYAFEIPDVPEKSEYLEVKYSAEMPQLPQDLKGETFSHVFGTNTSSLELFLMNRKIKGPCWLEVKSPQLLNQPVSWCKVEAMALKPDLVNVIKDVSPPPLVVMAFSMKTMQNAKNHQNEIIAMAALVHHSFALDKAAPKPPFQSHFCVVSKPKDCIFPYAFKEVIEKKNVKVEVAATERTLLGFFLAKVHKIDPDIIVGHNIYGFELEVLLQRINVCKAPHWSKIGRLKRSNMPKLGGRSGFGERNATCGRMICDVEISAKELIRCKSYHLSELVQQILKTERVVIPMENIQNMYSESSQLLYLLEHTWKDAKFILQIMCELNVLPLALQITNIAGNIMSRTLMGGRSERNEFLLLHAFYENNYIVPDKQIFRKPQQKLGDEDEEIDGDTNKYKKGRKKAAYAGGLVLDPKVGFYDKFILLLDFNSLYPSIIQEFNICFTTVQRVASEAQKVTEDGEQEQIPELPDPSLEMGILPREIRKLVERRKQVKQLMKQQDLNPDLILQYDIRQKALKLTANSMYGCLGFSYSRFYAKPLAALVTYKGREILMHTKEMVQKMNLEVIYGDTDSIMINTNSTNLEEVFKLGNKVKSEVNKLYKLLEIDIDGVFKSLLLLKKKKYAALVVEPTSDGNYVTKQELKGLDIVRRDWCDLAKDTGNFVIGQILSDQSRDTIVENIQKRLIEIGENVLNGSVPVSQFEINKALTKDPQDYPDKKSLPHVHVALWINSQGGRKVKAGDTVSYVICQDGSNLTASQRAYAPEQLQKQDNLTIDTQYYLAQQIHPVVARICEPIDGIDAVLIATWLGLDPTQFRVHHYHKDEENDALLGGPAQLTDEEKYRDCERFKCPCPTCGTENIYDNVFDGSGTDMEPSLYRCSNIDCKASPLTFTVQLSNKLIMDIRRFIKKYYDGWLICEEPTCRNRTRHLPLQFSRTGPLCPACMKATLQPEYSDKSLYTQLCFYRYIFDAECALEKLTTDHEKDKLKKQFFTPKVLQDYRKLKNTAEQFLSRSGYSEVNLSKLFAGCAVKS

SEQ ID NO: 74251 - protein, 73 aa, Homo sapiens
MDIKGQFWNDDDSEGDNESEEFLYGVQGSCAADLYRHPQLDADIEAVKEIYSENSVSIREYGTIDDVDIDLHI

SEQ ID NO: 74252 - protein, 42 aa, Homo sapiens
MLATRVFSLVGKRAISTSVCVRAHVETGFHHVSQDGLDLLTS

SEQ ID NO: 74253 - protein, 168 aa, Homo sapiens
MFSKRLEKIPQVPLLFPFIFIILTNYSKMEGAVESQPSFFKTSQDIVTCTWVENCYSSFSRRPLEMESHSVIQTGVQWHHLSSLQPPPPRFKLSSCLSLLSTRDRRLCDFAKMHHQQRMAALGTDKELSDLLDFSAMFSPPVSSGKNGPTSLASGHFTGSNVEDRSSS

SEQ ID NO: 74254 - protein, 59 aa, Homo sapiens
MATNFSDIVKQGYVKMKSRKLGIYRRCWLVFRKSSSKGPQRLEKYPDEKSVCLRGCPKS

SEQ ID NO: 74255 - protein, 509 aa, Homo sapiens
MGGGASKSGAEEWTQSSNGRDGLNWHGLSPLGWPSCRSIQTLRVLSGDLGQLPTGIRDFVEHSARLCQPEGIHICDGTEAENTATLTLLEQQGLIRKLPKYNNCWLARTDPKDVARVESKTVIVTPSQRDTVPLPPGGARGQLGNWMSPADFQRAVDERFPGCMQGRTMYVLPFSMGPVGSPLSRIGVQLTDSAYVVASMRIMTRLGTPVLQALGDGDFVKCLHSVGQPLTGQGEPVSQWPCNPEKTLIGHVPDQREIISFGSGYGGNSLLGKKCFALRIASRLARDEGWLAEHMLILGITSPAGKKRYVAAAFPSACGKTNLAMMRPALPGWKVECVGDDIAWMRFDSEGRLRAINPENGFFGVAPGTSATTNPNAMATIQSNTIFTNVAETSDGGVYWEGIDQPLPPGVTVTSWLGKPWKPGDKEPCAHPNSRFCAPARQCPIMDPAWEAPEGVPIDAIIFGGRRPKGVPLVYEAFNWRHGVFVGSAMRSESTAAAEHKGLLGTGGS

SEQ ID NO: 74256 - protein, 61 aa, Homo sapiens
MASASARGNQDKDAHFPPPSKQSLLFCPKSKLHIHRAEISKIMRECQEESFWKRACLSPRD

SEQ ID NO: 74257 - protein, 993 aa, Homo sapiens
  MOD_RES (1)..(1): Any amino acid
XNDNEQSVWRHSPKKQKNGYEKKKIPDATPLLDASSLEYLFAQGQYDLVKCLAPIRDPKTEQDGHDIENECLGMAVLAISHYAMMKKMQLPELPKDISSVSTHDLKVKYLATLETLTKHYGAEIFETSMLLISSENEMNWFHSNDGGNVLYYEVMVTGNLGIQWRHKPNVVSVEKEKNKLKRKKLENKHKKDEEKNKIREEWNNFSYFPEITHIVIKESVVSINKQDNKKMELKLSSHEEALSFVSLVDGYFRLTADAHHYLCTDVAPPLIVHNIQNGCHGPICTEYAINKLRQEGSEEGMYVLRWSCTDFDNILMTVTCFEKSEQVQGAQKQFKNFQIEVQKGRYSLHGSDRSFPSLGDLMSHLKKQILRTDNISFMLKRCCQPKPREISNLLVATKKAQEWQPVYPMSQLSFDRILKKDLVQGEHLGRGTRTHIYSGTLMDYKDDEGTSEEKKIKVILKVLDPSHRDISLAFFEAASMMRQVSHKHIVYLYGVCVRDVENIMVEEFVEGGPLDLFMHRKSDVLTTPWKFKVAKQLASALSYLEDKDLVHGNVCTKNLLLAREGIDSECGPFIKLSDPGIPITVLSRQECIERIPWIAPECVEDSKNLSVAADKWSFGTTLWEICYNGEIPLKDKTLIEKERFYESRCRPVTPSCKELADLMTRCMNYDPNQRPFFRAIMRDINKLEEQNPDIVSEKKPATEVDPTHFEKRFLKRIRDLGEGHFGKVELCRYDPEGDNTGEQVAVKSLKPESGGNHIADLKKEIEILRNLYHENIVKYKGICTEDGGNGIKLIMEFLPSGSLKEYLPKNKNKINLKQQLKYAVQICKGMDYLGSRQYVHRDLAARNVLVESEHQVKIGDFGLTKAIETDKEYYTVKDDRDSPVFWYAPECLMQSKFYIASDVWSFGVTLHELLTYCDSDSSPMALFLKMIGPTHGQMTVTRLVNTLKEGKRLPCPPNCPDEVYQLMRKCWEFQPSNRTSFQNLIEGFEALLK

SEQ ID NO: 74258 - protein, 139 aa, Homo sapiens
  MOD_RES (1)..(1): Any amino acid
XNISLCPEICFQKIESQVYFVRVDSGIQPGSDISIYYDPMISKLITYGSDRTEALKRMADALDNYVIRGVTHNIALLREVIINSRFVKGDISTKFLSDVYPDGFKGHMLTKSEKNQLLAIASSLFVAFQLRAQHFQENS

SEQ ID NO: 74259 - protein, 117 aa, Homo sapiens
MGLLTFRDVAIEFSLEEWQCLDTAQRNLYKNVILENYRNLVFLGIAVSKQDLITCLEQEKEPLTVKRHEMVNEPPGSVGQTQQVVPHVRSNEMHHDGTLKNESEVTAHPLGPLWIPA

SEQ ID NO: 74260 - protein, 754 aa, Homo sapiens
MATSRGASRCPRDIANVMQRLQDEQEIVQKRTFTKWINSHLAKRKPPMVVDDLFEDMKDGVKLLALLEVLSGQKLPCEQGRRMKRIHAVANIGTALKFLEGRKIKLVNINSTDIADGRPSIVLGLMWTIILYFQIEELTSNLPQLQSLSSSASSVDSIVSSETPSPPSKRKVTTKIQGNAKKALLKWVQYTAGKQTGIEVKDFGKSWRSGVAFHSVIHAIRPELVDLETVKGRSNRENLEDAFTIAETELGIPRLLDPEDVDVDKPDEKSIMTYVAQFLKHYPDIHNASTDGQEDDEILPGFPSFANSVQNFKREDRVIFKEMKVWIEQFERDLTRAQMVESNLQDKYQSFKHFRVQYEMKRKQIEHLIQPLHRDGKLSLDQALVKQSWDRVTSRLFDWHIQLDKSLPAPLGTIGAWLYRAEVALREEITVQQVHEETANTIQRKLEQHKDLLQNTDAHKRAFHEIYRTRSVNGIPVPPDQLEDMAERFHFVSSTSELHLMKMEFLELKYRLLSLLVLAESKLKSWIIKYGRRESVEQLLQNYVSFIENSKFFEQYEVTYQILKQTAEMYVKADGSVEEAENVMKFMNETTAQWRNLSVEVRSVRSMLEEVISNWDRYGNTVASLQAWLEDAEKMLNQSENAKKDFFRNLPHWIQQHTAMNDAGNFLIETCDEMVSRDLKQQLLLLNGRWRELFMEVKQYAQADEMDRMKKEYTDCVVTLSAFATEAHKKLSEPLEVSFMNVKLLIQDLEVRGF

SEQ ID NO: 74261 - protein, 127 aa, Homo sapiens
MWTCERWPTLSGRCQTGCWSPDGSRLLFTVLGEPLIYSLSFPERCGEGKGCVGGAKSATIVADLSETTIQTPDGEERLGGEAHSMVWDPSGERLAVLMKGKPRVQDGKPVILLFRTRNSPVFELLPW

SEQ ID NO: 74262 - protein, 173 aa, Homo sapiens
MEKWYLMTVVVLIGLTVRWTVSLNSYSGAGKPPMFGDYEAQRHWQEITFNLPVKQWYFNSSDNNLQYWGLDYPPLTAYHSLLCAYVAKFINPDWIALHTSRGYESQAHKLFMRTTVLIADLLIYIPAVVLYCCCLKEISTKKKIANALCILLYPGLILIDYGHFQYNSVCVAS

SEQ ID NO: 74263 - protein, 66 aa, Homo sapiens
MAAINPWASWGALTDQSWGMTAVDPWASWGESRAWSAVGCHIVASGCSALPQLGNRMGTRWGFRAG

SEQ ID NO: 74264 - protein, 225 aa, Homo sapiens
MQLVYKNPKECFLIQPKERKENTTKTRKRRKKKITDVLAKSEPKPGLPEDLQKLMKDYYSSRRLVIELEELNLPDSCFLKANDLTHSLSSYLKEICPKWVKLRKNHSEKKSVLMLIICSSAVRALELIRSMTAFRGDGKVIKLFAKHIKVQAQVKLLEKRVVHLGVGTPGRIKELVKQGGLNLSPLKFLVFDWNWRDQKLRRMMDIPEIRKEVFELLEMGVLSLC

SEQ ID NO: 74265 - protein, 159 aa, Homo sapiens
MSDPEMGWVPEPPTMTLGASRVELRVSCHGLLDRDTLTKPHPCVLLKLYSDEQWVEVERTEVLRSCSSPVFSRVLALEYFFEEKQPLQFHVFDAEDGATSPRNDTFLGSTECTLGQIVSQTKVTKPLLLKNGKTAGKSTITVGKITCTHPWSRSWPRRY

SEQ ID NO: 74266 - protein, 90 aa, Homo sapiens
MRVLACLLAALVGIQAVERLRLADGPHGCAGRLEVWHGGRWGTVCDDGWDLRDAAVACRQLGCGGALAAPGGAFFGEGAGPVWLSELACR

SEQ ID NO: 74267 - protein, 167 aa, Homo sapiens
  MOD_RES (1)..(1): Any amino acid
XTATLRPYLSAVRATLQAALCLENFSSQVVERHNKPEVEVRSSKELLLQPVTISRNEKEKVLIEGSINSVRVSIAVKQGYDISFLITNFHTEQMYKHKLVDFVIHFMEEIDKEISEMKLSVNARARIVAEEFLKNQKKIFTIQGCYPVIRCLLRRRGWVEKKMVHRS

SEQ ID NO: 74268 - protein, 114 aa, Homo sapiens
MPSRTARYARYSPRQRRRRMLADRSVRFPNDVLFLDHIRQGDLEQVGRFIRTRKVSLATIHPSGLAALHEAVLSGNLECVKLLVKYGADIHQRDEAGWTPLHIACSDGYPDIAR

SEQ ID NO: 74269 - protein, 161 aa, Homo sapiens
MPAPPPPLNCPPGLEYLSQIDMILIHQQIELLEVLFSFESSNMYEIKNSFGQRIYFAAEDTNFCIRNCCGRSRPFTLRITDNVGREVITLERPLRCNCCCCPCCLQEIEIQAPPGVPVGYVTQTWHPCLTKFTIKNQKREDVLKISGPCIVCSCIAGVDFE

SEQ ID NO: 74270 - protein, 451 aa, Homo sapiens
MDLGSDAGSSSSSSRASSQSNSTKVTPCSECKSSSSPGGSLDLVSALEDYEEPFPVYQKKVIDEWAPEEDGEEEEEEDERDQRGYRDDRSPAREPGDVSARTRSGGGGGRSATTAMPPPVPNGNLHQHDPQDLRHNGNVVVAGRPSCSRGPRRAIQKPQPAGGRRSGRGPAAGGLCLQPPDGGTCVPEEPPVPPMDWEALEKHLAGLQFREQEAQKNERESIRQKLALGSFFDDGPGIYTSCSKSGKPSLSSRLQSGMNLQICFVNDSGSDKDSDADDSKTETSLDTPLSPMSKQSSSYSDRDTTEEESESLDDMDFLTRQKKLQAEAKMALAMAKPMAKMQVEVEKQNRKKSPVADLLPHMPHISECLMKRSLKPTDLRDMTIGQLQVIVNDLHSQIESLNEELVQLLLIRDELHTEQDAMLVDIEDLTRSVWLHSCQRRKAQGGLKSKN

SEQ ID NO: 74271 - protein, 117 aa, Homo sapiens
MEAAENNHLEAVKYLIKAGALVDPKDAEGSTCLHLAAKKGHYEVVQYLLSNGQMDVNCQDDGGWTPMIWATEYKHVDLVKLLLSKGSDINIRDNDDGTMKRGALSRQKEEKREAEEP

SEQ ID NO: 74272 - protein, 43 aa, Homo sapiens
LCEKAGLLQQALEHYTDLYDIKRAVVHTHLLNPEASSTSWAQS

SEQ ID NO: 74273 - protein, 242 aa, Homo sapiens
MAPRSLLLLLSGALALTDTWAGSHSLRYFSTAVSRPGRGEPRYIAVEYVDDTQFLRFDSDAAIPRMEPREPWVEQEGPQYWEWTTGYAKANAQTDRVALRNLLRRYNQSEAGSHTLQGMNGCDMGPDGRLLRGYHQHAYDGKDYISLNEDLRSWTAADTVAQITQRFYEAEEYAEEFRTYLEGECLELLRRYLENGKETLQRAEQSPQPTIPIVGIVAGLVVLGAVVTGAVVAAVMWRKKSS

SEQ ID NO: 74274 - protein, 224 aa, Homo sapiens
  MOD_RES (1)..(1): Any amino acid
XKSCFQPLFQFEDMQEIIQNFVRVHVDAPGMEEGAPVFPLGYQYPSLDQLADMIPCVLQYLNFSTIIGVGVGAGAYILARYALNHPDTVEGLVLINIDPNAKGWMDWAAHKLTGLTSSIPEMILGHLFSQEELSGNSELIQKYRNIITHAPNLDNIELYWNSYNNRRDLNFERGGDITLRCPVMLVVGDQAPHEDAVTSFLKMADSGGQPQLTQPGKLTEAFKY

SEQ ID NO: 74275 - protein, 290 aa, Homo sapiens
MAALTPRKRKQDSLKCDSLLHFTENLFPSPNKKHCFYQNSDKNEENLHCSQQEHFVLSALKTTEINRLPSANQGSPFKSALSTVSFYNQNKWYLNPLERKLIKESRSTCLKTNDEDKSFPIVTEKMQGKPVCSKKNNKKPQKSLTAKYQPKYRHIKPVSRNSRNSKQNRVIYKPIVEKENNCHSAENNSNAPRVLSQKIKPQVTLQGGAAFFVRKKSSLRKSSLENEPSLGRTQKSKSEVIEDSDVETVSEKKTFATRQVPKCLVLEEKLKIGLLSASSKNKEKLIKIFR

SEQ ID NO: 74276 - protein, 132 aa, Homo sapiens
MRTYHYIPLFIWTYMFHTVDTILLQEKPNSYLSSKKIAGLTKDDGKMLRRTKRGWMWNQFFLLEEYTGTDTQYVGKLHTDQDKGDGNLKYILTGDGAGSLFVIDENTGDIHAAKKLDREEKSLYILRAKAID

SEQ ID NO: 74277 - protein, 27 aa, Homo sapiens
MSATTVSSLLACLHCPGGSSGRPGGLE

SEQ ID NO: 74278 - protein, 224 aa, Homo sapiens
MDMGNPGTLSPTKPGSQYYQYSSNNPRRRPLHSSAMEVQTKKVRKVPPGLPSSVYAPSASTADYNRDSPGYPSSKPATSTFPSSFFMQDGHHSSDPWSSSSGMNQPGYAGMLGNSSHIPQSSSYCSLHPHERLSYPSHSSADINSSLPPMSTFHRSGTNHYSTSSCTPPANGTDSIMANRGSGAAGSSQTGDALGKALASIYSPDHTNNSFSSNPSTPVGSPPS

SEQ ID NO: 74279 - protein, 387 aa, Homo sapiens
MSREMQDVDLAEVKPLVEKGETITGLLQEFDVQEQDIETLHGSVHVTLCGTPKGNRPVILTYHDIGMNHKTCYNPLFNYEDMQEITQHFAVCHVDAPGQQDGAASFPAGYMYPSMDQLAEMLPGVLQQFGLKSIIGMGTGAGAYILTRFALNNPEMVEGLVLINVNPCAEGWMDWAASKISGWTQALPDMVVSHLFGKEEMQSNVEVVHTYRQHIVNDMNPGNLHLFINAYNSRRDLEIERPMPGTHTVTLQCPALLVVGDSSPAVDAVVECNSKLDPTKTTLLKMADCGGLPQISQPAKLAEAFKYFVQGMGYMPSASMTRLMRSRTASGSSVTSLDGTRSRSHTSEGTRSRSHTSEGTRSRSHTSEGAHLDITPNSGAAGNSAGP

SEQ ID NO: 74280 - protein, 130 aa, Homo sapiens
MGLLVFVRNLLLALCLFLVLGFLYYSAWKLHLLQWEEDSKYDRLGFLLNLDSKLPAELATKYANFSEGACKPGYASALMTAIFPRQSDQSHLVSHQRVPPDPCLGQPPLPPLHHRGQWRRSCQQVSGVTN

SEQ ID NO: 74281 - protein, 147 aa, Homo sapiens
MAKERGLISPSDFAQLQKYMEYSTKKVSDVLKLFEDGEMAKYVQGDAIGYEGFQQFLKIYLEVDNVPRHLSLALFQSFETGHCLNETNVTKDVVCLNDVSCYFSLLEGGRPEDKLEFTFKLYDTDRNGILDSSEVDKIILQMMRVAE

SEQ ID NO: 74282 - protein, 25 aa, Homo sapiens
MDALKDSFSQLINLLEEKDHEAVRM

SEQ ID NO: 74283 - protein, 97 aa, Homo sapiens
MGVALRKLTQWTAAGHGTGILEITPLNEAILKEIIVFVESFIYKHPQEAKFVFVEPLEWNTSLAPSAFESGYVVSETTVKSEEVDKNGQPLLFLSVP

SEQ ID NO: 74284 - protein, 79 aa, Homo sapiens
RTESEIAFFGGMTIVYKNSIDLFLYVVGSSYENELMLMSVLTCLFESLNHMLRKNVEKRWLLENMDGAFLVLDEIVDGG

SEQ ID NO: 74285 - protein, 47 aa, Homo sapiens
MSGHSPTRGAMQVAMNGKARKEAVQTAAKELLKFVNRSPSPFHGWLQ

SEQ ID NO: 74286 - protein, 62 aa, Homo sapiens
MASNKTTLQKMGKKQNGKSKKVEEAEPEEFVVEKVLDRRVVNGKVEYFLKWKGFTDADNTWE

SEQ ID NO: 74287 - protein, 335 aa, Homo sapiens
MRFLRTDSASADPDNLKYSSSRDRGGSSSYGLQPSNSAVVSRQRHDDTRVHADIQNDEKGGYSVNGGSGENTYGRKSLGQELRVNNVTSPEFTSVQHGSRALATKDMRKSQERSMSYSDESRLSNLLRRITREDDRDRRLATVKQLKEFIQQPENKLVLVKQLDNILAAVHDVLNESSKLLQELRQEGACCLGLLCASLSYEAEKIFKWIFSKFSSSAKDEVKLLYLCATYKALETVGEKKAFSSVMQLVMTSLQSILENVDTPELLCKCVKCILLVARCYPHIFSTNFRDTVDILVGWHIDHTQKPSLTQQVSGWLQSLEPFWVADLAFSTTLL

SEQ ID NO: 74288 - protein, 553 aa, Homo sapiens
MDIKGQFWNDDDSEGDNESEEFLYGVQGSCAADLYRHPQLDADIEAVKEIYSENSVSIREYGTIDDVDIDLHINISFLDEEVSTAWKVLRTEPIVLRLRFSLSQYLDGPEPSIEVFQPSNKEGFGLGLQLKKILGMFTSQQWKHLSNDFLKTQQEKRHSWFKASGTIKKFRAGLSIFSPIPKSPSFPIIQDSMLKGKLGVPELRVGRLMNRSISCTMKNPKVEVFGYPPSPQAGLLCPQHVGLPPPARTSPLVSGHCKNIPTLEYGFLVQIMKYAEQRIPTLNEYCVVCDEQHVFQNGSMLKPAVCTRELCVFSFYTLGVMSGAAEEVATGAEVVDLLVAMCRAALESPRKSIIFEPYPSVVDPTDPKTLAFNPKKKNYERLQKALDSVMSIREMTQGSYLEIKKQMDKLDPLAHPLLQWIISSNRSHIVKLPLSRQLKFMHTSHQFLLLSSPPAKEARFRTAKKLYGSTFAFHGSHIENWHSILRNGLVNASYTKLQLHGAAYGKGIYLSPISSISFGYSGMGKGQHRMPSKDELVQRYNRMNTIPQTRSIQ

SEQ ID NO: 74289 - protein, 120 aa, Homo sapiens
MNGHISNHPSSFGMYPSQMNGYGSSPTFSQTDREHGSKTSAKALYEQRKNYARDSVSSVSDISQYRVEHLTTFVLDRKDAMITVDDGIRKLKLLDAKGKVWTQDMILQVDDRAVSLIDLE

SEQ ID NO: 74290 - protein, 65 aa, Homo sapiens
MADEDGEGIHPSAPHRNGGGGGGGGSGLHCAGNGGGGGGGPRVVRIVKSESGYGFNVRGQEPREC

SEQ ID NO: 74291 - protein, 334 aa, Homo sapiens
MGRPLHLVLLSASLAGLLLLGESLFIRREQANNILARVTRANSFLEEMKKGHLERECMEETCSYEEAREVFEDSDKTNEFWNKYKDGDQCETSPCQNQGKCKDGLGEYTCTCLEGFEGKNCELFTRKLCSLDNGDCDQFCHEEQNSVVCSCARGYTLADNGKACIPTGPYPCGKQTLERRKRSVAQATSSSGEAPDSITWKPYDAADLDPTENPFDLLDFNQTQPERGDNNLTRIVGGQECKDGECPWQALLINEENEGFCGGTILSEFYILTAAHCLYQAKRFKVRGTGTRSRRRAVRRCTRWRWSSSTTGSQRRPMTSTSPCSGSRPPSPSA

SEQ ID NO: 74292 - protein, 219 aa, Homo sapiens
RSSIQSTFSINPEIVCDPLSDYNVWSMLKPINTTGTLKPDDRVVVAATRLAAAEALQKAPDVTTLPRNVMFVFFQGETFDYIGSSRMVYDMEKGKFPVQLENVDSFVELGQVALRTSLELWMHTDPVSQKNESVRNQVEDLLATLEKSGAGVPAVILRRPNQSQPLPPSSLQRFLRARNISGVVLADHSGAFHNKYYQSIYDTAENINVSYPEWLSPEE

SEQ ID NO: 74293 - protein, 336 aa, Homo sapiens
MWLKVGGLLRGTGGQLGQTVGWPCGALGPGPHRWGPCGGSWAQKFYQDGPGRGLGEEDIRRAREARPRKTPRPQLSDRSRERKVPASRISRLANFGGLAVGLGLGVLAEMAKKSMPGGRLQSEGGSGLDSSPFLSEANAERIVQTLCTVRGAALKVGQMLSIQDNSFISPQLQHIFERVRQSADFMPRWQMLRVLEEELGRDWQAKVASLEEVPFAAASIGQVHQGLLRDGTEVAVKIQYPGIAQSIQSDVQNLLAVLKMSAALPAGLFAEQSLQALQQELAWECDYRREAACAQNFSCWQMTPSSGSQPWLRSCARHGCWAWSWLEGSPWTSARA

SEQ ID NO: 74294 - protein, 367 aa, Homo sapiens
MVMEKPSPLLVGREFVRQYYTLLNQAPDMLHRFYGKNSSYVHGGLDSNGKPADAVYGQKEIHRKVMSQNFTNCHTKIRHVDAHATLNDGVVVQVMGLLSNNNQALRRFMQTFVLAPEGSVANKFYVHNDIFRYQDEVFGGFVTEPQEESEEEVEEPEERQQTPEVVPDDSGTFYDQAVVSNDMEEHLEEPVAEPEPDPEPEPEQEPVSEIQEEKPEPVLEETAPEDAQKSSSPAPADIAQTVQEDLRTFSWASVTSKNLPPSGAVPVTGIPPHVVKVPASQPRPESKPESQIPPQRPQRDQRVREQRINIPPQRGPRPIREAGEQGDIEPRRMVRHPDSHQLFIGNLPHEVDKSELKDFFQTHHVQR

SEQ ID NO: 74295 - protein, 821 aa, Homo sapiens
MEGHAEMEMLRTLKGPSTGEVSMHLVAGDSPGSGPHLPATAFIIPASSATLGLPSSALDVSCFPREPIHVGAPEQVAGCEPVSATVLPQLSAGPASSSTSTVRLLEWTEAAAPPPGGGLRFRISEYKPLNMAGVEQPPSPELRQEGVTEYEDGGAPAGDGEAGPQQAEDHPQNPPEDPNQDPPEDDSTCQCQACGPHQAAGPDLGSSNDGCPQLFQERSVIVENSSGSTSASELLKPMKKRKRREYQSPSEEESEPEAMEKQEEGKDPEGQPTASTPESEEWSSSQPATGEKKECWSWESYLEEQKAITAPVSLFQDSQAVTHNKNGFKLGMKLEGIDPQHPSMYFILTVAEVCGYRLRLHFDGYSECHDFWVNANSPDIHPAGWFEKTGHKLQPPKGYKEEEFSWSQYLRSTRAQAAPKHLFVSQSHSPPPLGFQVGMKLEAVDRMNPSLVCVASVTDVVDSRFLVHFDNWDDTYDYWCDPSSPYIHPVGWCQKQGKPLTPPQDYPDPDNFCWEKYLEETGASAVPTWAFKVRPPHSFLVNMKLEAVDRRNPALIRVASVEDVEDHRIKIHFDGWSHGYDFWIDADHPDIHPAGWCSKTGHPLQPPLGPREPSSASPGGCPPLSYRSLPHTRTSKYSFHHRKCPTPGCDGSGHVTGKFTAHHCLSGCPLAERNQSRLKAELSDSEASARKKNLSGFSPRKKPRHHGRIGRPPKYRKIPQEDFQTLTPDVVHQSLFMSALSAHPDRSLSVCWEQHCKLLPGVAGISASTVAKWTIDEMIDGEAFLLLTQADIVKIMSVKLGPALKIYNAILMFKNADDTLK

SEQ ID NO: 74296 - protein, 11 aa, Homo sapiens
  MOD_RES (1)..(1): Any amino acid
XARQQCLGAAK

SEQ ID NO: 74297 - protein, 136 aa, Homo sapiens
  MOD_RES (1)..(1): Any amino acid
XLDWPEDSEDSLSSGGSDSDESVYKVLLLGAPGVGKSALARIFGGVEDGPEAEAAGHTYDRSIVVDGEEASLMVYDIWEQCCPAKWLSGASEGWAHRDACAGSYASQAAAAQPPGRPACRERTLPFFTARVCLPWR

SEQ ID NO: 74298 - protein, 12 aa, Homo sapiens
MQFCANKLDKKD

SEQ ID NO: 74299 - protein, 230 aa, Homo sapiens
  MOD_RES (1)..(1): Any amino acid
XDCPPLVQKGECHVNFVRKEQCSFSWDWGPSFPTQGIWKDVRIEAYNICHLNYFTFSPIYDKSAQEWNLEIESTFDVVSSKPVGGQVIVAIPKLQTQQTYSIELQPGKRIVELFVNISKNITVETWWPHGHGNQTGYNMTVLFELDGGLNIEKSAKVYFRTVELIEEPIKGSPGLSFYFKINGFPIFLKGSNWIPADSFQDRVTSEFWGWVGCGPSAQLGQLVSLPWCLC

SEQ ID NO: 74300 - protein, 32 aa, Homo sapiens
MGSDAWVGLWRPHRPRGPIAAHYGGPGPKYKL

SEQ ID NO: 74301 - protein, 224 aa, Homo sapiens
MRPLRPRAALLALLASLLAAPPVAPAEAPHLVHVDAARALWPLRRFWRSTGFWGSTGRGLSYNFTHLDGYLDLLRENQLLPGFELMGSASGHFTDFEDKQQVFEWKDLVSSLARRYIGRYGLAHVSKWNFETWNEPDHHDFDNVSMTMQGFLNYYDACSEGLRAASPALRLGGPGDSFHTPPRSPLSWGLLRHCHDGTNFFTGEAGVRLDYISLHRKGARSSIS

SEQ ID NO: 74302 - protein, 144 aa, Homo sapiens
  MOD_RES (1)..(1): Any amino acid
XMAGPAAEITVSGGPGTDSKDSGELSSLPLGPTTLDTRPLQSSALLDSSSSSSSSSSSSSNSNSSSSSGPNPSTSFEPIKADPTGVLELPKELSEIFDPTRECMSSELLEELMSSEGTCPVWLGPRLSDLGVAWGPLPPDPYRA

SEQ ID NO: 74303 - protein, 857 aa, Homo sapiens
MPSFRGKKIRAAGSAAGSVCRAGAPGRTQVRAGSGPRTRFHRHPQPGHARRQTSCSRRPESADTMWIQVRTMDGRQTHTVDSLSRLTKVEELRRKIQELFHVEPGLQRLFYRGKQMEDGHTLFDYEVRLNDTIQLLVRQSLVLPHSTKERDSELSDTDSGCCLGQSESDKSSTHGEAAAETDSRPADEDMWDETELGLYKVNEYVDARDTNMGAWFEAQVVRVTRKAPSRDEPCSSTSRPALEEDVIYHVKYDDYPENGVVQMNSRDVRARARTIIKWQDLEVGQVVMLNYNPDNPKERGFWYDAEISRKRETRTARELYANVVLGDDSLNDCRIIFVDEVFKIERPGEGSPMVDNPMRRKSGPSCKHCKDDVNRLCRVCACHLCGGRQDPDKQLMCDECDMAFHIYCLDPPLSSVPSEDEWYCPECRNDASEVVLAGERLRESKKKAKMASATSSSQRDWGKGMACVGRTKECTIVPSNHYGPIPGIPVGTMWRFRVQVSESGVHRPHVAGIHGRSNDGAYSLVLAGGYEDDVDHGNFFTYTGSGGRDLSGNKRTAEQSCDQKLTNTNRALALNCFAPINDQEGAEAKDWRSGKPVRVVRNVKGGKNSKYAPAEGNRYDGIYKVVKYWPEKGKSGFLVWRYLLRRDDDEPGPWTKEGKDRIKKLGLTMQYPEGYLEALANREREKENSKREEEEQQEGGFASPRTGKGKWKRKSAGGGPSRAGSPRRTSKKTKVEPYSLTAQQSSLIREDKSNAKLWNEVLASLKDRPASGSPFQLFLSKVEETFQCICCQELVFRPITTVCQHNVCKDCLDRSFRAQVFSCPACRYDLGRSYAMQVNQPLQTVLNQLFPGYGNGR

SEQ ID NO: 74304 - protein, 420 aa, Homo sapiens
MTVVGNPRSWSCQWLPILILLLGTGHGPGVEGVTHYKAGDPVILYVNKVGPYHNPQETYHYYQLPVCCPEKIRHKSLSLGEVLDGDRMAESLYEIRFRENVEKRILCHMQLSSAQVEQLRQAIEELYYFEFVVDDLPIRGFVGYMEESGFLPHSHKIGLWTHLDFHLEFHGDRIIFANVSVRDVKPHSLDGLRPDEFLGLTHTYSVRWSETSVERRSDRRRGDDGGFFPRTLEIHWLSIINSMVLVFLLVGFVAVILMRVLRNDLARYNLDEETTSAGSGDDFDQGDNGWKIIHTDVFRFPPYRGLLCAVLGVGAQFLALGTGIIVMALLGMFNVHRHGAINSAAILLYALTCCISGYVSSHFYRQIGGERWVWNIILTTSLFSGSASHNHPAASDGLAAGGLSPHCHWRHLWEEQRQPL

SEQ ID NO: 74305 - protein, 74 aa, Homo sapiens
MGEKPGTRVFKKSSPNCKPLAAEAAQPEPATGLGGAGLGPQARPQRRRPKASHVPVALLGANPSSPCTWASGTS

SEQ ID NO: 74306 - protein, 157 aa, Homo sapiens
MKQCEVAEMDHPGGLQNHARLRTPPPPLSHAHTPNQHHAASINSLNRGNFTPRSNPSPAPTDHSLSGEPPAGGAQEPAHAQENWLLNSNIPLETRNLGKQPFLGTLQDNLIEMDILGASRHDGAYSDGHFLFKPGGTSPLFCTTSPGYPLTSSTVYS

SEQ ID NO: 74307 - protein, 80 aa, Homo sapiens
MPPCSGGDGSTPPGPSLRDRDCPAQSAEYPRDRLDPRPGSPSEASSPPFLRRCLRKPRPKTNRWRRRRLRRSPFRQKLPS

SEQ ID NO: 74308 - protein, 647 aa, Homo sapiens
MKILNHPNIVKLFEVIETEKTLYLIMEYASGGEVFDYLVAHGRMKEKEARSKFRQIVSAVQYCHQKRIVHRDLKAENLLLDADMNIKIADFGFSNEFTVGGKLDTFCGSPPYAAPELFQGKKYDGPEVDVWSLGVILYTLVSGSLPFDGQNLKELRERVLRGKYRIPFYMSTDCENLLKRFLVLNPIKRGTLEQIMKDRWINAGHEEDELKPFVEPELDISDQKRIDIMVGMGYSQEEIQESLSKMKYDEITATYLLLGRKSSELDASDSSSSSNLSLAKVRPSSDLNNSTGQSPHHKVQRSVSSSQKQRRYSDHAGPAIPSVVAYPKRSQTSTADSDLKEDGISSRKSSGSAVGGKGIAPASPMLGNASNPNKADIPERKKSSTVPSSNTASGGMTRRNTYVCSERTTADRHSVIQNGKENSTIPDQRTPVASTHSISSAATPDRIRFPRGTASRSTFHGQPRERRTATYNGPPASPSLSHEATPLSQTRSRGSTNLFSKLTSKLTRRNMSFRFIKRLPTEYERNGRYEGSSRNVSAEQKDENKEAKPRSLRFTWSMKTTSSMDPGDMMREIRKVLDANNCDYEQRERFLLFCVHGDGHAENLVQWEMEVCKLPRLSLNGVRFKRISGTSIAFKNIASKIANELKL

SEQ ID NO: 74309 - protein, 316 aa, Homo sapiens
MAMESTATAAVAAELVSADKIEDVPAPSTSADKVERGKKYGETANECGEAFFFYGKSLLELARMENGVLGNALEGVHVEEEEGEKTEDESLVENNDNIDEEAREELREQVYDAMGEKEEAKKTEDKSLAKPETDKEQDSEMEKGGREDMDISKSAEEPQEKVDLTLDWLTETSEEAKGGAAPEGPNEAEVTSGKPEQEVPDAEEEKSVSGTDVQEECREKGGQEKQGEVIVSIEEKPKEVSEEQPVVTLEKQGTAVEVEAESLDPTVKPVDVGGDEPEEKVVTSENEAGKAVLEQLVGQEVPPAEESPEVTTEAAE

SEQ ID NO: 74310 - protein, 203 aa, Homo sapiens
MGPLMVLFCLLFLYPGLADSAPSCPQNVNISGGTFTLSHGWAPGSLLTYSCPQGLYPSPASRLCKSSGQWQTPGATRSLSKAVCKPGHCPNPGISLGAVRTGFRFGHGDKVRYRCSSNLVLTGSSERECQGNGVWSGTEPICRQPYSYDFPEDVAPALGTSFSHMLGATNPTQKTKESLGRKIQIQRSGHLNLYLLLDCSQSV

SEQ ID NO: 74311 - protein, 109 aa, Homo sapiens
MAYSQGGGKKKVCYYYDVCVFSILGDIGNYYYGQGHPMKPHRIRMTHNLLLNYGLYRKMEIYRPHKATAEEMTKYHSDEYIKFLRSIRPDNMSEYSKQMQRFNVGEDCP

SEQ ID NO: 74312 - protein, 413 aa, Homo sapiens
MRRGCAVLGALGLLAGAGVGSWLLVLYLCPAASQPISGTLQDEEITLSCSEASAEEALLPALPKTVSFRINSEDFLLEAQVRDQPRWLLVCHEGWSPALGLQICWSLGHLRLTHHKGVNLTDIKLNSSQEFAQLSPRLGGFLEEAWQPRNNCTSGQVVSLRCSECGARPLASRIVGGQSVAPGRWPWQASVALGFRHTCGGSVLAPRWVVTAAHCMHSFRLARLSSWRVHAGLVSHSAVRPHQGALVERIIPHPLYSAQNHDYDVALLRLQTALNFSDTVGAVCLPAKEQHFPKGSRCWVSGWGHTHPSHTYSSDMLQDTVVPLFSTQLCNSSCVYSGALTPRMLCAGYLDGRADACQGDSGGPLVCPDGDTWRLVGVVSWGRGCAEPNHPGVYAKVAEFLDWIHDTAQDSLL

SEQ ID NO: 74313 - protein, 174 aa, Homo sapiens
MCNCDHGMYQALVEILIPDVLRPIPSALTQAIRNFAKSLEGWLSNAMNNIPQRMIQTKVAAVSAFAQTLRRYTSLNHLAQAARAVLQNTSQINQMLSDLNRVDFANVQEQASWVCQCDDNMVQRLETDFKMTLQQQSTLEQWAAWLDNVMMQALKPYEGRPSFPKAARQFLLKW

SEQ ID NO: 74314 - protein, 779 aa, Homo sapiens
MVSMSVPDCLSIMTYVSQYYNHFCSPGQAGVSPPRKGLAPCSPPSVAPTPVEPEDVAQGEELSSGSLSEQGTGQTPSSTCAACQQHVHLVQRYLADGRLYHRHCFRCRRCSSTLLPGAYENGPEEGTFVCAEHCARLGPGTRSGTRPGPFSQPKQQHQQQLAEDAKDVPGGGPSSSAPAGAEADGPKASPEARPQIPTKPRVPGKLQELASPPAGRPTPAPRKASESTTPAPPTPRPRSSLQQENLVEQAGSSSLVNGRLHELPVPKPRGTPKPSEGTPAPRKDPPWITLVQAEPKKKPAPLPPSSSPGPPSQDSRQVENGGTEEVAQPSPTASLESKPYNPFEEEEEDKEEEAPAAPSLATSPALGHPESTPKSLHPWYGITPTSSPKTKKRPAPRAPSASPLALHASRLSHSEPPSATPSPALSVESLSSESASQTAGAELLEPPAVPKSSSEPAVHAPGTPGNPVSLSTNSSLASSGELVEPRVEQMPQASPGLAPRTRGSSGPQPAKPCSGATPTPLLLVGDRSPVPSPGSSSPQLQVKSSCKENPFNRKPSPAASPATKKATKGSKPVRPPAPGHGFPLIKRKVQADQYIPEEDIHGEMDTIERRLDALEHRGVLLEEKLRGGLNEGREDDMLVDWFKLIHEKHLLVRRESELIYVFKQQNLEQRQADVEYELRCLLNKPEKDWTEEDRAREKVLMQELVTLIEQRNAIINCLDEDRQREEEEDKMLEAMIKKKEFQREAEPEGKKKGKFKTMKMLKLLGNKRDAKSKSPRDKS

SEQ ID NO: 74315 - protein, 74 aa, Homo sapiens
MALKRIQKELTDLQRDPPAQCSAGPVGDDLFHWQATIMGPNDSPYQGGVFFLTIHFPTDYPFKPPKVRSLSQLP

SEQ ID NO: 74316 - protein, 59 aa, Homo sapiens
MELLQWEAVRYINENLIVNTDELGRDCLINAAKTSMSSKIIGINGDFFANMVVDAVLAI

SEQ ID NO: 74317 - protein, 824 aa, Homo sapiens
MEVDTEEKRHRTRSKGVRVPVEPAIQELFSCPTPGCDGSGHVSGKYARHRSVYGCPLAKKRKTQDKQPQEPAPKRKPFAVKADSSSVDECDDSDGTEDMDEKEEDEGEEYSEDNDEPGDEDEEDEEGDREEEEEIEEEDEDDDEDGEDVEDEEEEEEEEEEEEEEEENDPSRTEKKESKCPTPGCDGTGHVTGLYPHHRSLSGCPHKDRVPPEILAMHESVLKCPTPGCTGRGHVNSNRNSHRSLSGCPIAAAEKLAKAQEKHQSCDVSKSSQASDRVLRPMCFVKQLEIPQYGYRNNVPTTTPRSNLAKELEKYSKTSFEYNSYDNHTYGKRAIAPKVQTRDISPKGYDDAKRYCKDPSPSSSSTSSYAPSSSSNLSCGGGSSASSTCSKSSFDYTHDMEAAHMAATAILNLSTRCREMPQNLSTKPQDLCATRNPDMEVDENGTLDLSMNKQRPRDSCCPILTPLEPMSPQQQAVMNNRCFQLGEGDCWDLPVDYTKMKPRRIDEDESKDITPEDLDPFQEALEERRYPGEVTIPSPKPKYPQCKESKKDLITLSGCPLADKSIRSMLATSSQELKCPTPGCDGSGHITGNYASHRSLSGCPRAKKSGIRIAQSKEDKEDQEPIRCPVPGCDGQGHITGKYASHRSASGCPLAAKRQKDGYLNGSQFSWKSVKTEGMSCPTPGCDGSGHVSGSFLTHRSLSGCPRATSAMKKAKLSGEQMLTIKQRASNGIENDEEIKQLDEEIKELNESNSQMEADMIKLRTQVTITTMESNLKTIEEENKVIEQQNESLLHELANLSQSLIHSLANIQLPHMEDGVWWGQ

SEQ ID NO: 74318 - protein, 110 aa, Homo sapiens
  MOD_RES (1)..(1): Any amino acid
XSPRVPDGRKKLRGKKMAPLKIKLGLLGGKRKKGGSYVFQSDEGPEPEAEESDLDSGSVHSASGRPDGPVRTKKLKRGRPGRKKKKVAGEEEVDGYETDHQDYCEVCQQG

SEQ ID NO: 74319 - protein, 829 aa, Homo sapiens
MKKWSSTDLGAAADPLQKDTCPDPLDGDPNSRPPPAKPQLSTAKSRTRLFGKGDSEEAFPVDCPHEEGELDSCPTITVSPVITIQRPGDGPTGARLLSQDSVAASTEKTLRLYDRRSIFEAVAQNNCQDLESLLLFLQKSKKHLTDNEFKDPETGKTCLLKAMLNLHDGQNTTIPLLLEIARQTDSLKELVNASYTDSYYKGQTALHIAIERRNMALVTLLVENGADVQAAAHGDFFKKTKGRPGFYFGELPLSLAACTNQLGIVKFLLQNSWQTADISARDSVGNTVLHALVEVADNTADNTKFVTSMYNEILMLGAKLHPTLKLEELTNKKGMTPLALAAGTGKIGVLAYILQREIQEPECRHLSRKFTEWAYGPVHSSLYDLSCIDTCEKNSVLENRHDMLLVEPLNRLLQDKWDRFVKRIFYFNFLVYCLYMIIFTMAAYYRPVDGLPPFKMEKTGDYFRVTGEILSVLGGVYFFFRGIQYFLQRRPSMKTLFVDSYSEMLFFLQSLFMLATVVLYFSHLKEYVASMVFSLALGWTNMLYYTRGFQQMGIYAVMIEKMILRDLCRFMFVYIVFLFGFSTAVVTLIEDGKNDSLPSESTSHRWRGPACRPPDSSYNSLYSTCLELFKFTIGMGDLEFTENYDFKAVFIILLLAYVILTYILLLNMLIALMGETVNKIAQESKNIWKLQRAITILDTEKSFLKCMRKAFRSGKLLQVGYTPDGKDDYRWCFRVDEVNWTTWNTNVGIINEDPGNCEGVKRTLSFSLRSSRVSGRHWKNFALVPLLREASARDRQSAQPEEVYLRQFSGSLKPEDAEVFKSPAASGEK

SEQ ID NO: 74320 - protein, 70 aa, Homo sapiens
MKKLSGHPNIVQFCSAASIGKEESDTGQAEFLLLTELCKGQLVEFLKKMESRGPLSCDTVLKIFYQTCRA

SEQ ID NO: 74321 - protein, 139 aa, Homo sapiens
GLSSLWRLFRGKKWNVLRQRVDSCSYDLDQLRLLVVAVQGLIHLLVDLINSLPLYSLGLRLCRPYRLAAGVKFRVLRHEAGRPLRLLMQINPLPYSRVVHTYRLPSCGCHPKHSWGALCRKLFLGELIYPWRQRGDKQD

SEQ ID NO: 74322 - protein, 144 aa, Homo sapiens
MSIVIPLGVDTAETSYLEMAAGSEPESVEASPVVVEKSNSYPHQLYTSSSHHSHSYIGLPYADHNYGARPPPTPPASPPPSVLISKNEVGIFTTPNFDETSSATTISTSEDGSYGTDVTRCICGFTHDDGYMICCDKCSTLESP

SEQ ID NO: 74323 - protein, 53 aa, Homo sapiens
MLPCLALLLLMELSVCTVAGDGGEEQTLSTEAETWVIVALEVLLGRGSDEGRG

SEQ ID NO: 74324 - protein, 66 aa, Homo sapiens
MKSLKAKFRKSDTNEWNKNDDRLLQAVENGDAEKVASLLGKKGASATKHDISILLLQKDTWNASGS

SEQ ID NO: 74325 - protein, 1086 aa, Homo sapiens
MLEARPPRTQGSDAAGAAAGRGLRALLLSLTAAAGIWGSMGERSAYQRLAGGEEGPQRLGGGRMQPEEGTGWLLELLSEVQLQQYFLRLRDDLNVTRLSHFEYVKNEDLEKIGMGRPGQRRLWEAVKRRKALCKRKSWMSKVFSGKRLEAEFPPHHSQSTFRKTSPAPGGPAGEGPLQSLTCLIGEKDLRLLEKLGDGSFGVVRRGEWDAPSGKTVSVAVKCLKPDVLSQPEAMDDFIREVNAMHSLDHRNLIRLYGVVLTPPMKMVTELAPLGSLLDRLRKHQGHFLLGTLSRYAVQVAEGMGYLESKRFIHRDLAARNLLLATRDLVKIGDFGLMRALPQNDDHYVMQEHRKVPFAWCAPESLKTRTFSHASDTWMFGVTLWEMFTYGQEPWIGLNGSQILHKIDKEGERLPRPEDCPQDIYNVMVQCWAHKPEDRPTFVALRDFLLEAQPTDMRALQDFEEPDKLHIQMNDVITVIEGRAENYWWRGQNTRTLCVGPFPRNVVTSVAGLSAQDISQPLQNSFIHTGHGDSDPRHCWGFPDRIDELYLGNPMDPPDLLSVELSTSRPPQHLGGVKREPPPRPPQPAFFTQKPTYDPVSEDQDPLSSDFKRLGLRKPGLPRGLWLAKPSARVPGTKASRGSGAEVTLIDFGEEPVVPALRPCAPSLAQLAMDACSLLDETPPQSPTRALPRPLHPTPVVDWDARPLPPPPAYDDVAQDEDDFEICSINSTLVGAGVPAGPSQGQTNYAFVPEQARPPPPLEDNLFLPPQGGGKPPSSAQTAEIFQALQQECMRQLQAPAGSPAPSPSPGGDDKPQVPPRVPIPPRPTRPHVQLSPAPPGEEETSQWPGPASPPRVPPREPLSPQGSRTPSPLVPPGSSPLPPRLSSSPGKTMPTTQSFASDPKYATPQVIQAPGPRAGPCILPIVRDGKKVSSTHYYLLPERPSYLERYQRFLREAQSPEEPTPLPVPLLLPPPSTPAPAAPTATVRPMPQAALDPKANFSTNNSNPGARPPPPRATARLPQRGCPGDGPEAGRPADKIQMVEQLFGLGLRPRGECHKVLEMFDWNLEQAGCHLLGSWGPAHHKR

SEQ ID NO: 74326 - protein, 84 aa, Homo sapiens
MAAAVLTDRAQVSVTFDDVAVTFTKEEWGQLDLAQRTLYQEVMLENCGLLVSLAPLQTHPGSIRCILQSNQVDTLIKIPEHTEH

SEQ ID NO: 74327 - protein, 236 aa, Homo sapiens
MVPALRYLVGACGRARGLFAGGSPGACGFASGRPRPLCGGSRSASTSSFDIVIVGGGIVGLASARALILRHPSLSIGVLEKEKDLAVHQTGHNSGVIHSGIYYKPESLKAKLCVQGAALLYEYCQQKGISYKQCGKLIVAVEQEEIPRLQALYEKGLQNGVPGLRLIQQEDIKKKEPYCRGLMAIDCPHTGIVDYRQVALSFAQDFQEAGGSVLTNFEVKGIEMAKESPSRSIDAE

SEQ ID NO: 74328 - protein, 329 aa, Homo sapiens
MALTPPLLLLSAGTMTLGSPRKGLLMLLMALVTQGKGRYGEVWRGLWHGESVAVKIFSSRDEQSWFRETEIYNTVLLRHDNILGFIASDMTSRNSSTQLWLITHYHEHGSLYDFLQRQTLEPHLALRLAVSAACGLAHLHVEIFGTQGKPAIAHRDFKSRNVLVKSNLQCCIADLGLAVMHSQGSDYLDIGNNPRVGTKRYMAPEVLDEQIRTDCFESYKWTDIWAFGLVLWEIARRTIVNGIVEDYRPPFYDVVPNDPSFEDMKKVVCVDQQTPTIPNRLAADPVLSGLAQMMRECWYPNPSARLTALRIKKTLQKISNSPEKPKVIQ

SEQ ID NO: 74329 - protein, 190 aa, Homo sapiens
MMASPFALLMALVVLSCKSSCSLGCDLPETHSLDNRRTLMLLAQMSRISPSSCLMDRHDFGFPQEEFDGNQFQKAPAISVLHELIQQIFNLFTTKDSSAAWDEDLLDKFCTELYQQLNDLEACVMQEERVGETPLMNADSILAVKKYFRRITLYLTEKKYSPCAWEVVRAEIMRSLSLSTNLQERLRRKE

SEQ ID NO: 74330 - protein, 85 aa, Homo sapiens
MSSVMVESWTGLPKGEAEASSSELLEFLHMAPGEVTITVRLIRSFEHRNFKPVVYHGVNLDQTVKEFIVFLKQDIPLRTNLPPPF

SEQ ID NO: 74331 - protein, 680 aa, Homo sapiens
MKYQEVRCLTSFNISVSFPAETDDYAEIIDEEDTYTMPSTRDYEIQRERIELGRCIGEGQFGDVHQGIYMSPENPALAVAIKTCKNCTSDSVREKFLQEALTMRQFDHPHIVKLIGVITENPVWIIMELCTLGELRSFLQVRKYSLDLASLILYAYQLSTALAYLESKRFVHRDIAARNVLVSSNDCVKLGDFGLSRYMEDSTYYKASKGKLPIKWMAPESINFRRFTSASDVWMFGVCMWEILMHGVKPFQGVKNNDVIGRIENGERLPMPPNCPPTLYSLMTKCWAYDPSRRPRFTELKAQLSTILEEEKAQQEERMRMESRRQATVSWDSGGSDEAPPKPSRPGYPSPRSSEGFYPSPQHMVQTNHYQVSGYPGSHGITAMAGSIYPGQASLLDQTDSWNHRPQEIAMWQPNVEDSTVLDLRGIGQVLPTHLMEERLIRQQQEMEEDQRWLEKEERFLKPDVRLSRGSIDREDGSLQGPIGNQHIYQPVGKPDPAAPPKKPPRPGAPGHLGSLASLSSPADSYNEGVKLQPQEISPPPTANLDRSNDKVYENVTGLVKAVIEMSSKIQPAPPEEYVPMVKEVGLALRTLLATVDETIPLLPASTHREIEMAQKLLNSDLGELINKMKLAQQYVMTSLQQEYKKQMLTAAHALAVDAKNLLDVIDQARLKMLGQTRPH

SEQ ID NO: 74332 - protein, 47 aa, Homo sapiens
MKASAALLCLLLTAAAFSPQGLAQPASRPNWTRRSVLTPHRSGSRTL

SEQ ID NO: 74333 - protein, 174 aa, Homo sapiens
MTHCCSPCCQPTCCRTTCCRTTCWKPTTVTTCSSTPCCQPACCVSSCCQPCCRPTCCQNTCCRTTCCQPTCVTSCCQPSCCSTTCCQPTCCGSSCCGQTSCGSSCGQSSSCAPVYCRRTCYYPTTVCLPGCLNQSCGSNCCQPCCRPACCETTCCRTTCFQPTCVSSCCQPSCC

SEQ ID NO: 74334 - protein, 779 aa, Homo sapiens
MSQWYELQQLDSKFLEQVHQLYDDSFPMEIRQYLAQWLEKQDWEHAANDVSFATIRFHDLLSQLDDQYSRFSLENNFLLQHNIRKSKRNLQDNFQEDPIQMSMIIYSCLKEERKILENAQRFNQAQSGNIQSTVMLDKQKELDSKVRNVKDKVMCIEHEIKSLEDLQDEYDFKCKTLQNREHETNGVAKSDQKQEQLLLKKMYLMLDNKRKEVVHKIIELLNVTELTQNALINDELVEWKRRQQSACIGGPPNACLDQLQNWFTIVAESLQQVRQQLKKLEELEQKYTYEHDPITKNKQVLWDRTFSLFQQLIQSSFVVERQPCMPTHPQRPLVLKTGVQFTVKLRLLVKLQELNYNLKVKVLFDKDVNERNTVKGFRKFNILGTHTKVMNMEESTNGSLAAEFRHLQLKEQKNAGTRTNEGPLIVTEELHSLSFETQLCQPGLVIDLETTSLPVVVISNVSQLPSGWASILWYNMLVAEPRNLSFFLTPPCARWAQLSEVLSWQFSSVTKRGLNVDQLNMLGEKLLGPNASPDGLIPWTRFCKENINDKNFPFWLWIESILELIKKHLLPLWNDGCIMGFISKERERALLKDQQPGTFLLRFSESSREGAITFTWVERSQNGGEPDFHAVEPYTKKELSAVTFPDIIRNYKVMAAENIPENPLKYLYPNIDKDHAFGKYYSRPKEAPEPMELDGPKGTGYIKTELISVSEVHPSRLQTTDNLLPMSPEEFDEVSRIVGSVEFDSMALALLPRLECRAAIMAHCSLDLPSSTDPPNSAS

SEQ ID NO: 74335 - protein, 129 aa, Homo sapiens
MRRSPQWGRPWSTRGSCTWACSTPRRTTRLPHFSKVRAHRGPSTGSPCVTSAFPNQLCRYGYVTNSKVKFVMVVDSSNTALRDNEIRSMFRKLHNSYTDVMCNPFYNPGDRIQSRAFDNMVTSMMIQVC

SEQ ID NO: 74336 - protein, 105 aa, Homo sapiens
MSDPEMGWVPEPPTMTLGASRVELRVSCHGLLDRDTLTKPHPCVLLKLYSDEQWVEVERTEVLRSCSSPVFSRVLALEYFFEEKQPLQFHVFDAEDGATSPRNDT

SEQ ID NO: 74337 - protein, 48 aa, Homo sapiens
MREFEVLKKLNHKNIVKLFAIEEETTTRHKVLIMEFCPCGSLYTVLEE

SEQ ID NO: 74338 - protein, 111 aa, Homo sapiens
MAAPTPARPVLTHLLVALFGMGSWAAVNGIWVELPVVVKELPEGAVVGAVSWRVLLREGGSQLPAAWRGPAGIAGSRRGHPGGLSARRCCYVPPDQHLSRVPQQKGLCRPL

SEQ ID NO: 74339 - protein, 91 aa, Homo sapiens
MLEMLEYNHYQVQTHLENPTKYHIQQAQRQQVKQYLSTTLANKHANQVLSLPCPNQPGDHVMPPVPGSSAPNSPMAMLTLNSNCEKEFMKQ

SEQ ID NO: 74340 - protein, 190 aa, Homo sapiens
MAGREGEHETLDPGPAGTRPPSGEDGAGKTSLIRKIQGIEEYKKGRGLEYLYLNVHDEDRDDQTRCNVWILDGDLYHKGLLKFSLDAVSLKDTLVMLVVDMSKPWTALDSLQKWASVVREHVDKLKIPPEEMKQMEQKLIRDFQEYVEPGEDFPASPQRRNTASQEDKDDSVVLPLGADTLTHNLGIPVL

SEQ ID NO: 74341 - protein, 92 aa, Homo sapiens
MHRDAWLPRPAFSLTGLSLFFSLGTRNSFQPLGLGPWEYTCLGTRLAQNFNGLTLSLQCHQDGAWRSQYLPPSTSSMALTPACPAPSTPATQ

SEQ ID NO: 74342 - protein, 212 aa, Homo sapiens; identical to SEQ ID NO: 43344

SEQ ID NO: 74343 - protein, 186 aa, Homo sapiens
AAAQQRSHPAMSPGTPGPTMGRSQGSPMDPMVMKRPQLYGMGSNPHSQPQQSSPYPGGSYGPPGPQRYPIGIQGRTPGAMAGMQYPQQQMPPQYGQQGVSGYCQQGQQPYYSQQPQPPHLPPQAQYLPSQSQQRYQPQQDMSQEGYGTRSQPPLAPGKPNHEDLNLIQQERPSSLPVRHYCADLEM

SEQ ID NO: 74344 - protein, 161 aa, Homo sapiens
  MOD_RES (1)..(1): Any amino acid
XSTEIPPYVMKCPSNGLCSRLPADCIDCTTNFSCTYGKPVTFDCAVKPSVTCVDQDFKSQKNFIINMTCRFCWQLPETDYECTNSTSCMTVSCPRQRYPANCTVRDHVHCLGNRTFPKMLYCNWTGGYKWSTALALRVGLFIDTVTTPLHSSLSHRARHCL

SEQ ID NO: 74345 - protein, 156 aa, Homo sapiens
  MOD_RES (1)..(1): Any amino acid
XMLRSSLRFPITNSAGLQLWDTAGQERFKCIASTYYRGAQAIIIVFNLNDVASLEHTKQWLADALKENDPSSVLLFLTPAQYALMEKDALQVAQEMKAEYWAVSSLTGENVREFFFRVAALTFEANVLAELEKSGARRIGDVVRINSDDSNLYLTA

SEQ ID NO: 74346 - protein, 77 aa, Homo sapiens
MDFVMKQALGGATKDMGKMLGGEEEKDPDAQKKEEERQEALRQQEEERKAKHARMEAEREKVRQQIRDKYGLKKKEE

SEQ ID NO: 74347 - protein, 483 aa, Homo sapiens
MLNNLLLFSLQISLIGTTLGGNVLIWPMEGSHWLNVKIIIDELIKKEHNVTVLVASGALFITPTSNPSLTFEIYKVPFGKERIEGVIKDFVLTWLENRPSPSTIWRFYQEMAKVIKDFHMVSQEICDGVLKNQQLMAKLKKSKFEVLVSDPVFPCGDIVALKLGIPFMYSLRFSPASTVEKHCGKVPYPPSYVPAVLSELTDQMSFTDRIRNFISYHLQDYMFETLWKSWDSYYSKALGRPTTLCETMGKAEIWLIRTYWDFEFPRPYLPNFEFVGGLHCKPAKPLPKVLWRYKGKKPATLGNNTQLFDWIPQNDLLGHPKTKAFITHGGTNGIYEAIYHGVPMVGVPMFADQPDNIAHMKAKGAAVEVNLNTMTSVDLLSALRTVINEPSYKENAMRLSRIHHDQPVKPLDRAVFWIEFVMRHKGAKHLRVAAHDLTWFQYHSLDVIGFLLVCVTTAIFLVIQCCLFSCQKFGKIGKKKKRE

SEQ ID NO: 74348 - protein, 347 aa, Homo sapiens
MDTRSGSQCSVTPEAIRNNEELVLPPRISRVNGWSLPLHYFRVVTWAVFVGLSLATFRIFIPLLPHSWKYIAYVVTGGIFSFHLVVHLIASCIDPADSNVRLMKNYSQPMPLFDRSKHAHVIQNQFCHLCKVTVNKKTKHCISCNKCVSGFDHHCKWINNCVGSRNYWFFFSTVASATAGMLCLIAILLYVLVQYLVNPRVLRTDPRYEAGRQSPACLRLQESAGEAAPTRHHLMYLLQQRQDPDQEDLGQRSPSGCRTRLPVSAPGMAAPALHTARVVRQGGLACPCSRTFRSQHGVTFFSRMSFASSTWKSLKLLLPLRSVTDASRASQPLLKHFLKASSTLARP

SEQ ID NO: 74349 - protein, 59 aa, Homo sapiens
MDEDVLTTLKILIIGESGVGKSSLLLRFTDDTFDPELAATIGYFASADCKLFLKEPDRK

SEQ ID NO: 74350 - protein, 1206 aa, Homo sapiens
MAKPYEFNWQKEVPSFLQEGAVFDRYEEESFVFEPNCLFKVDEFGFFLTWRSEGKEGQVLECSLINSIRSGAIPKDPKILAALEAVGKSENDLEGRIVCVCSGTDLVNISFTYMVAENPEVTKQWVEGLRSIIHNFRANNVSPMTCLKKHWMKLAFMTNTNGKIPVRSITRTFASGKTEKVIFQALKELGLPSGKNDEIEPTAFSYEKFYELTQKICPRTDIEDLFKKINGDKTDYLTVDQLVSFLNEHQRDPRLNEILFPFYDAKRAMQIIEMYEPDEDLKKKGLISSDGFCRYLMSDENAPVFLDRLELYQEMDHPLAHYFISSSHNTYLTGRQFGGKSSVEMYRQVLLAGCRCVELDCWDGKGEDQEPIITHGKAMCTDILFKDVIQAIKETAFVTSEYPVILSFENHCSKYQQYKMSKYCEDLFGDLLLKQALESHPLEPGRALPSPNDLKRKILIKNKRLKPEVEKKQLEALRSMMEAGESASPANILEDDNEEEIESADQEEEAHPEFKFGNELSADDLGHKEAVANSVKKASDDLEHENNKKGLVTVEDEQAWMASYKYVGATTNIHPYLSTMINYAQPVKFQGFHVAEERNIHYNMSSFNESVGLGYLKTHAIEFVNYNKRQMSRIYPKGGRVDSSNYMPQIFWNAGCQMVSLNYQTPDLAMQLNQGKFEYNGSCGYLLKPDFMRRPDRTFDPFSETPVDGVIAATCSVQVISGQFLSDKKIGTYVEVDMYGLPTDTIRKEFRTRMVMNNGLNPVYNEESFVFRKVILPDLAVLRIAVYDDNNKLIGQRILPLDGLQAGYRHISLRNEGNKPLSLPTIFCNIVLKTYVPDGFGDIVDALSDPKKFLSITEKRADQMRAMGIETSDIADVPSDTSKNDKKGKANTAKANVTPQSSSELRPTTTAALASGVEAKKGIELIPQVRIEDLKQMKAYLKHLKKQQKELNSLKKKHAKEHSTMQKLHCTQVDKIVAQYDKEKSTHEKILEKAMKKKGGSNCLEMKKETEIKIQTLTSDHKSKVKEIVAQHTKEWSEMINTHSAEEQEIRDLHLSQQCELLKKLLINAHEQQTQQLKLSHDRESKEMRAHQAKISMENSKAISQDKSIKNKAERERRVRELNSSNTKKFLEERKRLAMKQSKEMDQLKKVQLEHLEFLEKQNEQLLKSCHAVSQTQGEGDAADGEIGSRDGPQTSNSSMKLQNAN

SEQ ID NO: 74351 - protein, 49 aa, Homo sapiens
MSPEKQHREEDEVDSVLLSASKILNSSEGVKESGCSDTDKETGTERLTP

SEQ ID NO: 74352 - protein, 19 aa, Homo sapiens
MGNLEIVLTGHNADLSFLQ

SEQ ID NO: 74353 - protein, 420 aa, Homo sapiens
MAPAGVSLRATILCLLAWAGLAAGDRVYIHPFHLVIHNESTCEQLAKANAGKPKDPTFIPAPIQAKTSPVDEKALQDQLVLVAAKLDTEDKLRAAMVGMLANFLGFRIYGMHSELWGVVHGATVLSPTAVFGTLASLYLGALDHTADRLQAILGVPWKDKNCTSRLDAHKVLSALQAVQGLLVAQGRADSQAQLLLSTVVGVFTAPGLHLKQPFVQGLALYTPVVLPRSLDFTELDVAAEKIDRFMQAVTGWKTGCSLMGASVDSTLAFNTYVHFQGKMKGFSLLAEPQEFWVDNSTSVSVPMLSGMGTFQHWSDIQDNFSVTQVPFTESACLLLIQPHYASDLDKVEGLTFQQNSLNWMKKLSPRTIHLTMPQLVLQGSYDLQDLLAQAELPAILHTELNLQKLSNDRIRVGEGPPGFL

SEQ ID NO: 74354 - protein, 218 aa, Homo sapiens
MADDAGAAGGPGGPGGPGMGNRGGFRGGFGSGIRGRGRGRGRGRGRGRGARGGKAEDKEWMPVTKLGRLVKDMKIKSLEEIYLFSLPIKESEIIDFFLGASLKDEVLKIMPVQKQTRAGQRTRFKAFVAIGDYNGHVGLGVKCSKEVATAIRGAIILAKLSIVPVRRGYWGNKIGKPHTVPCKVTGRCGSVLVRLIPAPRGTGIVSAPVPKKLLMMAG

SEQ ID NO: 74355 - protein, 149 aa, Homo sapiens
CASTRYAKELSMVRIPSRAAARFLARKLNRSEAYIAENVLALDIFFEALNYETVEQKKAYEMSELLGDIGGQMGLFIGASLLTILEILDYLCEVFRDKVLGYFWNRQHSQRHSSTNLLQEGLGSHRTQVPHLSLGPSSRPAVCVLGAPP

SEQ ID NO: 74356 - protein, 213 aa, Homo sapiens
MDNRFATAFVIACVLSLISTIYMAASIGTDFWYEYRSPVQENSSDLNKSIWDEFISDEADEKTYNDALFRYNGTVGLWRRCITIPKNMHWYSPPERTESFDVVTKCVSFTLTEQFMEKFVDPGNHNSGIDLLRTYLWRCQFLLPFVSLGLMCFGALIGLCACICRSLYPTIATGILHLLAGLCTLGSVSCYVAGIELLHQKLELPDNVSGEFG

SEQ ID NO: 74357 - protein, 1044 aa, Homo sapiens
MLQMVKTLAQFTIALEDMRDMGPAAASGEPAGGSSTDAEEPGEAQDMRKHVAMTLLDTEQSYVESLRTLMQGYMQPLKQPENSVLCDPSLVDEIFDQIPELLEHHEQFLEQVRHCMQTWHAQQKVGALLVQSFSKDVLVNIYSAYIDNFLNAKDAVRVAKEARPAFLKFLEQSMRENKEKQALSDLMIKPVQRIPRYELLVKDLLKHTPEDHPDHPLLLEAQRNIKQVAERINKGVRSAEEAERHARVLQEIEAHIEGMEDLQAPLRRFLRQEMVIEVKAIGGKKDRSLFLFTDLIVCTTLKRKSGSLRRSSMSLYTAASVIDTASKYKMLWKLPLEDADIIKGASQATNRENIQKAISRLDEDLTTLGQMSKLSESLGFPHQSLDDALRDLSAAMHRDLSEKQALCYALSFPPTKLELCATRPEGTDSYIFEFPHPDARLGFEQAFDEAKRKLASSKSCLDPEFLKAIPIMKTRSGMQFSCAAPTLNSCPEPSPEVWVCNSDGYVGQVCLLSLRAEPDVEACIAVCSARILCIGAVPGLQPRCHREPPPSLRSPPETAPEPAGPELDVEAAADEEAATLAEPGPQPCLHISIAGSGLEMTPGLGEGDPRPELVPFDSDSDDESSPSPSGTLQSQASRSTISSSFGNEETPSSKEATAETTSSEEEQEPGFLPLSGSFGPGGPCGTSPMDGRALRRSSHGSFTRGSLEDLLSVDPEAYQSSVWLGTEDGCVHVYQSSDSIRDRRNSMKLQHAASVTCILYLNNQVFVSLANGELVVYQREAGHFWDPQNFKSVTLGTQGSPITKMVSVGGRLWCGCQNRVLVLSPDTLQLEHMFYVGQDSSRCVACMVDSSLGVWVTLKGSAHVCLYHPDTFEQLAEVDVTPPVHRMLAGSDAIIRQHKAACLRITALLVCEELLWVGTSAGVVLTMPTSPGTVSCPRAPLSPTGLGQGHTGHVRFLAAVQLPDGFNLLCPTPPPPPDTGPEKLPSLEHRDSPWHRGPAPARPKMLVISGGDGYEDFRLSSGGGSSSETVGRDDSTNHLLLWRV

SEQ ID NO: 74358 - protein, 142 aa, Homo sapiens
MLAPEGALNIHEKAWNAYPYCRTVITNEYMKEDFLIKIETWHKPDLGTQENVHKLEPEAWKHVEAVYIDIADRSQVLSKDYKAEEDPAKFKSIKTGRGPLGPNWKQELVNQKDCPYMCAYKLVTVKFKWWGLQNKVENFIHK

SEQ ID NO: 74359 - protein, 643 aa, Homo sapiens
LERSPPQSPGPGKAGDAPNRRSGHVRGARVLSPPGRRARLSSPGPSRSSEAREELRRHLVGLIERSRVVIFSKSYCPHSTRVKELFSSLGVECNVLELDQVDDGARVQEVLSEITNQKTVPNIFVNKVHVGGCDQTFQAYQSGLLQKLLQEDLAYDYDLIIIGGGSGGLSCAKEAAILGKKVMVLDFVVPSPQGTSWGLGGTCVNVGCIPKKLMHQAALLGQALCDSRKFGWEYNQQVRHNWETMTKAIQNHISSLNWGYRLSLREKAVAYVNSYGEFVEHHKIKATNKKGQETYYTAAQFVIATGERPRYLGIQGDKEYCITSDDLFSLPYCPGKTLVVGASYVALECAGFLAGFGLDVTVMVRSILLRGFDQEMAEKVGSYMEQHGVKFLRKFIPVMVQQLEKGSPGKLKVLAKSTEGTETIEGVYNTVLLAIGRDSCTRKIGLEKIGVKINEKSGKIPVNDVEQTNVPYVYAVGDILEDKPELTPVAIQSGKLLAQRLFGASLEKCDYINVPTTVFTPLEYGCCGLSEEKAIEVYKKENLEIYHTLFWPLEWTVAGRENNTCYAKIICNKFDHDRVIGFHILGPNAGEVTQGFAAAMKCGLTKQLLDDTIGIHPTCGEVFTTLEITKSSGLDITQKGCCG

SEQ ID NO: 74360 - protein, 346 aa, Homo sapiens
MTQQPLRGVTSLRFNQDQSCFCCAMETGVRIYNVEPLMEKGHLDHEQVGSMGLVEMLHRSNLLALVGGGSSPKFSEISVLIWDDAREGKDSKEKLVLEFTFTKPVLSVRMRHDKIVIVLKNRIYVYSFPDNPRKLFEFDTRDNPKGLCDLCPSLEKQLLVFPGHKCGSLQLVDLASTKPGTSSAPFTINAHQSDIACVSLNQPGTVVASASQKGTLIRLFDTQSKEKLVELRRGTDPATLYCDKGTVHIFALKDTRLNRRSALARVGKVGPMIGQYVDSQWSLASFTVPAESACICAFGRNTSKNVNSVIAICVDGTFHKYVFTPDGNCNREAFDVYLDICDDDDF

SEQ ID NO: 74361 - protein, 99 aa, Homo sapiens
MSKSFQQSSLSRDSQGHGRDLSAAGIGLLAAATQSLSMPASLGRMNQGTARLASLMNLGMSSSLNQQGAHSALSSASTSSHNLQSIFNIGSRGPLPLSS

SEQ ID NO: 74362 - protein, 60 aa, Homo sapiens
LQPKVRRSFSDEEGSSEDLLELSDVDSESSDIRCGLPAAFLPPVLGLHPDRLLRLPGPVL

SEQ ID NO: 74363 - protein, 160 aa, Homo sapiens
MHEIEKFQKGEGKDEEKYIDVVINKNMKLGQKVLIPVKQFPKFNFVGKLLGPRGNSLKRLQEETLTKMSILGKGSMRDKAKEEELRKSGEAKYFHLNDDLHVLIEVFAPPAEAYARMGHALEEIKKFLIPDYNDEIRQAQLQELTYLNGGSENADVPVVR

SEQ ID NO: 74364 - protein, 70 aa, Homo sapiens
FWTWMFSTYFMEKWAPRQDDMLFYVRRKLAYSGSESGADGRKIPALPLGGAGLCTCKRAQQCPAPRSPSQ

SEQ ID NO: 74365 - protein, 256 aa, Homo sapiens
MLKRKQSSRVEAQPVTDFGPDESLSDNADILWINKPWVHSLLRICAIISVISVCMNTPMTFEHYPPLQYVTFTLDTLLMFLYTAEMIAKMHIRGIVKGDSSYVKDRWCVFDGFMVFCLWVSLVLQVFEIADIVDQMSPWGMLRIPRPLIMIRAFRIYFRFELPRTRITNILKRSGEQIWSVSIFLLFFLLLYGILGVQMFGTFTYHCVVNDTKPGNVTWNSLAIPDTHCSPELEEGYQCPPGFKCMDLEDLGLSRN

SEQ ID NO: 74366 - protein, 113 aa, Homo sapiens
  MOD_RES (1)..(1): Any amino acid
XQTQQEVKLRMTGMALRVVRTDGILALYSGLSASLCRQMTYSLTRFAIYETVRDRVAKGSQGPLPFHEKVLLGSVSGLAGGFVGTPADLVNVRMQNDVKLPQGQRRKERSSGP

SEQ ID NO: 74367 - protein, 415 aa, Homo sapiens
MLTFMASDSEEEVCDERTSLMSAESPTPRSCQEGRQGPEDGENTAQWRSQENEEDGEEDPDRYVCSGVPGRPPGLEEELTLKYGAKHVIMLFVPVTLCMIVVVATIKSVRFYTEKNGQLIYTPFTEDTPSVGQRLLNSVLNTLIMISVIVVMTIFLVVLYKYRCYKFIHGWLIMSSLMLLFLFTYIYLGEVLKTYNVAMDYPTLLLTVWNFGAVGMVCIHWKGPLVLQQAYLIMISALMALVFIKYLPEWSAWVILGAISVYAAMVWTVGMAKLDPSSQGALQLPYDPEMEEDSYDSFGEPSYPEVFEPPLTGYPGEELEEEEERGVKLGLGDFIFYSVLVGKAAATGSGDWNTTLACFVAILIGLCLTLLLLAVFKKALPALPISITFGLIFYFSTDNLVRPFMDTLASHQLYI

SEQ ID NO: 74368 - protein, 92 aa, Homo sapiens
SPQAPEDGQGCGDRGDPPGDLRSVLVTTVLNLEPLDEDLFRGRHYWVPAKRLFGGQIVGQALVAAAKSVSEDVHVHSLHCYFVRADALMCSA

SEQ ID NO: 74369 - protein, 556 aa, Homo sapiens
EEEAGRIKDCWDNQEAPALSTCSNANIFRRINAILDNSLDFSRVCTTPINRGIHDHLPDFQDSEETVTSRMLFPTSAQESSRGLPDANDLCLGLQSLSLTGWDRPWSTQDSDSSAQSSTHSVLSMLHNPLGNVLGKPPLSFLPLDPLGSDLVDKFPAPSVRGSRLDTRPILDSRSSSPSDSDTSGFSSGSDHLSDLISSLRISPPLPFLSLSGGGPRDPLKMGVGSRMDQEQAALAAVTPSPTSASKRWPGASVWPSWDLLEAPKDPFSIEREARLHRQAAAVNEATCTWSGQLPPRNYKNPIYSCKVFLGGVPWDITEAGLVNTFRVFGSLSVEWPGKDGKHPRCPPKGYVYLVFELEKSVRSLLQACSHDPLSPDGLSEYYFKMSSRRMRCKEVQVIPWVLADSNFVRSPSQRLDPSRTVFVGALHGMLNAEALAAILNDLFGGVVYAGIDTDKHKYPIGSGRVTFNNQRSYLKAVSAAFVEIKTTKFTKKVQIDPYLEDSLCHICSSQPGPFFCRDQVCFKYFCRSCWHWRHSMEGLRHHSPLMRNQKNRDSS

SEQ ID NO: 74370 - protein, 37 aa, Homo sapiens
MFATSGAVAAGKPYSCSECGKSFCYSSVLLRHERAHG

SEQ ID NO: 74371 - protein, 185 aa, Homo sapiens
MGVNQSVGFPPVTGPHLVGCGDVMEGQNLQGSFFRLFYPCQKAEETMEQPLWIPRYEYCTGLAEYLQFNKRCGGLLFNLAVGSCRLPVSWNGPFKTKDSGYPLIIFSHGLGAFRTLYSAFCMELASRGFVVAVPEHRCVYFRDRSAATTYFCKQAPEENQPTNESLQEEWIPFRRVEEGEKEFHV

SEQ ID NO: 74372 - protein, 91 aa, Homo sapiens
MRVHPRPHSRLAAKLAGLEPETPYPGFEFSELVTGATGTGDLTRKEPTELGASEMADEALAGLDEGALRKLLEVTADLAERRRIRSAIREL

SEQ ID NO: 74373 - protein, 72 aa, Homo sapiens
AEEKENHCPTMLRPLSHRTVTGAKPLKKAVVMPLQLIQEQAASPNAEIHILKNKGRKRKQLHEKGANITTGY

SEQ ID NO: 74374 - protein, 166 aa, Homo sapiens
MLKSLQSDILHDADSNDLKVIIISAEGPVFSSGHDLKELTEEQGRDYHAEVFQTCSKVMMHIRNHPVPVIAMVNGLAAAAGCQLVASCDIAVASDKSSFATPGVNVGLFCSTPGVALARAVPRKVALEMLFTGEPISAQEALLHGLLSKVVPEAELQEETMRIARK

SEQ ID NO: 74375 - protein, 495 aa, Homo sapiens
MENEIFTPLLEQFMTSPLVTWVKTFGPLAAGNGTNLDEYVALVDGVFLNQVMLQINPKLESQRVNKKVNNDASLRMHNLSILVRQIKFYYQETLQQLIMMSLPNVLIIGKNPFSEQGTEEVKKLLLLLLGCAVQCQKKEEFIERIQGLDFDTKAAVAAHIQEVTHNQENVFDLQWMEVTDMSQEDIEPLLKNMALHLKRLIDERDEHSENMNLLSDARSARMYRDELDALREKAVRVDKLESEVSRYKERLHDIEFYKARVEELKEDNQVLLETKTMLEDQLEGTRARSDKLHELEKENLQLKAKLHDMEMERDMDRKKIEELMEENMTLEMAQKQSMDESLHLGWELEQISRTSELSEAPQKSLGHEVNELTSSRLLKLEMENQSLTKTVEELRTTVDSVEGNASKILKMEKENQRLSKKVEILENEIVQEKQSLQNCQNLSKDLMKEKAQLEKTIETLRENSERQIKILEQENEHLNQTVSSLRQRSQISAEA

SEQ ID NO: 74376 - protein, 105 aa, Homo sapiens
AHNLLCQQKIQKFQIAQVVRESNAMLREGYKTFFNTLYHNNIPLFIFSAGIGDILEEIIRQMKVFHPNIHIVSNYMDFNEDVSQILFGLGKDEGWGPPARAVNSA

SEQ ID NO: 74377 - protein, 309 aa, Homo sapiens
SSSSDWRVPGQGLENRGEPPTPPSPAPAPAVAPGGSSESSSGRAAGDTPERKEAAGTGKKVKVRPPPLKKTFDSVDKVLSEVDFEERFAELPEFRPEEVLPSPTLQSLATSPRAILGSYRKKRKNSTDLDSAPEDPTSPKRKMRRRSSCSSEPNTPKSAKCEGDIFTFDRTEAEDVLGELEYDKVPYSSLRRTLDQRRALVMQLFQDHGFFPSAQATAAFQARYADIFPSKVCLQLKIREVRQKIMQAATPTEQPPGAEAPLPVPPPTGTAAAPAPTPSPAGGPDPTSPSSDSGTAQAAPPLPPPPESG

SEQ ID NO: 74378 - protein, 38 aa, Homo sapiens
MKLSQAVQSSWLVPEGWKCFLGQDGANRSVYSRCDSHL

SEQ ID NO: 74379 - protein, 1039 aa, Homo sapiens
MALGSDGVRVTMESALTARDRVGVQDFVLLENFTSEAAFIENLRRRFRENLIYTYIGPVLVSVNPYRDLQIYSRQHMERYRGVSFYEVPPHLFAVADTVYRALRTERRDQAVMISGESGAGKTEATKRLLQFYAETCPAPERGGAVRDRLLQSNPVLEAFGNAKTLRNDNSSRFGKYMDVQFDFKGAPVGGHILSYLLEKSRVVHQNHGERNFHIFYQLLEGGEEETLRRLGLERNPQSYLYLVKGQCAKVSSINDKSDWKVVRKALTVIDFTEDEVEDLLSIVASVLHLGNIHFAANEESNAQVTTENQLKYLTRLLSVEGSTLREALTHRKIIAKGEELLSPLNLEQAAYARDALAKAVYSRTFTWLVGKINRSLASKDVESPSWRSTTVLGLLDIYGFEVFQHNSFEQFCINYCNEKLQQLFIELTLKSEQEEYEAEGIAWEPVQYFNNKIICDLVEEKFKGIISILDEECLRPGEATDLTFLEKLEDTVKHHPHFLTHKLADQRTRKSLGRGEFRLLHYAGEVTYSVTGFLDKNNDLLFRNLKETMCSSKNPIMSQCFDRSELSDKKRPETVATQFKMSLLQLVEILQSKEPAYVRCIKPNDAKQPGRFDEVLIRHQVKYLGLLENLRVRRAGFAYRRKYEAFLQRYKSLCPETWPTWAGRPQDGVAVLVRHLGYKPEEYKMGRTKIFIRFPKTLFATEDALEVRRQSLATKIQAAWRGFHWRQKFLRVKRSAICIQSWWRGTLGRRKAAKRKWAAQTIRRLIRGFVLRHAPRCPENAFFLDHVRTSFLLNLRRQLPQNVLDTSWPTPPPALREASELLRELCIKNMVWKYCRSISPEWKQQLQQKAVASEIFKGKKDNYPQSVPRLFISTRLGTDEISPRVLQALGSEPIQYAVPVVKYDRKGYKPRSRQLLLTPNAVVIVEDAKVKQRIDYANLTGISVSSLSDSLFVLHVQRADNKQKGDVVLQSDHVIETLTKTALSANRVNSININQGSITFAGGPGRDGTIDFTPGSELLITKAKNGHLAVVAPRLNSR

SEQ ID NO: 74380 - protein, 26 aa, Homo sapiens
MDIKGQFWNDDDSEGDNESEEFLYGV

SEQ ID NO: 74381 - protein, 1137 aa, Homo sapiens
MSTGDSFETRFEKMDNLLRDPKSEVNSDCLLDGLDALVYDLDFPALRKNKNIDNFLSRYKDTINKIRDLRMKAEDYEVVKVIGRGAFGEVQLVRHKSTRKVYAMKLLSKFEMIKRSDSAFFWEERDIMAFANSPWVVQLFYAFQDDRYLYMVMEYMPGGDLVNLMSNYDVPEKWARFYTAEVVLALDAIHSMGFIHRDVKPDNMLLDKSGHLKLADFGTCMKMNKEGMVRCDTAVGTPDYISPEVLKSQGGDGYYGRECDWWSVGVFLYEMLVGDTPFYADSLVGTYSKIMNHKNSLTFPDDNDISKEAKNLICAFLTDREVRLGRNGVEEIKRHLFFKNDQWAWETLRDTVAPVVPDLSSDIDTSNFDDLEEDKGEEETFPIPKAFVGNQLPFVGFTYYSNRRYLSSANPNDNRTSSNADKSLQESLQKTIYKLEEQLHNEMQLKDEMEQKCRTSNIKLDKIMKELDEEGNQRRNLESTVSQIEKEKMLLQHRINEYQRKAEQENEKRRNVENEVSTLKDQLEDLKKVSQNSQLANEKLSQLQKQLEEANDLLRTESDTAVRLRKSHTEMSKSISQLESLNRELQERNRILENSKSQTDKDYYQLQAILEAERRDRGHDSEMIGDLQARITSLQEEVKHLKHNLEKVEGERKEAQDMLNHSEKEKNNLEIDLNYKLKSLQQRLEQEVNEHKVTKARLTDKHQSIEEAKSVAMCEMEKKLKEEREAREKAENRVVQIEKQCSMLDVDLKQSQQKLEHLTGNKERMEDEVKNLTLQLEQESNKRLLLQNELKTQAFEADNLKGLEKQMKQEINTLLEAKRLLEFELAQLTKQYRGNEGQMRELQDQLEAEQYFSTLYKTQVKELKEEIEEKNRENLKKIQELQNEKETLATQLDLAETKAESEQLARGLLEEQYFELTQESKKAASRNRQEITDKDHTVSRLEEANSMLTKDIEILRRENEELTEKMKKAEEEYKLEKEEEISNLKAAFEKNINTERTLKTQAVNKLAEIMNRKDFKIDRKKANTQDLRKKEKENRKLQLELNQEREKFNQMVVKHQKELNDMQAQLVEECAHRNELQMQLASKESDIEQLRAKLLDLSDSTSVASFPSADETDGNLPVDSACIPYLFIFYSCLLVKN

SEQ ID NO: 74382 - protein, 118 aa, Homo sapiens
MSPSMLTGNSPRGCRLPSISSTTCGRQLEKVPEKRDSGMTEVERTYSANCSDFLESKGCFANTTPSGKSVSSSSSVETGPSVSEPPGLPRVSAYVDTTADLDRKLSFSHSDHSSEMSL

SEQ ID NO: 74383 - protein, 243 aa, Homo sapiens [sequence omitted]

SEQ ID NO: 74384 - protein, 910 aa, Homo sapiens
MSQEDLKEKNLINSSLQEWAQAHAVSHPNEIETVELRKKKLTMRPLVLQKEESSRELCNVNLGFLLPRSCLELNISKSVTREDAPHFLKEQQRKSEEFSTSHMKYSGRSIKFLLPPLSLLPTRSGVLTIPQNHKFPKEKERNIPSLTSFVPKLSVSVRQSDELSPSNEPPGALVKSLMDPTLRSSDGFIWSRNMCSFPKTNHHRQCLEKEENWKSKEIEECNKIEITHFEKGQSLVSFENLKEGNIPAVREEDIDCHGSKTRKPEEENSQYLSSRKNESSVAKNYEQDPEIVCTIPSKFQETQHSEITPSQDEEMRNNKAASKRVSLHKNEAMEPNNILEECTVLKSLSSVVFDDPIDKLPEGCSSMETNIKISIAERAKPEMSRMVPLIHITFPVDGSPKEPVIAKPSLQTRKGTIHNNHSVNIPVHQENDKHKMNSHRSKLDSKTKTSKKTPQNFVISTEGPIKPTMHKTSIKTQIFPALGLVDPRPWQLPRFQKKMPQIAKKQSTHRTQKPKKQSFPCICKNPGTQKSCVPLSVQPTEPRLNYLDLKYSDMFKEINSTANGPGIYEMFGTPVYCHVRETERDENTYYREICSAPSGRRITNKCRSSHSERKSNIRTRLSQKKTHMKCPKTSFGIKQEHKVLISKEKSSKAVHSNLHDIENGDGISEPDWQIKSSGNEFLSSKDEIHPMNLAQTPEQSMKQNEFPPVSDLSIVEEVSMEESTGDRDISNNQILTTSLRDLQELEELHHQIPFIPSEDSWAVPSEKNSNKYVQQEKQNTASLSKVNASRILTNDLEFDSVSDHSKTLTNFSFQAKQESASSQTYQYWVHYLDHDSLANKSITYQMFGKTLSGTNSISQEIMDSVNNEELTDELLGCLAAELLALDEKDNNSCQKMANETDPENLNLVLR

SEQ ID NO: 74385 - protein, 126 aa, Homo sapiens
MATLVVNKLGAGVDSGRQGSRGTAVVKVLECGVCEDVFSLQGDKVPRLLLCGHTVCHDCLTRLPLHGRAIRCPFDRQVTDLGDSGVWGLKKNFALLELLERLQNGPIGQYGAAEESIGISGEFYQE

SEQ ID NO: 74386 - protein, 1084 aa, Homo sapiens
MYGKIAVMELFRPKGESKDLLFILTAKYNACILEYKQSGESIDIITRAHGNVQDRIGRPSETGIIGIIDPECRMIGLRLYDGLFKVIPLDRDNKELKAFNIRLEELHVIDVKFLYGCQAPTICFVYQDPQGRHVKTYEVSLREKEFNKGPWKQENVEAEASMVIAVPEPFGGAIIIGQESITYHNGDKYLAIAPPIIKQSTIVCHNRVDPNGSRYLLGDMEGRLFMLLLEKEEQMDGTVTLKDLRVELLGETSIAECLTYLDNGVVFVGSRLGDSQLVKLNVDSNEQGSYVVAMETFTNLGPIVDMCVVDLERQGQGQLVTCSGAFKEGSLRIIRNGIGIHEHASIDLPGIKGLWPLRSDPNRETDDTLVLSFVGQTRVLMLNGEEVEETELMGFVDDQQTFFCGNVAHQQLIQITSASVRLVSQEPKALVSEWKEPQAKNISVASCNSSQVVVAVGRALYYLQIHPQELRQISHTEMEHEVACLDITPLGDSNGLSPLCAIGLWTDISARILKLPSFELLHKEMLGGEIIPRSILMTTFESSHYLLCALGDGALFYFGLNIETGLLSDRKKVTLGTQPTVLRTFRSLSTTNVFACSDRPTVIYSSNHKLVFSNVNLKEVNYMCPLNSDGYPDSLALANNSTLTIGTIDEIQKLHIRTVPLYESPRKICYQEVSQCFGVLSSRIEVQDTSGGTTALRPSASTQALSSSVSSSKLFSSSTAPHETSFGEEVEVHNLLIIDQHTFEVLHAHQFLQNEYALSLVSCKLGKDPNTYFIVGTAMVYPEEAEPKQGRIVVFQYSDGKLQTVAEKEVKGAVYSMVEFNGKLLASINSTVRLYEWTTEKELRTECNHYNNIMALYLKTKGDFILVGDLMRSVLLLAYKPMEGNFEEIARDFNPNWMSAVEILDDDNFLGAENAFNLFVCQKDSAATTDEERQHLQEVGLFHLGEFVNVFCHGSLVMQNLGETSTPTQGSVLFGTVNGMIGLVTSLSESWYNLLLDMQNRLNKVIKSVGKIEHSFWRSFHTERKTEPATGFIDGDLIESFLDISRPKMQEVVANLQYDDGSGMKREATADDLIKVVEELTRIH

SEQ ID NO: 74387 - protein, 100 aa, Homo sapiens
MAAMPLKAQYQEMVTFEDVAVHFTKTEWTGLSPAQRALYRSVMLENFGNLTALGYPVPKPALISLLERGDMAWGLEAQDDPPAERTKNVCKDESLEFQKS

SEQ ID NO: 74388 - protein, 1058 aa, Homo sapiens [sequence omitted]

SEQ ID NO: 74389 - protein, 223 aa, Homo sapiens
IDLRYEAQNLEHFQVNFRNVKAVKFPTPLRPFVTREVLVETYEESVPVSSYQQAGIPVDLKRKIARLGINMLLKMIFVDNFVHADLHPGNILVQGANGLSSSQEAQLQQADICDTLVVAVPSSLCPLRLVLLDAGIVAELQAPDLRNFRAVFMAVVMGQLHVSSLLSSVFKLLMTHKVKLESNFASIVFAIMVLEGLGRSLDPKLDILEAARPFLLTGPVCPP

SEQ ID NO: 74390 - protein, 473 aa, Homo sapiens
MSLHFLYYCSEPTLDVKIAFCQGFDKQVDVSYIAKHYNMSKSKVDNQFYSVEVGDSTFTVLKRYQNLKPIGSGAQGIVCAAYDAVLDRNVAIKKLSRPFQNQTHAKRAYRELVLMKCVNHKNIISLLNVFTPQKTLEEFQDVYLVMELMDANLCQVIQMELDHERMSYLLYQMLCGIKHLHSAGIIHRDLKPSNIVVKSDCTLKILDFGLARTAGTSFMMTPYVVTRYYRAPEVILGMGYKENVDIWSVGCIMGEMVRHKILFPGRDYIDQWNKVIEQLGTPCPEFMKKLQPTVRNYVENRPKYAGLTFPKLFPDSLFPADSEHNKLKASQARDLLSKMLVIDPAKRISVDDALQHPYINVWYDPAEVEAPPPQIYDKQLDEREHTIEEWKELIYKEVMNSEEKTKNGVVKGQPSPSGAAVNSSESLPPSSSVNDISSMSTDQTLASDTDSSLEASAGPLGCCRMPMRNMKPR

SEQ ID NO: 74391 - protein, 131 aa, Homo sapiens
  MOD_RES (1)..(1): Any amino acid
XRPPPLTQRTTTPSSSSPLGPPLRRTGPRSRPCCYQMRLLSACAQTARARIRSVWEKLEKEEQIHSVDIGNDGSAFVEVLVGSSAGGAGEQDYEVLLVTSSFMSPSESRSGSNPNRVRMFGPDKLVRAAAE

SEQ ID NO: 74392 - protein, 512 aa, Homo sapiens
MAERAALEELVKLQGERVRGLKQQKASAELIEEEVAKLLKLKAQLGPDESKQKFVLKTPKGTRDYSPRQMAVREKVFDVIIRCFKRHGAEVIDTPVFELKETLMGKYGEDSKLIYDLKDQGGELLSLRYDLTVPFARYLAMNKLTNIKRYHIAKVYRRDNPAMTRGRYREFYQCDFDIAGNFDPMIPDAECLKIMCEILSSLQIGDFLVKVNDRRILDGMFAICGVSDSKFRTICSSVDKLDKVSWEEVKNEMVGEKGLAPEVADRIGDYVQQHGGVSLVEQLLQDPKLSQNKQALEGLGDLKLLFEYLTLFGIDDKISFDLSLARGLDYYTGVIYEAVLLQTPAQAGEEPLGVGSVAAGGRYDGLVGMFDPKGRKVPCVGLSIGVERIFSIVEQRLEALEEKIRTTETQVLVASAQKKLLEERLKLVSELWDAGIKAELLYKKNPKLLNQLQYCEEAGIPLVAIIGEQELKDGVIKLRSVTSREEVREVDVRREDLVEEIKRRTGQPLCIC

SEQ ID NO: 74393 - protein, 120 aa, Homo sapiens
MPNFCAAPNCTRKSTQSDLAFFRFPRDPARCQKWVENCRRADLEDKTPDQLNKHYRLCAKHFETSMICRTSPYRTVLRDNAIPTIFDLTSHLNNPHSRHRKRIKELSEDEIRTLKQKKSK

SEQ ID NO: 74394 - protein, 89 aa, Homo sapiens
  MOD_RES (1)..(1): Any amino acid
XREFFSQYGDVMDVFIPKPFRAFAFVTFADDQIAQSLCGEDLIIKGISVHISNAEPKHNSNRQLERSGRFGVHLISNVYGRSTSLKVVL

SEQ ID NO: 74395 - protein, 96 aa, Homo sapiens
MFRKGKKRHSSSSSQSSEISTKSKSVDSSLGGLSRSSTVASLDTDSTKSSGQSNNNSDTCAEFRIKYVGAIEKLKLSEGKGLEGPLDLINYIDVAQ

SEQ ID NO: 74396 - protein, 10 aa, Homo sapiens
MCPMLLKNGY

SEQ ID NO: 74397 - protein, 41 aa, Homo sapiens
  MOD_RES (1)..(1): Any amino acid
XRETSLDTKSVSEGHLKRNIVVKTVEMRDGEGTHPETSGII

SEQ ID NO: 74398 - protein, 274 aa, Homo sapiens
MFQAAERPQEWAMEGPRDGLKKERLLDDRHDSGLDSMKDEEYEQMVKELQEIRLEPQEVPRGSEPWKQQLTEDGDSFLHLAIIHEEKALTMEVIRQVKGDLAFLNFQNNLQQTPLHLAVITNQPEIAEALLGAGCDPELRDFRGNTPLHLACEQGCLASVGVLTQSCTTPHLHSILKATNYNGHTCLHLASIHGYLGIVELLVSLGADVNAQLTWGRPSTRIQQQLGQLTLENLQMLPESEDEESYDTESEFTEFTEDELPYDDCVFGGQRLTL

SEQ ID NO: 74399 - protein, 123 aa, Homo sapiens
MCDIEEATNQLLDVNLHENQKSVQVTESDLGSESELLVTIGATVPTGFEQTAADEVREKLGSSCKISRDRGKIYFVISVESLAQVHCLRSVDNLFVVVQEFQDYQFKQTKEEVLKDFEDLAGK

SEQ ID NO: 74400 - protein, 191 aa, Homo sapiens
MSGNGNAAATAEENSPKMRVIRVGTRKSQLARIQTDSVVATLKASYPGLQFEIIAMSTTGDKILDTALSKIGEKSLFTKELEHALEKNERENPHDAVVFHPKFVGKTLETLPEKSVVGTSSLRRAAQLQRKFPHLEFRSIRGNLNTRLRKLDEQQEFSAIILATAGLQRMGWHNRVGQILHPEECMYAVGQ

SEQ ID NO: 74401 - protein, 640 aa, Homo sapiens
MSHVAVENALGLDQQFAGLDLNSSDNQSGGSTASKGRYIPPHLRNREATKGFYDKDSSGWSSSKDKDAYSSFGSRSDSRGKSSFFSDRGSGSRGRFDDRGRSDYDGIGSRGDRSGFGKFERGGNSRWCDKSDEDDWSKPLPPSERLEQELFSGGNTGINFEKYDDIPVEATGNNCPPHIESFSDVEMGEIIMGNIELTRYTRPTPVQKHAIPIIKEKRDLMACAQTGSGKTAAFLLPILSQIYSDGPGEALRAMKENGRYGRRKQYPISLVLAPTRELAVQIYEEARKFSYRSRVRPCVVYGGADIGQQIRDLERGCHLLVATPGRLVDMMERGKIGLDFCKYLVLDEADRMLDMGFEPQIRRIVEQDTMPPKGVRHTMMFSATFPKEIQMLARDFLDEYIFLAVGRVGSTSENITQKVVWVEESDKRSFLLDLLNATGKDSLTLVFVETKKGADSLEDFLYHEGYACTSIHGDRSQRDREEALHQFRSGKSPILVATAVAARGLDISNVKHVINFDLPSDIEEYVHRIGRTGRVGNLGLATSFFNERNINITKDLLDLLVEAKQEVPSWLENMAYEHHYKGSSRGRSKSSRFSGGFGARDYRQSSGASSSSFSSSRASSSRSGGGGHGSSRGFGGELGA

SEQ ID NO: 74402 - protein, 210 aa, Homo sapiens
MAASTGYVRLWGAARCWVLRRPMLAAAGGRVPTAAGAWLLRGQRTCDASPPWALWGRGPAIGGQWRGFWEASSRGGGAFSGGEDASEGGAEEGAGGAGGSAGAGEGPVITALTPMTIPDVFPHLPLIAITRNPVFPRFIKIIEVEEQLKIIKKELGLEKDDKDAIEEKFRERLKELVVPKHVMDVVDEELSKLGLLDNHSSEFNVTRNYL

SEQ ID NO: 74403 - protein, 57 aa, Homo sapiens
VQNRIATFEEGRRLKEEAQKRRERIDEIKRKKLEELSTAVCCADQRGWTGGPVPGRR

SEQ ID NO: 74404 - protein, 414 aa, Homo sapiens
MGPWSRSLSALLLLLQVSSWLCQEPEPCHPGFDAESYTFTVPRRHLERGRVLGRVNFEDCTGRQRTAYFSLDTRFKVGTDGVITVKRPLRFHNPQIHFLVYAWDSTYRKFSTKVTLNTVGHHHRPPPHQASVSGIQAELLTFPNSSPGLRRQKRDWVIPPISCPENEKGPFPKNLVQLFSHAVSSNGNAVEDPMEILITVTDQNDNKPEFTQEVFKGSVMEGALPGTSVMEVTATDADDDVNTYNAAIAYTILSQDPELPDKNMFTINRNTGVISVVTTGLDRESFPTYTLVVQAADLQGEGLSTTATAVITVTDTNDNPPIFNPTTYKGQVPENEANVVITTLKVTDADAPNTPAWEAVYTILNDDGGQFVVTTNPVNNDGILKTAKVCMVPGKMQKLASSQLFIPLSPGLGF

SEQ ID NO: 74405 - protein, 202 aa, Homo sapiens
MAGYLSESDFVMVEEGFSTRDLLKELTLGASQATTDEVAAFFVADLGAIVRKHFCFLKCLPRVRPFYAVKCNSSPGVLKVLAQLGLGFSCANKIASVINSALDLYFPEGCGVDIFAELGRYYVTSAFTVAVSIIAKKEVLLDQPGREEENGSTSKTIVYHLDEGVYGIFNSVLFDNICPTPILQKVSLPHVGLFSVVCVYFN

SEQ ID NO: 74406 - protein, 53 aa, Homo sapiens
MLSAAHDILSHKRTSGNQSHPPGSRQWDLCCWKLRPGCLFSFCGDQPVWCGLR

SEQ ID NO: 74407 - protein, 105 aa, Homo sapiens
MDGKRRPGPGPGVPPKRARGGLWDDDDAPRPSQFEEDLALMEEMEAEHRLQEQEEEELQSVLEGVADGQVPPSAIDPRWLRPTPPALDPQTEPLIFQQLEIDHYV

SEQ ID NO: 74408 - protein, 483 aa, Homo sapiens
MAPWLQLLSLLGLLPGAVAAPAQPRAASFQAWGPPSPELLAPTRFALEMFNRGRAAGTRAVLGLVRGRVRRAGQGSLYSLEATLEEPPCNDPMVCRLPVSKKTLLCSFQVLDELGRHVLLRKDCGPVDTKVPGAGEPKSAFTQGSAMISSLSQNHPDNRNETFSSVISLLNEDPLSQDLPVKMASIFKNFVITYNRTYESKEARWRLSVFVNNMVRAQKIQALDRGTAQYGVTKFSDLTEEEFRTIYLNTLLRKEPGNKMKQAKSVGDLAPPEWDWRSKGAVTKVKDQGMCGSCWAFSVTGNVEGQWFLNQGTLLSLSEQELLDCDKMDKACMGGLPSNAYSAIKNLGGLETEDDYSYQGHMQSCNFSAEKAKVYINDSVELSQNEQKLAAWLAKRGPISVAINAFGMQFYRHGISRPLRPLCSPWLIDHAVLLVGYGNRSDVPFWAIKNSWGTDWGEKGYYYLHRGSGACGVNTMASSAVVD

SEQ ID NO: 74409 - protein, 180 aa, Homo sapiens
MKPRPAGFVDNKLKQRVIQSANHMNSSLLSLYRKGNPDSVSNTPEMEQRETTSSTPRISSKTGSIPLKTPAKDSEGGWFIDKTPSVKKDSFFLDLSCEKSNPKKPITEIQDSKDSSLLESDMKRKGKLKNKGSKRKKEDLQEVDGEIEAVLQKKAKARGLEFQISNVKFEDVGGNDMTLK

SEQ ID NO: 74410 - protein, 118 aa, Homo sapiens
  MOD_RES (1)..(1): Any amino acid
XLLPQEQQVDGDLLLRLTEEELQTDLGMKSGITRKRFFRELTELKTFANYSTCDRSNLADWLGSLDPRFRQYTYGLVSCGLDRSLLHRVSEQQLLEDCGIHLGVHRARILTAARAITD

SEQ ID NO: 74411 - protein, 61 aa, Homo sapiens
MDEDGLPLMGSGIDLTKVPAIQQKRTVAFLNQFVVHTVQFLNRFSTVCEETGSHFVTHAGV

SEQ ID NO: 74412 - protein, 79 aa, Homo sapiens
MNESKPGDSQNLACVFCRKHDDCPNKYGEKKTKEKWNLTVHYYCLLMSSGIWQRGKEEEGVYGFLIEDIRKEVNRASKL

SEQ ID NO: 74413 - protein, 921 aa, Homo sapiens
MPLRHWGMARGSKPVGDGAQPMAAMGGLKVLLHWAGPGGGEPWVTFSESSLTAEEVCIHIAHKVGITPPCFNLFALFDAQAQVWLPPNHILEIPRDASLMLYFRIRFYFRNWHGMNPREPAVYRCGPPGTEASSDQTAQGMQLLDPASFEYLFEQGKHEFVNDVASLWELSTEEEIHHFKNESLGMAFLHLCHLALRHGIPLEEVAKKTSFKDCIPRSFRRHIRQHSALTRLRLRNVFRRFLRDFQPGRLSQQMVMVKYLATLERLAPRFGTERVPVCHLRLLAQAEGEPCYIRDSGVAPTDPGPESAAGPPTHEVLVTGTGGIQWWPVEEEVNKEEGSSGSSGRNPQASLFGKKAKAHKAVGQPADRPREPLWAYFCDFRDITHVVLKEHCVSIHRQDNKCLELSLPSRAAALSFVSLVDGYFRLTADSSHYLCHEVAPPRLVMSIRDGIHGPLLEPFVQAKLRPEDGLYLIHWSTSHPYRLILTVAQRSQAPDGMQSLRLRKFPIEQQDGAFVLEGWGRSFPSVRELGAALQGCLLRAGDDCFSLRRCCLPQPGETSNLIIMRGARASPRTLNLSQLSFHRVDQKEITQLSHLGQGTRTNVYEGRLRVEGSGDPEEGKMDDEDPLVPGRDRGQELRVVLKVLDPSHHDIALAFYETASLMSQVSHTHLAFVHGVCVRGPENIMVTEYVEHGPLDVWLRRERGHVPMAWKMVVAQQLASALSYLENKNLVHGNVCGRNILLARLGLAEGTSPFIKLSDPGVGLGALSREERVERIPWLAPECLPGGANSLSTAMDKWGFGATLLEICFDGEAPLQSRSPSEVCLGDPWALPAVGAPPRNPEDRIRAQSCIPSGLVTSSLSGLPAGGPLAGAQCSPSLFRSLWKSLVPGTQKASKRLDFSFRQSDQGSDGRRPGCRVGKKG

SEQ ID NO: 74414 - protein, 90 aa, Homo sapiens
  MOD_RES (1)..(1): Any amino acid
XWRRLATVEERKKIVASSHGKKTKPNTKDHGYTTLATSVTLLKASEVEEILDGNDEKYKAVSISTEPPTYLREQKAKRNSHFDDHDPAVI

SEQ ID NO: 74415 - protein, 102 aa, Homo sapiens
  MOD_RES (1)..(1): Any amino acid
XHHSAEHKGLQLLGRDCALGRAEAAGLGPSPEQRVEIVPRDLRMKDKFLKHLTGPLYFSPKCSKHFHRLYHNTRDCTIPAYYKRCARLLTRLAVSPVCMEDK

SEQ ID NO: 74416 - protein, 32 aa, Homo sapiens
MATNKERLFAAGALGPGSGYPGAGFPFAFPGA

SEQ ID NO: 74417 - protein, 57 aa, Homo sapiens
MQRRGALFGMPGGSGGRKMAAGDIGELLVPHMPTIRVPRSGDRVYKNECAFSYDSPI

SEQ ID NO: 74418 - protein, 705 aa, Homo sapiens
MIDSVKLRRDSAADFFSHYEYLCALQNSVPLPAVRACLREGVLDFNADRLRGVDWAPLLSTLKINKDLPLVSIKSFFQPWLGDTGSDMNKFCRSRVPAIRYKDVTFQLCKALKGCLSISSVLKNLELNGLILRERDLTILAKGLNKSASLVHLSLANCPIGDGGLEIICQGIKSSITLKTVNFTGCNLTWQGADHMAKILKYQTMRRHEETWAESLRYRRPDLDCMAGLRRITLNCNTLIGDLGACAFADSLSEDLWLRALDLQQCGLTNEGAKALLEALETNTTLVVLDIRKNPLIDHSMMKAVIKKVLQNGRSAKSEYQWITSPSVKEPSKTAKQKRRTIILGSGHKGKATIRIGLATKKPVSSGRKHSLGKEYYAPAPLPPGVSGFLPWRTAERAKRHRGFPLIKTRDICNQLQQPGFPVTVTVESPSSSEVEEVDDSSESVHEVPEKTSIEQEALQEKLEECLKQLKEERVIRLKVDKRVSELEHENAQLRNINFSLSEALHAQSLTNMILDDEGVLGSIENSFQKFHAFLDLLKDAGLGQLATMAGIDQSDFQLLGHPQMTSTVSNPPKEEKKALEDEKPEPKQNALGQMQNIQFQKITGDARIPLPLDSFPVPVSTPEGLGTSSNNLGVPATEQRQESFEGFIARMCSPSPDATSGTGSQRKEEELSRNSRSSSEKKTKTGEYTKKHSDKQHPGKDLHS

SEQ ID NO: 74419 - protein, 536 aa, Homo sapiens
MLGGSGSHGRRSLAALSQIAYQRNDDDEEEAARERRRRARQERLRQKQEEESLGQVTDQVEVNAQNSVPDEEAKTTTTNTQVEGDDEAAFLERLARREERRQKRLQEALERQKEFDPTITDASLSLPSRRMQNDTAENETTEKEEKSESRQERYEIEETETVTKSYQKNDWRDAEENKKEDKEKEEEEEEKPKRGSIGENQIKDEKIKKDKEPKEEVKSFMDRKKGFTEVKSQNGEFMTHKLKHTENTFSRPGGRASVDTKEAEGAPQVEAGKRLEELRRRRGETESEEFEKLKQKQQEAALELEELKKKREERRKVLEEEEQRRKQEEADRKLREEEEKRRLKEEIERRRAEAAEKRQKMPEDGLSDDKKPFKCFTPKGSSLKIEERAEFLNKSVQKSSGVKSTHQAAIVSKIDSRLEQYTSAIEGTKSAKPTKPAASDLPVPAEGVRNIKSMWEKGNVFSSPTAAGTPNKETAGLKVGVSSRINEWLTKTPDGNKSPAPKPSLTFCSSLFGLWLIGNLLLLPSFLPLLPEWVFL

SEQ ID NO: 74420 - protein, 49 aa, Homo sapiens
MLKKFDKKDEESGGGSNPFQHLEKSAVLQEASDICSPLASIINIHHQCN

SEQ ID NO: 74421 - protein, 590 aa, Homo sapiens
MMAEQVKCASAGVSSGAGSGPVVNAELEVKKLQELVRKLEKQNEQLRSRAASAAAAPHLLLLPPPPPAAPPPAGLQPLGPRSPPAATATAAASGGLGLGLALGAGGGGGSGSGSGGGSSPAFPGTFCLPSPAPSLLCSLAQPPEAPFVYFKPAAGFFGAGGGGPEPGGAGTPPGAAAAPPSPPPTLLDEVELLDLESVAAWRDEDDYTWLYIGSSKTFTSSEKSLTPLQWCRHVLDNPTPEMEAARRSLCFRLEQGYTSRGSPLSPQSSIDSELSTSELEDDSISMGYKLQDLTDVQIMARLQEESLRQDYASTSASVSRHSSSVSLSSGKKGTCSDQEYDQYSLEDEEEFDHLPPPQPRLPRCSPFQRGIPHSQTFSSIRECRRSPSSQYFPSNNYQQQQYYSPQAQTPDQQPNRTNGDKLRRSMPNLARMPSTTAISSNISSPVTVRNSQSFDSSLHGAGNGISRIQSCIPSPGQLQHRVHSVGHFPVSIRQPLKATAYVSPTVQGSSNMPLSNGLQLYSNTGIPTPNKAAASGIMGRSALPRPSLAINGSNLPRSKIAQPVRSFLQPPKPLSSLSTLRDGNWRDGCY

SEQ ID NO: 74422 - protein, 105 aa, Homo sapiens
MAANCTSSWSLGESCNRPGLELPRSMASSETQLGNHDVDPEISHVNFRMFSCPKESDPIQALRKLTELCHLWLRPDLHTKEQILDMLVMEQFMISMPQELQVLVM

SEQ ID NO: 74423 - protein, 184 aa, Homo sapiens
MGTEAYAESIDRTVMYYGLPFIQEADFPFNNYLSMLDTVSGNSVYEVITSWMENMPEGKWPNWMIGGPDSSRLTSRLGNQYVNVMNMLLFTLPGTPITYYGEEIGMGNIVAANLNESYDINTLRSKSPMQWDNSSNAGFSEASNTWLPTNSDYHTVNVDVSISENFMLILETKKWVSTESTHSP

SEQ ID NO: 74424 - protein, 64 aa, Homo sapiens
MDGGDDGNLIIKKRFVSEAELDERRKRRQEEWEKVRKPEDPEECPEEVYDPRSLYERLQEQKDR

SEQ ID NO: 74425 - protein, 65 aa, Homo sapiens
  MOD_RES (1)..(1): Any amino acid
XLSHAPTLLGRPSSDNPNVLVLKTHVNLLCGGVAGAIAQTISYPFDVTRRRMQLGTVLPEFEKCL

SEQ ID NO: 74426 - protein, 138 aa, Homo sapiens
  MOD_RES (1)..(1): Any amino acid
XGPGTEHHQHRGPSFRAALQAVPAQPAQGGAAPRKAGRAGGVGLGGRGGLFGAQLLQQHPGEGAAAGRASGLQAGPDTALRPHGPRPGPISFSKRCLQPAMGRGVHRYRTSGPAPLPAGPLWPPRRNSCVRSPGTTAG

SEQ ID NO: 74427 - protein, 328 aa, Homo sapiens
MLEEAGEVLENMLKASCLPLGFIVFLPAVLLLVAPPLPAADAAHEFTVYRMQQYDLQGQPYVLLRTATANGFQMVTSGVQSKAVSDWLIASVEGRLTGLGGEDLPTIVIVAHYDAFGVAPWLSLGADSNGSGVSVLLELARLFSRLYTYKRTHAAYNLLFFASGGGKFNYQGTKRWLEDNLDHTDSSLLQDNVAFVLCLDTVGRGSSLHLHVSKPPREGTLQHAFLRELETVAAHQFPEVRFSMVHKRINLAEDVLAWEHERFAIRRLPAFTLSHLESHRDGQRSSIMDVRSRVDSKTLTRNTRIIAEALTRVIYNLTEKGTPPDMPV

SEQ ID NO: 74428 - protein, 605 aa, Homo sapiens
MSGVRAVRISIESACEKQVHEVGLDGTETYLPPLSMSQNLARLAQRIDFSQGSGSEEEEAAGTEGDAQEWPGAGSSADQDDEEGVVKFQPSLWPWDSVRNNLRSALTEMCVLYDVLSIVRDKKFMTLDPVSQDALPPKQNPQTLQLISKKKSLAGAAQILLKGAERLTKSVTENQENKLQRDFNSELLRLRQHWKLRKVGDKILGDLSYRSAGSLFPHHGTFEVIKNTDLDLDKKIPEDYCPLDVQIPSDLEGSAYIKVSIQKQAPDIGDLGTVNLFKRPLPKSKPGSPHWQTKLEAAQNVLLCKEIFAQLSREAVQIKSQVPHIVVKNQIISQPFPSLQLSISLCHSSNDKKSQKFATEKQCPEDHLYVLEHNLHLLIREFHKQTLSSIMMPHPASAPFGHKRMRLSGPQAFDKNEINSLQSSEGLLEKIIKQAKHIFLRSRSIQLQLNIGVEQIRVVHRDGRVITLSYQEQELQDFLLSQMSQHQVHAVQQLAKVMGWQVLSFSNHVGLGPIESIGNASAITVASPSGDYAISVRNGPESGSKIMVQFPRNQCKDLPKSDVLQDNKWSHLRGPFKEVQWNKMEGRNFVYKMELLMSALSPCLL

SEQ ID NO: 74429 - protein, 29 aa, Homo sapiens
MSCPTPGCDGSGHVSGSFLTHRSLSGCPR

SEQ ID NO: 74430 - protein, 65 aa, Homo sapiens
MDKLNKITVPASQKLRQLQKMVHDIKNNEGGIMNKIKKLKVKAPPSVPRRDYASDTCSLSWNPSK

SEQ ID NO: 74431 - protein, 162 aa, Homo sapiens
  MOD_RES (1)..(1): Any amino acid
XHLLPLDLQELIAQAVQATKNYNKCFLNVCFAYTSRHEISNAVREMAWGVEQGLLDPSDISESLLDKCLYTNRSPHPDILIRTSGEVRLSDFLLWQTSHSCLVFQPVLWPEYTFWNLFEAILQFQMNHSVLQHPGSLLTKAWKKPFQQDGELYGNCSSPKSS

SEQ ID NO: 74432 - protein, 64 aa, Homo sapiens
MEQWDHFHNQQEDTDSCSESVKFDARSMTALLPPNPKNSPSLQEKLKSFKAALIALYLLVFAVL

SEQ ID NO: 74433 - protein, 163 aa, Homo sapiens
MNLVDLWLTRSLSMCLLLQSFVLMILCFHSASMCPKGCLCSSSGGLNVTCSNANLKEIPRDLPPETVLLYLDSNQITSIPNEIFKDLHQLRVLNLSKNGIEFIDEHAFKGVAETLQTLDLSDNRIQSVHKNAFNNLKARARIANNPWHCDCTLQQVLRSMASN

SEQ ID NO: 74434 - protein, 229 aa, Homo sapiens
MASRGVVGIFFLSAVPLVCLELRRGIPDIGIKDFLLLCGRILLLLALLTLTISVTTSWLNSFKSPQVYLKEEEEKNEKRQKLVRKKQQEAQGEKGDEGTSQTSFETSNREAAKSQNLPKPLTEFPSPAEQPTCKEIPDLPEEPSQTAEEVVTVALRCPSGNVLRRRFLKSYSSQVLFDWMTRIGYHISLYSLSTSFPRRPLAVEGGQSLEDIGITVDTVLILEEKEQTN

SEQ ID NO: 74435 - protein, 22 aa, Homo sapiens
MKTLSVFDSNEDITNFVQGKIR

SEQ ID NO: 74436 - protein, 1757 aa, Homo sapiens
MVDKNIYIIQGEINIVVGAIKRNARWSTHTPLDEERDPLLHSFGHLKEVLNSITELSEIEPNVFLRPFLEVIRSEDTTGPITGLALTSVNKFLSYALIDPTHEGTAEGMENMADAVTHARFVGTDPASDEVVLMKILQVLRTLLLTPVGAHLTNESVCEIMQSCFRICFEMRLSELLRKSAEHTLVDMVQLLFTRLPQFKEEPKNYVGTNMKKLKMRAGGMSDSSKWKKQKRSPRPPRHMTKVTPGSELPTPNGTTLSSNLTGGMPFIDVPTPISSASSEAASAVVSPSTDSGLEFSSQTTSKEDLTDLEQPGSPGYSTATEPGSSELGVPEQPDLQEGTHVEKSQSASVESIPEVLEECTSPADHSDSASVHDMDYVNPRGVRFTQSSQKEGTALVPYGLPCIRELFRFLISLTNPHDRHNSEVMIHMGLHLLTVALESAPVAQCQTLLGLIKDEMCRHLFQNAFPVSGQLYTTHLLSLDALLTVIDSTEAHCQAKVLNSLTQQEKKETARPSCEIVDGTREASNTERTASDGKAVGMASDIPGLHLPGGGRLPPEHGKSGCSDLEEAVDSGADKKFARKPPRFSCLLPDPRELIEIKNKKKLLITGTEQFNQKPKKGIQFLQEKGLLTIPMDNTEVAQWLRENPRLDKKMIGEFVSDRKNIDLLESFVSTFSFQGLRLDEALRLYLEAFRLPGEAPVIQRLLEAFTERWMNCNGSPFANSDACFSLAYAVIMLNTDQHNHNVRKQNAPMTLEEFRKNLKGVNGGKDFEQDILEDMYHAIKNEEIVMPEEQTGLVRENYVWNVLLHRGATPEGIFLRVPTASYDLDLFTMTWGPTIAALSYVFDKSLEETIIQKAISGFRKCAMISAHYGLSDVFDNLIISLCKFTALSSESIENLPSVFGSNPKAHIAAKTVFHLAHRHGDILREGWKNIMEAMLQLFRAQLLPKAMIEVEDFVDPNGKISLQREETPSNRGESTVLSFVSWLTLSGPEQSSVRGPSTENQEAKRVALECIKQCDPEKMITESKFLQLESLQELMKALVSVTPDEETYDEEDAAFCLEMLLRIVLENRDRVGCVWQTVRDHLYHLCVQAQDFCFLVERAVVGLLRLAIRLLRREEISAQVLLSLRILLLMKPSVLSRVSHQVAYGLHELLKTNAANIHSGDDWATLFTLLECIGSGVKPPAALQATARADAPDAGAQSDSELPSYHQNDVSLDRGYTSDSEVYTDHGRPGKIHRSATDADVVNSGWLVVGKDDVDNSKPGPSRPGPSPLINQYSLTVGLDLGPHDTKSLLKCVESLSFIVRDAAHITPDNFELCVKTLRIFVEASLNGGCKSQEKRGKSHKYDSKGNRFKKKSKEGSMLRRPRTSSQHASRGGQSDDDEDEGVPASYHTVSLQLLDLMHTLHTRAASIYSSWAEEQRHLETGGQKIEADSRTLWAHCWCPLLQGIACLCCDARRQVRMQALTYLQRALLVHDLQKLDALEWESCFNKVLFPLLTKLLENISPADVGGMEETRMRASTLLSKVFLQHLSPLLSLSTFAALWLTILDFMDKYMHAGSSDLLSEAIPESLKNMLLVMDTAEIFHSADARGGGPSALWEITWERIDCFLPHLRDELFKQTVIQDPMPMEPQGQKPLASAHLTSAAGDTRTPGHPPPPEIPSELGACDFEKPESPRAASSSSPGSPVASSPSRLSPTPDGPPPLAQPPLILQPLASPLQVGVPPMTLPIILNPALIEATSPVPLLATPRPTDPIPTSEVN

SEQ ID NO: 74437 - protein, 88 aa, Homo sapiens
FLTLCTWLLLLGPGLLATVRAECSQDCATCSYRLVRPADINFLKHPRIDQFIHSTNEYLMEEAPDGGKSQCNASKWRHGVLMEKQQDL

SEQ ID NO: 74438 - protein, 458 aa, Homo sapiens
DWESILQICDLIRQGDTQAKYAVNSIKKKVNDKNPHVALYALEVMESVVKNCGQTVHDEVANKQTMEELKDLLKRQVEVNVRNKILYLIQAWAHAFRNEPKYKVVQDTYQIMKVEGHVFPEFKESDAMFAAERAPDWVDAEECHRCRVQFGVMTRKHHCRACGQIFCGKCSSKYSTIPKFGIEKEVRVCEPCYEQLNRKAEGKATSTTELPPEYLTSPLSQQSQLPPKRDETALQEEEELQLALALSQSEAEEKERLRQKSTYTSYPKAEPMPSASSAPPASSLYSSPVNSSAPLAEDIDPELARYLNRNYWEKKQEEARKSPTPSAPVPLTEPAAQPGEGHAAPTNVVEPQFHNGESEESHEQFLKALQNAVTTFVNRMKSNHMRGRSITNDSAVLSLFQSINGMHPQLLELLNQLDERRLYYEGLQDKLAQIRDARGALSALREEHREKLRRAAEE

SEQ ID NO: 74439 - protein, 232 aa, Homo sapiens
MRFAWTVLLLGPLQLCALVHCAPPAAGQQQPPREPPAAPGAWRQQIQWENNGQVFSLLSLGSQYQPQRRRDPGAAVPGAANASAQQPRTPILLIRDNRTAAARTRTAGSSGVTAGRPRPTARHWFQAGYSTSRAREAGASRAENQTAPGEVPALSNLRPPSRVDGMVGDDPYNPYKYSDDNPYYNYYDTYERPRPGGRYRPGYGTGYFQYVQHTGQMSEIMITGCCSDFPKE

SEQ ID NO: 74440 - protein, 157 aa, Homo sapiens
AENAEFMRNFQKGQVLKKIAQKALDLPSSGEGLAFFTFPNIASATKFKQLYRSRMNSLEMTPAVRQRVIEEAKTAFLLNIQLFEELQELLTHDTKDQSPSRAPGLRQRASNKVQDSAPVETPRGKPPLNTRSQAPLLRWVLTLSFLVATVAVGLYAM

SEQ ID NO: 74441 - protein, 486 aa, Homo sapiens
MAELQMLLEEEIPGGRRALFDSYTNLERVADYCENNYIQSADKQRALEETKAYTTQSLASVAYLINTLANNVLQMLDIQASQLRRMESSINHISQTVDIHKEKVARREIGILTTNKNTSRTHKIIAPANLERPVRYIRKPIDYTILDDIGHGVKWLLRFKVSTQNMKMGGLPRTTPPTQKPPSPPMSGKGTLGRHSPYRTLEPVRPPVVPNDYVPSPTRNMAPSQQSPVRTASVNQRNRTYSSSGSSGGSHPSSRSSSRENSGSGSVGVPIAVPTPSPPSVFPAPAGSAGTPPLPATSASAPAPLVPATVPSSTAPDAAAGGAQTLADGFTSPTPPVVSSTPPTGHPVQFYSMNRPASRHTPPTIGGSLPYRRPPSITSQTSLQNQMNGGPFYSQNPVSDTPPPPPPVEEPVFDESPPPPPPPEDYEEEEAAVVEYSDPYAEEDPPWAPRSYLEKVVAIYDYTKDKEDELSFQEGAIIYVIKKNDD

SEQ ID NO: 74442 - protein, 91 aa, Homo sapiens
MTSFQEVPLQTSNFAHVIFQNVAKSYLPNAHLECHYTLTPYIHPHPKDWVGIFKVGWSTARDYYTFLWSPMPEHYVEGSTVNCVLAFQVEN

SEQ ID NO: 74443 - protein, 130 aa, Homo sapiens
MAYHSFLVEPISCHAWNKDRTQIAICPNNHEVHIYEKSGAKWTKVHELKEHNGQVTGIDWAPESNRIVTCGTDRNAYVWTLKGRTWKPTLVILRINRAARCVRWAPNENKFAVGSGSRVISICYFEQEND

SEQ ID NO: 74444 - protein, 90 aa, Homo sapiens
ETDWWWAALHGQEGYVPRNYFGIPSKVPPMPTTIITSPSKPATCPAGPGMGHHTTGYSWESLLTPSLPAVLGSGWETLVSTRIPAPPLPN

SEQ ID NO: 74445 - protein, 123 aa, Homo sapiens
  MOD_RES (1)..(1): Any amino acid
XRRSKSRDRKSYKHRSKSRDREQDRKSKEKEKRGSDDKKSSVKSGSREKQSEDTNTESKESDTKNEVNGTSEDIKSEVQRKYAQMKMELSRVRRHTKASSEGKDSVVLQNILRTTVRRFLEEY

SEQ ID NO: 74446 - protein, 44 aa, Homo sapiens
MNEKSCSFHSKEELRDGQGERLSAGYSPSYDKDKSVLAFRGIPL

SEQ ID NO: 74447 - protein, 43 aa, Homo sapiens
MPEQSNDYRVAVFGAGGVGKSSLVLRFVKGTFRESYIPTVEDT

SEQ ID NO: 74448 - protein, 181 aa, Homo sapiens
MALRVVRSVRALLCTLRAVPSPAAPCPPRPWQLGVGAVRTLRTGPALLSVRKFTEKHEWVTTENGIGTVGISNFAQEALGDVVYCSLPEVGTKLNKQDEFGALESVKAASELYSPLSGEVTEINEALAENPGLVNKSCYEDGFVLFCFVLFCLRWSFALLVQAGVQWHNLGSLQPPPPGFK

SEQ ID NO: 74449 - protein, 178 aa, Homo sapiens
MSLQWTAVATFLYAEVFVVLLLCIPFISPKRWQKIFKSRLVELLVSYGNTFFVVLIVILVLLVIDAVREIRKYDDVTEKVNLQNNPGAMEHFHMKLFRAQRNLYIAGFSLLLSFLLRRLVTLISQQATLLASNEAFKKQAESASEAAKKYMEENDQLKKGAAVDGGKLDVGNAEVKLE

SEQ ID NO: 74450 - protein, 162 aa, Homo sapiens
MFPENLAEGETRMRGCLLEHGRNWSAIARMVGSKTVSQCKNFYFNYKKRQNLDEILQQHKLKMEKERNARRKKKKAPAAASEEAAFPPVVEDEEMEASGVSGNEEEMVEEAEATVNNSSDTESIPSPHTEAAKDTGQNGPKPPATLGADGPPPGPPTPPPED

SEQ ID NO: 74451 - protein, 505 aa, Homo sapiens
MMLRPGYPLSQESFPIDILLDDIVLTHSLFLPTEKFLQELHQYFVRAGGMEGPEGLGRKQACLAMLLHFLDTYQGLLQEEEGAGHIIKDLYLLIMKDESLYQGLREDTLRLHQLVETVELKIPEENQPPSKQVKPLFRHFRRIDSCLQTRVAFRGSDEIFCRVYMPDHSYVTIRSRLSASVQDILGSVTEKLQYSEEPAGREDSLILVAVSSSGEKVLLQPTEDCVFTALGINSHLFACTRDSYEALVPLPEEIQVSPGDTEIHRVEPEDVANHLTAFHWELFRCVHELEFVDYVFHGERGRRETANLELLLQRCSEVTHWVATEVLLCEAPGKRAQLLKKFIKIAALCKQNQDLLSFYAVVMGLDNAAVSRLRLTWEKLPGKFKNLFRKFENLTDPCRNHKSYREVISKMKPPVIPFVPLILKDLTFLHEGSKTLVDGLVNIEKLHSVAEKVRTIRKYRSRPLCLDMEASPNHLQTKAYVRQFQVIDNQNLLFELSYKLEANSQ

SEQ ID NO: 74452 - protein, 101 aa, Homo sapiens
MVTPITRMSKRYLQKATKGKLLIIIFIVTLWGKVVSSANHHKAHHVKTGTCEVVALHRCCNKNKIEERSQTVKCSCFPGQVAGTTRAAPSCVDASIVEQKW

SEQ ID NO: 74453 - protein, 24 aa, Homo sapiens
MGKNLKEAVKMLEDSQRRTEEENG

SEQ ID NO: 74454 - protein, 182 aa, Homo sapiens
MPGFDYKFLEKPKRRLLCPLCGKPMREPVQVSTCGHRFCDTCLQEFLSEGVFKCPEDQLPLDYAKFPHPYPQIYPDPELEVQVLGLPIRCIHSEEGCRWSGPLRHLQGHLNTCSFNVIPCPNRCPMKLSRRDLPAHLQHDCPKRRLKCEFCGCDFSGEAYESHEGMCPQESVYCENKCGARM

SEQ ID NO: 74455 - protein, 160 aa, Homo sapiens
MHRRRLALGLGFCLLAGTSLSVLWVYLENWLPVSYVPYYLPCPEILPMMMALSCLCHQQHEAALQEGEATPARGMVTVPSAQAAGAQAHTAADTHTLVGAHRLRGNLQPRASAAHLPATEPDHWGHGVCRGEVHSFHPVLPGVSRGVLHAWVPGALLHLH

SEQ ID NO: 74456 - protein, 221 aa, Homo sapiens
MRLQLKRKLQRNRTSFTQEQIEALEKEFERTHYPDVFARERLAAKIDLPEARIQVWFSNRRAKWRREEKLRNQRRQASNTPSHIPISSSFSTSVYQPIPQPTTPVSSFTSGSMLGRTDTALTNTYSALPPMPSFTMANNLPMQPPVPSQTSSYSCMLPTSPSVNGRSYDTYTPPHMQTHMNSQPMGTSGTTSTGLISPGVSVPVQVPGSEPDMSQYWPRLQ

SEQ ID NO: 74457 - protein, 156 aa, Homo sapiens
MAKPAQGAKYRGSIHDFPGFDPNQDAEALYTAMKGFGSDKEAILDIITSRSNRQRQEVCQSYKSLYGKDLIADLKYELTGKFERLIVGLMRPPAYCDAKEIKDAISGAGTDEKTLTRIMVSRSEIDLLNIRREFIEKYDKSLHQAIEGDTSGDFLK

SEQ ID NO: 74458 - protein, 146 aa, Homo sapiens
MGLRYSGCLGSHVENAGEPDSWSSLSYEIPYGDCSVRHHRELDIYTLTSESDSHHEHPFPGDGCTGPIFKLMNIQQQLMKTNLKQMDSLMPLMMTAQDPSSAPETDGQFLPCAPEPTDPQRLSSSEETESTQCCPGSPVAQTESPC

SEQ ID NO: 74459 - protein, 344 aa, Homo sapiens
MALRHLALLAGLLVGVASKSMENTAQLPECCVDVVGVNASCPGASLCGPGCYRRWNADGSASCVRCGNGTLPAYNGSECRSFAGPGAPFPMNRSSGTPGRPHPGAPRVAASLFLGTFFISSGLILSVAGFFYLKRSSKLPRACYRRNKAPALQPGEAAAMIPPPQSSGNSSCRIPLWGFPSLGQSQGALWVCPQTGLPGSGSRPPLPGSPGDPPTRQGQGRIWLVPPALDLSWIWPAPPARPPLIPVTSMLFPVPETWGLQERRTHHDRADPQYLLLLEVQLHPRTDAAGLRQALLSSHRFSGAGSGGPKSQPVRKPRYVRRERPLDRATDPAAFPGEARISNV

SEQ ID NO: 74460 - protein, 844 aa, Homo sapiens
MAPRRLLLVGEGNFSFAAALSETLDQSTQLTATCLQRPAELARDPLAWENLQCLRERGIDVRFGVDCTQLADVFELHEREFDQIYFIFPHCGRKAGVAKNRELLAKFFQSCADVLAEEGEVHVALCRGQGGTPADKPQREWHNSWQVVAMAALGGLILSDVYPFSCKAVAGYKCTGYRSQDKSFHVEGALNHIFTRSLPFEGSQPRIFRIKLGNQWFSFPEPEALVGKLNRLAMASRGARQRLKGSGASSGDTAPAADKLRELLGSREAGGAEHRTELSGNKAGQVWAPEGSTAFKCLLSARLCAALLSNISDCDETFNYWEPTHYLIYGEGFQTWEYSPAYAIRSYAYLLLHAWPAAFHARILQTNKILVFYFLRCLLAFVSCICELYFYKAVCKKFGLHVSRMMLAFLVLSTGMFCSSSAFLPSSFCMYTTLIAMTGWYMDKTSIAVLGVAAGAILGWPFSAALGLPIAFDLLVMKHRWKSFFHWSLMALILFLVPVVVIDSYYYGKLVIAPLNIVLYNVFTPHGPDLYGTEPWYFYLINGFLNFNVAFALALLVLPLTSLMEYLLQRFHVQNLGHPYWLTLAPMYIWFIIFFIQPHKEERFLFPVYPLICLCGAVALSALQKCYHFVFQRYRLEHYTVTSNWLALGTVFLFGLLSFSRSVALFRGYHGPLDLYPEFYRIATDPTIHTVPEGRPVNVCVGKEWYRFPSSFLLPDNWQLQFIPSEFRGQLPKPFAEGPLATRIVPTDMNDQNLEEPSRYIDISKCHYLVDLDTMRETPREPKYSSNKEEWISLAYRPFLDASRSSKLLRAFYVPFLSDQYTVYVNYTILKPRKAKQIRKKSGG

SEQ ID NO: 74461 - protein, 39 aa, Homo sapiens
MRRFLRPGHDPVRERLKRDLFQFNKTVEHGFPHQPSALG

SEQ ID NO: 74462 - protein, 78 aa, Homo sapiens
MGPEALSSLLLLLLVASGDADMKGHFDPAKCRYALGMQDRTIPDSDISASSSWSDSTAARHSRLESSDGDGAWCPAGS

SEQ ID NO: 74463 - protein, 90 aa, Homo sapiens
MAAPGALLVMGVSGSGKSTVGALLASELGWKFYDADDYHPEENRRKMGKGIPLNDQRCSLGTACGSSLFSPEENVQRHINTRKRWCSSEV

SEQ ID NO: 74464 - protein, 177 aa, Homo sapiens
MGRVQLFEISLSHGRVVYSPGEPLAGTVRVRLGAPLPFRAIRVTCIGSCGVSNKANDTAWVVEEGYFNSSLSLADKGSLPAGEHSFPFQFLLPATAPTSFEGPFGKIVHQVRAAIHTPRFSKDHKCSLVFYILSPLNLNSIPDIEGSSLRTPAKPLPGPPPKQPNVASATKKFSYKL

SEQ ID NO: 74465 - protein, 46 aa, Homo sapiens
MMQPQEAELCRPHDATASGKCNCVHGESSAARTITSPGDRFIMKGL

SEQ ID NO: 74466 - protein, 294 aa, Homo sapiens
  MOD_RES (1)..(1): Any amino acid
XIGRTLIPRYFSTVFEGGVTDLYYILKHSKESYHNSSITVDCDQCTMVTQHGKPMFTKVCTEGRLILEFTFDDLMRIKTWHFTIRQYRELVPRSILAMHAQDPQVLDQLSKNITRMGLTNFTLNYLRLCVILEPMQELMSRHKTYNLSPRDCLKTCLFQKWQRMVAPPEPTRQPTTKRRKRKNSTSSTSNSSAGNNANSTGSKKKTTAANLSLSSQVPDVMVVGEPTLMGGEFGDEDERLITRLENTQYDAANGMDDEEDFNNSPALGNNSPWNSKPPATQETKSENPPPQASQ

SEQ ID NO: 74467 - protein, 1190 aa, Homo sapiens
MRSRGSDTEGSAQKKFPRHTKGHSFQGPKNMKHRQQDKDSPSESDVILPCPKAEKPHSGNGHQAEDLSRDDLLFLLSILEGELQARDEVIGILKAEKMDLALLEAQYGFVTPKKVLEALQRDAFQAKSTPWQEDIYEKPMNELDKVVEKHKESYRRILGQLLVAEKSRRQTILELEEEKRKHKEYMEKSDEFICLLEQECERLKKLIDQEIKSQEEKEQEKEKRVTTLKEELTKLKSFALMVVDEQQRLTAQLTLQRQKIQELTTNAKETHTKLALAEARVQEEEQKATRLEKELQTQTTKFHQDQDTIMAKLTNEDSQNRQLQQKLAALSRQIDELEETNRSLRKAEEELQDIKEKISKGEYGNAGIMAEVEELRKRVLDMEGKDEELIKMEEQCRDLNKRLERETLQSKDFKLEVEKLSKRIMALEKLEDAFNKSKQECYSLKCNLEKERMTTKQLSQELESLKVRIKELEAIESRLEKTEFTLKEDLTKLKTLTVMFVDERKTMSEKLKKTEDKLQAASSQLQVEQNKVTTVTEKLIEETKRALKSKTDVEEKMYSVTKERDDLKNKLKAEEEKGNDLLSRVNMLKNRLQSLEAIEKDFLKNKLNQDSGKSTTALHQENNKIKELSQEVERLKLKLKDMKAIEDDLMKTEDEYETLERRYANERDKAQFLSKELEHVKMELAKYKLAEKTETSHEQWLFKRLQEEEAKSGHLSREVDALKEKIHEYMATEDLICHLQGDHSVLQKKLNQQENRNRDLGREIENLTKELERYRHFSKSLRPSLNGRRISDPQVFSKEVQTEAVDNEPPDYKSLIPLERAVINGQLYEESENQDEDPNDEGSVLSFKCSQSTPCPVNRKLWIPWMKSKEGHLQNGKMQTKPNANFVQPGDLVLSHTPGQPLHIKVTPDHVQNTATLEITSPTTESPHSYTSTAVIPNCGTPKQRITILQNASITPVKSKTSTEDLMNLEQGMSPITMATFARAQTPESCGSLTPERTMSPIQVLAVTGSASSPEQGRSPEPTEISAKHAIFRVSPDRQSSWQFQRSNSNSSSVITTEDNKIHIHLGSPYMQAVASPVRPASPSAPLQDNRTQGLINGALNKTTNKVTSSITITPTATPLPRQSQITIKEVCKQRIPARIPKPKSTGITKISTKAPTVPMDKPIYQNGCGKLHIVRTVTSNTFLHVGGRR

SEQ ID NO: 74468 - protein, 89 aa, Homo sapiens
  MOD_RES (1)..(1): Any amino acid
XDKKFARKPPRFSCLLPDPRELIEIKNKKKFNQKPKKGIQFLQEKGLLTIPMDNTEVAQWLRENPRLDKKMIGEFVSDRKNIDLLESFV

SEQ ID NO: 74469 - protein, 170 aa, Homo sapiens
MALPTARPLLGSCGTPALGSLLFLLFSLGWVQPSRTLAGETGQEAAPLDGVLANPPNISSLSPRQLLGFPCAEVSGLSTERVRELAVALAQKNVKLSTEQLRCLAHRLSEPPEDLDALPLDLLLFLNPDAFSGPQACTRFFSRITKANVDLLPRGAPERQRLLPAALACW

SEQ ID NO: 74470 - protein, 68 aa, Homo sapiens
MLVLFETSVGYAIFKVLNEKKLQEVDSLWKEFETPEKANKIVKLKHFEKFQDTAEALAGLVFPMCEER

SEQ ID NO: 74471 - protein, 25 aa, Homo sapiens
MGSWVQLITSVGVQQNHPGWTVAGQ

SEQ ID NO: 74472 - protein, 826 aa, Homo sapiens
MGQACGHSILCRSQQYPAARPAEPRGQQVFLKPDEPPPPPQPCADSLQVHCGQLSDNEEWSLQAVEKHTLVALRRVQVLQQRGPREAPRAVQNPPEGTAEDQKGGAAYTDRDRKILQLCGELYDLDASSLQLKVLQYLQQETRASRCCLLLVSEDNLQLSCKVIGDKVLGEEVSFPLTGCLGQVVEDKKSIQLKDLTSEDVQQLQSMLGCELQAMLCVPVISRATDQVVALACAFNKLEGDLFTDEDEHVIQHCFHYTSTVLTSTLAFQKEQKLKCECQALLQVAKNLFTHLDDVSVLLQEIITEARNLSNAEICSVFLLDQNELVAKVFDGGVVDDESYEIRIPADQGIAGHVATTGQILNIPDAYAHPLFYRGVDDSTGFRTRNILCFPIKNENQEVIGVAELVNKINGPWFSKFDEDLATAFSIYCGISIAHSLLYKKVNEAQYRSHLANEMMMYHMKVSDDEYTKLLHDGIQPVAAIDSNFASFTYTPRSLPEDDTSMAILSMLQDMNFINNYKIDCPTLARFCLMVKKGYRDPPYHNWMHAFSVSHFCYLLYKNLELTNYLEDIEIFALFISCMCHDLDHRGTNNSFQVASKSVLAALYSSEGSVMERHHFAQAIAILNTHGCNIFDHFSRKDYQRMLDLMRDIILATDLAHHLRIFKDLQKMAEVGYDRNNKQHHRLLLCLLMTSCDLSDQTKGWKTTRKIAELIYKEFFSQGDLEKAMGNRPMEMMDREKAYIPELQISFMEHIAMPIYKLLQDLFPKAAELYERVASNREHWTKVSHKFTIRGLPSNNSLDFLDEEYEVPDLDGTRAPINGCCSLDAE

SEQ ID NO: 74473 - protein, 113 aa, Homo sapiens
MPLLDSSYLPPTIFILTHVLGVAGVLYWKRHARGRADERDRVQKKTFTKWVNKHLMKVRKHINDLYEDLRDGHNLISLLEVLSGIKLPREKGRMRFHRLQNVQIALDFLKQRQ

SEQ ID NO: 74474 - protein, 109 aa, Homo sapiens
  MOD_RES (1)..(1): Any amino acid
XGRIYVGNLPTDVREKDLEDLFYKYGRIREIELKNRHGLVPFAFVRFEDPRDAEDAIYGRNGLPPSGSWQDLKDHMREAGDVCYADVQKDGVGMVEYLRKEDMEYALRK

SEQ ID NO: 74475 - protein, 134 aa, Homo sapiens
MNTSAPPAVSPNITVLAPGKGPWQVAFIGITTGLLSLATVTGNLLVLISFKVNTELKTVNNYFLLSLACADLIIGTFSMNLYTTYLLMGHWALGTLACDLWLALDYVASNASVMNLLLISFDRYFSVTRPLSYR

SEQ ID NO: 74476 - protein, 238 aa, Homo sapiens
MENFQKVEKIGEGTYGVVYKARNKLTGEVVALKKIRLDTLLDVIHTENKLYLVFEFLHQDLKKFMDASALTGIPLPLIKSYLFQLLQGLAFCHSHRVLHRDLKPQNLLINTEGAIKLADFGLARAFGVPVRTYTHEVTRRALFPGDSEIDQLFRIFRTLGTPDEVVWPGVTSMPDYKPSFPKWARQDFSKVVPPLDEDGRSLLSQMLHYDPNKRISAKAALAHPFFQDVTKPVPHLRL

SEQ ID NO: 74477 - protein, 36 aa, Homo sapiens
MSSIGTGYDLSASTFSPDGRVFQVEYAMKAVENSRQ

SEQ ID NO: 74478 - protein, 41 aa, Homo sapiens
MGCPSSKLCLYSPCAATRREEALKQHKTLSQELVNLRGELA

SEQ ID NO: 74479 - protein, 158 aa, Homo sapiens
MNQELLSVGSKRRRTGGSLRGNPSSSQVDEEQMNRVVEEEQQQQLRQQEEEHTARNGEVVGVEPRPGGQNDSQQGQLEENNNRFISVDEDSSGNQEEQEEDEEHAGEQDEEDEEEEEMDQESDDFDQSDDSSREDEHTHTNSVTNSSSIVDLPVHQLS

SEQ ID NO: 74480 - protein, 151 aa, Homo sapiens
MNRLRNAKIYVERAVKKKIFTIQGCYPVIRCLLRRRGWVEKKMVHRSGPTLLPPQKDLDSSAMGDSDTTEDEDEDEDEEFQPSQLFDFDDLLKFDDLDGTHALMSRMVQNEIPYFIWTTRRDVLDCRFLSKDQMINHYARAGSFTTKVGLC

SEQ ID NO: 74481 - protein, 387 aa, Homo sapiens
MRKFAYCKVVLATSLIWVLLDMFLLLYFSECNKCDEKKERGLPAGDVLEPVQKPHEGPGEMGKPVVIPKEDQEKMKEMFKINQFNLMASEMIALNRSLPDVRLEGCKTKVYPDNLPTTSVVIVFHNEAWSTLLRTVHSVINRSPRHMIEEIVLVDDASERDFLKRPLESYVKKLKVPVHVIRMEQRSGLIRARLKGAAVSKGQVITFLDAHCECTVGWLEPLLARIKHDRRTVVCPIIDVISDDTFEYMAGSDMTYGGFNWKLNFRWYPVPQREMDRRKGDRTLPVRTPTMAGGLFSIDRDYFQEIGTYDAGMDIWGGENLEISFRIWQCGGTLEIVTCSHVGHVFRKATPYTFPGGTGQIINKNNRRLAEVWMDEFKNFFYIISPG

SEQ ID NO: 74482 - protein, 1364 aa, Homo sapiens
MAQALLVPPGPESFRLFTRESLAAIEKRAAEEKAKKPKKEQDNDDENKPKPNSDLEAGKNLPFIYGDIPPEMVSEPLEDLDPYYINKKTFIVMNKGKAIFRFSATSALYILTPLNPVRKIAIKILVHSLFSMLIMCTILTNCVFMTLSNPPDWTKNVEYTFTGIYTFESLIKILARGFCLEDFTFLRDPWNWLDFSVIVMAYVTEFVDLGNVSALRTFRVLRALKTISVIPGLKTIVGALIQSVKKLSDVMILTVFCLSVFALIGLQLFMGNLRNKCLQWPPSDSAFETNTTSYFNGTMDSNGTFVNVTMSTFNWKDYIGDDSHFYVLDGQKDPLLCGNGSDAGQCPEGYICVKAGRNPNYGYTSFDTFSWAFLSLFRLMTQDYWENLYQLTLRAAGKTYMIFFVLVIFLGSFYLVNLILAVVAMAYEEQNQATLEEAEQKEAEFQQMLEQLKKQQEEAQAVAAASAASRDFSGIGGLGELLESSSEASKLSSKSAKEWRNRRKKRRQREHLEGNNKGERDSFPKSESEDSVKRSSFLFSMDGNRLTSDKKFCSPHQSLLSIRGSLFSPRRNSKTSIFSFRGRAKDVGSENDFADDEHSTFEDSESRRDSLFVPHRHGERRNSNGTTTETEVRKRRLSSYQISMEMLEDSSGRQRAVSIASILTNTMEELEESRQKCPPCWYRFANVFLIWDCCDAWLKVKHLVNLIVMDPFVDLAITICIVLNTLFMAMEHYPMTEQFSSVLTVGNLVFTGIFTAEMVLKIIAMDPYYYFQEGWNIFDGIIVSLSLMELGLSNVEGLSVLRSFRLLRVFKLAKSWPTLNMLIKIIGNSVGALGNLTLVLAIIVFIFAVVGMQLFGKSYKECVCKINDDCTLPRWHMNDFFHSFLIVFRVLCGEWIETMWDCMEVAGQTMCLIVFMLVMVIGNLVVLNLFLALLLSSFSSDNLAATDDDNEMNNLQIAVGRMQKGIDYVKNKMRECFQKAFFRKPKVIEIHEGNKIDSCMSNNTGIEISKELNYLRDGNGTTSGVGTGSSVEKYVIDENDYMSFINNPSLTVTVPIAVGESDFENLNTEEFSSESELEESKEKLNATSSSEGSTVDVVLPREGEQAETEPEEDLKPEACFTEGCIKKFPFCQVSTEEGKGKIWWNLRKTCYSIVEHNWFETFIVFMILLSSGALAFEDIYIEQRKTIKTMLEYADKVFTYIFILEMLLKWVAYGFQTYFTNAWCWLDFLIVDVSLVSLVANALGYSELGAIKSLRTLRALRPLRALSRFEGMRVVVNALVGAIPSIMNVLLVCLIFWLIFSIMGVNLFAGKFYHCVNMTTGNMFDISDVNNLSDCQALGKQARWKNVKVNFDNVGAGYLALLQV

SEQ ID NO: 74483 - protein, 578 aa, Homo sapiens
MLLLLLLAPLFLRPPGAGGVQTPNATSEGCQIIHPPWEGGIRYRGLTRDQVKAINFLPVDYEIEYVCRGEREVVGPKVRKCLANGSWTDMDTPSRCVRICSKSYLTLENGKVFLTGGDLPALDGARVDFRCDPDFHLVGSSRSICSQGQWSTPKPHCQVNRTPHSERRAVYIGALFPMSGGWPGGQACQPAVEMALEDVNSRRDILPDYELKLIHHDSKCDPGQATKYLYELLYNDPIKIILMPGCSSVSTLVAEAARMWNLIVLSYGSSSPALSNRQRFPTFFRTHPSATLHNPTRVKLFEKWGWKKIATIQQTTEVFTSTLDDLEERVKEAGIEITFRQSFFSDPAVPVKNLKRQDARIIVGLFYETEARKVFCEVYKERLFGKKYVWFLIGWYADNWFKIYDPSINCTVDEMTEAVEGHITTEIVMLNPANTRSISNMTSQEFVEKLTKRLKRHPEETGGFQEAPLAYDAIWALALALNKTSGGGGRSGVRLEDFNYNNQTITDQIYRAMNSSSFEGVSGHVVFDASGSRMAWTLIEQLQGGSYKKIGYYDSTKDDLSWSKTDKWIVISRTHSPT

SEQ ID NO: 74484 - protein, 132 aa, Homo sapiens
MQEHKLKVARLDNIFLTRMHWSNVGGLSGMILTLKETGLPKCVLSGPPQLEKYLEAIKIFSGPLKGIELAVRPHSAPEYEDETMTVYQIPIHSEQRRGKHQPWQSPERPLSRLSPERSSDSESNENEPHLPH

SEQ ID NO: 74485 - protein, 565 aa, Homo sapiens
MVAPKSHTDDWAPGPFSSKPQRSQLQIFSSVLQTSLLFLLMGLRASGKDSAPTVVSGILGGSVTLPLNISVDTEIENVIWIGPKNALAFARPKENVTIMVKSYLGRLDITKWSYSLCISNLTLNDAGSYKAQINQRNFEVTTEEEFTLFVYEQLQEPQVTMKSVKVSENFSCNITLMCSVKGAEKSVLYSWTPREPHASESNGGSILTVSRTPCDPDLPYICTAQNPVSQRSSLPVHVGQFCTDPGASRGGTTGETVVGVLGEPVTLPLALPACRDTEKVVWLFNTSIISKEREEAATADPLIKSRDPYKNRVWVSSQDCSLKISQLKIEDAGPYHAYVCSEASSVTSMTHVTLLIYRPERNTKLWIGLFLMVCLLCVGIFSWCIWKRKGRCSVPAFCSSQAEAPADTPEPTAGHTLYSVLSQGYEKLDTPLRPARQQPTPTSDSSSDSNLTTEEDEDRPEVHKPISGRYEVFDQVTQEGAGHDPAPEGQADYDPVTPYVTEVESVVGENTMYAQVFNLQGKTPVSQKEESSATIYCSIRKPQVVPPPQQNDLEIPESPTYENFT

SEQ ID NO: 74486 - protein, 101 aa, Homo sapiens
MGKRQHQKDKMYITCAEYTHFYGGKKPDLPQTNFRRLPFDHCSLSLQPFVYPVCTPDGIVFDLLNIVPWLKKYGTNPSNGEGSTTAQCCLPCSPTTPTSWL

SEQ ID NO: 74487 - protein, 220 aa, Homo sapiens
SSGRQCMHPLSVHLTKQLCCCSVGKAWGPHCEKCPLPGTAAFKEICPGGMGYTVSGVHRRRPIHHHVGKGPVFVKPKNTQPVAKSTHPPPLPAKEEPVEALTFSREHGPGVAEPEVATAPPEKEIPSLDQEKTKLEPGQPQLSPGISTIHLHPQFPGIVIEKTSPPVPVEVAPEASTSSASQVIAPTQVTEINECTVNPDICGAGHCINLPVRYTCICYE

SEQ ID NO: 74488 - protein, 125 aa, Homo sapiens
MVKLSKEAKQRLQQLFKGSQFAIRWGFIPLVIYLGFKRGADPGMPEPTVLRVWWLTPVISALWKAKVGRSWEDCLKLGVQDQPGQRSETHLYQKKKTYFGDKGLFGLLDLEAISGQHGRCVLWLG

SEQ ID NO: 74489 - protein, 54 aa, Homo sapiens
MTTFKEAVTFKDVAVFFTEEELGLLDPAQRKLYQDVMLENFTNLLSVGEHRHPL

SEQ ID NO: 74490 - protein, 226 aa, Homo sapiens
MSTEKVDQKEEAGEKEVCGDQIKGPDKEEEPPAAASHGQGWRPGGRAARNARPEPGARHPALPAMVNDPPVPALLWAQEVGQVLAGRARRLLLQFGVLFCTILLLLWVSVFLYGSFYYSYMPTVSHLSPVHFYYRTDCDSSTTSLCSFPVANVSLTKGGRDRVLMYGQPYRVTLELELPESPVNQDLGMFLVTISCYTRGGRIISTSSRSVMLHYRSDLLQMLDTL

SEQ ID NO: 74491 - protein, 77 aa, Homo sapiens
MKPALLEVMRMNRICRMVLATCLGSFILVIFYFQSMLHPVMRRNPFGVDICCRKGSRSPLQELYNPIQVSFKHSVSM

SEQ ID NO: 74492 - protein, 83 aa, Homo sapiens
MAVTLDKDAYYRRVKRLYSNWREFPGSVPHPFRCSRIIHRRRPRTLPLNRESPAFTLSCGHHHLPRVPALVMHSSTSRSLFPP

SEQ ID NO: 74493 - protein, 98 aa, Homo sapiens
MEPERCRIQTEFNQLRNILDRVEQRELKKLEQEEKKGLRIIEEAENDLVHQTQSLRELISDLERRCQGSTMELLQDVSDVTERSEFWTLRKPEALPTK

SEQ ID NO: 74494 - protein, 37 aa, Homo sapiens
MKRMMKMRTPQYSTSNTGLSGDSREPGHLAAVRPLNL

SEQ ID NO: 74495 - protein, 102 aa, Homo sapiens
SGDTSSNEEIGSTRDADENEFLGNIDGGDLKVPEEEADSISNEDSATNSSDNEDPQVNIVEEDPLNSGDDVSEQDVPDLFDTDNVIVCQYDKAFPRRTSFNT

SEQ ID NO: 74496 - protein, 38 aa, Homo sapiens
MGSACIKVTKYFLFLFNLIFFILGAVILGFGVWILADK

SEQ ID NO: 74497 - protein, 264 aa, Homo sapiens
MSARKSSDASACSSSEISDSFVKEFLAKAKEDFLKKWENPTQNNAGLEDFERKKTLGTGSFGRVMLVKHKATEQYYAMKILDKQKVVKLKQIEHTLNEKRILQAVNFPFLVRLEYAFKDNSNLYMVMEYVPGGEMFSHLRRIGRFSEPHARFYAAQIVLTFEYLHSLDLIYRDLKPENLLIDHQGYIQVTDFGFAKRVKGRTWTLCGTPEYLAPEIILSKGYNKAVDWWALGVLIYEMAAGYPPFFADQPIQIYEKIVSGKQNF

SEQ ID NO: 74498 - protein, 89 aa, Homo sapiens
MEKLAASTEPQGPRPVLGRESVQVPDDQDFRSFRSECEAEVGWNLTYSRAGVSVWVQAVEMDRTLHKIKCRMECCDVPAETLYDVLHDI

SEQ ID NO: 74499 - protein, 716 aa, Homo sapiens
SPGMTPGTPRSSGLFWRVTCPHLRSISGLCSRTMVGFQKGTRQLLGSRTQLELVLAGASLLLAALLLGCLVALGVQYHRDPSHSTCLTEACIRVAGKILESLDRGVSPCEDFYQFSCGGWIRRNPLPDGRSRWNTFNSLWDQNQAILKHLLENTTFNSSSEAEQKTQRFYLSCLQVERIEELGAQPLRDLIEKIGGWNITGPWDQDNFMEVLKAVAGTYRATPFFTVYISADSKSSNSNVIQVDQSGLFLPSRDYYLNRTANEKVLTAYLDYMEELGMLLGGRPTSTREQMQQVLELEIQLANITVPQDQRRDEEKIYHKMSISELQALAPSMDWLEFLSFLLSPLELSDSEPVVVYGMDYLQQVSELINRTEPSILNNYLIWNLVQKTTSSLDRRFESAQEKLLETLYGTKKSCVPRWQTCISNTDDALGFALGSLFVKATFDRQSKEIAEGMISEIRTAFEEALGQLVWMDEKTRQAAKEKADAIYDMIGFPDFILEPKELDDVYDGYEISEDSFFQNMLNLYNFSAKVMADQLRKPPSRDQWSMTPQTVNAYYLPTKNEIVFPAGILQAPFYARNHPKALNFGGIGVVMGHELTHAFDDQGREYDKEGNLRPWWQNESLAAFRNHTACMEEQYNQYQVNGERLNGRQTLGENIADNGGLKAAYNAYKAWLRKHGEEQQLPAVGLTNHQLFFVGFAQVSPSRKAWGLPLCPAPS

SEQ ID NO: 74500 - protein, 177 aa, Homo sapiens
  MOD_RES (1)..(1): Any amino acid
XTPTGYIESLPRVVKRRVNALKNLQVKCAQIEAKFYEEVHDLERKYAVLYQPLFDKRFEIINAIYEPTEEECEWKPDEEDEISEELKEKAKIEDEKKDEEKEDPKGIPEFWLTVFKNVDLLSDMVQEHDEPILKHLKDIKVKFSDAGQPMSFVLEFHFEPNEYFTNEVLTKTYRMSS

SEQ ID NO: 74501 - protein, 152 aa, Homo sapiens
MPLRLDIKRKLTARSDRVKSVDLHPTEPWMLASLYNGSVCVWNHETQTLVKTFEVCDLPVRAAKFVARKNWVVTGADDMQIRVFNYNTLERVHMFEAHSDYIRCIAVHPTQPFILTSSGHTHYVMQIVINPKDNNQFASASLDRTIKVWQLG

SEQ ID NO: 74502 - protein, 449 aa, Homo sapiens
MLWWEEVEDCYEREDVQKKTFTKWVNAQFSKFGKQHIENLFSDLQDGRRLLDLLEGLTGQKLPKEKGSTRVHALNNVNKALRVLQNNNVDLVNIGSTDIVDGNHKLTLGLIWNIILHWQVKNVMKNIMAGLQQTNSEKILLSWVRQSTRNYPQVNVINFTTSWSDGLALNALIHSHRPDLFDWNSVVCQQSATQRLEHAFNIARYQLGIEKLLDPEDVDTTYPDKKSILMYITSLFQVLPQQVSIEAIQEVEMLPRPPKVTKEEHFQLHHQMHYSQQITVSLAQGYERTSSPKPRFKSYAYTQAAYVTTSDPTRSPFPSQHLEAPEDKSFGSSLMESEVNLDRYQTALEEVLSWLLSAEDTLQAQGEISNDVEVVKDQFHTHEGYMMDLTAHQGRVGNILQLGSKLIGTGKLSEDEETEVQEQMNLLNSRWECLRVASMEKQSKCFKKI

SEQ ID NO: 74503 - protein, 126 aa, Homo sapiens
MGIVMSFQEIKPQSHYNHGYGEPLGRKTHIDDYSTWDIVKATQYGIYERCRELVEAGYDVRQPDKENVTLLHWAAINNRIDLVKYYISKGAIVDQLGGDLNSTPLHWATRQGHLSMVVQLMKYGAD

SEQ ID NO: 74504 - protein, 1745 aa, Homo sapiens
MKLNPQQAPLYGDCVVTVLLAEEDKAEDDVVFYLVFLGSTLRHCTSTRKVSSDTLETIAPGHDCCETVKVQLCASKEGLPVFVVAEEDFHFVQDEAYDAAQFLATSAGNQQALNFTRFLDQSGPPSGDVNSLDKKLVLAFRHLKLPTEWNVLGTDQSLHDAGPRETLMHFAVRLGLLRLTWFLLQKPGGRGALSIHNQEGATPVSLALERGYHKLHQLLTEENAGEPDSWSSLSYEIPYGDCSVRHHRELDIYTLTSESDSHHEHPFPGDGCTGPIFKLMNIQQQLMKTNLKQMDSLMPLMMTAQDPSSAPETDGQFLPCAPEPTDPQRLSSSEETESTQCCPGSPVAQTESPCDLSSIVEEENTDRSCRKKNKGVERKGEEVEPAPIVDSGTVSDQDSCLQSLPDCGVKGTEGLSSCGNRNEETGTKSSGMPTDQESLSSGDAVLQRDLVMEPGTAQYSSGGELGGISTTNVSTPDTAGEMEHGLMNPDATVWKNVLQGGESTKERFENSNIGTAGASDVHVTSKPVDKISVPNCAPAASSLDGNKPAESSLAFSNEETSTEKTAETETSRSREESADAPVDQNSVVIPAAAKDKISDGLEPYTLLAAGIGEAMSPSDLALLGLEEDVMPHQNSETNSSHAQSQKGKSSPICSTTGDDKLCADSACQQNTVTSSGDLVAKLCDNIVSESESTTARQPSSQDPPDASHCEDPQAHTVTSDPVRDTQERADFCPFKVVDNKGQRKDVKLDKPLTNMLEVVSHPHPVVPKMEKELVPDQAVISDSTFSLANSPGSESVTKDDALSFVPSQKEKGTATPELHTATDYRDGPDGNSNEPDTRPLEDRAVGLSTSSTAAELQHGMGNTSLTGLGGEHEGPAPPAIPEALNIKGNTDSSLQSVGKATLALDSVLTEEGKLLVVSESSAAQEQDKDKAVTCSSIKENALSSGTLQEEQRTPPPGQDTQQFHEKSISADCAKDKALQLSNSPGASSAFLKAETEHNKEVAPQVSLLTQGGAAQSLVPPGASLATESRQEALGAEHNSSALLPCLLPDGSDGSDALNCSQPSPLDVGVKNTQSQGKTSACEVSGDVTVDVTGVNALQGMAEPRRENISHNTQDILIPNVLLSQEKNAVLGLPVALQDKAVTDPQGVGTPEMIPLDWEKGKLEGADHSCTMGDAEEAQIDDEAHPVLLQPVAKELPTDMELSAHDDGAPAGVREVMRAPPSGRERSTPSLPCMVSAQDAPLPKGADLIEEAASRIVDAVIEQVKAAGALLTEGEACHMSLSSPELGPLTKGLESAFTEKVSTFPPGESLPMGSTPEEATGSLAGCFAGREEPEKIILPVQGPEPAAEMPDVKAEDEVDFRASSISEEVAVGSIAATLKMKQGPMTQAINRENWCTIEPCPDAASLLASKQSPECENFLDVGLGRECTSKQGVLKRESGSDSDLFHSPSDDMDSIIFPKPEEEHLACDITGSSSSTDDTASLDRHSSHGSDVSLSQILKPNRSRDRQSLDGFYSHGMGAEGRESESEPADPGDVEEEEMDSITEVPANCSVLRSSMRSLSPFRRHSWGPGKNAASDAEMNHRSFSLEGLTGGAGVGNKPSSSLEVSSANAEELRHPFSGEERVDSLVSLSEEDLESDQREHRMFDQQICHRSKQQGFNYCTSAISSPLTKSISLMTISHPGLDNSRPFHSTFHNTSANLTESITEENYNFLPHSPSKKDSEWKSGTKVSRTFSYIKNKMSSSKKSK

SEQ ID NO: 74505 - protein, 213 aa, Homo sapiens
MFTSEKGVVEEWLSEFKTLPETSLPNYATNLKDKSSLVSSLYKVIQEPQSELLEPVCHQLFEFYRSGEEQLLQFTLQFLPELIWCYLAVSASRNVHSSGCIEALLLGVYNLEIVDKQGHTKVLSFTIPSLSKPSVYHEPSSIGSMALTESALSQHGLSKVVYSGPHPQREMLTAQNRFEVLTFLLLCYNAALTYMPSVSLQSLCQICSRLLMQ

SEQ ID NO: 74506 - protein, 57 aa, Homo sapiens
  MOD_RES (1)..(1): Any amino acid
XLANTVEEDEEETKYEIFPWALGKNWRKLFPNFLKLRDQLWDRIDYRAIVSRRCCEE

SEQ ID NO: 74507 - protein, 118 aa, Homo sapiens
  MOD_RES (1)..(1): Any amino acid
XAREAELRQLRKSNMEFEERNAALQKHVESMRTAVEKLEVDVIQERSRNTVLQQHLETLRQVLTSSFASMPLPGSGETPTVDTIDSYMNRLHSIILANPQDNENFIATVREVVNRLDR

SEQ ID NO: 74508 - protein, 714 aa, Homo sapiens
  MOD_RES (1)..(1): Any amino acid
XTDEQTDFGLGDAHQSDGLNLEREIVSQTTATQEKSQEELPTTNNSVSKEIWLDFEDFCVCFQNIYIFHKPSSYCLNFQKSEFKFSEERVSYYLFVDSLKPIELLVCFSALVRWGEYGALTKDSPPIEPGLLTAETFSWKSLKPGSLVLKIHTYATKATVVRLPVGRHMLLFNAYSPVGHSIHICSMVSFVIGDEHVVLPNFEPESCRFTEQSLLIMKAIGNVIANFKDKGKLSAALKDLQTAHYPVPFHDKELTAQHFRVFHLSLWRLMKKVQITKPPPNFKFAFRAMVLDLELLNSSLEEVSLVEWLDVKYCMPTSDKEYSAEEVAAAIKIQAMWRGTYVRLLMKARIPDTKENISVADTLQKVWAVLEMNLEQYAVSLLRLMFKSKCKSLESYPCYQDEETKIAFADYTVTYQEQPPNSWFIVFRETFLVHQDMILVPKVYTTLPICILHIVNNDTMEQVPKVFQKVVPYLYTKNKKGYTFVAEAFTGDTYVAASRWKLRLIGSSAPLPCLSRDSPCNSFAIKEIRDYYIPNDKKILFRYSVKVLTPQPATIQVRTSKPDAFIKLQVLENEETMVSSTGKGQAIIPAFHFLKSEKGLSSQSYGERHEELINLGSPDSHTISEGQKSSVTSKTTRKGKEKSSEKEKTAKEKQAPRFEPQISTVHPQQEDPNKPYWILRLLRLVCITLAGSLRKHLMLRVRLYLKAKLNQKKK

SEQ ID NO: 74509 - protein, 133 aa, Homo sapiens
  MOD_RES (1)..(1): Any amino acid
XGPAHVVTVIARQRGDQLVPFSTKSGDTLLLLHHGDFSAEEVFHRELRSNSMKTWGLRAAGWMAMFMGLNLMTRILYTLAFFRLLSPQNVTWKTRSQQMTCTSLLSPLLQRGSEGSISKPDSGEGKWPAEKWS

SEQ ID NO: 74510 - protein, 36 aa, Homo sapiens
AITGVVCYACRIASTLLLYQELMRKGIRWLICHLSI

SEQ ID NO: 74511 - protein, 190 aa, Homo sapiens
ISSNANMLRKGPAEDMSSKLKIMYRTYRIQARSMSGHPEAAQMVRREFQLDLDEIENDNGTVRCEMPELVQHKLDDIFEPVLIPEPKIRAVSPHFDDMHSNTASTINFIISQVASGDINTSIQALTQIDEVLRQEDKAEAMSGHIDQFLIATFMQLRLIYNTHMADEKLEKDEIIKLYSCIIGNMISLFQ

SEQ ID NO: 74512 - protein, 52 aa, Homo sapiens
MAAAAGDGTVKPLQSAMKLANGAIELDTGNRPRRADATGGGLPAESEAEGCV

SEQ ID NO: 74513 - protein, 328 aa, Homo sapiens
  MOD_RES (1)..(1): Any amino acid
XIQNGNASLFFRRVSLLDEGIYTCYVGTAIQVITNKVVLKVGVFLTPVMKYEKRNTNSFLICSVLSVYPRPIITWKMDNTPISENNMEETGSLDSFSINSPLNITGSNSSYECTIENSLLKQTWTGRWTMKDGLHKMQSEHVSLSCQPVNDYFSPNQDFKVTWSRMKSGTFSVLAYYLSSSQNTIINESRFSWNKELINQSDFSMNLMDLNLSDSGEYLCNISSDEYTLLTIHTVHVEPSQETASHNKGLWILVPSAILAAFLLIWSVKCCRAQLEARRSRHPADGAQQERCCVPPGERCPSAPDNGEENVVRHYFLYQTIYSIKMLL

SEQ ID NO: 74514 - protein, 85 aa, Homo sapiens
  MOD_RES (1)..(1): Any amino acid
XKCFAPFRDVPKQMMQMFGLGAISLILVCLPIYCRSLFWRSEPADDLQRQDNRVVTGLKKQRRKRKRKSEMLQKAARGREEHGDE

SEQ ID NO: 74515 - protein, 108 aa, Homo sapiens
MERPLENGDESPDSQGHATDWRFAVCSFRDAWEEEEPASQMHVKDPGPPRPPAGATQDEELQGSPLSRKFQLPPAADESGDAQRGTVESSSVLSEGPGPSGVESLLCP

SEQ ID NO: 74516 - protein, 111 aa, Homo sapiens
QEKKEKRQGTAPPPMKLPPPYKALTDDSDENEEEDAFTDQKIRQRYADLPGELHIIELEKDKNGLGLSLAGNKDRSRMSIFVVGINPEGPAAADGRMRIGDELLEVRSMCF

SEQ ID NO: 74517 - protein, 459 aa, Homo sapiens
MAEQGRCCDLAALGEQGGAPPWEKSLGTYIGCFSDDGHERTLKGAVFYDLRKMTVSHCQDACAERSYVYAGLEAGAECYCGNRLPAVSVGLEECNHECKGEKGSVCGAVDRLSVYRVDELQPGSRKRRTATYRGCFRLPENITHAFPSSLIQANVTVGTCSGFCSQKEFPLAILRGWECYCAYPTPRFNLRDAMDSSVCGQDPEAQRLAEYCEVYQTPVQDTRCTDRRFLPNKSKVFVALSSFPGAGNTWARHLIEHATGFYTGSYYFDGTLYNKGFKGEKDHWRSRRTICVKTHESGRREIEMFDSAILLIRNPYRSLVAEFNRKCAGHLGYAADRNWKSKEWPDFVNSYASWWSSHVLDWLKYGKRLLVVHYEELRRSLVPTLREMVAFLNVSVSEERLLCVENNKEGSFRRRGRRSHDPEPFTPEMKDLINGYIRTVDQALRDHNWTGLPREYVPR

SEQ ID NO: 74518 - protein, 153 aa, Homo sapiens
MKRSLQALYCQLLSFLLILALTEALAFAIQEPSPRESLQVLPSGTPPGTMVTAPHSSTRHTSVVMLTPNPDGPPSQAAAPMATPTPRAEGHPPTHTISTIAATVTAPHSESSLSTGPAPAAMATTSSKPEGRPRGQAAPTILLTKPPGATSRP

SEQ ID NO: 74519 - protein, 82 aa, Homo sapiens
MVNEARGNSSLNPCLEGSASSGSESSKDSSRCSTPGLDPERHERLREKMRRRLESGDKWFSLEFFPPRTAEGAVNLISRPNR

SEQ ID NO: 74520 - protein, 113 aa, Homo sapiens
MKGKRGREELGNTQSAFFSTFGDAKPRVQLLGEARSPPPAAALLDMDPETCPCPSGGSCTCADSCKCEGCKCTSCKKSCCSCCPAECEKCAKDCVCKGGEAAEAEAEKCSCCQ

SEQ ID NO: 74521 - protein, 391 aa, Homo sapiens
MVVVLFLMITASTYAIRVSNYDIFWYTHNLFFVFYMLLTLHVSGGLLKYQTNLDTHPPGCISLNRTSSQNISLPEYFSEHFHEPFPEGFSKPAEFTQHKFVKICMEEPRFQANFPQTWLWISGPLCLYCAERLYRYIRSNKPVTIISVMSHPSDVMEIRMVKENFKARPGQYITLHCPSVSALENHPFTLTMCPTETKATFGVHLKIVGDWTERFRDLLLPPSSQDSEILPFIQSRNYPKLYIDGPFGSPFEESLNYEVSLCVAGGIGVTPFASILNTLLDDWKPYKLRRLYFIWFWQENRPDYVNIQLYLSQTDGIQKIIGEKYHALNSRLFIGRPRWKLLFDEIAKYNRGKTVGVFCCGPNSLSKTLHKLSNQNNSYGTRFEYNKESFS

SEQ ID NO: 74522 - protein, 225 aa, Homo sapiens
MTEWETAAPAVAETPDIKLFGKWSTDDVQINDISLQMTTTSVMRGLLHQKEHHISHMDYIAVKEKYAKYLPHSAGRYAAKRFRKAQCPIVERLTNSMMMHGRNNGKKLMTVRIVKHAFEIIHLLTGENPLQVLVNAIINSGPREDSTRIGRAGTVRRQAVDVSPLRRVNQAIWLLCTGAREAAFRNIKTIAECLADELINAAKGSSNSYAIKKKDELERVAKSNR

SEQ ID NO: 74523 - protein, 61 aa, Homo sapiens
MPLPFGLKLKRTRRYTVSSKSCLVARIQLLNNEFVEFTLSVESTGQESLEAVAQRLELREG

SEQ ID NO: 74524 - protein, 335 aa, Homo sapiens; identical to SEQ ID NO: 45998

SEQ ID NO: 74525 - protein, 152 aa, Homo sapiens
MTDVPATFTQAECNGDKPPENGQQTITKISEELTDVDSPLPHYRVEPSLEGALTKGSQEERRKLQGNMLLNSSMEDKMLKENPEEKLFIVHKAITDLSLQETSADEMTFREGHQWEKIPLSGSNQEIRRQKERITEQPLKEEEDEDRKNKGH

SEQ ID NO: 74526 - protein, 174 aa, Homo sapiens
MSRRYDSRTTIFSPEGRLYQVEYAMEAIGHAGTCLGILANDGVLLAAERRNIHKLLDEVFFSEKIYKLNEDMACSVAGITSDANVLTNELRLIAQRYLLQYQEPIPCEQLVTALCDIKQAYTQFGGKRPFGVSLLYIGWDKHYGFQLYQSDPSGNYGGWKATCIGNNSAWKLQH

SEQ ID NO: 74527 - protein, 203 aa, Homo sapiens
  MOD_RES (1)..(1): Any amino acid
XLPRDWTWAEGMGLGPPELSGSASPSRYHGPARWMPPRWAQGAPELEQERRHRQIVSWFADHPRAPFGLHRLVELGQSSGKKAGDWKAVESCSDVTRLVVYVSQDCTVYKADVARLVARPDPTAEWKSVVILVPVRLGGETLNPVYVPCVKELLRCELCLGIMGGKPRHSLYFIGYQDDFLLYLDPHYCQPTVDVSQADFPLE

SEQ ID NO: 74528 - protein, 86 aa, Homo sapiens
MAAMAVGGAGGSRVSSGRDLNCVPEIADTLGAVAKQGLEYANCGKAFSMDSSRLKSGEDSQELRGGHVTGAEFWCIFGSSSFPAAP

SEQ ID NO: 74529 - protein, 276 aa, Homo sapiens
MMEKYEKIGKIGEGSYGVVFKCRNRDTGQIVAIKKFLESEDDPVIKKIALREIRMLKQLKHPNLVNLLEVFRRKRRLHLVFEYCDHTVLHELDRYQRGVPEHLVKSITWQTLQAVNFCHKHNCIHRDVKPENILITKHSVIKLCDFGFARLLTGPSDYYTDYVATRWYRSPELLVGDTQYGPPVDVWAIGCVFAELLSGVPLWPGKSDVDQLYLIRKTLGDLIPRHQQVFSTNQYFSGVKIPDPEDMEPLELKFPNISYPALGLLKGRVPIASRTE

SEQ ID NO: 74530 - protein, 72 aa, Homo sapiens
MPSETLWEIAKAEVEKRGINGSEGDGAEIAEKFVFFIGSKNGGKTTIILRCLDSQKISLTFGNSVEEPLYWT

SEQ ID NO: 74531 - protein, 151 aa, Homo sapiens
MNTSIPYQQNPYNPRGSSNVIQCYRCGDTCKGEVVRVHNNHFHIRCFTCQVCGCGLAQSGFFFKNQEYICTQDYQQLYGTRCDSCRDFITGEVISALGRTYHPKCFVCSLCRTSPGMESSSLPPALPSASPSLVNSASEAFPHWRQGDLQR

SEQ ID NO: 74532 - protein, 72 aa, Homo sapiens
MGDKKSPTRPKRQPKPSSDEGYWDCSVCTFRNSAEAFKCMMCDVRKGTSTRDNRKRAWLPFGGTILLAQASA

SEQ ID NO: 74533 - protein, 121 aa, Homo sapiens
RVGCSAPRKGKSSGTSLLCSQGLGGVSWPGEQQRPLIGRSPSVSHTQGTIQAFEIQKSHCESTQAGNNPFLYVCVCPKWMGGLQPVLPLLTEGTSLSRALSFCTHSWRTDSARHPPASLTL

SEQ ID NO: 74534 - protein, 10 aa, Homo sapiens
MEPFSCDTFV

SEQ ID NO: 74535 - protein, 136 aa, Homo sapiens
MATLKEKLIAPVAEEEATVPNNKITVVGVGQVGMACAISILGKSLADELALVDVLEDKLKGEMMDLQHGSLFLQTPKIVADKDYSVTANSKIVVVTAGVRQQEGESRLNLVQRNVNVFKFIIPQIVKYSPDCIIIV

SEQ ID NO: 74536 - protein, 290 aa, Homo sapiens
MADTPRDAGLKQAPASRNEKAPVDFGYVGIDSILEQMRRKAMKQGFEFNIMVVGQSGLGKSTLINTLFKSKISRKSVQPTSEERIPKTIEIKSITHDIEEKGVRMKLTVIDTPGFGDHINNENCWQPIMKFINDQYEKYLQEEVNINRKKRIPDTRVHCCLYFIPATGHSLRPLDIEFMKRLSKVVNIVPVIAKADTLTLEERVHFKQRITADLLSNGIDVYPQKEFDEDSEDRLVNEKFREMIPFAVVGSDHEYQVNGKRILGRKTKWGTIEETRFHHVGQAGLELLTS

SEQ ID NO: 74537 - protein, 134 aa, Homo sapiens
  MOD_RES (1)..(1): Any amino acid
XVLGGGEDGIEPVSPPEGMTEPGHSRSAVYPLLYRDGEQTEPSRMGSKSPGNTSQPPAFFSKLTESNSAMVKSKKQEINKKLNTHNRNEPEYNISQPGTEIFNMPAITGTVLVHKKKFSRLQSLPLNLCQTSPL

SEQ ID NO: 74538 - protein, 288 aa, Homo sapiens
  MOD_RES (1)..(1): Any amino acid
XTEGSEEDDKENDKTEEMPNDSVLENKSLQENEEEEIGNLELAWDMLDLAKIIFKRQETKEAQLYAAQAHLKLGEVSVESENYVQAVEEFQSCLNLQEQYLEAHDRLLAETHYQLGLAYGYNSQYDEAVAQFSKSIEVIENRMAVLNEQVKEAEGSSAEYKKEIEELKELLPEIREKIEDAKESQRSGNVAELALKATLVESSTSGFTPGGGGSSVSMKRKPEEESPRKDDAKKAKQEPEVNGGSGDAVPSGNEVSENMEEEAENQAESRAAVEGTVEAGATVESTAC

SEQ ID NO: 74539 - protein, 4065 aa, Homo sapiens
KTESWHCLPQEMDSSQTLDTSQTRFNVRTEDTEVTDFPSLEEGILTQSENQVKEPNRDLFCSPLLVIQDSFASPDLPLLTCLTQDQEFAPDSLFHQSELSFAPLRGIPDKSEDTEWSSRPSEVSEALFQATAEVASDLASSRFSVSQHPLIGSTAVGSQCPFLPSEQGNNEETISSVDELKIPKDCDRYDDLCSYMSWKTRKDTQWPENNLADKDQVSVATSFDITDENIATKRSDHFDAARSYGQYWTQEDSSKQAETYLTKGLQGKVESDVITLDGLNENAVVCSERVAELQRKVGHSNLGINESFSFLLPSFVPHKPTRESEYHSSDLRMLRMSPDTVPKAPKHLKAGDTSKGGIAKVTQSNLKSGITTTPVDSDIGSHLSLSLEDLSQLAVSSPLETTTGQHTDTLNQKTLADTHLTEETLKVTAIPEPADQKTATPTVLSSSHSHRGKPSIFYQQGLPDSHLTEEALKVSAAPGLADQTTGMSTLTSTSYSHREKPGTFYQQELPESNLTEEPLEVSAAPGPVEQKTGIPTVSSTSHSHVEDLLFFYRQTLPDGHLTDQALKVSAVSGPADQKTGTATVLSTPHSHREKPGIFYQQEFADSHQTEETLTKVSATPGPADQKTEIPAVQSSSYSQREKPSILYPQDLADSHLPEEGLKVSAVAGPADQKTGLPTVPSSAYSHREKLLVFYQQALLDSHLPEEALKVSAVSGPADGKTGTPAVTSTSSASSSLGEKPSAFYQQTLPNSHLTEEALKVSIVPGPGDQKTGIPSAPSSFYSHREKPIIFSQQTLPDFLFPEEALKVSAVSVLAAQKTGTPTVSSNSHSHSEKSSVFYQQELPDSDLPRESLKMSAIPGLTDQKTVPTPTVPSGSFSHREKPSIFYQQEWPDSYATEKALKVSTGPGPADQKTEIPAVQSSSYPQREKPSVLYPQVLSDSHLPEESLKVSAFPGPADQMTDTPAVPSTFYSQREKPGIFYQQTLPESHLPKEALKISVAPGLADQKTGTPTVTSTSYSQHREKPSIFHQQALPGTHIPEEAQKVSAVTGPGNQKTWIPRVLSTFYSQREKPGIFYQQTLPGSHIPEEAQKVSPVLGPADQKTGTPTPTSASYSHTEKPGIFYQQVLPDNHPTEEALKISVASEPVDQTTGTPAVTSTSYSQYREKPSIFYQQSLPSSHLTEEAKNVSAVPGPADQKTVIPILPSTFYSHTEKPGVFYQQVLPHSHPTEEALKISVASEPVDQTTGTPTVTSTSYSQHTEKPSIFYQQSLPGSHLTEEAKNVSAVPGPGDRKTGIPTLPSTFYSHTEKPGSFYQQVLPHSHLPEEALEVSVAPGPVDQTIGTPTVTSPSSSFGEKPIVIYKQAFPEGHLPEESLKVSVAPGPVGQTTGAPTITSPSYSQHRAKSGSFYQLALLGSQIPEEALRVSSAPGPADQTTGIPTITSTSYSFGEKPIVNYKQAFPDGHLPEEALKVSIVSGPTEKKTDIPAGPLGSSALGEKPITFYRQALLDSPLNKEVVKVSAAPGPADQKTETLPVHSTSYSNRGKPVIFYQQTLSDSHLPEEALKVPPVPGPDAQKTETPSVSSSLYSYREKPIVFYQQALPDSELTQEALKVSAVPQPADQKTGLSTVTSSFYSHTEKPNISYQQELPDSHLTEEALKVSNVPGPADQKTGVSTVTSTSYSHREKPIVSYQRELPHFTEAGLKILRVPGPADQKTGINILPSNSYPQREHSVISYEQELPDLTEVTLKAIGVPGPADQKTGIQIASSSSYSNREKASIFHQQELPDVTEEALNVFVVPGQGDRKTEIPTVPLSYYSRREKPSVISQQELPDSHLTEEALKVSPVSIPAEQKTGIPIGLSSSYSHSHKEKLKISTVHIPDDQKTEFPAATLSSYSQIEKPKISTVIGPNDQKTPSQTAFHSSYSQTVKPNILFQQQLPDRDQSKGILKISAVPELTDVNTGKPVSLSSSYFHREKSNIFSPQELPGSHVTEDVLKVSTIPGPAGQKTVLPTALPSSFSHREKPDIFYQKDLPDRHLTEDALKISSALGQADQITGLQTVPSGTYSHGENHKLVSEHVQRLIDNLNSSDSSVSSNNVLLNSQADDRVVINKPESAGFRDVGSEEIQDAENSAKTLKEIRTLLMEAENMALKRCNFPAPLARFRDISDISFIQSKKVVCFKEPSSTGVSNGDLLHRQPFTEESPSSRCIQKDIGTQTNLKCRRGIENWEFISSTTVRSPLQEAESKVSMALEETLRQYQAAKSVMRSEPEGCSGTIGNKIIIPMMTVIKSDSSSDASDGNGSCSWDSNLPESLESVSDVLLNFFPYVSPKTSITDSREEEGVSESEDGGGSSVDSLAAHVKNLLQCESSLNHAKEILRNAEEEESRVRAHAWNMKFNLAHDCGYSISELNEDDRRKVEEIKAELFGHGRTTDLSKGLQSPRGMGCKPEAVCSHIIIESHEKGCFRTLTSEHPQLDRHPCAFRSAGPSEMTRGRQNPSSCRAKHVNLSASLDQNNSHFKVWNSLQLKSHSPFQNFIPDEFKISKGLRMPFDEKMDPWLSELVEPAFVPPKEVDFHSSSQMPSPEPMKKFTTSITFSSHRHSKCISNSSVVKVGVTEGSQCTGASVGVFNSHFTEEQNPPRDLKQKTSSPSSFKMHSNSQDKEVTILAEGRRQSQKLPVDFERSFQEEKPLERSDFTGSHSEPSTRANCSNFKEIQISDNHTLISMGRPSSTLGVNRSSSRLGVKEKNVTITPDLPSCIFLEQRELFEQSKAPRADDHVRKHHSPSPQHQDYVAPDLPSCIFLEQRELFEQCKAPYVDHQMRENHSPLPQGQDSIASDLPSPISLEQCQSKAPGVDDQMNKHHFPLPQGQDCVVEKNNQHKPKSHISNINVEAKFNTVVSQSAPNHCTLAASASTPPSNRKALSCVHITLCPKTSSKLDSGTLDERFHSLDAASKARMNSEFNFDLHTVSSRSLEPTSKLLTSKPVAQDQESLGFLGPKSSLDFQVVQPSLPDSNTITQDLKTIPSQNSQIVTSRQIQVNISDFEGHSNPEGTPVFADRLPEKMKTPLSAFSEKLSSDAVTQITTESPEKTLFSSEIFINAEDRGHEIIEPGNQKLRKAPVKFASSSSVQQVTFSRGTDGQPLLLPYKPSGSTKMYYVPQLRQIPPSPDSKSDTTVESSHSGSNDAIAPDFPAQVLGTRDDDLSATVNIKHKEGIYSKRVVTKASLPVGEKPLQNENADASVQVLITGDENLSDKKQQEIHSTRAVTEAAQAKEKESLQKDTADSSAAAAAEHSAQVGDPEMKNLPDTKAITQKEEIHRKKTVPEEAWPNNKESLQINIEESECHSEFENTTRSVFRSAKFYIHHPVHLPSDQDICHESLGKSVFMRHSWKDFFQHHPDKHREHMCLPLPYQNMDKTKTDYTRIKSLSINVNLGNKEVMDTTKSQVRDYPKHNGQISDPQRDQKVTPEQTTQHTVSLNELWNKYRERQRQQRQPELGDRKELSLVDRLDRLAKILQNPITHSLQVSESTHDDSRGERSVKEWSGRQQQRNKLQKKKRFKSLEKSHKNTGELKKSKVLSHHRAGRSNQIKIEQIKFDKYILSKQPGFNYISNTSSDCRPSEESELLTDTTTNILSGTTSTVESDILTQTDREVALHERSSSVSTIDTARLIQAFGHERVCLSPRRIKLYSSITNQQRRYLEKRSKHSKKVLNTGHPLVTSEHTRRRHIQVANHVISSDSISSSASSFLSSNSTFCNKQNVHMLNKGIQAGNLEIVNGAKKHTRDVGITFPTPSSSEAKLEENSDVTSWSEEKREEKMLFTGYPEDRKLKKNKKNSHEGVSWFVPVENVESRSKKENVPNTCGPGISWFEPITKTRPWREPLREQNCQGQHLDGRGYLAGPGREAGRDLLRPFVRATLQESLQFHRPDFISRSGERIKRLKLIVQERKLQSMLQTERDALFNIDRERQGHQNRMCPLPKRVFLAIQKNKPISKKEMIQRSKRIYEQLPEVQKKREEEKRKSEYKSYRLRAQLYKKSDQSTSGEKSSLGLTQVYFPQSLGILFYEPREAESLLL

SEQ ID NO: 74540 - protein, 163 aa, Homo sapiens
DKKEMAINDCSKAIQLNPSYIRAILRRAELYEKTDKLDEALEDYKSILEKDPSIHQAREACMRLPKQIEERNERLKEEMLGKLKDLGNLVLRPFGLSTENFQIKQDSSTGSWCLCSWCPRFWLSYVQEEAHLLRLTFLIIHTHSPAKASPEPNKPVGWETAQT

SEQ ID NO: 74541 - protein, 430 aa, Homo sapiens
MDHPSREKDERQRTTKPMAQRSAHCSRPSGSSSSSGVLMVGPNFRVGKKIGCGNFGELRLGKNLYTNEYVAIKLEPIKSRAPQLHLEYRFYKQLGSAGEGLPQVYYFGPCGKYNAMVLELLGPSLEDLFDLCDRTFTLKTVLMIAIQLLSRMEYVHSKNLIYRDVKPENFLIGRQGNKKEHVIHIIDFGLAKEYIDPETKKHIPYREHKSLTGTARYMSINTHLGKEQSRRDDLEALGHMFMYFLRGSLPWQGLKADTLKERYQKIGDTKRNTPIEALCENFPEEMATYLRYVRRLDFFEKPDYEYLRTLFTDLFEKKGYTFDYAYDWVGRPIPTPVGSVHVDSGASAITRESHTHRDRPSQQQPLRNQVVSSTNGELNVDDPTGAHSNAPITAHAEVEVVEEANCLKMLNLWCCCFFKRKRKKTAQRHK

SEQ ID NO: 74542 - protein, 123 aa, Homo sapiens
  MOD_RES (1)..(1): Any amino acid
XQTSDYPVILSLETHCSWEQQQTMARHLTEILGEQLLSTTLDGVLPTQLPSPEELRRKILVKGKKLTLEEDLEYEEEEAEPELEESELALESQFETEPEPQEQNLQNKDKKKAMSLCSTILGS

SEQ ID NO: 74543 - protein, 1087 aa, Homo sapiens
MESGHLLWALLFMQSLWPQLTDGATRVYYLGIRDVQWNYAPKGRNVITNQPLDSDIVASSFLKSDKNRIGGTYKKTIYKEYKDDSYTDEVAQPAWLGFLGPVLQAEVGDVILIHLKNFATRPYTIHPHGVFYEKDSEGSLYPDGSSGPLKADDSVPPGGSHIYNWTIPEGHAPTDADPACLTWIYHSHVDAPRDIATGLIGPLITCKRGALDGNSPPQRQDVDHDFFLLFSVVDENLSWHLNENIATYCSDPASVDKEDETFQESNRMHAINGFVFGNLPELNMCAQKRVAWHLFGMGNEIDVHTAFFHGQMLTTRGHHTDVANIFPATFVTAEMVPWEPGTWLISCQVNSHFRDGMQALYKVKSCSMAPPVDLLTGKVRQYFIEAHEIQWDYGPMGHDGSTGKNLREPGSISDKFFQKSSSRIGGTYWKVRYEAFQDETFQEKMHLEEDRHLGILGPVIRAEVGDTIQVVFYNRASQPFSMQPHGVFYEKDYEGTVYNDGSSYPGLVAKPFEKVTYRWTVPPHAGPTAQDPACLTWMYFSAADPIRDTNSGLVGPLLVCRAGALGADGKQKGVDKEFFLLFTVLDENKSWYSNANQAAAMLDFRLLSEDIEGFQDSNRMHGTFEIYCQAGSHREAGMRAIYNVSQCPGHQATPRQRYQAARIYYIMAEEVEWDYCPDRSWEREWHNQSEKDSYGYIFLSNKDGLLGSRYKKAVFREYTDGTFRIPRPRTGPEEHLGILGPLIKGEVGDILTVVFKNNASRPYSVHAHGVLESTTVWPLAAEPGEVVTYQWNIPERSGPGPNDSACVSWIYYSAVDPIKDMYSGLVGPLAICQKGILEPHGGRSDMDREFALLFLIFDENKSWYLEENVATHGSQDPGSINLQDETFLESNKMHAINGKLYANLRGLTMYQGERVAWYMLAMGQDVDLHTIHFHAESFLYRNGENYRADVVDLFPGTFEVVEMVASNPGTWLMHCHVTDHVHAGMETLFTVFSRTEHLSPLTVITKETEKAVPPRDIEEGNVKMLGMQIPIKNVEMLASVLVAISVTLLLVVLALGGVVWYQHRQRKLRRNRRSILDDSFKLLSFKQ

SEQ ID NO: 74544 - protein, 106 aa, Homo sapiens
IERMKQIYQQLSRYRGLGLLASVPSNPNGNGGFMGYSAENIPGCSSSGSCSQGSGILHYAHGDSQQTHLLKQGRSSMGTGLSGGKRPSQEEDTQSIGPKVQRQSTN

SEQ ID NO: 74545 - protein, 184 aa, Homo sapiens
MGNPENIEDAYVAVIRPKNTASLNSREYRAKSYEILLHEVPIEGQKKKRKKVLLETKLQGNSEITQGILDYVVETTKPISPANQGIRGKRVVLMKKFPLDGEKMGREASLFIVPSVVKDNTKYTYTPGCPIFYCLQDIMRVCSESSTHFATLTARMLIALDKWLDERHAQSHFIPALFRPSPLE

SEQ ID NO: 74546 - protein, 146 aa, Homo sapiens
MKPAAREARLPPRSPGLRWALPLLLLLLRLGQILCAGGTPSPIPDPSVATVATGENGITQISSTAESFHKQNGTGTPQVETNTSEDGESSGANDSLRTPEQGSNGTDGASQKTPSSTEPIPVSDLRVALTGVRKAALSWSNGNGTA

SEQ ID NO: 74547 - protein, 248 aa, Homo sapiens
MADPHQLFDDTSSAQSRGYGAQRAPGGLSYPAASPTPHAAFLADPVSNMAMAYGSSLAAQGKELVDKNDWEVQYQQDTPVAPRFDVNAPDLYIPAMAFITYVLVAGLALGTQDRFSPDLLGLQASSALAWLTLEVLAILLSLYLVTVNTDLTTIDLVAFLGYKYVGMIGGVLMGLLFGKIGYYLVLGWCCVAIFVFMIRTLRLKILADAAAEGVPVRGARNQLRMYLTMAVAAAQPMLMYWLTFHLVR

SEQ ID NO: 74548 - protein, 975 aa, Homo sapiens
MKGLSGSRTQPPLCSGHTCGLAPPEDCEHLHHGPDARPPYLLSPADSCPGGRHRCSPRSSVHSECVMMPVVLGDHVSSSTFPRMHYSSHYDTRDDCAVAHAGAKINRIPANLLDQFEKQLPLHRDGFHTLQYQRTSAAAEQRSESPGRIRHLVHSVQKLFTKSHSLEGSSKSNANGTKADGRADDHHHAHHAKHSKRSKSKERKPEGKPRPGMSSWWSSDDNLDSDSTYRTPSVLNRHHLGPVAHCYPDALQSPFGDLSLKTSKSNNDVKCSACEGLALTPDAKYLKRSSWSTLTVSQAKEAYRKSSLNLDKPLLHQDAKPALRPCHYLQVPQDEWGGYPTGGKDEEIPCRRMRSGSYIKAMGDEESGESDSSPKTSPKSAILQEPLLKSIGQRPLGEHQTQTYLQAASDVPVGHSLDPAANYNSPKFRSRNQSYMRAVSTLSQASCVSQVSEAEINGQFESVCESVFSEVESQAMDALDLPGCFRTRSHSYLRAIQAGYSQDDECIPMMTPSDITSTIRSTAAVSYTNYKKTPPPVPPRTTSKPLISVTAQSSTESTQDAYQDSRAQRMSPWPQDSRGLYNSTDSLDSNKAMNLALETAAAQRHLPESQSSSVRTSDKAILVSKAEELLKSRCSSIGIQDSEFPEHQPYPRSDVETATDSDTESRGLREYHSVGVQVEDEKRHGRFKRSNSVTAAVQADLELEGFPGHITTEDKGLQFGSSFQRHSEPSTPTQYSAVRTVRTQGLFSYREDYRTQVDTSTLPPPDPWLEPAIDTVETGRMSPCRRDGSWFLKLLHAETKRMEGWCKEMEREAEENDLSEEILGKIRSAVGSAQLLMSQKFQQFYWLCQQNMDPSAMPRPTSQDLAGYWDMLQLSIEDVSMKFDELQRLRLNDWKMMESPERKEERKVPPPIPKKPPKGKFPITREKSLDLPDRQRQEARRRLMAAKRAASFRQNSASERADSIEIYIPEAQTRL

SEQ ID NO: 74549 - protein, 97 aa, Homo sapiens
MAQILPIRFQEHLQLQNLGINPANIGFSTLTMESDKFICIREKVGEQAQVVIIDMNDPSNPIRRPISADSAIMNPASKVIALKAKSCGGSYAAIFCR

SEQ ID NO: 74550 - protein, 79 aa, Homo sapiens
RKQGFQGELLDGAQDYMSGLDDMTDSDSCLSRKKIKKTESGMYACDLCDKTFQKSSSLLRHKYEHTATIGTSLKASFPL

SEQ ID NO: 74551 - protein, 1307 aa, Homo sapiens
MDSLPRLTSVLTLLFSGLWHLGLTATNYNCDDPLASLLSPMAFSSSSDLTGTHSPAQLNWRVGTGGWSPADSNAQQWLQMDLGNRVEITAVATQGRYGSSDWVTSYSLMFSDTGRNWKQYKQEDSIWTFAGNMNADSVVHHKLLHSVRARFVRFVPLEWNPSGKIGMRVEVYGCSYKSDVADFDGRSSLLYRFNQKLMSTLKDVISLKFKSMQGDGVLFHGEGQRGDHITLELQKGRLALHLNLGDSKARLSSSLPSATLGSLLDDQHWHSVLIERVGKQVNFTVDKHTQHFRTKGETDALDIDYELSFGGIPVPGKPGTFLKKNFHGCIENLYYNGVNIIDLAKRRKHQIYTVGNVTFSCSEPQIVPITFVNSSGSYLLLPGTPQIDGLSVSFQFRTWNKDGLLLSTELSEGSGTLLLSLEGGILRLVIQKMTERVAEILTGSNLNDGLWHSVSINARRNRITLTLDDEAAPPAPDSTWVQIYSGNSYYFGGCPDNLTDSQCLNPIKAFQGCMRLIFIDNQPKDLISVQQGSLGNFSDLHIDLCSIKDRCLPNYCEHGGSCSQSWTTFYCNCSDTSYTGATCHNSIYEQSCEVYRHQGNTAGFFYIDSDGSGPLGPLQVYCNITEDKIWTSVQHNNTELTRVRGANPEKPYAMALDYGGSMEQLEAVIDGSEHCEQEVAYHCRRSRLLNTPDGTPFTWWIGRSNERHPYWGGSPPGVQQCECGLDESCLDIQHFCNCDADKDEWTNDTGFLSFKDHLPVTQIVITDTDRSNSEAAWRIGPLRCYGDRRFWNAVSFYTEASYLHFPTFHAEFSADISFFFKTTALSGVFLENLGIKDFIRLEISSPSEITFAIDVGNGPVELVVQSPSLLNDNQWHYVRAERNLKETSLQVDNLPRSTRETSEEGHFRLQLNSQLFVGGTSSRQKGFLGCIRSLHLNGQKMDLEERAKVTSGVRPGCPGHCSSYGSICHNGGKCVEKHNGYLCDCTNSPYEGPFCKKEVSAVFEAGTSVTYMFQEPYPVTKNISLSSSAIYTDSAPSKENIALSFVTTQAPSLLLFINSSSQDFVVVLLCKNGSLQVRYHLNKEETHVFTIDADNFANRRMHHLKINREGRELTIQMDQQLRLSYNFSPEVEFRVIRSLTLGKVTENLGLDSEVAKANAMGFAGCMSSVQYNHIAPLKAALRHATVAPVTVHGTLTESSCGFMVDSDVNAVTTVHSSSDPFGKTDEREPLTNAVRSDSAVIGGVIAVVIFIIFCIIGIMTRFLYQHKQSHRTSQMKEKEYPENLDSSFRNEIDLQNTVSECKREYFI

SEQ ID NO: 74552 - protein, 120 aa, Homo sapiens
  MOD_RES (1)..(1): Any amino acid
XQLAGAGSMGSPGATTGWGLLDYKTEKYVMTRNWRVGALQRLLQFGIVVYVVGWALLAKKGYQERDLEPQFSIITKLKGVSVTQIKELGNRLWDVADFVKPPQAAGFRPFQSTRAQPGQP

SEQ ID NO: 74553 - protein, 1317 aa, Homo sapiens [sequence omitted]

SEQ ID NO: 74554 - protein, 23 aa, Homo sapiens
MGWAAFNLSNVTGNSRILCSVYC

SEQ ID NO: 74555 - protein, 169 aa, Homo sapiens
MAATLGPLGSWQQWRRCLSARDGSRMLLLLLLLGSGQGPQQVGAGQTFEYLKREHSLSKPYQGVGTGSSSLWNLMGNAMVMTQYIRLTPDMQSKQGALWNRVPCFLRDWELQVHFKIHGQGKKNLHGDGLAIWYTKDRMQPGPEEAIFSRSPAGIPLHLSHGEQRLPQL

SEQ ID NO: 74556 - protein, 14 aa, Homo sapiens
MVRSRLTAVSASWV

SEQ ID NO: 74557 - protein, 427 aa, Homo sapiens
MKQRKGQGSGGSRGRKKRGLSDISPSTSLPPLVEGQLRCFLKLTVNRVIWKIAKPPTCVLVRVRWWGETSDGTLFCPRDALQTEPKAVRTTTRYAIRCGPKQFTSYLTDMAVLVLEVITKLDGLPIGRVQINGLAQLSPTHQINGFFTIVSSTSKKLGELQVSLALEPLSETYDSYHPLPTTDMTENVLLSKQGFRENTEPSSTQFQVPSRPRDIHTIKIDGKELAANSSRSTTPRGKDHVCFAENPDTIKDSSFGLQHSLNSGQSLESVTLKGRAPRKQMSLLNSSEFQPQIRTVAKSHSDSCILSSNNLPTKDLLSALLEQGNKLRNAMVISAMKSSPETSMLLDQVHPPINEDSLRASTQIRAFSRNRFKDHIEDHLLPSTENTFWRHDTKADTRAIQLLLGRNLIPASVISSVKRMISSLLKK

SEQ ID NO: 74558 - protein, 247 aa, Homo sapiens
  MOD_RES (1)..(1): Any amino acid
XFQAMRLGVEEINNSTALLPNITLGYQLYDVCSDSANVYATLRVLSLPGQHHIELQGDLLHYSPTVLAVIGPDSTNRAATTAALLSPFLVPMLLEQIHKVHFLLHKDTVAFNDNRDPLSSYNIIAWDWNGPKWTFTVLGSSTWSPVQLNINETKIQWHGKDNQVPKSVCSSDCLEGHQRVVTGFHHCCFECVPCGAGTFLNKSATWVRTCQRTTTRPNVSPSACSSTSCPGSPSSPRPASTTASTCL

SEQ ID NO: 74559 - protein, 562 aa, Homo sapiens
MGKDQELLEAARTGNVALVEKLLSGRKGGILGGGSGPLPLSNLLSIWRGPNVNCTDSSGYTALHHAALNGHKDIVLKLLQYEASTNVADNKGYFPIHLAAWKGDVEIVKILIHHGPSHSRVNEQNNENETALHCAAQYGHSEVVAVLLEELTDPTIRNSKLETPLDLAALYGRLRVVKMIISAHPNLMSCNTRKHTPLHLAARNGHKAVVQVLLEAGMDVSCQTEKGSALHEAALFGKVDVVRVLLETEYLEGVGRSTVLEEPVQEDATQETHISSPVESPSQKTKSETVTGELSKLLDEIKLCQEKDYSFEDLCHTISDHYLDNLSKISEEELGKNGSQSVRTSSTINLSPGEVEEEDDDENTCGPSGLWEALTPCNGCRNLGFPMLAQESYPKKRNYTMEIVPSASLDTFPSENENFLCDLMDTAVTKKPCSLEIARAPSPRTDNASEVAVTTPGTSNHRNSSTGPTPDCSPPSPDTALKNIVKVIRPQPKQRTSIVSSLDFHRMNHNQEYFEINTSTGCTSFTASPPASPPTSSVGTTEVKNEGTNHTDDLSRQDDNDP

SEQ ID NO: 74560 - protein, 626 aa, Homo sapiens
MGNAAGSAEQPAGPAAPPPKQHRFEKLMEYFRNEDSNIDFMVACMQFINIVVHSVENMNFRVFLQYEFTHLGLDLYLERLRLTESDKLQVQIQAYLDNIFDVGALLEDTETKNAVLEHMEELQEQVALLTERLRDAENESMAKIAELEKQLSQARKELETLRERFSESTAMGPSRRPPEPEKAPPAAPTRPSALELKVEELEEKGLIRILRGPGDAVSIEILPVAVATPSGGDAPTPGVPTGSPSPDLAPAAEPAPGAAPPPPPPPPGGPPDALGRRDSELGPGVKAKKPIQTKFRMPLLNWVALKPSQITGTVFTELNDEKVLQELDMSDFEEQFKTKSQGPSLDLSALKSKAAQKAPSKATLIEANRAKNLAITLRKGNLGAERICQAIEAYDLQALGLDFLELLMRFLPTEYERSLITRFEREQRPMEELSEEDRFMLCFSRIPRLPERMTTLTFLGNFPDTAQLLMPQLNAIIAASMSIKSSDKLRQILEIVLAFGNYMNSSKRGAAYGFRLQSLDALLEMKSTDRKQTLLHYLVKVIAEKYPQLTGFHSDLHFLDKAGSVSLDSVLADVRSLQRGLELTQREFVRQDDCMVLKEFLRANSPTMDKLLADSKTAQAVPTGGL

SEQ ID NO: 74561 - protein, 372 aa, Homo sapiens
MSKISEAVKRARAAFSSGRTRPLQFRIQQLEALQRLIQEQEQELVGALAADLHKNEWNAYYEEVVYVLEEIEYMIQKLPEWAADEPVEKTPQTQQDELYIHSEPLGVVLVIGTWNYPFNLTIQPMVGAIAAGNSVVLKPSELSENMASLLATIIPQYLDKDLYPVINGGVPETTELLKERFDHILYTGSTGVGKIIMTAAAKHLTPVTLELGGKSPCYVDKNCDLDVACRRIAWGKFMNSGQTCVAPDYILCDPSIQNQIVEKLKKSLKEFYGEDAKKSRDYGRIISARHFQRVMGLIEGQKVAYGGTGDAATRYIAPTILTDVDPQSPVMQEEIFGPVLPIVCVRSLEEAIQFINQREKPLALYMFSSNDK

SEQ ID NO: 74562 - protein, 747 aa, Homo sapiens
MSRKGPRAEVCADCSAPDPGWASISRGVLVCDECCSVHRSLGRHISIVKHLRHSAWPPTLLQMVHTLASNGANSIWEHSLLDPAQVQSGRRKANPQDKVHPIKSEFIRAKYQMLAFVHKLPCRDDDGVTAKDLSKQLHSSVRTGNLETCLRLLSLGAQANFFHPEKGTTPLHVAAKAGQTLQAELLVVYGADPGSPDVNGRTPIDYARQAGHHELAERLVECQYELTDRLAFYLCGRKPDHKNGHYIIPQMADRSRQKCMSQSLDLSELAKAAKKKLQALSNRLFEELAMDVYDEVDRRENDAVWLATQNHSTLVTERSAVPFLPVNPEYSATRNQGRQKLARFNAREFATLIIDILSEAKRRQQGKSLSSPTDNLELSLRSQSDLDDQHDYDSVASDEDTDQEPLRSTGATRSNRARSMDSSDLSDGAVTLQEYLELKKALATSEAKVQQLMKVNSSLSDELRRLQREIHKLQAENLQLRQPPGPVPTPPLPSERAEHTPMAPGGSTHRRDRQAFSMYEPGSALKPFGGPPGDELTTRLQPFHSTELEDDAIYSVHVPAGLYREGSRHTSKLSRHGSGADSDYENTQSGDPLLGLEGKRFLELGKEEDFHPELESLDGDLDPGLPSTEDVILKTEQVTKNIQELLRAAQEFKHDSFVPCSEKIHLAVTEMASLFPKRPALEPVRSSLRLLNASAYRLQSECRKTVPPEPGAPVDFQLLTQQVIQCAYDIAKAAKQLVTITTREKKQ

SEQ ID NO: 74563 - protein, 152 aa, Homo sapiens
MEYYLVKWKGWPDSTNTWEPLQNLKCPLLLQQFSNDKHNYLSQVITSEEAERRGQFYDNKGITYLFDLDYESDEFTVDAARYGNVSHFVNHSCDPNLQVFNVFIDNLDTRLPRIALFSTRTINAGEELTFDYQMKGSGDISSDSIDHSPAKK

SEQ ID NO: 74564 - protein, 158 aa, Homo sapiens
MLEAMAEPSPEDPPPTLKPETQPPEKRRRTIEDFNKFCSFVLAYAGYIPPSKEESDWPASGSSSPLRGESAADSDGWDSAPSDLRTIQTFVKKAKSSKRRAAQAGPTQPGPPRSTFSRLQAPDSATLLEKMKLKDSLFDLDGPKVASPFPSPCAANTP

SEQ ID NO: 74565 - protein, 92 aa, Homo sapiens
MNYSLHLAFVCLSLFTERMCIQGSQFNVEVGRSDKLSLPGFENLTAGYNKFLRPNFGGEPVQIALTLDIASISSISESNMDYTATIYLRQRW

SEQ ID NO: 74566 - protein, 2495 aa, Homo sapiens
MFSKKPHGDVKKSTQKVLDTKKDALTRLKHLRIVIENAESIDLKQFFDQHFSHIYYVFFENFVTIEASLKQKGHKSQREELDAILFIFEKILQLLPERIHQRWQFHSIGLILKKLLHTGNSLKIRREGVRLFLLWLQALQNNCSKEQLWMFSCLIPGFSAPQSEHGPRTLDNLINPPLNLQETQVTIEEITPLVPPQSGDKGQEDLTSYFLEALLKYIVIQVKSLEWKNKENQERGFSFLFSHFKKYYLPYIFPNICKENSLYHPILDIPQMRPKPHYVVIKKDAETNEAIYCTKEPFIKARVIVIRWLVSFWLEPKPHTGPHIPGMEGEVLPKNIQRAAASLVSREESKNDNADKTDRTTEPEQSHSNTSTLTEREPSSSSLCSIDEEHLTDIEIVRRVFSSKRSNVNFVTEIFRQAFLLPICEAAAMRKVVKVYQEWIQQEEKPLFMQEPEEIVITSSDLPCIENVTDHDISMEEGEKREEENGTNTADHVRNSSWAKNGSYQGALHNASEEATEQNIRAGTQAVLQVFIINSSNIFLLEPANEIKNLLDEHTDMCKRILNIYRYMVVQVSMDKKTWEQMLLVLLRVTESVLKMPSQAFLQFQGKKNMTLAGRLAGPLFQTLIVAWIKANLNVYISRELWDDLLSVLSSLTYWEELATEWSLTMETLTKVLARNLYSLDLSDLPLDKLSEQKQKKHKGKGVGHEFQKVSVDKSFSRGWSRDQPGQAPMRQRSATTTGSPGTEKARSIVRQKTVDIDDAQILPRSTRVRHFSQSEETGNEVFGALNEEQPLPRSSSTSDILEPFTVERAKGAVPVIDSSSRHAPSLQSSTEASSITRSTESHITDTHSRESSLEVGDSIYDHLCHLIGPVELADSAFEQIQYIDLEGDDDLLSTLKEYFKENQENHSKNETGKDPASQEVTIAVNRGERLSLDKLECTDQETESENITSFVGTPENLQFQKEPNSAVFMSNIAPNQSDSFFRTQTSEKSKQLNTDKQPSEPSLDSPCDKEKRKHLYRQAATELDACVDVTLVEKLKSVQINEKITVPHVMRAKKATLKAPVNRRMPHVTSTSKLSPTKRSLSETVTHRAKIMKIATKKRNSVHVTFRPSTESVQFYNPLENKEAPWKMRLRKLGGFSSGSSNSSTSNTHTSTNSATELVKPGVYRPLDTLGTASVSSKTVKESTEIPTTILQKEGIASSQLGSRSTLRSSSHEAGLQQGSLGGVYKTVVHALSKPKANVSPQRQNRMPPEAPLRDLYSHVMGYFGRKAAVNKEDMSQKLPPLNSDIGGSSANVPDLMDEFIAERLRSGNASTMTRRGSSPGSLEIPKDLPDILNKQNQMRPIDDPGVPSEWTSPASAGSSDLISSDSHSDSFSAFQYDGRKFDNFGFGTDTGVTSSADVDSGSGHHQSAEEQEVASLTTLHIDSETSSLNQQAFSAEVATITGSESASPVHSPLGSRSQTPSPSTLNIDHMEQKDLQLDEKLHHSVLQTPDDLEISEFPSECCSVMAGGTLTGWHADVATVMWRRMLGILGDVNSIMDPEIHAQVFDYLCELWQNLAKIRDNLGISTDNLTSPSPPVLIPPLRILTPWLFKATMLTDKYKQGKLHAYKLICNTMKRRQDVSPNRDFLTHFYNIMHCGLLHIDQDIVNTIIKHCSPQFFSLGLPGATMLIMDFIVAAGRVASSAFLNAPRVEAQVLLGSLVCFPNLYCELPSLHPNIPDVAVSQFTDVKELIIKTVLSSARDEPSGPARCVALCSLGIWICEELVHESHHPQIKEALNVICVSLKFTNKTVAHVACNMLHMLVHYVPRLQIYQPDSPLKIIQILIATITHLLPSTEASSYEMDKRLVVSLLLCLLDWIMALPLKTLLQPFHATGAESDKTEKSVLNCIYKVLHGCVYGAQCFSNPRYFPMSLSDLASVDYDPFMHLESLKEPEPLHSPDSERSSKLQPVTEVKTQMQHGLISIAARTVITHLVNHLGHYPMSGGPAMLTSQVCENHDNHYSESTELSPELFESPNIQFFVLNNTTLVSCIQIRSEENMPGGGLSAGLASANSNVRIIVRDLSGKYSWDSAILYGPPPVSGLSEPTSFMLSLSHQEKPEEPPTSNECLEDITVKDGLSLQFKRFRETVPTWDTIRDEEDVLDELLQYLGVTSPECLQRTGISLNIPAPQPVCISEKQENDVINAILKQHTEEKEFVEKHFNDLNMKAVEQDEPIPQKPQSAFYYCRLLLSILGMNSWDKRRSFHLLKKNEKLLRELRNLDSRQCRETHKIAVFYVAEGQEDKHSILTNTGGSQAYEDFVAGLGWEVNLTNHCGFMGGLQKNKSTGLTTPYFATSTVEVIFHVSTRMPSDSDDSLTKKLRHLGNDEVHIVWSEHTRDYRRGIIPTEFGDVLIVIYPMKNHMFSIQIMKKPEVPFFGPLFDGAIVNGKVLPIMVRATAINASRALKSLIPLYQNFYEERARYLQTIVQHHLEPTTFEDFAAQVFSPAPYHHLPSDADH

SEQ ID NO: 74567 - protein, 113 aa, Homo sapiens
MELLTFRDVAIEFSPEEWKCLDPDQQNLYRDVMLENYRNLVSLGVAISNPDLVTCLEQRKEPYNVKIHKIVARPPEFFHLYDNKPILAFWRIASEKSQSASVYRQLTHRSRAT

SEQ ID NO: 74568 - protein, 616 aa, Homo sapiens
MKLSLVAAMLLLLSAARAEEEDKKEDVGTVVGIDLGTTYSCVGVFKNGRVEIIANDQGNRITPSYVAFTPEGERLIGDAAKNQLTSNPENTVFDAKRLIGRTWNDPSVQQDIKFLPFKVVEKKTKPYIQVDIGGGQTKTFAPEEISAMVLTKMKETAEAYLGKKVTHAVVTVPAYFNDAQRQATKDAGTIAGLNVMRIINEPTAAAIAYGLDKREGEKNILVFDLGGGTFDVSLLTIDNGVFEVVATNGDTHLGGEDFDQRVMEHFIKLYKKKTGKDVRKDNRAVQKLRREVEKAKRALSSQHQARIEIESFYEGEDFSETLTRAKFEELNMIQQLVKEFFNGKEPSRGINPDEAVAYGAAVQAGVLSGDQDTGDLVLLDVCPLTLGIETVGGVMTKLIPRNTVVPTKKSQIFSTASDNQPTVTIKVYEGERPLTKDNHLLGTFDLTGIPPAPRGVPQIEVTFEIDVNGILRVTAEDKGTGNKNKITITNDQNRLTPEEIERMVNDAEKFAEEDKKLKERIDTRNELESYAYSLKNQIGDKEKLGGKLSSEDKETMEKAVEEKIEWLESHQDADIEDFKAKKKELEEIVQPIISKLYGSAGPPPTGEEDTAEKDEL

SEQ ID NO: 74569 - protein, 144 aa, Homo sapiens
  MOD_RES (1)..(1): Any amino acid
XRIEPNSVSLEDWLDFSSTNVEKADKQRNNSLMLKALVDRILSQTANDLRKQCDVVDTAFKNGLKDTKDARDKLADHLAKIEGNFSPSSGRAERAASQTACPAGGDPGQREHHLYRRSAVYADEEIHPTSGWGRPWGLGWGPPP

SEQ ID NO: 74570 - protein, 23 aa, Homo sapiens
MRPEDRMFHIRAVILRALSLAFL

SEQ ID NO: 74571 - protein, 58 aa, Homo sapiens
MAAAALRDPAQGYVTFEDVAVYFSQEEWRLLDDAQRLLYRNVMLENFTLLASLGLCDL

SEQ ID NO: 74572 - protein, 164 aa, Homo sapiens
MVLLWLTLLLIALPCLLQTKEGGKPWAGAENLTCWIHDVDFLSCSWAVGPGAPADVQYDLYLNVANRRQQYECLHYKTDAQGTRIGCRFDDISRLSSGSQSSHILVRGRSAAFGIPCTDKFVVFSQIEILTPPNMTAKCNKTHSFMHWKMRSHFNRKFRYELQI

SEQ ID NO: 74573 - protein, 562 aa, Homo sapiens
MATSGAASAELVIGWCIFGLLLLAILAFCWIYVRKYQSRRESEVVSTITAIFSLAIALITSALLPVDIFLVSYMKNQNGTFKDWANANVSRQIEDTVLYGYYTLYSVILFCVFFWIPFVYFYYEEKDDDDTSKCTQIKTALKYTLGFVVICALLLLVGSLVCKPELSGAGISKLFLKHRYAFVPLNVPNNKNSTEWEKVKSLFEELGSSHGLAALSFSISSLTLIGMLAAITYTAYGMSALPLNLIKGTRSAAYERLENTEDIEEVEQHIQTIKSKSKDGRPLPARDKRALKQFEERLRTLKKRERHLEFIENSWWTKFCGALRPLKIVWGIFFILVALLFVISLFLSNLDKALHSAGIDSGFIIFGANLSNPLNMLLPLLQTVFPLDYILITIIIMYFIFTSMAGIRNIGIWFFWIRLYKIRRGRTRPQALLFLCMILLLIVLHTSYMIYSLAPQYVMYGSQNYLIETNITSDNHKGNSTLSVPKRCDADAPEDQCTVTRTYLFLHKFWFFSAAYYFGNWAFLGVFLIGLIVSCCKGKKSVIEGVDEDSDISDDEPSVYSA

SEQ ID NO: 74574 - protein, 687 aa, Homo sapiens
MSGSGRKDFDVKHILRLRWKLFSHPSPSTGGPAGGGCLQQDGSGSFEHWGPSQSRLLKSQERSGVSTFWKKPSSSSSSSSSPSSSSSSFNPLNGTLLPVATRLQQGAPGQGTQQPARTLFYVESLEEEVVPGMDFPGPHEKGLVLQELKVEPDNSSQATGEGCGHRLVLSSVSDYFAAMFTSDVCEAKQEEIKMEGIDPNALWDLVQFAYTGCLELKEDTIENLLAAACLLQLPQVVEVCCHFLMKLLHPSNCLGIRAFADAQGCIELMKVAHSYTMENIMEVIRNQEFLLLPAEELHKLLASDDVNVPDEETIFHALMMWVKYDMQSRCNDLSMLLAFIRLPLLPPQILADLENHALFKNDLECQKLILEAMKYHLLPERRTLMQSPRTKPRKSTVGTLYAVGGMDNNKGATTIEKYDLRTNLWIQAGMMNGRRLQFGVAVIDDKLFVIGGRDGLKTLNTVECYNPKTKTWTVLPPMSTHRHGLGVTVLEGPIYAVGGHDGWSYLNTVERWDPQSQQWTFVASMSIARSTVGVAALNGKLYSVGGRDGSSCLSSMEYYDPHTNKWNMCAPMCKRRGGVGVATCDGFLYAVGGHDAPASNHCSRLLDYVERYDPKTDTWTMVAPLSMPRDAVGVCLLGDRLYAVGGYDGQTYLNTMESYDPQTNEWTQMASLNIGRAGACVVVIKQP

SEQ ID NO: 74575 - protein, 52 aa, Homo sapiens
MTPPQQPPPLRSEPGTLGSAASSYSPLGECRLPPCWRCREASVGLPPRCRPD

SEQ ID NO: 74576 - protein, 171 aa, Homo sapiens
MPRYGASLRQSCPRSGREQGQDGTAGAPGLLWMGLVLALALALALALALSDSRVLWAPAEAHPLSPQGHPARLHRIVPRLRDVFGWGNLTCPICKGLFTAINLGLKKEPNVARVGSVAIKLCNLLKIAPPAVCQSIVHLFEDDMVENWGVLCSFPIPRSPPHLSQYEFLFP

SEQ ID NO: 74577 - protein, 126 aa, Homo sapiens
MHLKHLRTLLSPQDGAAKVTCMAWSQNNAKFAVCTVDRVVLLYDEHGERRDKFSTKPADMKYGRKSYMVKGMAFSPDSTKIAIGQTDNIIYVYKIGEDWGDKKVICNKFIQTDGASWLFMVICCLP

SEQ ID NO: 74578 - protein, 165 aa, Homo sapiens
MGAPTLPPAWQPFLKDHRISTFKNWPFLEGCACTPERMAEAGFIHCPTENEPDLAQCFFCFKELEGWEPDDDPIGPGTVAYACNTSTLGGRGGRITREEHKKHSSGCAFLSVKKQFEELTLGEFLKLDRERAKNKIAKETNNKKKEFEETAEKVRRAIEQLAAMD

SEQ ID NO: 74579 - protein, 236 aa, Homo sapiens
MLDHKDLEAEIHPLKNEERKSQENLGNPSKNEDNVKSAPPQSRLSRCRAAAFFLSLFLCLFVVFVVSFVIPCPDRPASQRMWRIDYSAAVIYDFLAVDDINGDRIQDVLFLYKNTNSSNNFSRSCVDEGFSSPCTFAAAVSGANGSTLWERPVAQDVALVECAVPQPRGSEAPSACILVGRPSSFIAVNLFTGETLWNHSSSFSGNASILSPLLQVPDVDGDGAPDLLVLTQEREE

SEQ ID NO: 74580 - protein, 234 aa, Homo sapiens
MELRPWLLWVVAATGTLVLLAADAQGQKVFTNTWAVRIPGGPAVANSVARKHGFLNLGQIFGDYYHFWHRGVTKRSLSPHRPRHSRLQREPQVQWLEQQVAKRRTKRDVYQEPTDPKFPQQWYLSGVTQRDLNVKAAWAQGYTGHGIVVSILDDGIEKNHPDLAGNYDPGASFDVNDQDPDPQPRYTQMNDNRPHLPGPVHPICSTHATCLALAGTAHGVRGKWLRWPTTVSVV

SEQ ID NO: 74581 - protein, 188 aa, Homo sapiens
MTTHVTLEDALSNVDLLEELPLPDQQPCIEPPPSSIMYQANFDTNFEDRNAFVTGIARYIEQATVHSSMNEMLEEGHEYAVMLYTWRSCSRAIPQVKCNEQPNRVEIYEKTVEVLEPEVTKLMKFMYFQRKAIERFCSEVKRLCHAERRKDFVSEAYLLTLGKFINMFAVLDELKNMKCSVKNDHSAY

SEQ ID NO: 74582 - protein, 109 aa, Homo sapiens
DMEICADELKKVLNTVVNKHKDLKTHGFTLESCRSMIALMDMALESSTCRSSTTSGTRLRPGRKFSNTMTQTSPAPSTATRCEMQSTTQDSTSTTSSMTSLPCGTQTNT

SEQ ID NO: 74583 - protein, 564 aa, Homo sapiens
MQKSVRYNEGHALYLAFLARKEGTKRGFLSKKTAEASRWHEKWFALYQNVLFYFEGEQSCRPAGMYLLEGCSCERTPAPPRAGAGQGGVRDALDKQYYFTVLFGHEGQKPLELRCEEEQDGKEWMEAIHQASYADILIEREVLMQKYIHLVQIVETEKIAANQLRHQLEDQDTEIERLKSEIIALNKTKERMRPYQSNQEDEDPDIKKIKKVQSFMRGWLCRRKWKTIVQDYICSPHAESMRKRNQIVFTMVEAESEYVHQLYILVNGFLRPLRMAASSKKPPISHDDVSSIFLNSETIMFLHEIFHQGLKARIANWPTLILADLFDILLPMLNIYQEFVRNHQYSLQVLANCKQNRDFDKLLKQYEANPACEGRMLETFLTYPMFQIPRYIITLHELLAHTPHEHVERKSLEFAKSKLEELSRVMHDEVSDTENIRKNLAIERMIVEGCDILLDTSQTFIRQGTMKNSNTIIVKHEWGRQLHSDWTLLLSGPDILCSSKEDRSAWPTAVAVPSADDTQAKAQEKLALLKALSHKTGDHVRSENSCLLFPFFISTSGSAPHDII

SEQ ID NO: 74584 - protein, 78 aa, Homo sapiens
VMYAERWGLEPCTLPVIVNIAAAPCDTLDFSPLDESSSLIFYNVNKHPGGRQKARILQAGTPLGLMAYLYSRATPSPA

SEQ ID NO: 74585 - protein, 173 aa, Homo sapiens
MVEWTDEFKNDPQLSLISAMIKNLKEQGVTFPAIGSQAAEQAKASPALVAKDPGTVANKKEEEDLAKAIELSLKEQRQQSTTLSTLYPSTSSLLTNHQHEGRKVRAIYDFEAAEDNELTFKAGEIITVLDDSDPNWWKGETHQGIGLFPSNFVTADLTAEPEMIKTEKKTVQF

SEQ ID NO: 74586 - protein, 447 aa, Homo sapiens
MKGFIDDANYSVGLLDEGTNLGNVIDNYVYEHTLTGKNAFFVGDLGKIVKKHSQWQNVVAQIKPFYTVKCNSAPAVLEILAALGTGFACSSKNEMALVQELGVPPENIIYISPCKQVSQIKYAAKVGVNILTCDNEIELKKIARNHPNAKVLLHIATEDNIGGEEGNMKFGTTLKNCRHLLECAKELDVQIIGVKFHVSSACKESQVYVHALSDARCVFDMAGEIGFTMNMLDIGGGFTGTEFQLEEVNHVISPLLDIYFPEGSGVKIISEPGSYYVSSAFTLAVNIIAKKVVENDKFPSGEKTGSDEPAFMYYMNDGVYGSFASKLSEDLNTIPEVHKKYKEDEPLFTSSLWGPSCDELDQIVESCLLPELNVGDWLIFDNMGADSFHEPSAFNDFQRPAIYYMMSFSDWYEMQDAGITSDSMMKNFFFVPSCIQLSQEDSFSAEA

SEQ ID NO: 74587 - protein, 974 aa, Homo sapiens
MKSARAKTPRKPTVKKGSQTNLKDPVGVYCRVRPLGFPDQECCIEVINNTTVQLHTPEGYRLNRNGDYKETQYSFKQVFGTHTTQKELFDVVANPLVNDLIHGKNGLLFTYGVTGSGKTHTMTGSPGEGGLLPRCLDMIFNSIGSFQAKRYVFKSNDRNSMDIQCEVDALLERQKREAMPNPKTSSSKRQVDPEFADMITVQEFCKAEEVDEDSVYGVFVSYIEIYNNYIYDLLEEVPFDPIKPKWNSCSTPMRNTDFVPPQSKLLREDKNHNMYVAGCTEVEVKSTEEAFEVFWRGQKKRRIANTHLNRESSRSHSVFNIKLVQAPLDADGDNVLQEKEQITISQLSLVDLAGSERTNRTRAEGNRLREAGNINQSLMTLRTCMDVLRENQMYGTNKMVPYRDSKLTHLFKNYFDGEGKVRMIVCVNPKAEDYEENLQVMRFAEVTQEVEVARPVDKAICGLTPGRRYRNQPRGPVGNEPLVTDVVLQSFPPLPSCEILDINDEQTLPRLIEALEKRHNLRQMMIDEFNKQSNAFKALLQEFDNAVLSKENHMQGKLNEKEKMISGQKLEIERLEKKNKTLEYKIEILEKTTTIYEEDKRNLQQELETQNQKLQRQFSDKRRLEARLQGMVTETTMKWEKECERRVAAKQLEMQNKLWVKDEKLKQLKAIVTEPKTEKPERPSRERDREKVTQRSVSPSPVPLSSNYIAQISNGQQLMSQPQLHRRSNSCSSISVASCISEWEQKIPTYNTPLKVTSIARRRQQEPGQSKTCIVSDRRRGMYWTEGREVVPTFRNEIEIEEDHCGRLLFQPDQNAPPIRLRHRRSRSAGDRWVDHKPASNMQTETVMQPHVPHAITVSVANEKALAKCEKYMLTHQELASDGEIETKLIKGDIYKTRGGGQSVQFTDIETLKQESPNGSRKRRSSTVAPAQPDGAESEWTDVETRCSVAVEMRAGSQLGPGYQHHAQPKRKKP

SEQ ID NO: 74588 - protein, 61 aa, Homo sapiens
MAATQKLVKDIIDSKTGETASKRWKGAKNSETAAKVALMKLKMHADGDKSLPQTERIYFQV

SEQ ID NO: 74589 - protein, 90 aa, Homo sapiens
  MOD_RES (1)..(1): Any amino acid
XRPRGCADRPEELLEQLYGRLAAGVLSAFHHTLQLGPREQARNASCPAGGRPADRRFRPPTNLRSVSPWAYSSVSITSNHPWRTRPLFLD

SEQ ID NO: 74590 - protein, 928 aa, Homo sapiens
MDRAALRAAAMGEKKEGGGGGDAAAAEGGAGAAASRALQQCGQLQKLIDISIGSLRGLRTKCAVSNDLTQQEIRTLEAKLVRYICKQRQCKLSVAPGERTPELNSYPRFSDWLYTFNVRPEVVQEIPRDLTLDALLEMNEAKVKETLRRCGASGDECGRLQYALTCLRKVTGLGGEHKEDSSWSSLDARRESGSGPSTDTLSAASLPWPPGSSQLGRAGNSAQGPRSISVSALPASDSPTPSFSEGLSDTCIPLHASGRLTPRALHSFITPPTTPQLRRHTKLKPPRTPPPPSRKVFQLLPSFPTLTRSKSHESQLGNRIDDVSSMRFDLSHGSPQMVRRDIGLSVTHRFSTKSWLSQVCHVCQKSMIFGVKCKHCRLKCHNKCTKEAPACRISFLPLTRLRRTESVPSDINNPVDRAAEPHFGTLPKALTKKEHPPAMNHLDSSSNPSSTTSSTPSSPAPFPTSSNPSSATTPPNPSPGQRDSRFNFPAAYFIHHRQQFIFPDISAFAHAAPLPEAADGTRLDDQPKADVLEAHEAEAEEPEAGKSEAEDDEDEVDDLPSSRRPWRGPISRKASQTSVYLQEWDIPFEQVELGEPIGQGRWGRVHRGRWHGEVAIRLLEMDGHNQDHLKLFKKEVMNYRQTRHENVVLFMGACMNPPHLAIITSFCKGRTLHSFVRDPKTSLDINKTRQIAQEIIKGMGYLHAKGIVHKDLKSKNVFYDNGKVVITDFGLFGISGVVREGRRENQLKLSHDWLCYLAPEIVREMTPGKDEDQLPFSKAADVYAFGTVWYELQARDWPLKNQAAEASIWQIGSGEGMKRVLTSVSLGKEVSEILSACWAFDLQERPSFSLLMDMLEKLPKLNRRLSHPGHFWKSADRWRSRYYGKGRYGHPDFKSSCPILEEYINSSKVVPRFERFGLGVLESSNPKM

SEQ ID NO: 74591 - protein, 1853 aa, Homo sapiens
MEPSSPQDEGLRKKQPKKPVPEILPRPPRALFCLTLENPLRKACISIVEWKPFETIILLTIFANCVALAVYLPMPEDDNNSLNLGLEKLEYFFLIVFSIEAAMKIIAYGFLFHQDAYLRSGWNVLDFTIVFLGVFTVILEQVNVIQSHTAPMSSKGAGLDVKALRAFRVLRPLRLVSGVPSLQVVLNSIFKAMLPLFHIALLVLFMVIIYAIIGLELFKGKMHKTCYFIGTDIVATVENEEPSPCARTGSGRRCTINGSECRGGWPGPNHGITHFDNFGFSMLTVYQCITMEGWTDVLYWVNDAIGNEWPWIYFVTLILLGSFFILNLVLGVLSGEFTKEREKAKSRGTFQKLREKQQLDEDLRGYMSWITQGEVMDVEDFREGKLSLDEGGSDTESLYEIAGLNKIIQFIRHWRQWNRIFRWKCHDIVKSKVFYWLVILIVALNTLSIASEHHNQPLWLTRLQDIANRVLLSLFTTEMLMKMYGLGLRQYFMSIFNRFDCFVVCSGILEILLVESGAMTPLGISVLRCIRLLRIFKITKYWTSLSNLVASLLNSIRSIASLLLLLFLFIVIFALLGMQLFGGRYDFEDTEVRRSNFDNFPQALISVFQVLTGEDWTSMMYNGIMAYGGPSYPGMLVCIYFIILFVCGNYILLNVFLAIAVDNLAEAESLTSAQKAKAEEKKRRKMSKGLPDKSEEEKSTMAKKLEQKPKGEGIPTTAKLKIDEFESNVNEVKDPYPSADFPGDDEEDEPEIPLSPRPRPLAELQLKEKAVPIPEASSFFIFSPTNKIRVLCHRIVNATWFTNFILLFILLSSAALAAEDPIRADSMRNQMTTYGAFLHKGSFCRNYFNMLDLLVVAVSLISMGLESSAISVVKILRVLRVLRPLRAINRAKGLKHVVQCMFVAISTIGNIVLVTTLLQFMFACIGVQLFKGKFFRCTDLSKMTEEECRGYYYVYKDGDPMQIELRHREWVHSDFHFDNVLSAMMSLFTVSTFEGWPQLLYKAIDSNAEDVGPIYNNRVEMAIFFIIYIILIAFFMMNIFVGFVIVTFQEQGETEYKNCELDKNQRQCVQYALKARPLRCYIPKNPYQYQVWYIVTSSYFEYLMFALIMLNTICLGMQHYNQSEQMNHISDILNVAFTIIFTLEMILKLMAFKARGYFGDPWNVFDFLIVIGSIIDVILSEIDTFLASSGGLYCLGGGCGNVDPDESARISSAFFRLFRVMRLIKLLSRAEGVRTLLWTFIKSFQALPYVALLIVMLFFIYAVIGMQMFGKIALVDGTQINRNNNFQTFPQAVLLLFRCATGEAWQEILLACSYGKLCDPESDYAPGEEYTCGTNFAYYYFISFYMLCAFLVINLFVAVIMDNFDYLTRDWSILGPHHLDEFKAIWAEYDPEAKGRIKHLDVVTLLRRIQPPLGFGKFCPHRVACKRLVGMNMPLNSDGTVTFNATLFALVRTALKIKTEGNFEQANEELRAIIKKIWKRTSMKLLDQVIPPIGDDEVTVGKFYATFLIQEHFRKFMKRQEEYYGYRPKKDIVQIQAGLRTIEEEAAPEICRTVSGDLAAEEELERAMVEAAMEEGIFRRTGGLFGQVDNFLERTNSLPPVMANQRPLQFAEIEMEEMESPVFLEDFPQDPRTNPLARANTNNANANVAYGNSNHSNSHVFSSVHYEREFPEETETPATRGRALGQPCRVLGPHSKPCVEMLKGLLTQRAMPRGQAPPAPCQCPRVESSMPEDRKSSTPGSLHEETPHSRSTRENTSRCSAPATALLIQKALVRGGLGTLAADANFIMATGQALADACQMEPEEVEIMATELLKGREAPEGMASSLGCLNLGSSLGSLDQHQGSQETLIPPRL

SEQ ID NO: 74592 - protein, 99 aa, Homo sapiens
PPALECRRCHVKCHRDHLDKKEDLICPCKVSYDVTSARDMLLLACSQDEQKKWVTHLVKKIPKNPPSGFVRASPRTLSTRSTANQSFRKVVKNTSGKTR

SEQ ID NO: 74593 - protein, 404 aa, Homo sapiens
MATQAKRPRVAGPVDGGDLDPVACFLSWCRRVGLELSPKVAVSRQGTVAGYGMVARESVQAGELLFVVPRAALLSQHTCSIGGLLERERVALQSQSGWVPLLLALLHELQAPASRWRPYFALWPELGRLEHPMFCLRVRSLELYHQLVALVMAYSFQEPLEEEEDEKEPNSPVMVPAADILNHLANHNANLEYSANCLRMVATQPIPKGHEIFNTYGQMANWQLIHMYGFVEPYPDNTDDTADIQMVTVREAALQGTKTEAERHLVYERWDFLCKLEMVGEEGAFVIGREEVLTEEELTTTLKVLCMPAEEFRELKDQDGGGDDKREEGSLTITNIPKLKASWRQLLQNSVLLTLQTYATDLKTDQGLLSNKEVYAKLSWREQQALQVRYGQKMILHQLLELTS

SEQ ID NO: 74594 - protein, 73 aa, Homo sapiens
MVLILGRRLNREDLGVRDSPATKRKVFEMDPKSLTGHEFFDFSSGSSHAENILQIFNEFRDSRLFTDVIICVE

SEQ ID NO: 74595 - protein, 232 aa, Homo sapiens
ETPSSEPMEEEEDDDLELFGGYDSFRSYNSSVGSESSSYLEESSEAENEDREAGELPTSPLHLLSPGTPRSLDGSGSEPAVCEMCGIVGTREAFFSKTKRFCSVSCSRSYSSNSKKASILARLQGKPPTKKAKVLHKAAWSAKIGAFLHSQGTGQLADGTPTGQDALVLGFDWGKFLKDHSYKAAPVSCFKHGIGCCFGMKALKMTPAMTSGATWEQWMSTPLAGVPSTARS

SEQ ID NO: 74596 - protein, 93 aa, Homo sapiens
  MOD_RES (1)..(1): Any amino acid
XKYLLPEVTVLDYGKKCVVIDLDETLVHSSFKPISNADFIVPVEIDGTIHQQATGKCHKSPTYGGLSGKSVHFQCQLLQTDLIIPASFSPENL

SEQ ID NO: 74597 - protein, 35 aa, Homo sapiens
MATLVVNKLGAGVDSGRQGSRGTAVVKVLECGVCE

SEQ ID NO: 74598 - protein, 104 aa, Homo sapiens
MGNYKSFGDTKFVPNLPKEKLERVILGSEAAQQHPEEVRGLWQTCGELMFSLEPRLRHLGLGKEGITTYFSGNCTMEDAKLAQDFLDSQNLSAYNTRLFKEVDG

SEQ ID NO: 74599 - protein, 283 aa, Homo sapiens
MSKELAAMGPGASGDGVRTETAPHIALDSRVGLHAYDISVVVIYFVFVIAVGIWSSIRASRGTIGGYFLAGRSMSWWPIGASLMSSNVGSGLFIGLAGTGAAGGLAVGGFEWNATWLLLALGWVFVPVYIAAGVVTMPQYLKKRFGGQRIQVYMSVLSLILYIFTKISTDIFSGALFIQMALGWNLYLSTGILLVVTAVYTIAGGLMAVIYTDALQTVIMVGGALVLMFLGHCAAVSLGQESVSCQGRLRAGGLPEDPPHVLHRHAWHDQPGPVPRRGGLRGP

SEQ ID NO: 74600 - protein, 131 aa, Homo sapiens
  MOD_RES (1)..(1): Any amino acid
XQTPLQSGQPFKFSILEICDRIKEEFQFLQAQYHSLKLECEKLASEKTEMQRHYVMYYEMSYGLNIEMHKQSASPSPPESLVEEERPSGPGGGGKQRADEKEPSGPYESDEDKSDYNLVVDEDQPSEPPSP

SEQ ID NO: 74601 - protein, 214 aa, Homo sapiens
MMEAIKKKMQMLKLDKENALDRAEQAEAEQKQAEERSKQLEDELAAMQKKLKGTEDELDKYSEALKDAQEKLELAEKKAADAEAEVASLNRRIQLVEEELDRAQERLATALQKLEEAEKAADESERGMKVIENRALKDEEKMELQEIQLKEAKHIAEEADRKYEEVARKLVIIEGDLERTEERAELAESRCREMDEQIRLMDQNLKCLSAAEEK

SEQ ID NO: 74602 - protein, 50 aa, Homo sapiens
MSGTLEKVLCLRNNTIFKQAFSLLRFRTSGEKPIYSVAQEEEGKSGSESH

SEQ ID NO: 74603 - protein, 19 aa, Homo sapiens
MMWASTTNYASTPSSTSRT

SEQ ID NO: 74604 - protein, 176 aa, Homo sapiens
MALPRLTGALRSFSNVTKQDNYNEEVADLKIKRSKLHEQVLDLGLTWKKIIKFLNEKLEKSKMQSINEDLKDILHAAKQIVGTDNGREAIESGAAFLFMTFHLKDSVGHKETKAIKQMFGPFPSSSATAACNATNRIISHFSQDDLTALVQMTEKEHGDRVFFGKNLAFSFDMHDL

SEQ ID NO: 74605 - protein, 536 aa, Homo sapiens
MWPQPRLPPHPAMSEKTQQGKLAAAKKKLKAYWQRKSPGIPAGANRKKKVNGSSPDTATSGGYHSPGDSATGIYGEGRASSTTLQDLESQYQELAVALDSSSAIISQLTENINSLVRTSKEEKKHEIHLVQKLGRSLFKLKNQTAEPLAPEPPAGPSKVEQLQDETNHLRKELESVGRQLQAEVENNQMLSLLNRRQEERLREQEERLHEQEERLHEQEERLCEQEERLREQEERLCEQEERLREQEERLREQEERLREQEERLHEQEERLHEQEERLCEQEERLREQEERLCEQEERLREQEERLCEQEERLREQEERLCEQEERLCEQEERLCEQEKLPGQERLLEEVEKLLEQERRQEEQERLLERERLLDEVEELLEQERLRQQDERLWQQETLRELERLRELERLRELERMLELGWEALYEQRAEPRSGFEELNNENKSTLQLEQQVKELEKSGGAEEPRGSESAAAARPVPGAPVPQGAWMCGQAGWTPQEHPGLSGEAVGTGEAAGGAEEAACHSFRAAENRELNITII

SEQ ID NO: 74606 - protein, 272 aa, Homo sapiens
MLLVQGQFPRQCPRRGRGPLARVASPSLPAARGHFRCCFCEFFRCTRVLLKRQLRSPRSAEPAEPQPCCPGTKTNSPKIRSYVEDRASWCTGWPWTSLPLAAVASLPALGGGASVSLRCWAADRPNRHAWYPRGVRQETTKTDAMTEADVNPKAYPLADAHLTKKLLDLVQQSCNYKQLRKGANEATKTLNRGISEFIVMAADAEPLEIILHLPLLCEDKNVPYVFVRSKQALGRACGVSRPVIACSVTIKEGSQLKQQIQSIQQSIERLLV

SEQ ID NO: 74607 - protein, 447 aa, Homo sapiens
MIPTFTALLCLGLSLGPRTHMQAGPLPKPTLWAEPGSVISWGNSVTIWCQGTLEAREYRLDKEESPAPWDRQNPLEPKNKARFSIPSMTEDYAGRYRCYYRSPVGWSQPSDPLELVMTGAYSKPTLSALPSPLVTSGKSVTLLCQSRSPMDTFLLIKERAAHPLLHLRSEHGAQQHQAEFPMSPVTSVHGGTYRCFSSHGFSHYLLSHPSDPLELIVSGSLEGPRPSPTRSVSTAAGPEDQPLMPTGSVPHSGLRRHWEVLIGVLVVSILLLSLLLFLLLQHWRQGKHRTLAQRQADFQRPPGAAEPEPKDGGLQRRSSPAADVQGENFCAAVKNTQPEDGVEMDTRSPHDEDPQAVTYAKVKHSRPRREMASPPSPLSGEFLDTKDRQAEEDRQMDTEAAASEAPQDVTYARLHSFTLRQKATEPPPSQEGASPAEPSVYATLAIH

SEQ ID NO: 74608 - protein, 153 aa, Homo sapiens
MAWWLIAFAHGDLAPSEGTAEPCVTSIHSFSSAFLFSIEVQVTIGFGGRMVTEECPLAILILIVQNIVGLMINAIMLGCIFMKTAQAHRRAETLIFSKHAVIALRHGRLCFMLRVGDLRKSMIISATIHMQVVRKTTSPEGEVVPLHQVDIPM

SEQ ID NO: 74609 - protein, 121 aa, Homo sapiens
MAFTFAAFCYMLALLLTAALIFFAIWHLVLPEYLIHAFFCVMFLCAAEWLTLGLNMPLLAYHIWRYMSRPVMSGPGLYDPTTIMNADILAYCQKEGWCKLAFYLLAFFYYLYGMIYVLVSS

SEQ ID NO: 74610 - protein, 1581 aa, Homo sapiens
MPLAFCGSENHSAAYRVDQGVLNNGCFVDALNVVPHVFLLFITFPILFIGWGSQSSKVHIHHSTWLHFPGHNLRWILTFMLLFVLVCEIAEGILSDGVTESHHLHLYMPAGMAFMAAVTSVVYYHNIETSNFPKLLIALLVYWTLAFITKTIKFVKFLDHAIGFSQLRFCLTGLLVILYGMLLLVEVNVIRVRRYIFFKTPREVKPPEDLQDLGVRFLQPFVNLLSKGTYWWMNAFIKTAHKKPIDLRAIGKLPIAMRALTNYQRLCEAFDAQRKDIQGTQGARAIWQALSHAFGRRLVLSSTFRILADLLGFAGPLCIFGIVDHLGKENDVFQPKTQFLGVYFVSSQEFLANAYVLAVLLFLALLLQRTFLQASYYVAIETGINLRGAIQTKIYNKIMHLSTSNLSMGEMTAGQICNLVAIDTNQLMWFFFLCPNLWAMPVQIIVGVILLYYILGVSALIGAAVIILLAPVQYFVATKLSQAQRSTLEYSNERLKQTNEMLRGIKLLKLYAWENIFRTRVETTRRKEMTSLRAFAIYTSISIFMNTAIPIAAVLITFVGHVSFFKEADFSPSVAFASLSLFHILVTPLFLLSSVVRSTVKALVSVQKLSEFLSSAEIREEQCAPHEPTPQGPASKYQAVPLRVVNRKRPAREDCRGLTGPLQSLVPSADGDADNCCVQIMGGYFTWTPDGIPTLSNITIRIPRGQLTMIVGQVGCGKSSLLLAALGEMQKVSGAVFWSSSLPDSEIGEDPSPERETATDLDIRKRGPVAYASQKPWLLNATVEENIIFESPFNKQRYKMVIEACSLQPDIDILPHGDQTQIGERGINLSGGQRQRISVARALYQHANVVFLDDPFSALDIHLSDHLMQAGILELLRDDKRTVVLVTHKLQYLPHADWIIAMKDGTIQREGTLKDFQRSECQLFEHWKTLMNRQDQELEKETVTERKATEPPQGLSRAMSSRDGLLQDEEEEEEEAAESEEDDNLSSMLHQRAEIPWRACAKYLSSAGILLLSLLVFSQLLKHMVLVAIDYWLAKWTDSALTLTPAARNCSLSQECTLDQTVYAMVFTVLCSLGIVLCLVTSVTVEWTGLKVAKRLHRSLLNRIILAPMRFFETTPLGSILNRFSSDCNTIDQHIPSTLECLSRSTLLCVSALAVISYVTPVFLVALLPLAIVCYFIQKYFRVASRDLQQLDDTTQLPLLSHFAETVEGLTTIRAFRYEARFQQKLLEYTDSNNIASLFLTAANRWLEVRMEYIGACVVLIAAVTSISNSLHRELSAGLVGLGLTYALMVSNYLNWMVRNLADMELQLGAVKRIHGLLKTEAESYEGLLAPSLIPKNWPDQGKIQIQNLSVRYDSSLKPVLKHVNALIAPGQKIGICGRTGSGKSSFSLAFFRMVDTFEGHIIIDGIDIAKLPLHTLRSRLSIILQDPVLFSGTIRFNLDPERKCSDSTLWEALEIAQLKLVVKALPGGLDAIITEGGENFSQGQRQLFCLARAFVRKTSIFIMDEATASIDMATENILQKVVMTAFADRTVVTIAHRVHTILSADLVIVLKRGAILEFDKPEKLLSRKDSVFASFVRADK

SEQ ID NO: 74611 - protein, 96 aa, Homo sapiens
MMGVLFCCGAGFFIRRRMYPPPLIEEPAFNVSYTRQPPNPGPGAQQPGPPYYTDPGGPGMNPVGNSMAMAFQVPPNSPQGSVACPPPPAYCNTPPP

SEQ ID NO: 74612 - protein, 644 aa, Homo sapiens
  MOD_RES (1)..(1): Any amino acid
XYSLTFGAINQTWSYRIHQNITYQVCRHAPRHPSFPTTQQLNVDRVFALYNDEERVLRFAVTNQIGPVKEDSDPTPGNPCYDGSHMCDTTARCHPGTGVDYTCECASGYQGDGRNCVDENECATGFHRCGPNSVCINLPGSYRCECRSGYEFADDRHTCIYVDECSENRCHPAATCYNTPGSFSCRCQPGYYGDGFQCIPDSTSSLTPCEQQQRHAQAQYAYPGARFHIPQCDEQGNFLPLQCHGSTGFCWCVDPDGHEVPGTQTPPGSTPPHCGPSPEPTQRPPTICERWRENLLEHYGGTPRDDQYVPQCDDLGHFIPLQCHGKSDFCWCVDKDGREVQGTRSQPGTTPACIPTVAPPMVRPTPRPDVTPPSVGTFLLYTQGQQIGYLPLNGTRLQKDAAKTLLSLHGSIIVGIDYDCRERMVYWTDVAGRTISRAGLELGAEPETIVNSGLISPEGLAIDHIRRTMYWTDSVLDKIESALLDGSERKVLFYTDLVNPRAIAVDPIRGNLYWTDWNREAPKIETSSLDGENRRILINTDIGLPNGLTFDPFSKLLCWADAGTKKLECTLPDGTGRRVIQNNLKYPFSIVSYADHFYHTDWRRDGVVSVNKHSGQFTDEYLPEQRSHLYGITAVYPYCPTGRK

SEQ ID NO: 74613 - protein, 608 aa, Homo sapiens
MWNQFFLLEEYTGSDYQYVGKLHSDQDRGDGSLKYILSGDGAGDLFIINENTGDIQATKRLDREEKPVYILRAQAINRRTGRPVEPESEFIIKIHDINDNEPIFTKEVYTATVPEMSDVGTFVVQVTATDADDPTYGNSAKVVYSILQGQPYFSVESETGIIKTALLNMDRENREQYQVVIQAKDMGGQMGGLSGTTTVNITLTDVNDNPPRFPQSTYQFKTPESSPPGTPIGRIKASDADVGENAEIEYSITDGEGLDMFDVITDQETQEGIITVKKLLDFEKKKVYTLKVEASNPYVEPRFLYLGPFKDSATVRIVVEDVDEPPVFSKLAYILQIREDAQINTTIGSVTAQDPDAARNPVKYSVDRHTDMDRIFNIDSGNGSIFTSKLLDRETLLWHNITVIATEINNPKQSSRVPLYIKVLDVNDNAPEFAEFYETFVCEKAKADQLIQTLHAVDKDDPYSGHQFSFSLAPEAASGSNFTIQDNKDNTAGILTRKNGYNRHEMSTYLLPVVISDNDYPVQSSTGTVTVRVCACDHHGNMQSCHAEALIHPTGLSTGALVAILLCIVILLGKLVLPASYLPMVRGSHCYCDTLDLSASPIKAYSLI

SEQ ID NO: 74614 - protein, 38 aa, Homo sapiens
MRGTPGDADGGGRAVYQSMCKPITGTINDLNQQVWTLQ

SEQ ID NO: 74615 - protein, 52 aa, Homo sapiens
PKPERLPPSMKGKIKSKAIISSSDDSSDEDKLKIADEGPRSSGFPRVFSRTC

SEQ ID NO: 74616 - protein, 86 aa, Homo sapiens
TQNHTCSYPGWHSTTIADHTRPHGDSAPVSCLGEHHSTPSLPADPGSLPEESASPARCMIVHQGTILDNVKNLLEFAETLQFIDSM

SEQ ID NO: 74617 - protein, 96 aa, Homo sapiens
MLRVRCLRGGSRGAEAVHYIGSRLGRTLTGWVQRTFQSTQAATASSRNSCAADDKATEPLPKDCPVSSYNEWDPLEEVIVGRAENACVPPFTIEVK

SEQ ID NO: 74618 - protein, 172 aa, Homo sapiens
MSSCSNVCGSRQAQAAAEGGYQRYGVRSYLHQFYEDCTASIWEYEDDFQIQRSPNRWSSVFWKVGLISGTVFVILGLTVLAVGFLVPPKIEAFGEADFVVVDTHAVQFNSALDMYKLAGAVLFCIGGTSMAGCLLMSVFVKSYSKEEKFLQQKFKERIADIKAHTQPVTKAP

SEQ ID NO: 74619 - protein, 499 aa, Homo sapiens
MDAMKRGLCCVLLLCGAVFVSPSQEIHARFRRGARSYQVICRDEKTQMIYQQHQSWLRPVLRSNRVEYCWCNSGRAQCHSVPVKSCSEPRCFNGGTCQQALYFSDFVCQCPEGFAGKCCEIDSKPWCYVFKAGKYSSEFCSTPACSEGNSDCYFGNGSAYRGTHSLTESGASCLPWNSMILIGKVYTAQNPSAQALGLGKHNYCRNPDGDAKPWCHVLKNRRLTWEYCDVPSCSTCGLRQYSQPQFRIKGGLFADIASHPWQAAIFAKHRRSPGERFLCGGILISSCWILSAAHCFQERFPPHHLTVILGRTYRVVPGEEEQKFEVEKYIVHKEFDDDTYDNDIALLQLKSDSSRCAQESSVVRTVCLPPADLQLPDWTECELSGYGKHEALSPFYSERLKEAHVRLYPSSRCTSQHLLNRTVTDNMLCAGDTRSGGPQANLHDACQGDSGGPLVCLNDGRMTLVGIISWGLGCGQKDVPGVYTKVTNYLDWIRDNMRP

SEQ ID NO: 74620 - protein, 132 aa, Homo sapiens
MEYMSTGSDNKEEIDLLIKHLNVSDVIDIMENLYASEEPAVYEPSLMTMCQDSNQNDERSKSLLLSGQEVPWLSSVRYGTVEDLLAFANHISNTAKHFYGQRPQESGILLNMVRFFPISWVLCAQLSYCSFI

SEQ ID NO: 74621 - protein, 197 aa, Homo sapiens
EEVLALLEKVLQSHMSLPATRGYALTALMKLSTRLCGDNKAAILEKMPLVERDGPQADEEAKESKEAAQLSEAAPVPTEPQASQLLDLLDLLDGASGDVQHPPHLDPSPGGALVHLLDLPCVPPPPAPIPDLKVFEREGVQLNLSFIRPPENPALLLITITATNFSEGDVTHFICQAAVPKSLQLQLQAPSGNTVPA

SEQ ID NO: 74622 - protein, 33 aa, Homo sapiens
MGPPSAPPCRLHVPWKEVLLTASLLTFWNPPTT

SEQ ID NO: 74623 - protein, 312 aa, Homo sapiens
RNQSFLRTPIQRTPHEIMRRESNRLSAPSYLARSLADVPREYGSSQSFVTEVSFAVENGDSGSRYYYSDNFFDGQRKRPLGDRAHEDYRYYEYNHDLFQRMPQNQGRHASGIGRVAATSLGNLTNHGSEDLPLPPGWSVDWTMRGRKYYIDHNTNTTHWSHPLEREGLPPGWERVESSEFGTYYVDHTNKKAQYRHPCAPSVPRYDQPPPVTYQPQQTERNQSLLVPANPYHTAEIPDWLQVYARAPVKYDHILKWELFQLADLDTYQGMLKLLFMKELEQIVKMYEAYRQALLTELENRKQRQQCQCCYCI

SEQ ID NO: 74624 - protein, 106 aa, Homo sapiens
MAAPGALLVMGTLTLSPRLEYSGVISAHCNLCLLSSSDCHASASGVTGVTGVHHHTQLSFVFLVETGFCHVGRASPELLASSDPPASASQSAGIIGVSQGLNLTWS

SEQ ID NO: 74625 - protein, 175 aa, Homo sapiens
  MOD_RES (1)..(1): Any amino acid
XAVEWLYPAGALRLTLGGPDPRARPGIACLRPVRPFAGAQVFAERAGGALELLLAEGPGPAGGRCVRWGPRERRALFLQATPHQDISRRVAAFRFELREDGRPELPPQAHGLGVDGACRPCSDAELLLAACTSDFVIHGIIHGVTHDVELQESVITVGGPTALEVMGLSIRTLFT

SEQ ID NO: 74626 - protein, 68 aa, Homo sapiens
RSHHFQKVGKKPELTLVWEPEDMEQEPAQQGPLENLMKAMSLHPRNCLEPFSPTVCPERGPRPSGCVS

SEQ ID NO: 74627 - protein, 80 aa, Homo sapiens
MKFLAVLVLLGVSIFLVSAQNPTTAAPADTYPATGPADDEAPDAETTPTTATTAASTTARKDIPVLPKWVGDLPNGRVCP

SEQ ID NO: 74628 - protein, 163 aa, Homo sapiens
  MOD_RES (1)..(1): Any amino acid
XQTHYALQASLKLLDFYEKYFDIYYPLSKLDLIAIPDFAPGAMENWGLITYRETSLLFDPKTSSASDKLWVTRVIAHELAHQWFGNLVTMEWWNDIWLKEGFAKYMELIAVNATYPELQFGACILNMLKDFLGEEKFQKGIIQYLKKFSYRNAKNDDLWSSLS

SEQ ID NO: 74629 - protein, 352 aa, Homo sapiens
ECDVIEYPLEEEEEEEDEDTRGMAEGHHAVNIEGLKSARVEDEMQVQECEPEKVEIRERYELSEKMLSACNLLKNTINDPKALTSKDMGQVQWLTPMIPTLREADAGGSHERFCLNTLQHEWFRVSSQKSAIPAMVGDYIAAFEAISPDVLRYVINLADGNGNTALHYSVSHSNFEIVKLLLDADVCNVDHQNKAGYTPIMLAALAAVEAEKDMRIVEELFGCGDVNAKASQAGQTALMLAVSHGRIDMVKGLLACGADVNIQDDEGSTALMCASEHGHVEIVKLLLAQPGCNGHLEDNDGSTALSIALEAGHKDIAVLLYAHVNFAKAQSPGTPRLGRKTSPGPTHRGSFD

SEQ ID NO: 74630 - protein, 1414 aa, Homo sapiens
MHSSNPKVRSSPSGNTQSSPKSKQEVMVRPPTVMSPSGNPQLDSKFSNQGKQGGSASQSQPSPCDSKSGGHTPKALPGPGGSMGLKNGAGNGAKGKGKRERSISADSFDQRDPGTPNDDSDIKECNSADHIKSQDSQHTPHSMTPSNATAPRSSTPSHGQTTATEPTPAQKTPAKVVYVFSTEMANKAAEAVLKGQVETIVSFHIQNISNNKTERSTAPLNTQISALRNDPKPLPQQPPAPANQDQNSSQNTRLQPTPPIPAPAPKPAAPPRPLDRESPGVENKLIPSVGSPASSTPLPPDGTGPNSTPNNRAVTPVSQGSNSSSADPKAPPPPPVSSGEPPTLGENPDGLSQEQLEHRERSLQTLRDIQRMLFPDEKEFTGAQSGGPQQNPGVLDGPQKKPEGPIQAMMAQSQSLGKGPGPRTDVGAPFGPQGHRDVPFSPDEMVPPSMNSQSGTIGPDHLDHMTPEQIAWLKLQQEFYEEKRRKQEQVVVQQCSLQDMMVHQHGPRGVVRGPPPPYQMTPSEGWAPGGTEPFSDGINMPHSLPPRGMAPHPNMPGSQMRLPGFAGMINSEMEGPNVPNPASRPGLSGVSWPDDVPKIPDGRNFPPGQGIFSGPGRGERFPNPQGLSEEMFQQQLAEKQLGLPPGMAMEGIRPSMEMNRMIPGSQRHMEPGNNPIFPRIPVEGPLSPSRGDFPKGIPPQMGPGRELEFGMVPSGMKGDVNLNVNMGSNSQMIPQKMREAGAGPEEMLKLRPGGSDMLPAQQKMVPLPFGEHPQQEYGMGPRPFLPMSQGPGSNSGLRNLREPIGPDQRTNSRLSHMPPLPLNPSSNPTSLNTAPPVQRGLGRKPLDISVAGSQVHSPGINPLKSPTMHQVQSPMLGSPSGNLKSPQTPSQLAGMLAGPAAAASIKSPPVLGSAAASPVHLKSPSLPAPSPGWTSSPKPPLQSPGIPPNHKAPLTMASPAMLGNVESGGPPPPTASQPASVNIPGSLPSSTPYTMPPEPTLSQNPLSIMMSRMSKFAMPSSTPLYHDAIKTVASSDDDSPPARSPNLPSMNNMPGPNPVVPMPTLSPMGMTQPLSHSNQMPSPNAVGPNIPPHGVPMGPGLMSHNPIMGHGSQEPPMVPQGRMGFPQGFPPVQSPPQQVPFPHNGPSGGQGSFPGGMGFPGEGPLGRPSNLPQSSADAALCKPGGPGGPDSFTVLGNSMPSVFTDPDLQEVIRPGATGIPEFDLSRIIPSEKPSQTLQYFPRGEVPGRKQPQGPGPGFSHMQGMMGEQAPRMGLALPGMGGPGPVGTPDIPLGTAPSMPGHNPMRPPAFLQQGMMGPHHRMMSPAQSTMPGQPTLMSNPAAAVGMIPGKDRGPAGLYTHPGPVGSPGMMMSMQGMMGPQQNIMIPPQMRPRGMAADVGMGGFSQGPGNPGNMMF

SEQ ID NO: 74631 - protein, 219 aa, Homo sapiens
ELLNNLGNFINRAGMFVSKFFGGYVPEMVLTPDDQRLLAHVTLELQHYHQLLEKVRIRDALRSILTISRHGNQYIQPYMPTVSATIQAQLQLPPPACSILLTNFLCTLPAGHQIGTVSPLFQKLENDQIESLRQRFGGGQAKTSPKPAVVETVTTAKPQQIQALMDEVTKQGNIVRELKAQKADKNEVAAEVAKLLDLKKQLAVAEGKPPEAPKGKKKK

SEQ ID NO: 74632 - protein, 168 aa, Homo sapiens
MLLLTRSPTAWHRLSQLKPRVLPGTLGGQALHLRSWLLSRQGPAETGGQGQPQGPGLRTRLLITGLFGAGLGGAWLALRAEKERLQQQKRTEALRQAAVGQGDFHLLDHRGRARCKADFRGQWVLMYFGFTHCPDICPDELEKLVQVVRQLEAEPGLPPVQPVFITVD

SEQ ID NO: 74633 - protein, 43 aa, Homo sapiens
MGVQGLWKLLECSGRQTILVASRNIDLIQDRCTSTPSSTSEIY

SEQ ID NO: 74634 - protein, 36 aa, Homo sapiens
MKLKDSLFDLDGPKVASPLSPTSLTHTSRPPAALTP

SEQ ID NO: 74635 - protein, 2971 aa, Homo sapiens [sequence omitted]

SEQ ID NO: 74636 - protein, 117 aa, Homo sapiens
MAVAVRTLQEQLEKAKESLKNVDENIRKLTGRDPNDVRPIQARLLALSGPGGGRGRGSLLLRRGFSDSGGGPPAKQRDLEGAVSRLGGERRTRRESRQESDPEDDDVKKVLRLKELK

SEQ ID NO: 74637 - protein, 194 aa, Homo sapiens
MQRDAPPRAPAPAPRLPAPPIGAAASSGGGGGGGSGGGGGGASAAPAPPGLSGTTSPRGPGGGRRAEEAGSAPRGRKWPWRRKWRGRGGAWSAAAAGPGAGAAAAATGGGGGALEAAMAKQYDSVECPFCDEVSKYEKLAKIGQGTFGEVFKARHRKTGQKVALKKVLMENEKEGFPITALREIKILQLLKHEN

SEQ ID NO: 74638 - protein, 133 aa, Homo sapiens
MIKFFLMVNKQGQTRLSKYYEHVDINKRTLLETEVIKSCLSRSNEQCSFIEYKDFKLIYRQYAALFIVVGVNDTENEMAIYEFIHNFVEVLDEYFSRVSELDIMFNLDKVHIILDEMVLNGCIVETNRARILA

SEQ ID NO: 74639 - protein, 101 aa, Homo sapiens
MEVVDPQQLGMFTEGELMSVGMDTFIHRIDSTEVIYQPRRKRAKLIGKYLMGDLLGEGSYGKVKEVLDSETLCRRAVKILKKKKLRRIPNGEANVKNSWPL

SEQ ID NO: 74640 - protein, 32 aa, Homo sapiens
MTSLKRSQTERPLATDRASVVGTDGTPKVHTD

SEQ ID NO: 74641 - protein, 70 aa, Homo sapiens
  MOD_RES (1)..(1): Any amino acid
XIEARASGKSPQPQLLSNKEKAEARKLWEYKNSVISQAGVQWRNLSSLQAPPPRFKRFSCLSLPSSWDYR

SEQ ID NO: 74642 - protein, 60 aa, Homo sapiens
  MOD_RES (1)..(1): Any amino acid
XINEWLQIDLGEEKIVRGIIIQGGKHRENKVFMRKFKIGYSNNGSDWKMIMDDSKRKALI

SEQ ID NO: 74643 - protein, 189 aa, Homo sapiens
MGIKFLEVIKPFCAVLPEIQKPERKIQFREKVLWTAITLFIFLVCCQIPLFGIMSSDSADPFYWMRVILASNRGTLMELGISPIVTSGLIMQLLAGAKIIEVGDTPKDRALFNGAQKRTEFEGAVIALFHLLATRTDKVRALREAFYRQNLPNLMNLIATVFVFAVVIYFQGFRVDLPIKSARYRGQYS

SEQ ID NO: 74644 - protein, 344 aa, Homo sapiens
TTFSSFSRVTNFFRGALQPQPEGAASDLPPPPDDEPEPGFEVISCVELGPRPTVERGPPVTEEEWARHVGPEGRLQQVPELKNRIFSGGLSPSLRREAWKFLLGYLSWEGTAEEHKAHIRKKTDEYFRMKLQWKSVSPEQERRNSLLHGYRSLIERDVSRTDRTNKFYEGPENPGLGLLNDILLTYCMYHFDLGYVQGMSDLLSPILYVIQNEVDAFWCFCGFMELVQGNFEESQETMKRQLGRLLLLLRVLDPLLCDFLDSQDSGSLCFCFRWLLIWFKREFPFPDVLRLWEVLWTGLPGPNLHLLVACAILDMERDTLMLSGFGSNEILKHEAQSGRSGGGG

SEQ ID NO: 74645 - protein, 332 aa, Homo sapiens
MGRRALLLLLLSFLAPWATIALRPALRALGSLHLPTNPTSLPAVAKNYSVLYFQQKVDHFGFNTVKTFNQRYLVADKYWKKNGGSILFYTGNEGDIIWFCNNTGFMWDVAEELKAMLVFAEHRYYGESLPFGDNSFKDSRHLNFLTSEQALADFAELIKHLKRTIPGAENQPVIAIGGSYGGMLAAWFRMKYPHMVVGALAASAPIWQFEDLVPCGVFMKIVTTDFRKSGPHCSESIHRSWDAINRLSNTGSGLQWLTGALHLCSPLTSQDIQHLKDWISETWVNLAMVDYPYASNFLQPLPAWPIKRWSLTLSPKLECSGVIIALEPGTPD

SEQ ID NO: 74646 - protein, 104 aa, Homo sapiens
MSKFFQYGWRCTTNENTYSNRTLMGNWNQERYDLRNIVQPKPLPSQFGHYFETTYDTSYNNKMPLSTHRFKREPHWFPGHQPELDPPRYKCTEKSTYMNSYSKP

SEQ ID NO: 74647 - protein, 33 aa, Homo sapiens
MIDHLSRAVISDPEQNLAIEQKESDHILPDSKM

SEQ ID NO: 74648 - protein, 242 aa, Homo sapiens
  MOD_RES (1)..(1): Any amino acid
XDIGLPQYKTQFDEGRVDGRMLHYMTVNTIAPSEVQKWTNHRVMEWLRSVDLAEYAPNLRGSGVHGGLMVLEPRFNVETMAQLLNIPPNKTLLRRHLATHFNLLIGAEAQHQKRDAMELPDYVLLTATAKVKPKKLAFSNFGNLRKKKQEDGEEYVCPMELGQASGSASKKGFKPGLDMRLYEEDDLDRLEQMEDSEGTVRQIGAFSEGINNLTHMLKEDDMFKDFAARSPSASITDEDSNV

SEQ ID NO: 74649 - protein, 952 aa, Homo sapiens
MTSPQLEWTLQTLLEQLNEDELKSFKSLLWAFPLEDVLQKTPWSEVEEADGKKLAEILVNTSSENWIRNATVNILEEMNLTELCKMAKAEMMEDGQVQEIDNPELGDAEEDSELAKPGEKEGWRNSMEKQSLVWKNTFWQGDIDNFHDDVTLRNQRFIPFLNPRTPRKLTPYTVVLHGPAGVGKTTLAKKCMLDWTDCNLSPTLRYAFYLSCKELSRMGPCSFAELISKDWPELQDDIPSILAQAQRILFVVDGLDELKVPPGALIQDICGDWEKKKPVPVLLGSLLKRKMLPRAALLVTTRPRALRDLQLLAQQPIYVRVEGFLEEDRRAYFLRHFGDEDQAMRAFELMRSNAALFQLGSAPAVCWIVCTTLKLQMEKGEDPVPTCLTRTGLFLRFLCSRFPQGAQLRGALRTLSLLAAQGLWAQMSVFHREDLERLGVQESDLRLFLDGDILRQDRVSKGCYSFIHLSFQQFLTALFYTLEKEEGEDRDGHAWDIGDVQKLLSGEERLKNPDLIQVGHFLFGLANEKRAKELEATFGCRMSPDIKQELLQCKAHLHANKPLSVTDLKEVLGCLYESQEEELAKVVVAPFKEISIHLTNTSEVMHCSFSLKHCQDLQKLSLQVAKGVFLENYMDFELDIEFESSNSNLKFLEVKQSFLSDSSVRILCDHVTRSTCHLQKVEIKNVTPDTAYRDFCLAFIGKKTLTHLTLAGHIEWERTMMLMLCDLLRNHKCNLQYLRLGGHCATPEQWAEFFYVLKANQSLKHLRLSANVLLDEGAMLLYKTMTRPKHFLQMLSLENCRLTEASCKDLAAVLVVSKKLTHLCLAKNPIGDTGVKFLCEGLSYPDCKLQTLVLQQCSITKLGCRYLSEALQEACSLTNLDLSINQIARGLWILCQALENPNCNLKHLRLKTYETNLEIKKLLEEVKEKNPKLTIDCNASGATAPPCCDFFC

SEQ ID NO: 74650 - protein, 183 aa, Homo sapiens
MEFSGRKWRKLRLAGDQRNASYPHCLQFYLQPPSENISLIEFENLAIDRVKLLKSVENLGVSYVKGTEQYQSKLESELRKLKFSYRENLEDEYEPRRRDHISHFILRLAYCQSEELRRWFIQQEMDLLRFRFSILPKDKIQDFLKDSQLQFEARWGLTVLPRLVSNSWIQVILPPWPPKVLGL

SEQ ID NO: 74651 - protein, 181 aa, Homo sapiens
MVSESHHEALAAPPVTTVATVLPSNATEPASPGEGKEDAFSKLKEKFMNELHKIPLPPWALIAIAIVAVLLVLTCCFCICKKCLFKKKNKKKGKEKGGKNAINMKDVKDLGKTMKDQALKDDDAETGLTDGEEKEEPKEEEKLGKLQYSLDYDFQNNQLLVGIIQAAELPALDMGGTSDPY

SEQ ID NO: 74652 - protein, 223 aa, Homo sapiens
MPEAPPLLLAAVLLGLVLLVVLLLLLRHWGWGLCLIGWNEFILQPIHNLLMGDTKEQRILNHVLQHAEPGNAQSVLEAIDTYCEQKEWAMNVGDKKGKIVDAVIQEHQPSVLLELGAYCGYSAVRMARLLSPGARLITIEINPDCAAITQRMVDFAGVKDKVTLVVGASQDIIPQLKKKYDVDTLDMVFLDHWKDRYLPDTLLLEECGLLRKGTVLLADNVIC

SEQ ID NO: 74653 - protein, 149 aa, Homo sapiens
MAVDCPGDLGTRMMPIRRSAQLERIRQQQEDMRRRREEEGKKQELDLNSSMRLKKLAQIPPKTGIDNPMFDTEEGIVLESPHYAVKILEIEDLFSSLKHIQHTLVDSQSQEDISLLLQLVQNKDFQNAFKIHNAITVHMNKASPPFPLI

SEQ ID NO: 74654 - protein, 179 aa, Homo sapiens
MARDWIRPQRASDCWSGKQQLFQIIIIIIISPPCCCVDDTWAQAEVGPVTSCTGFVEGSSRTGGMGSACIKVTKYFLFLFNLIFFILGAVILGFGVWILADKSSFISVLQTSSSSLRMGAYVFIGVGAVTMLMGFLGCIGAVNEVRCLLGLYFAFLLLILIAQVTAGALFYFNMGKVSP

SEQ ID NO: 74655 - protein, 213 aa, Homo sapiens
MSDDIDWLRSHRGVCKVDLYNPEGQQDQDRKVICFVDVSTLNVEDKDYKDAASSSSEGNLNLGSLEEKEIIVIKDTEKKDQSKTEGSVCLFKQAPSDPVSVLNWLLSDLQKYALGFQHALSPSTSTCKHKVGDTEGEYHRASSENCYSVYADQVNIDYLMNRPQNLRLEMTAAKNTNNNQNTCEEDCPGSTMGYMAQSTQYEKCGGGQSAKAL

SEQ ID NO: 74656 - protein, 168 aa, Homo sapiens
MDVPLAHKLEGSLLKTYKQDDYPNKIFLAYRGTFPQPHGVQERFVCRLSAELSPGGPNQASGAPSVVFLTVCMTNEGHPWVSLVVQKTRLQISQDPSLNYEYLPTMGLKSFIQASLALLFGKHSQAIVENRVGGVHTVGDSGAFQLGVQFLRAWHKDARIVYIISSQK

SEQ ID NO: 74657 - protein, 66 aa, Homo sapiens
MASDDFDIVIEAMLEAPYKKEEDEQQRKEVKKDYPSNTTSSTSNSGNETSGSSTIGETSNRSRDRD

SEQ ID NO: 74658 - protein, 217 aa, Homo sapiens
MEPSTCRTMESEEDYVEEKESEKCVKEGVTNPSNSSQQALLKADYKALKNGVPSPIMATKIPKKVIAPVDTGDLEAGRRKRRRKRRSLAINLTNCKYESVRRAAQMCGLKEVGEDEEWTLYWTDCAVSLERVMDMKRFQPLLIDGFKFDMRVYVLITSCDPLRIFTYEEGLARFATTPYMEPSHNNLDNVCMHLTNYAINKHNENFVRDGAVGSKSI

SEQ ID NO: 74659 - protein, 41 aa, Homo sapiens
MHGLFDVEISLTVQENAGSISCSMRHAHLSREVESRVQIGV

SEQ ID NO: 74660 - protein, 51 aa, Homo sapiens
MSSKMVISEPGLNWDISPKNGLKTFFSRENYKDHSMAPSLKELRVLSNRKF

SEQ ID NO: 74661 - protein, 74 aa, Homo sapiens
MWNLLHETDSAVATARRPRWLCAGALVLAGGFFLLGFLFGWFIKSSNEATNITPKHNMKAFLDELKAENIKKFL

SEQ ID NO: 74662 - protein, 5044 aa, Homo sapiens
  MOD_RES (1)..(1): Any amino acid
XTTEDTLITGSKTAAPVTSTGSTTATLEGQSTAASSRTSNQDISASSQNHQTKSTETTSKAQTDTLTQMMTSTLFSSPSVHNVMETAPPDEMTTSFPSSVTNTLMMTSKTITMTTSTDSTLGNTEETSTAGTESSTPVTSAVSITAGQEGQSRTTSWRTSIQDTSASSQNHWTRSTQTTRESQTSTLTHRTTSTPSFSPSVHNVTGTVSQKTSPSGETATSSLCSVTNTSMMTSEKITVTTSTGSTLGNPGETSSVPVTGSLMPVTSAALVTFDPEGQSPATFSRTSTQDTTAFSKNHQTQSVETTRVSQINTLNTLTPVTTSTVLSSPSGFNPSGTVSQETFPSGETTTSSPSSVSNTFLVTSKVFRMPTSRDSTLGNTEETSLSVSGTISAITSKVSTIWWSDTLSTALSPSSLPPKISTAFHTQQSEGAETTGRPHERSSFSPGVSQEIFTLHETTTWPSSFSSKGHTTWSQTELPSTSTGAATRLVTGNPSTGTAGTIPRVPSKVSAIGEPGEPTTYSSHSTTLPKTTGAGAQTQWTQETGTTGEALLSSPSYSVTQMIKTATSPSSSPMLDRHTSQQITTAPSTNHSTIHSTSTSPQESPAVSQRGHTQAPQTTQESQTTRSVSPMTDTKTVTTPGSSFTASGHSPSEIVPQDAPTISAATTFAPAPTGDGHTTQAPTTALQAAPSSHDATLGPSGGTSLSKTGALTLANSVVSTPGGPEGQWTSASASTSPDTAAAMTHTHQAESTEASGQTQTSEPASSGSRTTSAGTATPSSSGASGTTPSGSEGISTSGETTRFSSNPSRDSHTTQSTTELLSASASHGAIPVSTGMASSIVPGTFHPTLSEASTAGRPTGQSSPTSPSASPQETAAISRMAQTQRTRTSRGSDTISLASQATDTFSTVPPTPPSITSTGLTSPQTETHTLSPSGSGKTFTTALISNATPLPVTYASSASTGHTTPLHVTDASSVSTGHATPLPVTSPSSVSTGHTTPLPVTDTSSESTGHVTPLPVTSFSSASTGDSTPLPVTDTSSASTGHVTPLPVTSLSSASTGDTTPLPVTDTSSASTGHATSLPVTDTSSVSTGHTTPLPVTDTSSASTGHATSLPVTDTSSVSTGHTTPLHVTDASSASTGQATPLPVTSLSSVSTGDTTPLPVTSPSSASTGHATPLLVTDTSSASTGHATPLPVTDASSVSTDHATSLPVTIPSAASTGHTTPLPVTDTSSASTGQATSLLVTDTSSVSTGDTTPLPVTSTSSASTGHVTPLHVTSPSSASTGHATPLPVTSLSSASTGDTMPLPVTSPSSASTGDTTPLPVTDASSVSTGHTTPLHVTDASSASTGQATPLPVTSLSSVSTGDTTPLPVTSPSSASTGHATPLLVTDTSSASTGHATPLPVTDASSVSTDHATSLPVTIPSAASTGHTTPLPVTDTSSASTGQATSLLVTDTSSVSTGDTTPLPVTSTSSASTGHVTPLHVTSPSSASTGHATPLPVTSLSSASTGDTMPLPVTSPSSASTGDTTPLPVTDASSVSTGHTTPLPVTSPSSASTGHTTPLPVTDTSSASKGDTTPLPVTSPSSASTGHTTPLPVTDTSSASTGDTTPLPVTNASSLSTGHATPLHVTSPSSASTGHATPLPVTSTSSASTGHATPLPVTGLSSATTDDTTRLPVTDVSSASTGQATPLPVTSLSSVSTGDTTPLPVTSPSSASTGHASPLLVTDASSASTGQATPLPVTDTSSVSTAHATPLPVTGLSSASTDDTTRLPVTDVSSASTGQAIPLPVTSPSSASTGDTTPLPVTDASSASTGDTTSLPVTIPSSASSGHTTSLPVTDASSVSTGHATSLLVTDASSVSTGDTTPLPVTDTNSASTGDTTPLHVTDASSVSTGHATSLPVTSLSSASTGDTTPLPVTSPSSASSGHTTPLPVTDASSVPTGHATSLPVTDASSVSTGHATPLPVTDASSVSTGHATPLPVTDTSSVSTGQATPLPVTSLSSASTGDTTPLPVTDTSSASTGHAPHLPVTGLSSASTGDTTRLPVTNVSSASTGHATPLPVTSTSSASTGDTTPLPGTDTSSVSTGHTTPLLVTDASSVSTGDTTRLPVTSPSSASTGHTTPLHVTDASSVSTGHTTPLPVTDTSSASTGQATSLLVTDTSSVSTGDTTPLPVTSTSSASTGHVTPLHVTSPSSASTGHATPLPVTSLSSASTGDTTPLPVTDTSSVSTGHTTPLPVTSPSSASTGHTTPLPVTDTSSASKGDTTPLPVTSPSSASTGHTTPLPVTDTSSASTGDTTPLPVTNASSLSTGHATPLHVTSPSSASTGHATPLPVTSTSSASTGHATPLPVTSTSSASTGHATPLPVTDNSSVSTGHATPLPVTGLSSATTDDTTRLPVTDVSSASTGQATPLPVTSLSSVSTGDTTPLPVTSPSSASTGHASPLLVTDASSASTGQATPLPVTDTSSVSTAHATPLPVTGLSSASTDDTTRLPVTDVSSASTGQAIPLPVTSPSSASTGDTTPLPVTDASSASTGDTTSLPVTIPSSASSGHTTSLPVTDASSVSTGHATSLLVTDASSVSTGDTTPLPVTDTNSASTGDTTPLHVTDASSVSTGHATSLPVTSLSSASTGDTTPLPVTSPSSASSGHTTSLPVTDASSVSTGHATSLPVTIPSSASSGHTTPLPVTDASSVPTGHATSLPVTDASSVSTGHATPLPVTDASSVSTGHATPLPVTDTSSVSTGQATPLPVTSLSSASSTGDTTPLPVTDTSSASTGQDTPLPVTSLFSVSTGDTTPLPVTSPSSASTGHATHLLVTDASSVSTGHATSLLVTDASSVSTGHATALHVTDASSLSTGDTTPLPVTSPSSASTGDTTPLPVTDTSSVSTGHATSLPVTDTSSASTGHATSLPVTDTSSASTGQATPLPVTSPSSASTGHAIPLLVTDTSSASTGQATPLPVTSLSSASTGDTTPLPVTDASSVSTGHATSLPVTSLSSVSTGDTTPLPVTSPSSASTGHATPLHVTSPSSASTGHATPLPVTSLSSASTGDTTPLPVTSPSSASTGHATPLHVTDASSVSTGDTTPLPVTSPSSASSGHTTPLPVTDASSASTGDTTPLPVTDTSSASTGHATHLPVTGLSSASTGDTTRLPVTDVSSASTGHATPLPVTSTSSASTGDTTPLPGTDTSSVSTGHTTPLLVTDASSVSTGDTTRLPVTSPSSASTGHTTPLPVTDTPSASTGDTTPLPVTNASSLSTRHATSLHVTSPSSASTGHATPLPVTDTSAASTGHATPLPVTSTSSASTGDTTPLPVTDTSSASTGHATPLPVTNTSSVSTGHATPLHVTSPSSASTGHTTPLPVTDASSVSTGHATSLPVTDASSVSTGHATPLPVTDASSVSTGHATPLPLTSLSSVSTGDTTPLPVTDTSSASTGQATPLPVTSLSSVSTGDTTPLPVTDTSSASTGHATSLPVTDTSSASTGHATPLHVTSPSSASTGHATPLPVTDTSSASTGHATPLPVTSLSSVSTGDTTPLPVTSPSSASTGHATPLLVTDASSASTGQATPLPVTSLSSVSTGDTTPLPVTSPSSASTGHATSLPVTDTSSASTGDTTSLPVTDTSSAYTGDTTSLPVTDTSSSSTGDTTPLLVTETSSASTGDTTPVPVTDTSSVSTGHATPLPVTGLSSASTGDTTRLPVTDISSASTGQATPLPVTNTSSVSTGDTMPLPVTSPSSASTGHATPLPVTSTSSASTGHATPVPVTSTSSASTGHTTPLPVTSPSSASTGHTTPLPVTDTSSASTGDTTPLPVTNASSLSTGHTTPLHVTIPSSASTGDTSTLPVTGASSASTGHATPLPVTDTSSVSTGHATPLPVTSFSSVSTGDTTPLPVTDASSASTGHATPLPVTDTSSASTGDTTPLPVTDASSASTGQATPLPVTSLSSVSTGDTTPLPVTIPSSASSGHTTSLPVSDTSSASTGQATPLPVTSLSSVSTGDTTPLLVTDASSVSTGHATPLPVTDTSSASTGDTTRLPVTDTSSASTGQATPLPVTSLSSVSTGDTTPLLVTNTSSVSTGHATSLPVTIPSSSSSGHTTPLPVTSTSSVSTGHVTPLHVTSPSSSSTGQATPLPVTSTSSSSTGQATPLPVTSTSSASTGHATPLPVTDASSVSTGHATPLPVTDTSSASTGDTTPLPVTDTSSASTGQATPLPVTSLSSVSTGHATPLAVSSATSASTVSSDSPLKMETSGMTTPSLKTDGGRRTATSPPPTTSQTIISTIPSTAMHTRSTAAPIPILPERGVSLFPYGADAGDLEFVRRTVDFTSPLFKPATGFPLGSSLRDSLYFTDNGQIIFPESDYQIFSYPNPLPTGFTGRDPVALVAPFWDDADFSTGRGTTFYQEYETFYGEHSLLVQQAESWIRKITNNGGYKARWALKVTWVNAHAYPAQWTLGSNTYQAILSTDGSRSYALFLYQSGGMQWDVAQRSGKPVLMGFSSGDGYFENSPLMSQPVWERYRPDRFLNSNSGLQGLQFYRLHREERPNYRLECLQWLKSQPRWPSWGWNQVSCPCSWQQGRRDLRFQPVSIGRWGLGSRQLCSFTSWRGGVCCSYGPWGEFREGWHVQRPWQLAQELEPQSWCCRWNDKPYLCALYQQRRPHVGCATYRPPQPAWMFGDPHITTLDGVSYTFNGLGDFLLVGAQDGNSSFLLQGRTAQTGSAQATNFIAFAAQYRSSSLGPVTVQWLLEPHDAIRVLLDNQTVTFQPDHEDGGGQETFNATGVLLSRNGSEVSASFDGWATVSVIALSNILHSSASLPPEYQNRTEGLLGVWNNNPEDDFRMPNGSTIPPGSPEEMLFHFGMTWQINGTGLLGKRNDQLPSNFTPVFYSQLQKNSSWAEHLISNCDGDSSCIYDTLALRNASIGLHTREVSKNYEQANATLNQYPPSINGGRVIEAYKGQTTLIQYTSNAEDANFTLRDSCTDLELFENGTLLWTPKSLEPFTLEILARSAKIGLASALQPRTVVCHCNAESQCLYNQTSRVGNSSLELWGALSCVRTSPAL

SEQ ID NO: 74663 - protein, 62 aa, Homo sapiens
MVELMFPLLLLLLPFLLYMAAPQIRSSSIFSLPGCGKGGIGGQRDPDHDREPAGVGAETGPV

SEQ ID NO: 74664 - protein, 83 aa, Homo sapiens
MEEEGGSSGGAAGTSADGGDGGEQLLTVKHELRTETSLLCCPGWSVVLISAHYNLRLLGSSDSPASASQVAGITGTHYHTQLI

SEQ ID NO: 74665 - protein, 228 aa, Homo sapiens
GAFFMEFVRSPRTASSAFYPQVSVDQTATPMLDGTSLGICTGQSMDRGNSQTFGNSQNIGEQGYSSTNSSDSSSQQLVASSLTSSSTLTEILEAMKHPSTGVQLLSEQKGLSPYCFISAEVVHWLVNHVEGIQTQAMAIDIMQSMTEGCPFKMPLCRNFRVSMSLLENAGRAAHHTCIWRSLADLHLRLLFLQDSNGQRARPSGHAAARHHLAHSRSGRLRQLPAQVV

SEQ ID NO: 74666 - protein, 198 aa, Homo sapiens
METGRQTGVSAEMLAMPRGLKGSKKDGIPEDLDGNLEAPRDQEGELRSEDVMDLTEGDSEASASAPPAAKRRKTHTKGKKESKPTVDAEEAQRMTTLLSAMSEEQLSRYEVCRRSAFPRARVAGLMRAITGSSVSENAAIAMAGIAKLFVGEVVEEALDVCEMWGETPPLQPKHLREAVRRLKPKGLFPNSNCRRIMF

SEQ ID NO: 74667 - protein, 300 aa, Homo sapiens
MEVVPLGSQTRERGSSPGAGRSGETQKNGGPSQEGSCQQGVGQPRGLPQKAGRGLQQASHLREAGEEAPWMRRKRPAGPAGAGTDKTIIMWKLTRDETNYGIPQRALRGHSHFVSDVVISSDGQFALSGSWDGTLRLWDLTTGTTTRRFVGHTKDVLSVAFSSDNRQIVSGSRDKTIKLWNTLGVCKYTVQDESHSEWVSCVRFSPNSSNPIIVSCGWDKLVKVWNLANCKLKTNHIGHTGYLNTVTVSPDGSLCASGGKDGQAMLWDLNEGKHLYTLDGGDIINALCFSPNRYWLCAAT

SEQ ID NO: 74668 - protein, 51 aa, Homo sapiens
MNPAAEAEFNILLATDSYKVTHYKQYPPNTSKVYSYFECREKKTENSKLRK

SEQ ID NO: 74669 - protein, 48 aa, Homo sapiens
MSKSKDDAPHELESQFILRLPPEYASTVRRAVQSGHVNLKDRLTIELH

SEQ ID NO: 74670 - protein, 446 aa, Homo sapiens
MEAGAGAGAGAAGWSCPGPGPTVTTLGSYEASEGCERKKGQRWGSLERRGMQAMEGEVLLPALYEEEEEEEEEEEEVEEEEEQVQKGGSVGSLSVNKHRGLSLTETELEELRAQVLQLVAELEETRELAGQHEDDSLELQGLLEDERLASAQQAEVFTKQIQQLQGELRSLREEISLLEHEKESELKEIEQELHLAQAEIQSLRQAAEDSATEHESDIASLQEDLCRMQNELEDMERIRGDYEMEIASLRAEMEMKSSEPSGSLGLSDYSGLQEELQELRERYHFLNEEYRALQESNSSLTGQLADLESERTQRATERWLQSQTLSMTSAESQTSEMDFLEPDPEMQLLRQQLRDAEEQMHGMKNKCQELCCELEELQHHRQVSEEEQRRLQRELKCAQNEVLRFQTSHSVTQSSPTPNPPIFSLPLVGLVVISALLWCWWAETSS

SEQ ID NO: 74671 - protein, 30 aa, Homo sapiens
  MOD_RES (1)..(1): Any amino acid
XMKKLKEEMEGVVKELAENNHILERFLDNI

SEQ ID NO: 74672 - protein, 10 aa, Homo sapiens
MIICPTRPFT

SEQ ID NO: 74673 - protein, 70 aa, Homo sapiens
  MOD_RES (1)..(1): Any amino acid
XIACLCCDARRQVRMQALTYLQRALLVHDLQKLDALEWESCFNKLLENISPADVGGMEETRMRASTLLSK

SEQ ID NO: 74674 - protein, 110 aa, Homo sapiens
MAFASWWYKTHVSEKTSESPSKPGEKKGSDEKKAASLGSSQSSRTYAGGTASATKALGVLLCHLGWSAVVQSRATAAFMSRLKWSSHLSLLRAWDHRCQLPLVQPASLPV

SEQ ID NO: 74675 - protein, 38 aa, Homo sapiens
MAANCTSSWSLGESCNRPGLELPRSMASSETQLGNHDV

SEQ ID NO: 74676 - protein, 4707 aa, Homo sapiens
MEKDAEDGAPSEGAEAPPSTEEAAPPRSEEEEAPRPPTVEAPAEDGFSPSAEDAVSSVVDYRDLIPSEEGIVLPDDHEADLNRVRQRLAPRPVQSVISEVLSLPSSRRSSRYRRSMSGLPNLQETLKERQARFREARESRRLKIDPSYKYIFEILAENLGLDIVTVEELILDCPSLEAFTNFFAKDGCKTLKFLYQEGDVPGIECGRTIAGATKGAKMMKLYIDNAAPDKLKGLCIFFVRCRNDVAINVKTIQEEALFTVLDASKGLLNGIRDMLANIFLPAVLATNNWGALNQSKQGESEKHIFTETINRYLSFLDGARISIEGTVKLKTIDNVNFSKLHTFEEVTAAASNSETVHQLEEVLMVWYKQIEQVLIESEQMRKEAGDSGPLTELEHWKRMSAKFNYIIEQIKGPSCKAVINVLNVAHSKLLKNWRDLDARITDTANESKDNVRYLYTLEKVCQPLYNHDLVSMAHGIQNLINAIRMIHGVSRYYNTSERMTSLFIKVTNQMVTACKAYITDGGLNHVWDQETPVVLKKIQDCIFLFKEYQASFHKTRKLISESSGEKSFEVSEMYIFGKFEAFCKRLEKITEMITVVQTYSTLSNSTIEGIDIMAIKFRNIYQGVKKKQYDILDPRRTEFDTDFLDFMTKINGLEVQIQAFMNSSFGKILSSQQALQLLQRFQKLNIPCLGLEINHTIERILQYYVAELDATKKLYHSQKDDPPLARNMPPIAGKILWVRQLYRRISEPINYFFKNSDILSSPDGKAVIRQYNKISYVLVEFEVVYHTAWIREISQLHYALQATLFVRHPETGKLLVNFDPKILEVVRETKCMIKMKLDVPEQAKRLLKLESKLKADKLYLQGLLQYYDELCQEVPSVFVNLMTPKMKKVESVLRQGLTVLTWSSLTLESFFQEVELVLDMFNQLLKKISDLCEMHIDTVLKEIAKTVLISLPESGATKVEDMLTLNETYTKEWADILNHKSKHVEEAVRELISIFEQIYEVKYTGKVGKQSEQRKHVVFGSETGEGENNDYEANIVNEFDTHDKEDEFKKECKEVFAFFSHQLLDSLQKATRLSLDTMKRRIFVASLYGRKQSEDIISFIKSEVHLAIPNVVMIPSLDDIQQAINRMIQLTLEVSRGVAHWGQQQIRPIKSVIPSPTTTDVTHQNTGKLLKKEERSFEEAIPARKLKNFYPGVAEHKDISKLVLLLSSSVNSLRKAAHEALQDFQKYKTLWTEDRDVKVKEFLANNPSLTEIRSEILHYATFEQEIDELKPIIVVGALELHTEPMKLALSIEAKAWKMLLCRYLNEEYKKKMSYMIAFINEYLKKLSRPIRDLDDVRFAMEALSCIRDNEIQMDMTLGPIEEAYAILNRFEVEVTKEESEAVDTLRYSFNKLQSKAVSVQEDLVQVQPKFKSNLLESVEVFREDVINFAEAYELEGPMVPNIPPQEASNRLQIFQASFDDLWRKFVTYSSGEQLFGLPVTDYEVLHKTRKELNLLQKLYGLYDTVMSSISGYYEILWGDVDIEKINAELLEFQNRCRKLPKGLKDWQAFLDLKKRIDDFSESCPLLEMMTNKAMKQRHWDRISELTGTPFDVESDSFCLRNIMEAPLLKHKDDIEDICISAIKEKDIEAKLTQVIENWTNQNLSFAAFKGKGELLLKGTESGEIITLMEDSLMVLGSLLSNRYNAPFKKNIQNWVYKLSTSSDIIEEWLVVQNLWVYLEAVFVGGDIAKQLPQEAKRFQNIDKSWIKIMQRAHENPNVINCCVGDETMGQLLPHLHEQLEVCQKSLTGYLEKKRLLFPRFFFVSDPVLLEILGQASDSHTIQPHLPAVSDNINEVTFHAKDYDRIMAVISREGEKIVLDNSVMAKGPVEIWLLDLLKMQMSSLHNIIRSAFYQISDSGFQLLPFLSHFPAQVGLLGIQMLWTHDSEEALRNAKDDRKIMQVTNQKFLDILNTLISQTTHDLSKFDRVKFETLITIHVHQRDIFDDLVKMHIKSPTDFEWLKQSRFYFKEDLDQTVVSITDVDFIYQNEFLGCTDRLVITPLTDRCYITLAQALGMNMGGAPAGPAGTGKTETTKDMGRCLGKYVVVFNCSDQMDFRGLGRIFKGLAQSGSWGCFDEFNRIELPVLSVAAQQIYIVLTARKERKKQFIFSDGDCVDLNPEFGIFLTMNPGYAGRQELPENLKIQFRTVAMMVPDRQIIMRVKLASCGFLENVILAQKFYVLYKLCEEQLTKQVHYDFGLRNILSVLRTLGSQKRARPEDSELSIVMRGLRDMNLSKLVDEDEPLFLSLINDLFPGLQLDSNTYAELQNAVAHQVQIEGLINHPPWNLKLVQLYETSLVRHGLMTLGPSGSGKTTVITILMKAQTECGRPHREMRMNPKAITAPQMFGRLDTATNDWTDGIFSTLWRKTLKAKKGENIFLILDGPVDAIWIENLNSVLDDNKTLTLANGDRIPMAPSCKLLFEVHNIENASPATVSRMGMVYISSSALSWRPILQAWLKKRTAQEAAVFLTLYEKVFEDTYTYMKLNLNPKMQLLECNYIVQSLNLLEGLIPSKEEGGVSCVEHLHKLFVFGLMWSLGALLELESREKLEAFLRQHESKLDLPEIPKGSNQTMYEFYVTDYGDWEHWNKKLQPYYYPTDSIPEYSSILVPNVDNIRTNFLIDTIAKQHKAVLLTGEQGTAKTVMVKAYLKKYDPEVQLSKSLNFSSATEPMMFQRTIESYVDKRIGSTYGPPGGRKMTVFIDDINMPVINEWGDQITNEIVRQMMEMEGMYSLDKPGDFTTIVDVQLIAAMIHPGGGRNDIPQRLKRQFTVFNCTLPSNASIDKIFGIIGCGYFDPCRSFKPQICEMIVNLVSVGRVLWQWTKVKMLPTPSKFHYIFNLRDLSRIWQGMLTIKAEECASIPTLLSLFKHECSRVIADRFITPEDEQWFNAHLTRAVEENIGSDAASCILPEPYFVDFLREMPEPTGDEPEDSVFEVPKIYELMPSFDFLAEKLQFYQRQFNEIIRGTSLDLVFFKDAMTHLIKISRIIRTSCGNALLVGVGGSGKQSLSRLASFIAGYQIFQITLTRSYNVTNLTDDLKALYKVAGADGKGITFIFTDSEIKDEAFLEYLNNLLSSGEISNLFARDEMDEITQGLISVMKRELPRHPPTFDNLYEYFISRSRKNLHVVLCFSPVGEKFRARSLKFPGLISGCTMDWFSRWPREALIAVASYFLSDYNIVCSSEIKRQVVETMGLFHDMVSESCESYFQRYRRRAHVTPKSYLSFINGYKNIYAEKVKFINEQAERMNIGLDKLMEASESVAKLSQDLAVKEKELAVASIKADEVLAEVTVSAQASAKIKNEVQEVKDKAQKIVDEIDSEKVKAESKLEAAKPALEEAEAALNTIKPNDIATVRKLAKPPHLIMRIMDCVLLLFQKKIDPVTMDPEKSCCKPSWGESLKLMSATGFLWSLQQFPKDTINEETVELLQPYFNMDDYTFESAKKVCGNVAGLLSWTLAMAIFYGINREVLPLKANLAKQEGRLAVANAELGKAQALLDEKQAELDKVQAKFDAAMNEKMDLLNDADTCRKKMQAASTLIDGLSGEKIRWTQQSKEFKAQINRLVGDILLCTGFLSYLGPFNQIFRNYLLKDQWEMELRARKIPFTENLNLISMLVDPPTIGEWGLQGLPGDDLSIQNGIIVTKATRYPLLIDPQTQGKTWIKSKEKENDLQVTSLNHKYFRTHLEDSLSLGRPLLIEDIHEELDPALDNVLEKNFIKSGTTFKVKVGDKECDIMDTFKLYITTKLPNPAFTPEINAKTSVIDFTVTMKGLENQLLRRVILTEKQELEAERVKLLEDVTFNKRKMKELEDNLLYKLSATKGSLVDDESLIGVLRTTKQTAAEVSEKLHVAAETEIKINAAQEEFRPAATRGSILYFLITEMSMVNIMYQTSLAQFLKLFDQSMARSEKSPLPQKRITNIIEYLTYEVFTYSVRGLYENHKFLFVLLMTLKIDLQRGTVKHREFQALIKGGAALDLKACPPKPYRWILDMTWLNLVELSKLPQFAEIMNQISRNEKGWKSWFDKDAPEEEIIPDGYNDSLDTCHKLLLIRSWCPDRTVFQARKYIADSLEEKYTEPVILNLEKTWEESDTRTPLICFLSMGSDPTNQIDALAKKLKLECRTISMGQGQEVHARKLIQMSMQQGGWVLLQNCHLGLEFMEELLETLITTEASDDSFRVWITTEPHDRFPITLLQTSLKFTNEPPQGVRAGLKRTFAGINQDLLDISNLPMWKPMLYTVAFLHSTVQERRKFGPLGWNIPYEFNSADFSASVQFIQNHLDECDIKKGVSWNTVRYMIGEVQYGGRVTDDFDKRLLNCFARVWFSEKMFEPSFCFYTGYKIPLCKTLDQYFEYIQSLPSLDNPEVFGLHPNADITYQSNTASAVLETITNIQPKESGGGVGETREAIVYRLSEDMLSKLPPDYIPHEVKSRLIKMGHLNSMNIFLRQEIDRMQRVISILRSSLSDLKLAIEGTIIMSENLRDALDNMYDARIPQLWKRVSWDSSTLGFWFTELLERNAQFSTWIFEGRPNVFWMTGFFNPQGFLTAMRQEVTRAHKGWALDTVTIHNEVLRQTKEEITSPPGEGVYIYGLYMDGAAWDRRNGKLMESTPKVLFTQLPVLHIFAINSTAPKDPKLYVCPIYKKPRRTDLTFITVVYLRTVLSPDHWILRGVALLCDIK

SEQ ID NO: 74677 - protein, 105 aa, Homo sapiens
MVSNHYFLLCVNLPLREIHTPEVHMVRPGYSHRVSLPTSPGILATSPYPETDSAFFEPSHLTSAADEGAVQVSRRTISSNSFSPEVFVLPVDVEKHLIDGDCQKH

SEQ ID NO: 74678 - protein, 549 aa, Homo sapiens
MLLRGVLLALQALQLAGALDLPAGSCAFEESTCGFDSVLASLPWILNEEGHYIYVDTSFGKQGEKAVLLSPDLQAEEWSCLRLVYQITTSSESLSDPSQLNLYMRFEDESFDRLLWSAKEPSDSWLIASLDLQNSSKKFKILIEGVLGQGNTASIALFEIKMTTGYCIECDFEENHLCGFVNRWNPNVNWFVGGGSIRNVHSILPQDHTFKSELGHYMYVDSVYVKHFQEVAQLISPLTTAPMAGCLSFYYQIQQGNDNVFSLYTRDVAGLYEEIWKADRPGNAAWNLAEVEFSAPYPMEVIFEVAFNGPKGGYVALDDISFSPVHCQNQTELLFSAVEASCNFEQDLCNFYQDEGPGWTRVKVKPNMYRAGDHTTGLGYYLLANTKFTSQPGYIGRLYGPSLPGNLQYCLRFHYAIYGFLKMSDTLAVYIFEENHVVQEKIWSVLESPRGVWMQAEITFKKPMPTKVVFMSLCKSFWDCGLVALDDITIQLGSCSSSEKLPPPPGECTFEQDECTFTQEKRNRSSWHRRRGETPTSYTGPKGDHTTGV

SEQ ID NO: 74679 - protein, 235 aa, Homo sapiens
  MOD_RES (1)..(1): Any amino acid
XNYLFQGRQECYAFNGTQRFLERYIYNREELVRFDSDVGEFRAVTELGRPEAEYWNSQKDILEEERAVPDRMCRHNYELGGPMTLQRRVQPRVNVSPSKKGPLQHHNLLVCHVTDFYPGSIQVRWFLNGQEETAGVVSTNLIRNGDWTFQILVMLEMTPQQGDVYTCQVEHTSLDSPVTVEWKAQSDSARSKTLTGAGGFVLGLIICGVGIFMHRRSKKGEKACRFNEDLHKQGS

SEQ ID NO: 74680 - protein, 317 aa, Homo sapiens
  MOD_RES (1)..(1): Any amino acid
XPHSLRYNLMVLSQDGSVQSGFLAEGHLDGQPFLRYDRQKRRAKPQGQWAEDVLGAKTWDTETEDLTENGQDLRRTLTHIKDQKGVPQSSRAQTLAMNVTNFWKEDAMKTKTHYRAMQADCLQKLQRYLKSGVAIRRTVPPMVNVTCSEVSEGNITVTCRASSFYPRNITLTWRQDGVSLSHNTQQWGDVLPDGNGTYQTWVATRIRQGEEQRFTCYMEHSGNHGTHPVPSGKALVLQSQRTDFPYVSAAMPCFVIIIILCVPCCKKKTSAAEGPELVSLQVLDQHPVGTGDHRDAAQLGFQPLMSATGSTGSTEGA

SEQ ID NO: 74681 - protein, 80 aa, Homo sapiens
MNIRGDIGHKAYEYQDYAPKPYKCQQPKKAFRYHPSFRTQERNHTGEKPYACKECGKTFISHSGIRRRMVMHSGDGPYKC

SEQ ID NO: 74682 - protein, 450 aa, Homo sapiens
  MOD_RES (1)..(1): Any amino acid
XSAVHKMIVDRQYMGVSKRKCIVWGVAFLSDGTIISVDSAGKVQFWDSATGTLVKSHLIANADVQSIAVADQEDSFVVGTAEGTVFHFQLVPVTSNSSEKQWVRTKPFQHHTHDVRTVAHSPTALISGGTDTHLVFRPLMEKVEVKNYDAALRKITFPHRCLISCSKKRQLLLFQFAHHLELWRLGSTVATGKNGDTLPLSKNADHLLHLKTKGPENIICSCISPCGSWIAYSTVSRFFLYRLNYEHDNISLKRVSKMPAFLRSALQILFSEDSTKLFVASNQGALHIVQLSGGSFKHLHAFQPQSGTVEAMCLLAVSPDGNWLAASGTSAGVHVYNVKQLKLHCTVPAYNFPVTAMAIAPNTNNLVIAHSDQQVFEYSIPDKQYTDWSRTVQKQGFHHLWLQRDTPITHISFHPKRPMHILLHDAYMFCIIDKSLVSSSLLPPKSSSES

SEQ ID NO: 74683 - protein, 604 aa, Homo sapiens
MPTAAAPIISSVQKLVLYETRARYFLVGSNNAETKYRVLKIDRTEPKDLVIIDDRHVYTQQEVRELLGRLDLGNRTKMGQKGSSGLFRAVSAFGVVGFVRFLEGYYIVLITKRRKMADIGGHAIYKVEDTNMIYIPNDSVRVTHPDEARYLRIFQNVDLSSNFYFSYSYDLSHSLQYNLTVLRMPLEMLKSEMTQNRQESFDIFEDEGLITQGGSGVFGICSEPYMKYVWNGELLDIIKSTVHRDWLLYIIHGFCGQSKLLIYGRPVYVTLIARRSSKFAGTRFLKRGANCEGDVANEVETEQILCDASVMSFTAGSYSSYVQVRGSVPLYWSQDISTMMPKPPITLDQADPFAHVAALHFDQMFQRFGSPIIILNLVKEREKRKHERILSEELVAAVTYLNQFLPPEHTIVYIPWDMAKYTKSKLCNVLDRLNVIAESVVKKTGFFVNRPDSYCSILRPDEKWNELGGCVIPTGRLQTGILRTNCVDCLDRTNTAQFMVGKCALAYQLYSLGLIDKPNLQFDTDAVRLFEELYEDHGDTLSLQYGGSQLVHRVKTYRKIAPWTQHSKDIMQTLSRYYSNAFSGNSEVIAIFKTYSEVHFLYVF

SEQ ID NO: 74684 - protein, 53 aa, Homo sapiens
MAPLLLQLAVLGAALAAAALVLTCMSAFRFPSLHLQLLQKCQHSIDMKKRNSS

SEQ ID NO: 74685 - protein, 69 aa, Homo sapiens
MEKSSSCESLGSQPAAARPPSVDSLSSASTSHSENSVHTKSASVVSSDSISTSADNFSPDLRMIITCRD

SEQ ID NO: 74686 - protein, 738 aa, Homo sapiens
MQFLHKLILNHNPLTTVEDPYLFKLPALKYLDMGTTLVPLTTLKNILMMTVELEKLILPSHMACCLCQFKNSIEAVCKTVKLHCNSACLTNTTHCPEEASVGNPEGAFMKVLQARKNYTSTELIVEPEEPSDSSGINLSGFGSEQLDTNDESDFISTLRYILPYFSAVNLDVKSLLLPLIKLPTTGNSLAKIQTVGQNRQRVKRVLMGPRSIQKRHFKEVGRQSIRREQGAQASVENAAEEKRLGSPAPREVEQPHTQQGPEKLAGNAVYTKPSFTQEHKAAVSVLKPFSKGAPSTSSPAKALPQVRDRWKDLTHAISTLESAKARVTNTKTSKPIVHARKKYRFHKTRSHVTHRTPKVKKSPKVRKKSYLSRLMLANRLPFSAAKSLINSPSQGAFSSLGDLSPQENPFLEVSAPSEHFIEKNNTKHTTARNAFEENDFMENTNMPEGTISENTNYNHPPEADSAGTAFNLGPTVKQTETKWEYNNVGTDLSPEPKSFNYPLLSSPGDQFEIQLTQQLQSLIPNNNVRRLIAHVIRTLKMDCSGTHVQVTCAKLISRTGHLMKLLSGQQEVKASKIEWDTDQWKIENYINESTEAQSEQKEKSLELKKEVPGYGYTDKLILALIVTGILTILIILFCLIVICCHRRSLQEDEEGFSRGIFRFLPRRGCSSRRESQDGLSSFGQPLWFKDMYKPLSATRINNHAWKLHKKSSNEDKILNRDPGDSEAPTEEEESEALP

SEQ ID NO: 74687 - protein, 223 aa, Homo sapiens
FPFAPPGAAAEPHSLRYNLTVLSWDGSVQSGFLAEVHLDGQPFLRYDRQKCRAKPQGQWAEDVLGNKTWDRETRDLTGNGKDLRMTLAHIKDQKEVPPMVNVTRSEASEGNITVTCRASSFYPRNIILTWRQDGVSLSHDTQQWGDVLPDGNGTYQTWVATRICRGEEQRFTCYMEHSGNHSTHPVPSGKVLVLQSHWQTFHVSAVAAGCCYFCYYYFLCPLL

SEQ ID NO: 74688 - protein, 68 aa, Homo sapiens [sequence omitted]

SEQ ID NO: 74689 - protein, 50 aa, Homo sapiens
  MOD_RES (1)..(1): Any amino acid
XTNPYTEANYKPTFLSDDELKHLILRDVTEGRYSLSQSLSSRSSTTARMI

SEQ ID NO: 74690 - protein, 5334 aa, Homo sapiens
  MOD_RES (1)..(1): Any amino acid
XTTEDTLITGSKTAAPVTSTGSTTATLEGQSTAASSRTSNQDISASSQNHQTKSTETTSKAQTDTLTQMMTSTLFSSPSVHNVMETAPPDEMTTSFPSSVTNTLMMTSKTITMTTSTDSTLGNTEETSTAGTESSTPVTSAVSITAGQEGQSRTTSWRTSIQDTSASSQNHWTRSTQTTRESQTSTLTHRTTSTPSFSPSVHNVTGTVSQKTSPSGETATSSLCSVTNTSMMTSEKITVTTSTGSTLGNPGETSSVPVTGSLMPVTSAALVTFDPEGQSPATFSRTSTQDTTAFSKNHQTQSVETTRVSQINTLNTLTPVTTSTVLSSPSGFNPSGTVSQETFPSGETTTSSPSSVSNTFLVTSKVFRMPTSRDSTLGNTEETSLSVSGTISAITSKVSTIWWSDTLSTALSPSSLPPKISTAFHTQQSEGAETTGRPHERSSFSPGVSQEIFTLHETTTWPSSFSSKGHTTWSQTELPSTSTGAATRLVTGNPSTGTAGTIPRVPSKVSAIGEPGEPTTYSSHSTTLPKTTGAGAQTQWTQETGTTGEALLSSPSYSVTQMIKTATSPSSSPMLDRHTSQQITTAPSTNHSTIHSTSTSPQESPAVSQRGHTQAPQTTQESQTTRSVSPMTDTKTVTTPGSSFTASGHSPSEIVPQDAPTISAATTFAPAPTGDGHTTQAPTTALQAAPSSHDATLGPSGGTSLSKTGALTLANSVVSTPGGPEGQWTSASASTSPDTAAAMTHTHQAESTEASGQTQTSEPASSGSRTTSAGTATPSSSGASGTTPSGSEGISTSGETTRFSSNPSRDSHTTQSTTELLSASASHGAIPVSTGMASSIVPGTFHPTLSEASTAGRPTGQSSPTSPSASPQETAAISRMAQTQRTRTSRGSDTISLASQATDTFSTVPPTPPSITSTGLTSPQTETHTLSPSGSGKTFTTALISNATPLPVTYASSASTGHTTPLHVTDASSVSTGHATPLPVTSPSSVSTGHTTPLPVTDTSSESTGHVTPLPVTSFSSASTGDSTPLPVTDTSSASTGHVTPLPVTSLSSASTGDTTPLPVTDTSSASTGHATSLPVTDTSSVSTGHTTPLPVTDTSSASTGHATSLPVTDTSSVSTGHTTPLHVTDASSASTGQATPLPVTSLSSVSTGDTTPLPVTSPSSASTGHATPLLVTDTSSASTGHATPLPVTDASSVSTDHATSLPVTIPSAASTGHTTPLPVTDTSSASTGQATSLLVTDTSSVSTGDTTPLPVTSTSSASTGHVTPLHVTSPSSASTGHATPLPVTSLSSASTGDTMPLPVTSPSSASTGDTTPLPVTDASSVSTGHTTPLHVTDASSASTGQATPLPVTSLSSVSTGDTTPLPVTSPSSASTGHATPLLVTDTSSASTGHATPLPVTDASSVSTDHATSLPVTIPSAASTGHTTPLPVTDTSSASTGQATSLLVTDTSSVSTGDTTPLPVTSTSSASTGHVTPLHVTSPSSASTGHATPLPVTSLSSASTGDTMPLPVTSPSSASTGDTTPLPVTDASSVSTGHTTPLPVTSPSSASTGHTTPLPVTDTSSASKGDTTPLPVTSPSSASTGHTTPLPVTDTSSASTGDTTPLPVTNASSLSTGHATPLHVTSPSSASTGHATPLPVTSTSSASTGHATPLPVTGLSSATTDDTTRLPVTDVSSASTGQATPLPVTSLSSVSTGDTTPLPVTSPSSASTGHASPLLVTDASSASTGQATPLPVTDTSSVSTAHATPLPVTGLSSASTDDTTRLPVTDVSSASTGQAIPLPVTSPSSASTGDTTPLPVTDASSASTGDTTSLPVTIPSSASSGHTTSLPVTDASSVSTGHATSLLVTDASSVSTGDTTPLPVTDTNSASTGDTTPLHVTDASSVSTGHATSLPVTSLSSASTGDTTPLPVTSPSSASSGHTTPLPVTDASSVPTGHATSLPVTDASSVSTGHATPLPVTDASSVSTGHATPLPVTDTSSVSTGQATPLPVTSLSSASTGDTTPLPVTDTSSASTGHAPHLPVTGLSSASTGDTTRLPVTNVSSASTGHATPLPVTSTSSASTGDTTPLPGTDTSSVSTGHTTPLLVTDASSVSTGDTTRLPVTSPSSASTGHTTPLHVTDASSVSTGHTTPLPVTDTSSASTGQATSLLVTDTSSVSTGDTTPLPVTSTSSASTGHVTPLHVTSPSSASTGHATPLPVTSLSSASTGDTTPLPVTDTSSVSTGHTTPLPVTSPSSASTGHTTPLPVTDTSSASKGDTTPLPVTSPSSASTGHTTPLPVTDTSSASTGDTTPLPVTNASSLSTGHATPLHVTSPSSASTGHATPLPVTSTSSASTGHATPLPVTSTSSASTGHATPLPVTDNSSVSTGHATPLPVTGLSSATTDDTTRLPVTDVSSASTGQATPLPVTSLSSVSTGDTTPLPVTSPSSASTGHASPLLVTDASSASTGQATPLPVTDTSSVSTAHATPLPVTGLSSASTDDTTRLPVTDVSSASTGQAIPLPVTSPSSASTGDTTPLPVTDASSASTGDTTSLPVTIPSSASSGHTTSLPVTDASSVSTGHATSLLVTDASSVSTGDTTPLPVTDTNSASTGDTTPLHVTDASSVSTGHATSLPVTSLSSASTGDTTPLPVTSPSSASSGHTTSLPVTDASSVSTGHATSLPVTIPSSASSGHTTPLPVTDASSVPTGHATSLPVTDASSVSTGHATPLPVTDASSVSTGHATPLPVTDTSSVSTGQATPLPVTSLSSASSTGDTTPLPVTDTSSASTGQDTPLPVTSLFSVSTGDTTPLPVTSPSSASTGHATHLLVTDASSVSTGHATSLLVTDASSVSTGHATALHVTDASSLSTGDTTPLPVTSPSSASTGDTTPLPVTDTSSVSTGHATSLPVTDTSSASTGHATSLPVTDTSSASTGQATPLPVTSPSSASTGHAIPLLVTDTSSASTGQATPLPVTSLSSASTGDTTPLPVTDASSVSTGHATSLPVTSLSSVSTGDTTPLPVTSPSSASTGHATPLHVTSPSSASTGHATPLPVTSLSSASTGDTTPLPVTSPSSASTGHATPLHVTDASSVSTGDTTPLPVTSPSSASSGHTTPLPVTDASSASTGDTTPLPVTDTSSASTGHATHLPVTGLSSASTGDTTRLPVTDVSSASTGHATPLPVTSTSSASTGDTTPLPGTDTSSVSTGHTTPLLVTDASSVSTGDTTRLPVTSPSSASTGHTTPLPVTDTPSASTGDTTPLPVTNASSLSTRHATSLHVTSPSSASTGHATPLPVTDTSAASTGHATPLPVTSTSSASTGDTTPLPVTDTSSASTGHATPLPVTNTSSVSTGHATPLHVTSPSSASTGHTTPLPVTDASSVSTGHATSLPVTDASSVSTGHATPLPVTDASSVSTGHATPLPLTSLSSVSTGDTTPLPVTDTSSASTGQATPLPVTSLSSVSTGDTTPLPVTDTSSASTGHATSLPVTDTSSASTGHATPLHVTSPSSASTGHATPLPVTDTSSASTGHATPLPVTSLSSVSTGDTTPLPVTSPSSASTGHATPLLVTDASSASTGQATPLPVTSLSSVSTGDTTPLPVTSPSSASTGHATSLPVTDTSSASTGDTTSLPVTDTSSAYTGDTTSLPVTDTSSSSTGDTTPLLVTETSSASTGDTTPVPVTDTSSVSTGHATPLPVTGLSSASTGDTTRLPVTDISSASTGQATPLPVTNTSSVSTGDTMPLPVTSPSSASTGHATPLPVTSTSSASTGHATPVPVTSTSSASTGHTTPLPVTSPSSASTGHTTPLPVTDTSSASTGDTTPLPVTNASSLSTGHTTPLHVTIPSSASTGDTSTLPVTGASSASTGHATPLPVTDTSSVSTGHATPLPVTSFSSVSTGDTTPLPVTDASSASTGHATPLPVTDTSSASTGDTTPLPVTDASSASTGQATPLPVTSLSSVSTGDTTPLPVTIPSSASSGHTTSLPVSDTSSASTGQATPLPVTSLSSVSTGDTTPLLVTDASSVSTGHATPLPVTDTSSASTGDTTRLPVTDTSSASTGQATPLPVTSLSSVSTGDTTPLLVTNTSSVSTGHATSLPVTIPSSSSSGHTTPLPVTSTSSVSTGHVTPLHVTSPSSSSTGQATPLPVTSTSSSSTGQATPLPVTSTSSASTGHATPLPVTDASSVSTGHATPLPVTDTSSASTGDTTPLPVTDTSSASTGQATPLPVTSLSSVSTGHATPLAVSSATSASTVSSDSPLKMETSGMTTPSLKTDGGRRTATSPPPTTSQTIISTIPSTAMHTRSTAAPIPILPERGVSLFPYGADAGDLEFVRRTVDFTSPLFKPATGFPLGSSLRDSLYFTDNGQIIFPESDYQIFSYPNPLPTGFTGRDPVALVAPFWDDADFSTGRGTTFYQSNTYQAILSTDGSRSYALFLYQSGGMQWDVAQRSGKPVLMGFSSGDGYFENSPLMSQPVWERYRPDRFLNSNSGLQGLQFYRLHREERPNYRLECLQWLKSQPRWPSWGWNQVSCPCSWQQGRRDLRFQPVSIGRWGLGSRQLCSFTSWRGGVCCSYGPWGEFREGWHVQRPWQLAQELEPQSWCCRWNDKPYLCALYQQRRPHVGCATYRPPQPAWMFGDPHITTLDGVSYTFNGLGDFLLVGAQDGNSSFLLQGRTAQTGSAQATNFIAFAAQYRSSSLGPVTVQWLLEPHDAIRVLLDNQTVTFQPDHEDGGGQETFNATGVLLSRNGSEVSASFDGWATVSVIALSNILHSSASLPPEYQNRTEGLLGVWNNNPEDDFRMPNGSTIPPGSPEEMLFHFGMTWQINGTGLLGKRNDQLPSNFTPVFYSQLQKNSSWAEHLISNCDGDSSCIYDTLALRNASIGLHTREVSKNYEQANATLNQYPPSINGGRVIEAYKGQTTLIQYTSNAEDANFTLRDSCTDLELFENGTLLWTPKSLEPFTLEILARSAKIGLASALQPRTVVCHCNAESQCLYNQTSRVGNSSLEVAGCKCDGGTFGRYCEGSEDACEEPCFPSVHCVPGKGCEACPPNLTGDGRHCAALGSSFLCQNQSCPVNYCYNQGHCYISQTLGCQPMCTCPPAFTDSRCFLAGNNFSPTVNLELPLRVIQLLLSEEENASMAEVNASVAYRLGTLDMRAFLRNSQVERIDSAAPASGSPIQHWMVISEFQYRPRGPVIDFLNNQLLAAVVEAFLYHVPRRSEEPRNDVVFQPISGEDVRDVTALNVSTLKAYFRCDGYKGYDLVYSPQSGFTCVSPCSRGYCDHGGQCQHLPSGPRCSCVSFSIYTAWGEHCEHLSMKLDAFFGIFFGALGGLLLLGVGTFVVLRFWGCSGARFSYFLNSAEALP

SEQ ID NO: 74691 - protein, 566 aa, Homo sapiens
MGQGDESERIVINVGGTRHQTYRSTLRTLPGTRLAWLAEPDAHSHFDYDPRADEFFFDRHPGVFAHILNYYRTGKLHCPADVCGPLYEEELAFWGIDETDVEPCCWMTYRQHRDAEEALDSFGGAPLDNSADDADADGPGDSGDGEDELEMTKRLALSDSPDGRPGGFWRRWQPRIWALFEDPYSSRYARYVAFASLFFILVSITTFCLETHERFNPIVNKTEIENVRNGTQVRYYREAETEAFLTYIEGVCVVWFTFEFLMRVIFCPNKVEFIKNSLNIIDFVAILPFYLEVGLSGLSSKAAKDVLGFLRVVRFVRILRIFKLTRHFVGLRVLGHTLRASTNEFLLLIIFLALGVLIFATMIYYAERIGAQPNDPSASEHTHFKNIPIGFWWAVVTMTTLGYGDMYPQTWSGMLVGALCALAGVLTIAMPVPVIVNNFGMYYSLAMAKQKLPKKKKKHIPRPPQLGSPNYCKSVVNSPHHSTQSDTCPLAQEEILEINRADSKLNGEVAKAALANEDCPHIDQALTPDEGLPFTRSGTRERYGPCFLLSTGEYACPPGGGMRKGM

SEQ ID NO: 74692 - protein, 24 aa, Homo sapiens
MKKTQEISKGKRKEDSLTASQRKQ

SEQ ID NO: 74693 - protein, 479 aa, Homo sapiens
MSFQAPRRLLELAGQSLLRDQALAISVLDELPRELFPPLFVEAFTSRRCEVLKVMVQAWPFPCLPLGSLMKTPDLEILHYVVDGIDCLLAQKVRPRRWKLQVLEMRDVDENFWTIWSGARLLSCSPEAMSKRQTVEDCPRTGEKQPLKVFMDVCLKEKFMDEDLSFFSGWVQHRRGSVHLCCTKVVNYSMSILNFRNILETVYPDSIQVLEIWNMCWLCMIVEFSRYLSQMRNLRKLFISDGCRYLLSSDSQEQLVAEFSSVLLRLENLQMLYVRRVCFFRGHLDQLIRCLRSPLETLALTYGFLEEEDLKCLPRYPSLSQLKQLNLSHGALRFIRLEPLRALLEKVAATLQTLFLVDCGIGYSKLRVILPALSRCSNLTTFCFHGNDTSMDALKDLLRHTGRLSNLSLETYPAPRESLDNRGRVILELLTPLQAELMRILREVREPKRIFFGPVSCPCCGTSPTEQLEFNFCLWGRPA

SEQ ID NO: 74694 - protein, 39 aa, Homo sapiens
MAALRALCGFRGVAAQVLRPGAGVRLPIQPSRPFHTLTG

SEQ ID NO: 74695 - protein, 88 aa, Homo sapiens
  MOD_RES (1)..(1): Any amino acid
XSYLEGSLLASGALLGADELARYFPDRNVALFVATWNMQGQKVSGGAGPPHAPSFQELPPSLDEFLLPAEADYAQDLYVIGVQEGCSD

SEQ ID NO: 74696 - protein, 85 aa, Homo sapiens
  MOD_RES (1)..(1): Any amino acid
XVEIGESVRGEDVYIVQSGCGEINDNLMELLIMINACKIASASRVTAVIPCFPYARQDKKDKSDLHCRQAECGLCLDSQRTEEGQ

SEQ ID NO: 74697 - protein, 46 aa, Homo sapiens
MSYGEIEGKFLGPREEVTSEPRCKKLKSTTESKTSYRSGKISSYNR

SEQ ID NO: 74698 - protein, 97 aa, Homo sapiens
RQKSTYTSYPKAEPMPSASSAPPASSLYSSPVELKDLLSGASTSPLPGLSPALSRGTRRRLWLRTSTLSSHGISTGTTGRRSRRRLARAPRHLRPCP

SEQ ID NO: 74699 - protein, 59 aa, Homo sapiens
MALLTAFSSSVAVTDKDTFELSTFLDSSKAPQHDRNELPEQRGVGGGLDVPLRPVGFGG

SEQ ID NO: 74700 - protein, 283 aa, Homo sapiens
MFAWEIRDRLLAERVCDNDTVPSVSSINRIIRTKVQQPPNQPVPASSHSIVSTGSVTQVSSVSTDSAGSSYSISGILGITSPSADTNKRKRDEGIQESPVPNGHSLPGRDFLRKQMRGDLFTQQQLEVLDRVFERQHYSDIFTTTEPIKPEQTTEYSAMASLAGGLDDMKANLASPTPADIGSSVPGPQSYPIVTGRDLASTTLPGYPPHVPPAGQGSYSAPTLTGMVPGSEFSGSPYSHPQYSSYNDSWRFPNPGLLGSPYYYSAAARGAAPPAAATAYDRH

SEQ ID NO: 74701 - protein, 231 aa, Homo sapiens
MQGPPAPAPVPGPGSPRGSPRGSPGLFRKLLVNQSIRLQRRFTVAHPLCFDLENGLSCGRRALDPQSSPGLGRIMQAPVPHSQRRESFLYRSDSDYELSPKAMSRNSSVASDLHGEDMIVTPFAQVLASLRTVRSNVAALARQQCLGAAKGHGAEAGIGDARRAGLVPGSVGDAADPALGGGDGLQQVQADPEPGVDPPVRNQPLREPGVRVHLPDLPGPADRGGAAQGDR

SEQ ID NO: 74702 - protein, 57 aa, Homo sapiens
MGKRTSLEGGQVRTRWALVPSAANGASHALRSPRNRCWSWSGASSSRSTWRRPSETG

SEQ ID NO: 74703 - protein, 102 aa, Homo sapiens
MTVTDFGWEDALHTVRAGRSCANPNVGFQRQLQEFEKHEVHQYRQWLKEEYGESPLQDAEEAKNILGKYKEQGRTEPQPGARRWSSFPALAPLTYDNYTTET

SEQ ID NO: 74704 - protein, 44 aa, Homo sapiens
MEEDIDTRKINNSFLRDHSYATEGAKGEPKTENSGPIMKHELSR

SEQ ID NO: 74705 - protein, 75 aa, Homo sapiens
MTRGFAPILPVEFHKMGSFRRPRPRFMSSPVLSDLPRFQAARQALQLSSSSAWNSVQTAVINVFKGGGLQSNELY

SEQ ID NO: 74706 - protein, 69 aa, Homo sapiens
MPADEDREAATQHLCHTLPAVDHSHREDLPRGFSRREGGVDAGHPDGRQQPQAAGPRRGPHGLQVWLPQ

SEQ ID NO: 74707 - protein, 200 aa, Homo sapiens
MFSVFEEITRIVVKEMDAGGDMIAVRSLVDADRFRCFHLVGEKRTFFGCRHYTTGLTLMDILDTDGDKWLDELDSGLQGQKAEFQILDNVDSTGELIVRLPKEITISGSFQGFHHQKIKISENRISQQYLATLENRKLKRELPFSFRSINTRENLYLVTETLETVKEETLKSDRQYKFWSQISQGHLSYKHKRRMVLHPV

SEQ ID NO: 74708 - protein, 145 aa, Homo sapiens
MFTSPSEGKPGNMDRHHYEMFTKFGDDGFLIHLDNARGFGRHSHDEISILSPLSQCCMIKKKTLLHLQLLAQADYRLSDVMRESLLEDQLSPVLTEPHLLALDRRLQTILRTVEGCIVAHGQQSVIVDGPVEQLAPDSGQANLTS

SEQ ID NO: 74709 - protein, 186 aa, Homo sapiens
MSSLYTRSKEFTRNRKSQSDSPPASPSPTAKTLRHERLSRLESGGSNPTTSDSYGDRASARARREAREARLATLTSRVEEDSNRDYKKLYESALTENQKLKTKLQEAQLELADIKSKLEKVAQQKQEKTSDRSSVLEMEKRERRALERKMSEMEEEMKVLTELKSDNQRLKDENGALIRVISKLSK

SEQ ID NO: 74710 - protein, 26 aa, Homo sapiens
MKLLLWACIVCVAFARKNAGLGFLWL

SEQ ID NO: 74711 - protein, 108 aa, Homo sapiens
MGTWCRAPSGAEMEPWWARRARTSSCGSLTPEQSRGPLRALSCTETATSPTSRGSTSPHLVRVTASVPTSCVWPCRCSAAGDRWLCLSYGSLAACPTRHCPRCRMGQL

SEQ ID NO: 74712 - protein, 39 aa, Homo sapiens
MRSSASRLSSFSSRDSLWNRYPGMIFRVFEKMRGADGFH

SEQ ID NO: 74713 - protein, 479 aa, Homo sapiens
MLLKSPENSLLQFQFKYGVPTPTNVTIESYNMNPIVYWEYQIMPQVPVFTVEVKNYGVKNSEWIDACINISHHYCNISDHVGDPSNSLWVRVKARVGQKESAYAKSEEFAVCRDGKIGPPKLDIRKEEKQIMIDIFHPSVFVNGDEQEVDYDPETTCYIRVYNVYVRMNGSEIQYKILTQKEDDCDEIQCQLAIPVSSLNSQYCVSAEGVLHVWGVTTEKSKEVCITIFNSSIKGSLWIPVVAALLLFLVLSLVFICFYIKKINPLKEKSIILPKSLISVVRSATLETKPESKYVSLITSYQPFSLEKEVVCEEPLSPATVPGMHTEDNPGKVEHTEELSSITEVVTTEENIPDVVPGSHLTPIERESSSPLSSNQSEPGSIALNSYHSRNCSESDHSRNGFDTDSSCLESHSSLSDSEFPPNNKGEIKTEGQELITVIKAPTSFGYDKPHVLVDLLVDDSGKESLIGYRPTEDSKEFS

SEQ ID NO: 74714 - protein, 246 aa, Homo sapiens
MATTVQLDAQAAQQLQYGGAVGTVGRLNITVVQAKLAKNYGMTRMDPYCRLRLGYAVYETPTAHNGAKNPRWNKVIHCTVPPGVDSFYLEIFDERAFSMDDRIAWTHITIPESLRQGKVEDKWYSLSGRQGDDKEGMINLVMSYALLPAAMVMPPQPVVLMPTVYQQGVGYVPITGMPAVCSPGMVPVALPPAAVNAQPRCSEEDLKAIQDMFPNMDQEVIRSVLEAQRGNKDAAINSLLQMGEEP

SEQ ID NO: 74715 - protein, 548 aa, Homo sapiens
MGRKAIVLAIANTSLAFPLCQHLVTFCLGEDDGVHTVEDASRKLAVMDSQGRVWAQEMLLRVSPDHVTLLDPASKEELESYPLGAIVRCDAVMPPGRSRSLLLLVCQEPERAQPDVHFFQGLRLGAELIREDIQGALHNYRSGRGERRAAALRATQEELQRDRSPAAETPPLQRRPSVRAVISTVERGAGRGRPQAKPIPEAEEAQRPEPVGTSSNADSASPDLGPRGPDLAVLQAEREVDILNHVFDDVESFVSRLQKSAEAARVLEHRERGRRSRRRAAGEGLLTLRAKPPSEAEYTDVLQKIKYAFSLLARLRGNIADPSSPELLHFLFGPLQMIVNTSGGPEFASSVRRPHLTSDAVALLRDNVTPRENELWTSLGDSWTRPGLELSPEEGPPYRPEFFSGWEPPVTDPQSRAWEDPVEKQLQHERRRRQVTQATQQGRGWEVRGRGRSAWPRLTRLSYFLQQSAPQVAVNGHRDLEPESEPQLESETAGKWVLCNYDFQARNSSELSVKQRDVLEDKEKVSELEAVMEKQKKKVEGEVEMEVI

SEQ ID NO: 74716 - protein, 171 aa, Homo sapiens
MEATRRRQHLGATGGPGAQLGASFLQARHGSVSADEAARTAPFHLDLWFYFTLQNWVLDFGRPIAMLVFPLEWFPLNKPSVGDYFHMAYNVITPFLLLKLIERSPRTLPRSITYVSIIIFIMGASIHLVGDSVNHRLLFSGYQHHLSVRENPIIKNLKPETLVRPPPAPCL

SEQ ID NO: 74717 - protein, 694 aa, Homo sapiens
MAQLRPAVPPGRPRRGSLPAGASWQNTDLFEMIEKMQGSRMDEQRCSFPPPLKTEEDYIPYPSVHEVLGREGPFPLILLPQFGGYWIEGTNHEITSIPETEPLQSPTTKVKLECNPTARIYRKHFLGKEHFNYYSLDAALGHLVFSLKYDVIGDQEHLRLLLRTKCRTYHDVIPISCLTEFPNVVQMAKLVCEDVNVDRFYPVLYPKASRLIVTFDEHVISNNFKFGVIYQKLGQTSEEELFSTNEESPAFVEFLEFLGQKVKLQDFKGFRGGLDVTHGQTGTESVYCNFRNKEIMFHVSTKLPYTEGDAQQLQRKRHIGNDIVAVVFQDENTPFVPDMIASNFLHAYVVVQAEGGGPDGPLYKVSVTARDDVPFFGPPLPDPAVFRKGPEFQEFLLTKLINAEYACYKAEKFAKLEERTRAALLETLYEELHIHSQSMMGLGGDEDKMENGSGGGGFFESFKRVIRSRSQSMDAMGLSNKKPNTVSTSHSGSFAPNNPDLAKAAGISLIVPGKSPTRKKSGPFGSRRSSAIGIENIQEVQEKRESPPAGQKTPDSGHVSQEPKSENSSTQSSPEMPTTKNRAETAAQRAEALKDFSRSSSSASSFASVVEETEGVDGEDTGLESVSSSGTPHKRDSFIYSTWLEDSVSTTSGGSSPGPSRSPHPDAGKLGDPACPEIKIQLEASEQHMPQLGC

SEQ ID NO: 74718 - protein, 143 aa, Homo sapiens
MTAEFLSLLCLGLCLGYEDEKKNEKPPKPSLHAWPSSVVEAESNVTLKCQAHSQNVTFVLRKVNDSGYKQEQSSAENEAEFPFTDLKPKDAGRYFCAYKTTASHEWSESSEHLQLVVTDKHDELEAPSMKTVAHVCNTRTLGR

SEQ ID NO: 74719 - protein, 73 aa, Homo sapiens
MVRHQPLQYYEPQLCLSCLTGIYGCRWKRYQRSHDDTTPWERLWFLLLTFTFGLTLTWLYFWWEVHNDYDEFN

SEQ ID NO: 74720 - protein, 121 aa, Homo sapiens
PPTSPLSGGSAPGAHLEPPYDPGTHHLPSGDFAQCTSPVPTLPQVGNSGDQAGATVLRMVRPQDTVAYEDLSVDYTQKKWKSLTLSQRALQWNMMPENHHSMASLDGETGTEEELIPKHHS

SEQ ID NO: 74721 - protein, 710 aa, Homo sapiens
MITSAAGIISLLDEDEPQLKEFALHKLNAVVNDFWAEISESVDKIEVLYEDEGFRSRQFAALVASKVFYHLGAFEESLNYALGAGDLFNVNDNSEYVETIIAKCIDHYTKQCVENADLPEGEKKPIDQRLEGIVNKMFQRCLDDHKYKQAIGIALETRRLDVFEKTILESNDVPGMLAYSLKLCMSLMQNKQFRNKVLRVLVKIYMNLEKPDFINVCQCLIFLDDPQAVSDILEKLVKEDNLLMAYQICFDLYESASQQFLSSVIQNLRTVGTPIASVPGSTNTGTVPGSEKDSDSMETEEKTSSAFVGKTPEASPEPKDQTLKMIKILSGEMAIELHLQFLIRNNNTDLMILKNTKDAVRNSVCHTATVIANSFMHCGTTSDQFLRDNLEWLARATNWAKFTATASLGVIHKGHEKEALQLMATYLPKDTSPGSAYQEGGGLYALGLIHANHGGDIIDYLLNQLKNASNDIVRHGGSLGLGLAAMGTARQDVYDLLKTNLYQDDAVTGEAAGLALGLVMLGSKNAQAIEDMVGYAQETQHEKILRGLAVGIALVMYGRMEEADALIESLCRDKDPILRRSGMYTVAMAYCGSGNNKAIRRLLHVAVSDVNDDVRRAAVESLGFILFRTPEQCPSVVSLLSESYNPHVRYGAAMALGICCAGTGNKEAINLLEPMTNDPVNYVRQGALIASALIMIQQTEITCPKIWGAP

SEQ ID NO: 74722 - protein, 41 aa, Homo sapiens
MPDVKESVPPKYPGDSEGRSCKPETSGPPQEDKSGSEDPPP

SEQ ID NO: 74723 - protein, 242 aa, Homo sapiens
RSLDTITLSGDERDFGRLNVKLFYNSSVEQIWITVLQAIEFMETFVFAIKLQNLQTVRLVFKIQTQTPRKKTIGECSMSLRTLSTQEMDYSLDITPPSKISVCHAELELGTCFQAVNSRIQLQILEARYLPSSSTPLTLSFFVKVGMFSSGELIYKKKTRLLKASNGRVKWGETMIFPLIQSEKEIVFLIKLYSRSSVRRKHFVGQIWISEDSNNIEAVNQWKETVINPEKVVIRWHKLNPS

SEQ ID NO: 74724 - protein, 168 aa, Homo sapiens
MRKLVLSGFLASEEIYINQLEALLLPMKPLKATATTSQPVLTIQQIETIFYKIQDIYEIHKEFYDNLCPKVQQWDSQVTMGHLFQKLASQLGVYKAFVDNYKVALETAEKCSQSNNQFQKISEELKVKGPKDSKDSHTSVTMEALLYKPIDRVTRSTLVLHDLLKHTP

SEQ ID NO: 74725 - protein, 81 aa, Homo sapiens
MWLKVGGLLRGTGGQLGQTVGWPCGALGPGPHRWGPCGGSWAQKFYQDGPGRGLGEEDIRRAREARPRKTPRPQDWLWAWG

SEQ ID NO: 74726 - protein, 97 aa, Homo sapiens
MVSNPVHGLPFLPGTSFKDSTKTAFHRSQTLSYRNGYAIVRRPTVGIGGDRLQFNQLSQAELDELASKAPVLTYGQPKQAPPADFIPAHVAFDKKLL

SEQ ID NO: 74727 - protein, 224 aa, Homo sapiens
MNNGGKAEKENTPSEANLQEEEVRTLFVSGLPLDIKPRELYLLFRPFKGYEGSLIKLTSKQPVGFVSFDSRSEAEAAKNALNGIRFDPEIPQTLRLEFAKANTKMAKNKLVGTPNPSTPLPNTVPQFIAREPYELTVPALYPSSPEVWAPYPLYPAELAPALPPPAFTYPASLHAQVIDTHRPGLHSLHHQSFQTWFPRAHHTTNTYPANRSTLKRLMIPSKSS

SEQ ID NO: 74728 - protein, 870 aa, Homo sapiens
MWPHSAGARPWASTLTGKDPRVMACWCLDGLPSGLAEPWRELWRWRSRPLHCVPPFSPLARSSRDHRNLRRRGNIDGRQNLEPSNNVEMFPPSGSTGLIPPSHFQARPLSTLPRMAPTWLSDIPLVQPPGHQDVSERRLDTQRPQVTMWERDVSSDRQEPGRRGRSWGLEGSQALSQQAEVIVRQLQELRWLEEEVWLLRETSLQQKMRLEAQAMELEALARAEKAGRAEAEGLRAALAGAEVVRKNLEEGRQRELEEVQRLHQEQLSSLTQAHEEALSSLTSKAEGLEKSLSSLETRRAGEAKELAEAQREAELLRKQLSKTQEDLEAQVTLVENLRKYVGEQVPSEVHSQTWELERQKLLETMQHLQEDRDSLHATAELLQVRVQSLTHILALQEEELTRKVQPSDSLEPEFTRKCQSLLNRWREKVFALMVQLKAQELEHSDSVKQLKGQVASLQEKVTSQSQEQAILQRSLQDKAAEVEVERMGAKGLQLELSRAQEARRWWQQQTASAEEQLRLVVNAVSSSQIWLETTMAKVEGAAAQLPSLNNRLSYAVRKVHTIRGLIARKLALAQLRQESCPLPPPVTDVSLELQQLREERNRLDAELQLSARLIQQEVGRAREQGEAERQQLSKVAQQLEQELQQTQESLASLGLQLEVARQCQQESTEEAASLRQELTQQQELYGQALQEKVAEVETRLREQLSDTERRLNEARREHAKAVVSLRQIQRRAAQEKERSQELRRLQEEARKEEGQRLARRLQELERDKNLMLATLQQEGLLSRYKQQRLLTVLPSLLDKKKSVVSSPRPPECSASAPVAAAVPTRESIKGSLSVLLDDLQDLSEAISKEEAVCQGDNLDRCSSCNPQMSS

SEQ ID NO: 74729 - protein, 86 aa, Homo sapiens
MERRRLWGSIQSRYISMSVWTSPRRLVELAGQSLLKDEALAIAALELLPRELFPPLFMAAFDGRHSQTLKAMVQAWPFTCLPLGVL

SEQ ID NO: 74730 - protein, 110 aa, Homo sapiens
MADKVLKEKRKLFIRSMGEGTINGLLDELLQTRVLNKEEMEKVKRENATVMDKTRALIDSVIPKGAQACQICITYICEEDSYLAGTLGLSADLSNNGQVKPHTSCSHYLQ

SEQ ID NO: 74731 - protein, 69 aa, Homo sapiens
MWVFSNLRCGTPEEPCQEAFNQTNRKLGLTYNTTCCNKDNCNSAGPRPTPALGLVFLTSLAGLGLWLLH

SEQ ID NO: 74732 - protein, 489 aa, Homo sapiens
MHRGGQPLKKRRGSFKMAELDQLPDESSSAKALVSLKEGSLSNTWNEKYSSLQKTPVWKGRNTSSAVEMKFTATMSTPDKKASQKIGFRLRNLLKLPKAHKWCIYEWFYSNIDKPLFEGDNDFCVCLKESFPNLKTRKLTRVEWGKIRRLMGKPRRCSSAFFEEERSALKQKRQKIRLLQQRKVADVSQFKDLPDEIPLPLVIGTKVTARLRGVHDGLFTGQIDAVDTLNATYRVTFDRTGLGTHTIPDYEVLSNEPHETMPIAAFGQKQRPSRFFMTPPRLHYTPPLQSPIIDNDPLLGQSPWRSKISGSDTETLGGFPVEFLIQVTRLSKILMIKKEHIKKLREMNTEAEKLKSYSMPISIEFQRRYATIVLELEQLNKDLNKVLHKVQQYCYELAPDQGLQPADQPTDMRRRCEEEAQEIVRHANSSTGQPCVENENLTDLISRLTAILLQIKCLAEGGDLNSFEFKSLTDSLNDIKSTIDASNIR

SEQ ID NO: 74733 - protein, 481 aa, Homo sapiens
MTTEKSLVTEAENSQHQQKEEGEEAINSGQQEPQQEESCQTAAEGDNWCEQKLKASNGDTPTHEDLTKNKERTSESRGLSRLFSSFLKRPKSQVSEEEGKEVESDKEKGEGGQKEIEFGTSLDEEIILKAPIAAPEPELKTDPSLDLHSLSSAETQPAQEELREDPDFEIKEGEGLEECSKIEVKEESPQSKAETELKASQKPIRKHRNMHCKVSLLDDTVYECVVEKHAKGQDLLKRVCEHLNLLEEDYFGLAIWDNATSKTWLDSAKEIKKQVRGVPWNFTFNVKFYPPDPAQLTEDITRYYLCLQLRQDIVAGRLPCSFATLALLGSYTIQSELGDYDPELHGVDYVSDFKLAPNQTKELEEKVMELHKSYRSMTPAQADLEFLENAKKLSMYGVDLHKAKDLEGVDIILGVCSSGLLVYKDKLRINRFPWPKVLKISYKRSSFFIKIRPGEKSRFVTQAGVQWRHLSSPQPLPLRFK

SEQ ID NO: 74734 - protein, 63 aa, Homo sapiens
MVEGPGCTLNGEKIRARVLPGQAVTGVRGSALRSLQGRALRLAASTVVVSPQDSFRNERLHHD

SEQ ID NO: 74735 - protein, 821 aa, Homo sapiens
MTKMLGKLRIAPSFPQPLDSKPLLSQREAVPPGNIPQRPDRLPMSDTFTDNWTDGSHYDNTGFVAEETTAENANSNPLLSSKSRSTSSHGRRPLIRQDRIVGVPLELEQSTHRHTPETEVPPSNPWQNWTRTPSPFEDRTAFPSKLETTPTTSPLPERKEHIKESTEIPSPFSPGVPWEYHDSNPNRSLSNVFSQIHCRPESSKGVISISKSTERLSPLMKDIKSNKFKKSQSIDEIDIGTYKVYNIPLENYASGSDHLGSHERPDKMLGPEHGMSSMSRSQSVPMLDDEMLTYGSSKGPQQQKASMTKKVYQFDQSFNPQGSVEVKAEKRIPPPFQHNPEYVQQASKNIAKDLISPRAYRGYPPMEQMFSFSQPSVNEDAVVNAQFASQGARAGFLRRADSLVSATEMAMFRRVNEPHELPPTDRYGRPPYRGGLDRQSSVTVTESQFLKRNGRYEDEHPSYQEVKAQAGSFPVKNLTQRRPLSARSYSTESYGASQTRPVSARPTMAALLEKIPSDYNLGNYGDKPSDNSDLKTRPTPVKGEESCGKMPADWRQQLLRHIEARRLDRNAAYKHNTVNLGMLPYGGISAMHAGRSMTLNLQTKSKFDHQELPLQKTPSQQSNILDNGQEDVSPSGQWNPYPLGRRDVPPDTITKKAGSHIQTLMGSQSLQHRSREQQPYEGNINKVTIQQFQSPLPIQIPSSQATRGPQPGRCLIQTKGQRSMDGYPEQFCVRIEKNPGLGFSISGGISGQGNPFKPSDKGIFVTRVQPDGPASNLLQPGDKILQANGHSFVHMEHEKAVLLLKSFQNTVDLVIQRELTV

SEQ ID NO: 74736 - protein, 114 aa, Homo sapiens
MDPGSRWRNLPSGPSLKHLTDPSYGIPREQQKAALQELTRAHVESFNYAVHEGLGLAVQAIPPFEFAFKDERISFTILDAVISPPTVPKGTICKEANVYPAECRGRRSTYRGKL

SEQ ID NO: 74737 - protein, 241 aa, Homo sapiens
MTCSLGKVYISEIAYPAVRGLLGSCVQLMVVVGILLAYLAGWVLEWRWLAVLGCVPPSLMLLLMCFMPETPRFLLTQHRRQEAMAALRFLWGSEQGWEDPPIGAEQQLSGVNAVMFYAETIFEEAKFKDSSLASVVVGVIQVLFTAVAALIMDRAGRRLLLVLSGVVMVFSTSAFGAYFKLTQGGPGNSSHVAISAPVSAQPVDASVGLAWLAVGSMCLFIAGFAVGWGPIPWLLMSEIFP

SEQ ID NO: 74738 - protein, 133 aa, Homo sapiens
PSTKWHNSYREPFEQHLLLGVSVSCIVILAVCLLCYVSITKIKKEWWDQIPNPARSRLVAIIIQDAQGSQWEKRSRGPWAPRLVNELLAAPSTASAADCPCCNCPRHVLPTRSWPTWRPTCLCLTELEAEPRN

SEQ ID NO: 74739 - protein, 50 aa, Homo sapiens
MEEYEKFCEKSLARIQEASLSTESFLPAQSESISLIRFHGVAILSPLVNL

SEQ ID NO: 74740 - protein, 577 aa, Homo sapiens
MAEAATGFLEQLKSCIVWSWTYLWTVWFFIVLFLVYILRVPLKINDNLSTVSMFLNTLTPKFYVALTGTSSLISGLILIFEWWYFRKYGTSFIEQVSVSHLRPLLGGVDNNSSNNSNSSNGDSDSNRQSVSECKVWRNPLNLFRGAEYNRYTWVTGREPLTYYDMNLSAQDHQTFFTCDSDHLRPADAIMQKAWRERNPQARISAAHEALEINEIRSRVEVPLIASSTIWEIKLLPKCATAYILLAEEEATTIAEAEKLFKQALKAGDGCYRRSQQLQHHGSQYEAQHRRDTNVLVYIKRRLAMCARRLGRTREAVKMMRDLMKEFPLLSMFNIHENLLEALLELQAYADVQAVLAKYDDISLPKSATICYTAALLKARAVSDKFSPEAASRRGLSTAEMNAVEAIHRAVEFNPHVPKYLLEMKSLILPPEHILKRGDSEAIAYAFFHLAHWKRVEGALNLLHCTWEGTFRMIPYPLEKGHLFYPYPICTETADRELLPSFHEVSVYPKKELPFFILFTAGLCSFTAMLALLTHQFPELMGVFAKAFLSTLFAPLNFVMEKVESILPSSLWHQLTRI

SEQ ID NO: 74741 - protein, 386 aa, Homo sapiens
MPVGPQHPSFKRSSLDTFHGCCQQQETGALPWDTDTKRWRPELNWDLVCDNAWKVHIAKFSLLVGLIFGYLITGCIADWVGRRPVLLFSIIFILIFGLTVALSVNVTMFSTLRFFEGFCLAGIILTLYALRIELCPPGKRFMITMVASFVAMAGQFLMPGLAALCRDWQVLQALIICPFLLMLLYWSIFPESLRWLMATQQFESAKRLILHFTQKNRMNPEGDIKGVIPELEKELSRRPKKVCIVKVVGTRNLWKNIVVLCVNSLTGYGIHHCFARSMMGHEVKVPLLENFYADYYTTASIALVSCLAMCVVVRFLGRRGGLLLFMILTALASLLQLGLLNLIGKYSQHPDSGMSDSVKDKFSIAFSIVGMFASHAVGSLSVFFCA

SEQ ID NO: 74742 - protein, 567 aa, Homo sapiens
MAAAAQSRVVRVLSMSRSAITAIATSVCHGPPCRQLHHALMPHGKGGRSSVSGIVATVFGATGFLGRYVVNHLGRMGSQVIIPYRCDKYDIMHLRPMGDLGQLLFLEWDARDKDSIRRVVQHSNVVINLIGRDWETKNFDFEDVFVKIPQAIAQLSKEAGVEKFIHVSHLNANIKSSSRYLRNKAVGEKVVRDAFPEAIIVKPSDIFGREDRFLNSFASMHRFGPIPLGSLGWKTVKQPVYVVDVSKGIVNAVKDPDANGKSFAFVGPSRYLLFHLVKYIFAVAHRLFLPFPLPLFAYRWVARVFEISPFEPWITRDKVERVWQCGGKVEILPCSRIAHLERHHKPYALDLTAALKRNALRVAEIWMDEHKHMVYLAWNIPLQNSGIDFGDVSSRMALREKLKCKTFDWYLKNVYPLLKPLHTIVGYGRMKNLLDENVCLDQGPVPGNTPIMYYCHEFSSQNVYYHLTGELYVGQLIAEASASDRCLTDPGKAEKPTLEPCSKAAKNRLHIYWDFKPGGAVINRDTKRCLEMKKDLLGSHVLVLQTCSTQVWEIQHTVRDWGQTNSQ

SEQ ID NO: 74743 - protein, 155 aa, Homo sapiens
  MOD_RES (1)..(1): Any amino acid
XDGSPALKQIEINTISASFGGLASRTPAVHRHVLSVLSKTKEAGKILSNNPSKGLALGIAKAWELYGSPNALVLLIAQEKERNIFDQRAIENELLARNIHVIRRTFEDISEKGSLDQDRRLFVIGKHVYCWRGHMLPSAQTLPPSWLGLRRCSRS

SEQ ID NO: 74744 - protein, 608 aa, Homo sapiens
MDSFDLALLQEWDLESLCVYEPDRNALRRKERERRNQETQQDDGTFNSSYSLFSEPYKTNKGDELSNRIQNTLGNYDEMKDFLTDRSNQSHLVGVPKPGVPQTPVNKIDEHFVADSRAQNQPSSICSTTTSTPAAVPVQQSKRGTMGWQKAGHPPSDGQQRATQQGSLRTLLGDGVGRQQPRAKQVCNVEVGLQTQERPPAMAAKHSSSGHCVQNFPPSLASKPSLVQQKPTAYVRPMDGQDQAPDESPKLKSSSETSVHCTSYRGVPASKPEPARAKAKLSKFSIPKQGEESRSGETNSCVEEIIREMTWLPPLSAIQAPGKVEPTKFPFPNKDSQLVSSGHNNPKKGDAEPESPDNGTSNTSMLEDDLKLSSDEEENEQQAAQRTALRALSDSAVVQQPNCRTSVPSSKGSSSSSSSGSSSSSSDSESSSGSDSETESSSSESEGSKPPHFSSPEAEPASSNKWQLDKWLNKVNPHKPPILIQNESHGSESNQYYNPVKEDVQDCGKVPDVCQPSLREKEIKSTCKEEQRPRTANKAPGSKGVKQKSPPAAVAVAVSAAAPPPAVPCAPAENAPAPARRSAGKKPTRRTERTSAGDGANCHRPEEP

SEQ ID NO: 74745 - protein, 1311 aa, Homo sapiens [sequence omitted]

SEQ ID NO: 74746 - protein, 441 aa, Homo sapiens
LAQFPNTLLGNPKKRMRYFDPLRNEYFFDRNRPSFDAILYYYQSGGRLRRPVNVPLDMFSEEIKFYELGEEAMEKFREDEGFIKEEERPLPEKEYQRQVWLLFEYPESSGPARVIAIVSVMVILISIVIFCLETLPELKDDKDFTGTVHRIDNTTVIYNSNIFTDPFFIVETLCIIWFSFELVVRFFACPSKTDFFKNIMNFIDIVAIIPYFITLGTEIAEQEGNQKGEQATSLAILRVIRLVRVFRIFKLSRHSKGLQILGQTLKASMRELGLLIFFLFIGVILFSSAVYFAEAEEAESHFSSIPDAFWWAVVSMTTVGYGDMYPVTIGGKIVGSLCAIAGVLTIALPVPVIVSNFNYFYHRETEGEEQAQLLHVSSPNLASDSDLSRRSSSTMSKSEYMEIEEDMNNSIAHYRQVNIRTANCTTANQNCVNKSKLLTDV

SEQ ID NO: 74747 - protein, 59 aa, Homo sapiens
MAELQMLLEEEIPGGRRALFDSYTNLERVADYCENNYIQAFRFDSAYPLVLPDKEYMES

SEQ ID NO: 74748 - protein, 125 aa, Homo sapiens
MMHKYKISEAKNCLVDKHIAFIGDSRIRQLFYSFVKIINPQFKEEGNKHENIPFEDKTASVKVDFLWHPEVNGSMKQCIKVWTEDSIAKPHVIVAGAATWSIKIHNGSSEALSQYKMNITSIAPL

SEQ ID NO: 74749 - protein, 123 aa, Homo sapiens
AKLDTENKRLRAELQALQKTYQKILREKESALEAKYQAMERAATFEHDRDKVKRQFKIFRETKENEIQDLLRAKRELESKLQRLQAQGIQVFDPGESDSDDNCTDVTVSLESDQHPGIFIANF

SEQ ID NO: 74750 - protein, 325 aa, Homo sapiens
MAMNYNAKDEVDGGPPCAPGGTAKTRRPDNTAFKQQRLPAWQPILTAGTVLPIFFIIGLIFIPIGIGIFVTSNNIREIEIDYTGTEPSSPCNKCLSPDVTPCFCTINFTLEKSFENPSKECEPYRRNEDKPIAPCGAIANSMFNDTLELFLIGNDSYPIPIALKKKGIAWWTDKNVKFRNPPGGDNLEERFKGTTKPVNWLKPVYMLDSDPDNNGFINEDFIVWMRTAALPTFRKLYRLIERKSDLHPTLPAGRYSLNVTYNYPVHYFDGRKRMILSTISWMGGKNPFLGIAYIAVGSISFLLGVVLLVINHKYRNSSNTADITI

SEQ ID NO: 74751 - protein, 212 aa, Homo sapiens
MLCPWRTANLGLLLILTIFLVAVNTSWPVKMATNAVLCCPPIALRNLIIITWEIILRGQPSCTKAYKKETNETKETNCTDERITWVSRPDQNSDLQIRTVAITHDGYYRCIMVTPDGNFHRGYHLQVLVTPEVTLFQNRNRTAVCKAVAGKPAAHISWIPEGDCATKQEYWSNGTVTVKSTCHWEVHNVSTVTCHVSHLTGNKSLYIELLPG

SEQ ID NO: 74752 - protein, 71 aa, Homo sapiens
MSKQQPTQFINPETPGYVGFANLPNQVHRKSVKKGFEFTLMVVGESGLGKSTLINSLFLTDLYPERVIPGA

SEQ ID NO: 74753 - protein, 494 aa, Homo sapiens
MPVPWFLLSLALGRSPVVLSLERLVGPQDATHCSPGLSCRLWDSDILCLPGDIVPAPGPVLAPTHLQTELVLRCQKETDCDLCLRVAVHLAVHGHWEEPEDEEKFGGAADSGVEEPRNASLQAQVVLSFQAYPTARCVLLEVQVPAALVQFGQSVGSVVYDCFEAALGSEVRIWSYTQPRYEKELNHTQQLPALPWLNVSADGDNVHLVLNVSEEQHFGLSLYWNQTGPQIITLNHTDLVPCLCIQVWPLEPDSVRTNICPFREDPRAHQNLWQAARLQLLTLQSWLLDAPCSLPAEAALCWRAPGGDPCQPLVPPLSWENVTVDKVLEFPLLKGHPNLCVQVNSSEKLQLQECLWADSLGPLKDDVLLLETRGPQDNRSLCALEPSGCTSLPSKASTRAARLGEYLLQDLQSGQCLQLWDDDLGALWACPMDKYIHKRWALVWLACLLFAAALSLILLLKKDHAKGPGENHPGQLWRWKHCLGGREFVQIQRQ

SEQ ID NO: 74754 - protein, 160 aa, Homo sapiens
MQMPQGNPLLLSHTLQELLARDTVQVELIPEKKGLFLKHVEYEVSSQRFKSSVYRRYNDFVVFQEMLLHKFPYRMVPALPPKRMLGADREFIEARRRALKRFVNLVARHPLFSEDVVLKLFLSFSGSDVQNKLKESAQCVGDEFLNCKLATRAKDFLPAD

SEQ ID NO: 74755 - protein, 204 aa, Homo sapiens
MDGKRSRPSSGDSRAGRGRFSHWRGLRPPGAAGRTQESSGLDRRSPGTPSPGPRPPTWDPFSRSSSPDPRPGPHPQGLDHRPGTPFPEPRPPIPDPEPLPQGLDHQPGTPFPGPRPSIPDPEPLPQGLYHRPGTPSPGPRPPTTDRDPSQAPDPQPEILYPGPRPSTRDPSPQASIPDPRFGTPSPGPPSPNLNPVCLPRGLDL

SEQ ID NO: 74756 - protein, 88 aa, Homo sapiens
MSGRSVRAETRSRAKDDIKKVMAAIEKVRKWEKKWVTVGDTSLRIFKWVPVTDSKETKTATRVPCLTSISLRWTAAPTQAPAPSRVSP

SEQ ID NO: 74757 - protein, 69 aa, Homo sapiens
KPDAERQTDEEKEELKKPKKEDSSPKEETDKWAVEKGKDHKEPRKGEELEEEWTPTEKVRPLCRRSPSG

SEQ ID NO: 74758 - protein, 215 aa, Homo sapiens
MSRQTTSVGSSCLDLWREKNDRLVRQAKVAQNSGLTLRRQQLAQDALEGLRGLLHSLQGLPAAVPVLPLELTVTCNFIILRASLAQGFTEDQAQDIQRSLERVLETQEQQGPRLEQGLRELWDSVLRASCLLPELLSALHRLVGLQAALWLSADRLGDLALLLETLNGSQSGASKDLLLLLKTWSPPAEELDAPLTLQDAQGLKDVLLTAFAYRQ

SEQ ID NO: 74759 - protein, 128 aa, Homo sapiens
  MOD_RES (1)..(1): Any amino acid
XCVQAFRARNWWVASVDVVENEEASASIIVKMTDSFTEQADQVTAEVGKLLGEEKVDAILCVAGGWAGGNAKSKSLFKNCDLMWKQSIWTSTISSHLATKHLKEGGLLTLAGAKAALDGTPGLPWIPR

SEQ ID NO: 74760 - protein, 303 aa, Homo sapiens
MPPKVTSELLRQLRQAMRNSEYVTEPIQAYIIPSGDAHQSEYIAPCDCRRAFVSGFDGSAGTAIITEEHAAMWTDGRYFLQAAKQMDSNWTLMKMGLKDTPTQEDWLVSVLPEGSRVGVDPLIIPTDYWKKMAKVLRSAGHHLIPVKENLVDKIWTDRPERPCKPLLTLGLDYTGISWKDKVADLRLKMAERNVMWFVVTALDEIAWLFNLRGSDVEHNPVFFSYAIIGLETIMLFIDGDRIDAPSVKEHLLLDLGLEAEYRIQVHPYKSILSELKALCADLSPREKVWVSDKASYAVSETIP

SEQ ID NO: 74761 - protein, 170 aa, Homo sapiens
  MOD_RES (1)..(1): Any amino acid
XKSADEVLFTGVKEVDDFFEQEKNFLINYYNRIKDSCVKADKMTRSHKNVADDYIHTAACLHSLALEEPTVIKKYLLKVAELFEKLRKVEGRVSSDEDLKLTELLRYYMLNIEAAKDLLYRRTKALIDYENSNKALDKARLKSKDVKLAEAHQQECCQKFEQLSESAKEG

SEQ ID NO: 74762 - protein, 157 aa, Homo sapiens
  MOD_RES (1)..(1): Any amino acid
XIYYKTLDQAIMKFHSMKMEEINKIIRDLWRSTYRGQDIEYIEIRSDADENVSASDKRRNYNYRVVMLKGDTALDMRGRCSAGQKVLASLIIRLALAETFCLNCGIIALDEPTTNLDRENIESLAHALVEWSSRLRALSTERKFSTVHTHLWKALTT

SEQ ID NO: 74763 - protein, 459 aa, Homo sapiens
DFAISAKPLTRHMPQNKQSFQYRMWQFVVSPPFEYTIMAMIALNTIVLMMKFYGASVAYENALRVFNIVFTSLFSLECVLKVMAFGILNYFRDAWNIFDFVTVLGSITDILVTEFGNPNNFINLSFLRLFRAARLIKLLRQGYTIRILLWTFVQSFKALPYVCLLIAMLFFIYAIIGMQVFGNIGIDVEDEDSDEDEFQITEHNNFRTFFQALMLLFRSATGEAWHNIMLSCLSGKPCDKNSGILTRECGNEFAYFYFVSFIFLCSFLMLNLFVAVIMDNFEYLTRDSSILGPHHLDEYVRVWAEYDPAACGRIHYKDMYSLLRVISPPLGLGKKCPHRVACKRLLRMDLPVADDNTVHFNSTLMALIRTALDIKIAKGGADKQQMDAELRKEMMAIWPNLSQKTLDLLVTPHKSTDLTVGKIYAAMMIMEYYRQSKAKKLQAMREEQDRTPLMFQRME

SEQ ID NO: 74764 - protein, 207 aa, Homo sapiens
MSRESDVEAQQSHGSSACSQPHGSVTQSQGSSSQSQGISSSSTSTMPNSSQSSHSSSGTLSSLETVSTQELYSIPEDQEPEDQEPEEPTPAPWARLWALQDGFANLECVNDNYWFGRDKSCEYCFDEPLLKRTDKYRTYSKKHFRIFREVGPKNSYIAYIEDHSGNGTFVNTELVGKGKRRPLNNNSEIALSLSRNKEKILKIYSLS

SEQ ID NO: 74765 - protein, 188 aa, Homo sapiens
MARVIIDNKDGPTQKYLLIFGAFVSVYIQEMFRFAYYKLLKKASEGLKSINPGETAPSMRLLAYVSGLGFGIMSGVFSFVNTLSDSLGPGTVGIHGDSPQFFLYSAFMTLVIILLHVFWGIVFFDGCEKKKWGILLIVLLTHLLVSAQTFISSYYGINLASAFIILVLMGTWAFLAAGGSCRSLKLCL

SEQ ID NO: 74766 - protein, 186 aa, Homo sapiens
MGAVSCRQGQHTQQGEHTRVAVPHKQGGNIRGPWARGWKSLWTGLGTIRSDLEELWELRGHHYLHQESLKPAPVLVEKPLPEWPVPQFINLFLPEFPIRPIRGQQQLKILGLVAKGSFGTVLKVLDCTQKAVFAVKVVPKVKVLQRDTVRQCKEERQINHPFVHSLGDSWQGKRHLFIMCSYCSTD

SEQ ID NO: 74767 - protein, 104 aa, Homo sapiens
ISAGKIKQFCKTCNTQVHLHPKRLNHKYNPVSLPKDLPDWDWRHGCIPCQNMELFAVLCIETSHYVAFVKYGKDDSAWLFFDSMADRDGTENAFLLHVAQGSGL

SEQ ID NO: 74768 - protein, 209 aa, Homo sapiens
  MOD_RES (1)..(1): Any amino acid
XESAAQKTSEGLERAAENNVFHLVATVCSQEEPVQPLLREVLRPSRDSQQRVRRNLRASAREVRQEGRYRVLSSRRSLGTTSSGQESEYTPGNPEAAGNSGFQLLDLVHEEGEPEAASAGSCKTSDPDVILCNSVELIRERLTVSEDGPGVRRQEEQKHDDYVYDIYYLETATPGWIENILSVQPYSQEWELVRGPMSRRGMRHPKLLI

SEQ ID NO: 74769 - protein, 147 aa, Homo sapiens
MSDQAPKVPEEMFREVKYYAVGDIDPQVIQLLKAGKAKEVSYNALASHIISEDGDNPEVGEAREVFDLPVVKPSWVILSVQCGTLLPVNGFSPESCQIFFGITACLSQGVDTSWSSLLESSRALPGRGREGSLSSRSWEAQRSSAFF

SEQ ID NO: 74770 - protein, 184 aa, Homo sapiens
  MOD_RES (1)..(1): Any amino acid
XPDEDSSHDLMLLRLSEPAKITDVVKVLGLPTQEPALGTTCYASGWGSIEPEEFLRPRSLQCVSLHLLSNDMCARAYSEKVTEFMLCAGLWTGGKDTCGESGAVDGAGQKKDRAWLRVILGVHLSVMVCFKVSHHGALSHVPCLKSLLCTPRWCITGSGSRTPSQPTPECPCPTPTSSKFKSTS

SEQ ID NO: 74771 - protein, 34 aa, Homo sapiens
MSLVIPEKFQHILRVLNTNIDGRRKIAFAITAIK

SEQ ID NO: 74772 - protein, 191 aa, Homo sapiens
KIEVIEIMTDRGSGKKRGFAFVTFDDHDSVDKIVIQKYHTVNGHNCEVRKALSKQEMASASSSQRGRSGSGNFGGGRGGGFGGNDNFGRGGNFSGRGGFGGSRGGGGYGGSGDGYNGFGNDGSNFGGGGSYNDFGNYNNQSSNFGPMKGGNFGGRSSGPYGGGGQYFAKPRNQGGYGGSSSSSSYGSGRRF

SEQ ID NO: 74773 - protein, 47 aa, Homo sapiens
MAASELYTKFARVWIPDPEEVWKSAELLKDYKPGDKVLLLHLEEGKV

SEQ ID NO: 74774 - protein, 81 aa, Homo sapiens
MQGGNSGVRKREEEGDGAGAVAAPPAIDFPAEGPDPEYDEMWSCCVSQAGLERLASSDSPASAFQNAGIIDNLMFQQKSRC

SEQ ID NO: 74775 - protein, 89 aa, Homo sapiens
MKMLLLLHCLGVFLSCSGHIQDEHPQYHSPPDVVIPVRITGTTRGMTPPGWLSYILPFGGQKHIIHIKVKKLLFSKHLPVFTYTDQGAI

SEQ ID NO: 74776 - protein, 60 aa, Homo sapiens
MQLPRWWELGDPCAWTGQGRGTRRMSPATTGTFLLTGTLRSECIPISRCPLCSCFGKRIF

SEQ ID NO: 74777 - protein, 189 aa, Homo sapiens
  MOD_RES (1)..(1): Any amino acid
XAAGRILVTLGILSVCSGVIAFFPVFSYKPWFTGWSVRIACPIWNGALAITTGVLLLLAYREWTQRYLGEATFTFVILSIMGCPLHFAIALESALLGPYCFYSFSGIAGTNYLGYAVTFPYPYAKFPLACVDPPHYEEYHLTLQALDLCLSFTLLCTSLTVFIKLSARLIQNGHINMQLPAGNPNPFSP

SEQ ID NO: 74778 - protein, 561 aa, Homo sapiens
MSNPGGRRNGPVKLRLTGLPDPFAKVVVDGSGQCHSTDTVKNTLDPKWNQHYDLYIGKSDSVTISVWNHKKIHKKQGAGFLGCVRLLSNAINRLKDTGYQRLDLCKLGPNDNDTVRGQIVVSLQSRDRIGTGGQVVDCSRLFDNDLPDGWEERRTASGRIQYLNHITRTTQWERPTRPASEYSSPGRPLSCFVDENTPISGTNGATCGQSSDPRLAERRVRSQRHRNYMSRTHLHTPPDLPEGYEQRTTQQGQVYFLHTQTGVSTWHDPRVPRDLSNINCEELGPLPPGWEIRNTATGRVYFVDHNNRTTQFTDPRLSANLHLVLNRQNQLKDQQQQQVVSLCPDDTECLTVPRYKRDLVQKLKILRQELSQQQPQAGHCRIEVSREEIFEESYRQVMKMRPKDLWKRLMIKFRGEEGLDYGGVAREWLYLLSHEMLNPYYGLFQYSRDDIYTLQINPDSAVNPEHLSYFHFVGRIMGMAVFHGHYIDGGFTLPFYKQLLGKSITLDDMELVDPDLHNSLVWILENDITGVLDHTFCVEHNAYGEIIQHELKPNGKSIPVN

SEQ ID NO: 74779 - protein, 136 aa, Homo sapiens
MSRLLGGTLERVCKAVLLLCLLHFLVAVILYFDVYAQHLAFFSRFSARGPAHALHPAASSSSSSSNCSRPNATASSSGLPEVPSALPGPTAPTLPPCPDSPPGLAGAEGEPRRAHGRPIHTARLHPSPDGGGHHPL

SEQ ID NO: 74780 - protein, 152 aa, Homo sapiens
MAHCVTLVQLSISCDHLIDKDIGSKSDPLCVLLQDVGGGSWAELGRTERVRNCSSPEFSKTLQLEYRFETVQKLRFGIYDIDNKTPELRDDDFLGGAECSLGQIVSSQVLTLPLMLKPGKPAGRGTITVSAQELKDNRVVTMEVEARNLDKK

SEQ ID NO: 74781 - protein, 192 aa, Homo sapiens
MTKVLRMAILLSYCSILCNYKAIEMPSHQTYGGSWKFLTFIDLVIQAVFFGICVLTDLSSLLTRGSGNQEQERQLKKLISLRDWMLAVLAFPVGVFVVAVFWIIYAYDREMIYPKLLDNFIPGWLNHGMHTTVLPFILIEMRTSHHQYPSRSSGLTAICTFSVGYILWVCWVHHVTGMWVYPFLEHIGPGAR

SEQ ID NO: 74782 - protein, 66 aa, Homo sapiens
PMDYPVEDAFCKPQLVKKSYGVENRAYSQEEITQGFEETGDTLYAPYSTHFQLQVSDFFLPLHQRH

SEQ ID NO: 74783 - protein, 357 aa, Homo sapiens
MSLVLNDLLICCRQLEHDRATERKKEVEKFKRLIRDPETIKHLDRHSDSKQGKYLNWDAVFRFLQKYIQKETECLRIAKPNVSASTQASRQKKMQEISSLVKYFIKCANRRAPRLKCQELLNYIMDTVKDSSNGAIYGADCSNILLKDILSVRKYWCEISQQQWLELFSVYFRLYLKPSQDVHRVLVARIIHAVTKGCCSQTDGLNSKFLDFFSKAIQCARQEKSSSGLNHILAALTIFLKTLAVNFRIRVCELGDEILPTLLYIWTQHRLNDSLKEVIIELFQLQIYIHHPKGAKTQEKGAYESTKWRSILYNLYDLLVNEISHIGSRGKYSSGFRNIAVKENLIELMADICHQVQ

SEQ ID NO: 74784 - protein, 31 aa, Homo sapiens
  MOD_RES (1)..(1): Any amino acid
XGSGQSFLARQRQATSSRRSYPGHVQPATAR

SEQ ID NO: 74785 - protein, 60 aa, Homo sapiens
  MOD_RES (1)..(1): Any amino acid
XRIKNACLQTSSLAVRVNSLVCLGKILEYLDKWFVLDDILPFLQQIPSKEPAVLMGILGN

SEQ ID NO: 74786 - protein, 82 aa, Homo sapiens
MAAASVSAASGSHLSNSFAEPSRSNGSMVRHSSSPYVVYPSDKPFLNSDLRRSPSKPTLAYPESNSRASTFVFVFGSHIFCS

SEQ ID NO: 74787 - protein, 104 aa, Homo sapiens
  MOD_RES (1)..(1): Any amino acid
XKTAFADKETQAIYLLTDGRPDQPPETVIDQVKRFQEIPIYTISFNYNDEIANRFLKEVAALTGGEFHFYNFGCKDPTPPEAVQASKGNLFYDFNPRKVCKASI

SEQ ID NO: 74788 - protein, 212 aa, Homo sapiens
IHPGSPSAWPPRARAALRLWLGCVCFALVQADSPSAPVNVTVRHLKANSAVVSWDVLEDEVVIGFAISQQKKDVRMLRFIQEVNTTTRSCALWDLEEDTEYIVHVQAISIQGQSPASEPVLFKTPREAEKMASKNKDEVTMKEMGRNQQLRTGEVLIIVVVLFMWAGVIALFCRQYDIIKDNEPNNNKEKTKSASETSTPEHQGGGLLRSKI

SEQ ID NO: 74789 - protein, 93 aa, Homo sapiens
  MOD_RES (1)..(1): Any amino acid
XTEGRGTSICRRVPAALQSPPTPAAARPLPACLASLSPGLGPSLLPPVFYMGWTQERSTDALKSMTLNLEVNRRMCSSEGPGIFPSCTWVSVC

SEQ ID NO: 74790 - protein, 83 aa, Homo sapiens
  MOD_RES (1)..(1): Any amino acid
XTLVMFYAPWCPHCKKVIPHFTATADAFKDDRKIACAAVDCVKDKNQDLCQQEAVKGYPTFHYYHYGKFAEKYDSDRTVFSVG

SEQ ID NO: 74791 - protein, 156 aa, Homo sapiens
  MOD_RES (1)..(1): Any amino acid
XLSDSAIFVQSPNCNQRYGWHPATVCKIPPGKAPLSTPSPYFWKPSLQTSPCSGSRSLWASLPSPLAGCNLKIFNNQEFAALLAQSVNQGFEAVYQLTRMCTIRMSFVKGWGAEYRRQTVTSTPCWIELHLNGPLQWLDKVLTQMGSPSIRCSSVS

SEQ ID NO: 74792 - protein, 142 aa, Homo sapiens
MALLTAAARLLGTKNASCLVLAARHASASSTNLKDILADLIPKEQARIKTFRQQHGKTVVGQITVDMMYGGMRGMKGLVYETSVLDPDEGLFWLLVTGHIPTEEQVSWLSKEWAKRAALPSHVVTMLDNFPTNLHPMSQLSA

SEQ ID NO: 74793 - protein, 86 aa, Homo sapiens
MEKSSSCESLGSQPAAARPPSVDSLSSASTSHSENSVHTKSASVVSSDSISTSADNFSPDLRPMQSSSGAKSLKHCVIVPTHLIIV

SEQ ID NO: 74794 - protein, 23 aa, Homo sapiens
MRPEDRMFHIRAVILRALSLAFL

SEQ ID NO: 74795 - protein, 53 aa, Homo sapiens
MHRRGVGAGAIAKKKLAEAKYKERGTVLAEDQLAQLEKDFGLRCWAWGTSITN

SEQ ID NO: 74796 - protein, 275 aa, Homo sapiens
  MOD_RES (1)..(1): Any amino acid
XRAAAYGVRVPDGIMAAYPATMLQPAASPSRLLSLMDPLLPLSVLSKCVSAYAGAKTEDHSNSDQKALGMMGLVRRDTALLLRDFRLGASSWLNSFLELSGRKSQKMSEPIAGLSALPLSEPMRRSVSEAALAQPQGPLGTDSLKNLTLRDLSLRGNSETSSDTPEMSLSAETLSPSTPSDVNFLLPPEDAGEEAEAKNELSPMDRGLGVRAAFPEGFHPRRSSQGATQMPLYSSPIVKNPFMSPLLAPDSMLKSLPPVHIVACALDPMLDDSVM

SEQ ID NO: 74797 - protein, 21 aa, Homo sapiens
  MOD_RES (1)..(1): Any amino acid
XLIKAILSVTKEYRLTPALDR

SEQ ID NO: 74798 - protein, 98 aa, Homo sapiens
MLEKLMGADSLQLFRSRYTLGKIYFIGFQRSILLSKSENSLNSIAKETEEGRETVTRKEGWKRRHEDGYLEMAQRHLQRSLCPWVSYLPQPYAESWDF

SEQ ID NO: 74799 - protein, 870 aa, Homo sapiens [sequence omitted]

SEQ ID NO: 74800 - protein, 11 aa, Homo sapiens
  MOD_RES (1)..(1): Any amino acid
XALSDPDCLLT

SEQ ID NO: 74801 - protein, 208 aa, Homo sapiens
MLEKLEFEDEAVEDSESGVYMRFMRSHKCYDIVPTSSKLVVFDTTLQVKKAFFALVANGVRAAPLWESKKQSFVGMLTITDFINILHRYYKSPMVQIYELEEHKIETWRELYLQETFKPLVNISPDASLFDAVYSLIKNKIHRLPVIDPISGNALYILTHKRILKFLQLFESHDLNIDELFDLNILFLLIVHLFLIIIRCLICQSLPS

SEQ ID NO: 74802 - protein, 76 aa, Homo sapiens
MLREEATKKSKEKEPGMALPQGRLTFRDVAIEFSLEEWKCLNPAQRALYRAVMLENYRNLEFVEFCSCCPGWSAMW

SEQ ID NO: 74803 - protein, 61 aa, Homo sapiens
  MOD_RES (1)..(1): Any amino acid
XVDEHTQKTGVLAAVLASQPSIPRSVGKDKKAIQASIRRNKETNTVLARLNSELQQQLKVI

SEQ ID NO: 74804 - protein, 140 aa, Homo sapiens
MSALVPDTPPDTPPAMKNATSSKQLPLEPESPSGQVGPRPAPPQEESPSSEAKSRGPTPPAMGPRDARPPRRSSQPSPTAVPASDSPPTKQEVKKAGERHKLAKERREERAKYLAAKKAVWLEKEEKAKALREKQLQERR

SEQ ID NO: 74805 - protein, 110 aa, Homo sapiens
MEQDRTNHVEGNRLSPFLIPSPPICQTEPLATKLQNGSPLPERAHPEVNGDTKWHSFKSYYGIPCMKGSQNSRVSPDFTQESRGYSKCLQNGGIKRTVSEPSLSGLLQIK

SEQ ID NO: 74806 - protein, 220 aa, Homo sapiens
MNLFRFLGDLSHLLAIILLLLKIWKSRSCAGISGKSQVLFAVVFTARYLDLFTNYISLYNTCMKVVYIACSFTTVWLIYSKFKATYDGNHDTFRVEFLVVPTAILAFLVNHDFTPLEEDRPGWPDVLIFSTEAIIQEFSDPLDLLHLPGVSGHLAAAVHGEQDRRGGDHHQPLLVCARRLPHALSLQLDLALPFRGLLRPHRHCGRPGPDSPLLRFLLPL

SEQ ID NO: 74807 - protein, 88 aa, Homo sapiens
MSKLPRELTRDLERSLPAVASLGSSLSHSQSLSSHLLPPPEKRRAISDVRRTFCLFVTFDLLFISLLWIIELNTNTGIRKNLEQEIIQ

SEQ ID NO: 74808 - protein, 327 aa, Homo sapiens
  MOD_RES (1)..(1): Any amino acid
XIQNVPLEDRVRGPKGPEEKKDCEVVMMIGLPGAGKTTWVTKHAAENPGKYNILGTNTIMDKMMVAGFKKQMADTGKLNTLLQRAPQCLGKFIEIAARKKRNFILDQTNVSAAAQRRKMCLFAGFQRKAVVVCPKDEDYKQRTQKKAEVEGKDLPEHAVLKMKGNFTLPEVAECFDEITYVELQKEEAQKLLEQYKEESKKALPPEKKQNTGSKKSNKNKSGKNQFNRGGGHRGRGGFNMRGGNFRGGAPGNRGGYNRRGNMPQRGGGGGGSGGIGYPYPRAPVFPGRGSYSNRGNYNRGGMPNRGNYNQQFWGQKPWSQHYHQGYY

SEQ ID NO: 74809 - protein, 77 aa, Homo sapiens
  MOD_RES (1)..(1): Any amino acid
XALENPVLLNKFLLLTFADLKKYHFYYWFCYPALCLPESLPLIQGPVGLDQRFSLKQIVLKQLDGKRTRKEAWDQGW

SEQ ID NO: 74810 - protein, 145 aa, Homo sapiens
MAGEAEGLVMFEDVTVYFSREEWGLLNVTQKGLYRDVMLENFALVSSLGLAPSRSPVFTQLEDDEQSWVPSWVDVTPVSRAEARRGFGLGPACSCLSGLRLLIALLCICAELSTVGDSVRVLKCAHILKQMVCVEWRMREPILSI

SEQ ID NO: 74811 - protein, 296 aa, Homo sapiens
MEIPNPPTSKCITYWKRKVKSEYMRLRQLKRLQANMGAKALYVANFAKVQEKTQILNEEWKKLRVQPVQSMKPVEDETVLCNIPYMGDEVKEEDETFIEELINNYDGKVHGEEEMIPGSVLISDAVFLELVDALNQYSDEEEEGHNDTSDGKQDDSKEDLPVTRKRKRHAIEGNKKSSKKQFPNDMIFSAIASMFPENGVPDDMKERYRELTEMSDPNALPPQCTPNIDGPNAKSVQREQSLHSFHTLFCRRCFKYDCFLHPFHATPNVYKRKNKEIKIEPEPCGTDCFLLLEGAK

SEQ ID NO: 74812 - protein, 121 aa, Homo sapiens
MKRYSMYLTPKGGVRTSYQPSSPGRFTKETTQKNFNNLYGTKGNYTSRVWEYSSSIQNSDNDLPVVQGSSSFSLKGYPSLMRSQSPKAQPQTWKSGKQTMLSHYRPFYVNKGNGIGSNEAP

SEQ ID NO: 74813 - protein, 223 aa, Homo sapiens
MGRGGGGGGGGGGGGGGGGGGGGWVGPRRAAAAEVEAEGGGGGGGGKMAAPVLLRVSVPRWERVARYAVCAAGILLSIYAYHVEREKERDPEHRALCDLGPWVKCSAALASRWGRGFGLLGSIFGKDGVLNQPNSVFGLIFYILQLLLGMTASAVAALILMTSSIMSVVGSLYLAYILYFVLKEFCIICIVTYVLNFLLLIINYKRLVYLNEAWKRQLQPKQD

SEQ ID NO: 74814 - protein, 476 aa, Homo sapiens
MKPGATGESDLAEVLPQHKFDSKSLEAYLNQHLSGFGAEREATLTIAQYRAGKSNPTFYLQKGFQTYVLRKKPPGSLLPKAHQIDREFKVQKALFSIGFPVPKPILYCSDTSVIGTEFYVMEHVQGRIFRDLTIPGLSPAERSAIYVATVETLAQLHSLNIQSLQLEGYGIGAGYCKRQVSTWTKQYQAAAHQDIPAMQQLSEWLMKNLPDNDNEENLIHGDFRLDNIVFHPKECRVIAVLDWELSTIGHPLSDLAHFSLFYFWPRTVPMINQGSYSENSGIPSMEELISIYCRCRGINSILPNWNFFLALSYFKMAGIAQGVYSRYLLGNNSSEDSFLFANIVQPLAETGLQLSKRTFSTVLPQIDTTGQLFVQTRKGQEVLIKVKHFMKQHILPAEKEVTEFYVQNENSVDKWGKPLVIDKLKEMAKVEGLWNLFLPAVSGLSHVDYALIAEETGKCFFAPDVFNCQAPGYYIN

SEQ ID NO: 74815 - protein, 137 aa, Homo sapiens
MPGSFVPTVTAITTSQDLQWLVQPTLISSMAQSQGQPLASQPPVVDPYDMPGTSYSTPGMSGYSSGGASGSGGPSTSGTTSGPGPARPARARPRRPREETLTPEEEEKRRVRRERNKLAAAKCRNRRRELTDRLQAE

SEQ ID NO: 74816 - protein, 327 aa, Homo sapiens
MPECWDGEHDIETPYGLLHVVIRGSPKGNRPAILTYHDVGLNHKLCFNTFFNFEDMQEITKHFVVCHVDAPGQQVGASQFPQGYQFPSMEQLAAMLPSVVQHFGFKYVIGIGVGAGAYVLAKFALIFPDLVEGLVLVNIDPNGKGWIDWAATKLSGLTSTLPDTVLSHLFSQEELVNNTELVQSYRQQIGNVVNQANLQLFWNMYNSRRDLDINRPGTVPNAKTLRCPVMLVVGDNAPAEDGVVECNSKLDPTTTTFLKPGKLTEAFKYFLQGMGYMPSASMTRLARSRTASLTSASSVDGSRPQACTHSESSEGLGQVNHTMEVSC

SEQ ID NO: 74817 - protein, 505 aa, Homo sapiens
  MOD_RES (1)..(1): Any amino acid
XTCRRLRELCQSSGKVWKEQFRVRWPSLMKHYSPTDYVNWLEEYKVRQKAGLEARKIVASFSKRFFSEHVPCNGFSDIENLEGPEIFFEDELVCILNMEGRKALTWKYYAKKILYYLRQQKILNNLKAFLQQPDDYESYLEGAVYIDQYCNPLSDISLKDIQAQIDSIVELVCKTLRGINSRHPSLAFKAGESSMIMEIELQSQVLDAMNYVLYDQLKFKGNRMDYYNALNLYMHQVLIRRTGIPISMSLLYLTIARQLGVPLEPVNFPSHFLLRWCQGAEGEGIDQSYQLLRDSLDLYLAMYPDQVQLLLLQARLYFHLGIWPEKVLDILQHIQTLDPGQHGAVGYLVQHTLEHIERKKEEVGVEVKLRSDEKHRDVCYSIGLIMKHKRYGYNCVIYGWDPTCMMGHEWIRNMNVHSLPHGHHQPFYNVLVEDGSCRYAAQENLEYNVEPQEISHPDVGRYFSEFTGTHYIPNAELEIRYPEDLEFVYETVQNIYSAKKENIDE

SEQ ID NO: 74818 - protein, 94 aa, Homo sapiens
  MOD_RES (1)..(1): Any amino acid
XILIFIEHKRKQCNGSLCLEKAVDKPPSPSPIEMKKASNPVEVGIQVTPEDDDCLSTSSRGICPKQEHIAAGCGNDHFHVLSCDWKENEQKCKA

SEQ ID NO: 74819 - protein, 70 aa, Homo sapiens
MDEQPRLMHSHAGVGMAGHPGLSQHLQDGAGGTEGEGGRKQDIGDILQQIMTITDQSLDEAQASNYMAEE

SEQ ID NO: 74820 - protein, 61 aa, Homo sapiens
MAEGGSPDGRAGPGSAAASTRSLSGAVAGSPAHRCESRPLQAMGAVWTSSSGRGPRWIWWT

SEQ ID NO: 74821 - protein, 229 aa, Homo sapiens
CLQQLFEVKVFKEKHHSWFINQSVQSGGLLHFATPVDPLFLLLHYLIKADKEGKFQPLDQVVVDNVFPNCILLLKLPGLEKLLHHVTEEKGNPEIDNKKYYKYSKEKTLKWLEKKVNQTVAALKTNNVNVSSRVQSTAFFSGDQASTDKEEDYIRYAHGLISDYIPKELSDDLSKYLKLPEPSASLPNPPSKKIKLSDEPVEAKEDYTKFNTKDLKTEKMAAQRQKRGK

SEQ ID NO: 74822 - protein, 87 aa, Homo sapiens
MSIAAALELTGRSQFLQTHGRITWHDGSGSLHDIQLSLPSSPEPEDGDKVYKNEDLLNEIKQLKDEIKKKDEKIQLLELQLRLHQLS

SEQ ID NO: 74823 - protein, 542 aa, Homo sapiens
MAELQMLLEEEIPGGRRALFDSYTNLERVADYCENNYIQSADKQRALEETKAYTTQSLASVAYLINTLANNVLQMLDIQASQLRRMESSINHISQTVDIHKEKVARREIGILTTNKNTSRTHKIIAPANLERPVRYIRKPIDYTILDDIGHGVKWLLRFKVSTQNMKMGGLPRTTPPTQKPPSPPMSGKGTLGRHSPYRTLEPVRPPVVPNDYVPSPTRNMAPSQQSPVRTASVNQRNRTYSSSGSSGGSHPSSRSSSRENSGSGSVGVPIAVPTPSPPSVFPAPAGSAGTPPLPATSASAPAPLVPATVPSSTAPDAAAGGAQTLADGFTSPTPPVVSSTPPTGHPVQFYSMNRPASRHTPPTIGGSLPYRRPPSITSQTSLQNQMNGGPFYSQNPVSLAPPPPSILQVTPQLPLMGFVARVQENISDTPPPPPPVEEPVFDESPPPPPPPEDYEEEEAAVVEYSDPYAEEDPPWAPRSYLEKVVAIYDYTKDKEDELSFQEGAIIYVIKKNDDGWYEGVMNGVTGLFPGNYVESIMHYSE

SEQ ID NO: 74824 - protein, 166 aa, Homo sapiens
SAQESVITRDIHRTFPAHDYFKDTGGDGQESLYKICKAYSVYDEDIGYCQGQSFLAAVLLLHMPEEQAFCVLVKIMYDYGLRDLYRNNFEDLHCKFYQLERLMQEQLPDLHSHFSDLNLEAHMYASQWFLTLFTAKFPLCMVFHIIDLLLCESGISALQFTGMVTF

SEQ ID NO: 74825 - protein, 72 aa, Homo sapiens
MIKRFLEDTTDDGELSKFVKDFSGNASCHPPEAKTWASRPQVPEPRPQAPDLYDDDLEFRPPSRPQSSDNQQ

SEQ ID NO: 74826 - protein, 65 aa, Homo sapiens
MASALWTVLPSRMSLRSLKWSLLLLSLLSFFVMWYLSLPHYNVIERVNWMYFYEYEPIYRQDFHF

SEQ ID NO: 74827 - protein, 127 aa, Homo sapiens
  MOD_RES (1)..(1): Any amino acid
XIRRLDHIVMTVKSIKDTTMFYSKILGMEVMTFKEDRKALCFGDQKFNLHEVGKEFEPKAAHPVPGSLDICLITEVPLEEMIQHLKACDVPIEEGPVPRTGAKGPIMSIYFRDPDRNLIEVSNYISS

SEQ ID NO: 74828 - protein, 966 aa, Homo sapiens
MWVSWAPGLWLLGLWATFGHGANTGAQCPPSQQEGLKLEHSSSLPANVTGFNLIHRLSLMKTSAIKKIRNPKGPLILRLGAAPVTQPTRRVFPRGLPEEFALVLTLLLKKHTHQKTWYLFQVTDANGYPQISLEVNSQERSLELRAQGQDGDFVSCIFPVPQLFDLRWHKLMLSVAGRVASVHVDCSSASSQPLGPRRPMRPVGHVFLGLDAEQGKPVSFDLQQVHIYCDPELVLEEGCCEILPAGCPPETSKARRDTQSNELIEINPQSEGKVYTRCFCLEEPQNSEVDAQLTGRISQKAERGAKVHQETAADECPPCVHGARDSNVTLAPSGPKGGKGERGLPGPPGSKGEKGARGNDCVRISPDAPLQCAEGPKGEKGESGALGPSGLPGSTGEKGQKGEKGDGGIKGVPGKPGRDGRPGEICVIGPKGQKGDPGFVGPEGLAGEPGPPGLPGPPGIGLPGTPGDPGGPPGPKGDKGSSGIPGKEGPGGKPGKPGVKGEKGDPCEVCPTLPEGFQNFVGLPGKPGPKGEPGDPVPARGDPGIQGIKGEKGEPCLSCSSVVGAQHLVSSTGASGDVGSPGFGLPGLPGRAGVPGLKGEKGNFGEAGPAGSPGPPGPVGPAGIKGAKGEPCEPCPALSNLQDGDVRVVALPGPSGEKGEPGPPGFGLPGKQGKAGERGLKGQKGDAGNPGDPGTPGTTGRPGLSGEPGVQGPAGPKGEKGDGCTACPSLQGTVTDMAGRPGQPGPKGEQGPEGVGRPGKPGQPGLPGVQGPPGLKGVQGEPGPPGRGVQGPQGEPGAPGLPGIQGLPGPRGPPGPTGEKGAQGSPGVKGATGPVGPPGASVSGPPGRDGQQGQTGLRGTPGEKGPRGEKGEPGECSCPSQGDLIFSGMPGPPGIPGPPGPPGVPGLQVKGEKRMRSLGGRAHGSGWLLPAGPQGCCSPTPKTQTCHFSLLCLPASQGGKEGPLSL

SEQ ID NO: 74829 - protein, 315 aa, Homo sapiens
FDEVFHALSRCLGGLLRPFRVPGSCIDFQPEIYVTIQAYSSIIGLQSHQVLVQGCLLDPSQREVFLQQIYEQLCLFEDKVATMLQQQYDPQSQAEDQSPDSGDLLGRKVGVSMVTADLGLVSMIRQGILALQLLPSNSSAGIIVITDGVTSVPDVAVCETLLNQLRSGTVACSFVQVGGVYSYDCSFGHVPNVELMKFIAMATFGSYLSTCPEPEPGNLGLTVYHRAFLLYSFLRSGEALNPEYYCGERHTEALSTAYLMSTWSLQAATLPWPCAGRSTLRRRCQPTWSALCPYGFERATVSERSHWPKEGPNWR

SEQ ID NO: 74830 - protein, 77 aa, Homo sapiens
MKKNTSKTTMRINKQDALCTPHSHDPRDLQNMLDGGEYAPFVSPPMLESNFIQVNRRGESIYLHNRANWVTVGICFS

SEQ ID NO: 74831 - protein, 55 aa, Homo sapiens
MFLPMLLTEGVHQHTALPDRQMYTGDHHVHVTSRGSGNQWPQHLCLAPVQVITCS

SEQ ID NO: 74832 - protein, 92 aa, Homo sapiens
  MOD_RES (1)..(1): Any amino acid
XDSGKVTTVVATLGQGPERSQEVAYTDIKVIGNGSFGVVYQARLAETRELVAIKKVLQDKRFKVNRELQIMRKLDHCNIVRLRYFFYSSGEK

SEQ ID NO: 74833 - protein, 412 aa, Homo sapiens
MQKYCIYQHFQFQLLIQHLWIAANCDIADERFDATFHTNVLVNSSGHCQYLPPGIFKSSCYIDVRWFPFDVQHCKLKFGSWSYGGWSLDLQMQEADISGYIPNGEWDLVGIPGKRSERFYECCKEPYPDVTFTVTMRRRTLYYGLNLLIPCVLISALALLVFLLPADSGEKISLGITVLLSLTVFMLLVAEIMPATSDSVPLIAQYFASTMIIVGLSVVVTVIVLQYHHHDPDGGKMPKWTRVILLNWCAWFLRMKRPGEDKVRPACQHKQRRCSLASVEMSAVAPPPASNGNLLYIGFRGLDGVHCVPTPDSGVVCGRMACSPTHDEHLLHGGQPPEGDPDLAKILEEVRYIANRFRCQDESEAVCSEWKFAACVVDRLCLMAFSVFTIICTIGILMLAPNFVEAVSKDFA

SEQ ID NO: 74834 - protein, 142 aa, Homo sapiens
MATVPGLQPLPTLEQDLEQEEILIVKVEEDFCLEEEPSVETEDPSPETFRQLFRLFCYQEVAGPREALSRLWELCCRWLRPELRTKEQILELLVLEQFLTVLPGEIQARVREQQPESGEEAVVLVEGLQRKPRKHRQRGDSS

SEQ ID NO: 74835 - protein, 300 aa, Homo sapiens
LLNQTSLVTYFRLRGLSVNHKARIAMFSMFLIFYVLTLIGNVLIVITIIYDHRLHTPMYFFLSNLSFIDVCHSTVTVPKMLRDVWSEEKLISFDACVTQMFFLHLFACTEIFLLTVMAYDRYVAICKPLQYMIVMNWKVCVLLAVALWTGGTIHSIALTSLTIKLPYCGPDEIDNFFCDVPQVIKLACIDTHVIEILIVSNSGLISVVCFVVLVVSYAVILVSLRQQISKGKRKALSTCAAHLTVVTLFLGHCIFIYSRPSTSLPEDKVVSVFFTAVTPLLNPIIYTLRNEEMKSALNKL

SEQ ID NO: 74836 - protein, 51 aa, Homo sapiens
  MOD_RES (1)..(1): Any amino acid
XQRQHRASRENVGHWAISREGQNVRPSLAPPMVQVRNPLRAGSQGHRLGQL

SEQ ID NO: 74837 - protein, 470 aa, Homo sapiens
MCGSIVQSLVPTPTNVTIESYNMNPIVYWEYQIMPQVPVFTVEVKNYGVKNSEWIDACINISHHYCNISDHVGDPSNSLWVRVKARVGQKESAYAKSEEFAVCRDGKIGPPKLDIRKEEKQIMIDIFHPSVFVNGDEQEVDYDPETTCYIRVYNVYVRMNGSEIQYKILTQKEDDCDEIQCQLAIPVSSLNSQYCVSAEGVLHVWGVTTEKSKEVCITIFNSSIKGSLWIPVVAALLLFLVLSLVFICFYIKKINPLKEKSIILPKSLISVVRSATLETKPESKYVSLITSYQPFSLEKEVVCEEPLSPATVPGMHTEDNPGKVEHTEELSSITEVVTTEENIPDVVPGSHLTPIERESSSPLSSNQSEPGSIALNSYHSRNCSESDHSRNGFDTDSSCLESHSSLSDSEFPPNNKGEIKTEGQELITVIKAPTSFGYDKPHVLVDLLVDDSGKESLIGYRPTEDSKEFS

SEQ ID NO: 74838 - protein, 101 aa, Homo sapiens
MMAECLEKFTVSLNHKLDSHAELLDATQHTLQQQIQTLVKEGLRGFREARRDFWRGAESLEAALTHNAEVPRRRAQEAEEAGAALRTARAGYRGRALDYAL

SEQ ID NO: 74839 - protein, 112 aa, Homo sapiens
MSSPLQRAVGDTKRALSASSSSSASLPFDDRDSNHTSEGNGDSLLADEDTDFEDSLNRNVKKRAAKRPPKTTPVAKHPKKGSRVVHRHSRKQSEPPANDLFNAVKAAKSDMQ

SEQ ID NO: 74840 - protein, 224 aa, Homo sapiens
MRVTAPRTVLLLLSGALALTETWAGSHSMRYFYTAMSRPGRGEPRFIAVGYVDDTQFVRFDSDAASPRMAPRAPWIEQEGPEYWDRETQISKTNTQTYRESLRNLRGYYNQSEAGSHTLQRMYGCDVGPDGRLLRGHDQSAYDGKDYIALNEDLSSWTAADTAAQITQRKWEAAREAEQWRAYLEGLCVEWLRRYLENGKETLQRADQEQKSLFPAQRLELSNE

SEQ ID NO: 74841 - protein, 69 aa, Homo sapiens
MRDNTSPISVILVSSGSRGNKLLFRYPFQRSQEHPASQTSKPRSRYAASNTGDHADEQDGDSRPTQTRQ

SEQ ID NO: 74842 - protein, 283 aa, Homo sapiens
MRLTPRALCSAAQAAWRENFPLCGRDVARWFPGHMAKGLKKMQSSLKLVDCIIEVHDARIPLSGRNPLFQETLGLKPHLLVLNKMDLADLTEQQKIMQHLEGEGLKNVIFTNCVKDENVKQIIPMVTELIGRSHRYHRKEVSERPLMFLLDTPGVLAPRIESVETGLKLALCGTVLDHLVGEETMADYLLYTLNKHQRFGYVQHYGLGSACDNVERVLKSVAVKLGKTQKVKVLTGTGNVNIIQPNYPAAARDFLQTFRRGLLGSVMLDLDVLRGHPPAETLP

SEQ ID NO: 74843 - protein, 130 aa, Homo sapiens
MSRRKQGKPQHLSKREFSPEPLEAILTDDEPDHGPLGAPEGDHDLLTCGQCQMNFPLGDILIFIEHKRKQCNGSLCLEKAVDKPPSPSPIEMKKASNPVEVGIQVTPEDDDCLSTSSRGICPKQEHIAEP

SEQ ID NO: 74844 - protein, 69 aa, Homo sapiens
MSTVHEILCKLSLEGDHSTPPSAYGSVKAYTNFDAERDALNIETAIKTKGARPEPRSYQTLEKESLVPF

SEQ ID NO: 74845 - protein, 179 aa, Homo sapiens
MSTEGGFGGTSSSDAQQSLQSFWPRVMEEIRNLTVKDFRVQELPLARIKKIMKLDEDVKMISAEAPVLFAKAAQIFITELTLRAWIHTEDNKRRTLQEEVRQSVTPAEPVQYYFTLAQQPTAVQVQGQQQGQQTTSSTTTIQPGQIIIAQPQQGQTTPVTMQVGEGQQVQIVQAQPQGQ

SEQ ID NO: 74846 - protein, 299 aa, Homo sapiens
MVVSAGPWSSEKAEMNILEINEKLRPQLAENKQQFGNLKERCFVTQLAGFLANQQKKYKYEECKDLIKSMLRNERQFKEEKLAEQLKQAEELRQYKVLVHAQERELTQLREKLREGRDASRSLNEHLQALLTPDEPDKSQGQDLQEQLAEGCRLAQHLVQKLSPENDNDDDEDVQVELAEKVQKSSAPREMQKAEEKEVPEDSQEECAITYSNSHGPYDSNQPHRKTKITFEEDKVDSTLIGSSSHVEWEDAVHIIPENESDDEEEEEKGPVSPRTSVGSSEKGGPRGNRSQAQQGAAG

SEQ ID NO: 74847 - protein, 137 aa, Homo sapiens
MQAMEGEVLLPALYEEEEEEEEEEEEVEEEEEQVQKGGSVGSLSVNKHRGLSLTETELEELRAQVLQLVAELEETRELAGQHEDDSLELQGLLEDERLASAQQAEVFTKQIQQLQGELRSLREEISLLEHEKESELK

SEQ ID NO: 74848 - protein, 249 aa, Homo sapiens
IANMAAAAQIHSPLSRAGTSVIKERIPESPSPAPSLEENHRPGSQTSSHTSSSVSSSPSQMDHHLERMEEVPVQIPIMKSPLDKIQLTPGQALPAGFPGPFIFADSLSSVETLLTNIQVNNISINKINGLLKVALDNARIQEKQIQQEKKELRLELYREREIRENLERQLAVELQSRTTMQKRLKKEKKTKRKLQEALEFESKRREQVEQALKQATTSDSGLRMLKDTGIPDIEIENNGTPHDSAAMQA

SEQ ID NO: 74849 - protein, 74 aa, Homo sapiens
MLQKVEVEYETLPGWKADTTGARRWEDLPPQAQNYIRFVENHVGVAVCIITVFSALSVKWVGVGKSRESMIQLF

SEQ ID NO: 74850 - protein, 141 aa, Homo sapiens
MSGWYRFVGEGGVRMSETCVQVHRCQTDAPMWLNGTHPALGDGITNHTACAHWSGNCCFWKTEVLVKACPGGYHVYRLEGTPWCNLRYCTDPSTVEDKCEKACRPEEECLALNSTWGCFCRQDLNSSDVHSLQPQLDCGPR

SEQ ID NO: 74851 - protein, 137 aa, Homo sapiens
MDIPLDLSSSAGSGKRRRRGNLPKESVQILRDWLYEHRYNAYPSEQEKALLSQQTHLSTLQVCNWFINARRRLLPDMLRKDGKDPNQFTISRRGAKISETSSVESVMGIKNFMPALEETPFHSCTAGPNPTLGRPLS

SEQ ID NO: 74852 - protein, 258 aa, Homo sapiens
  MOD_RES (1)..(1): Any amino acid
XEKAKGGPPPGNAAGDTGQPAEDSDHGGKPPLPAEKPAPGPGLPPEPREQRDVERAGGNQAASQLEAGRAEMLDHAVLLQVIKEQQVQQKRLLDQQEKLLAVIEEQHKEIHQQRQEDEEDKPRQVEVHQEPGAAVPRGQEAPEGKARETVENLPPLPLDPVLRAPGGRPAPSQDLNQRSLEHSEGPVGRDPAGPPDGGPDTEPRAAQAKLRDGQKDAAPRAAGTVKELPKGPEQVPVPDPAREAGGPEERLAEEFPGQ

SEQ ID NO: 74853 - protein, 165 aa, Homo sapiens
MASPPACPSEEDESLKGCELYVQLHGIQQVLKDCIVHLCISKPERPMKFLREHFEKLEKEENRQILARQKSNSQSDSHDEEVSPTPPNPVVKARRRRGGVSAEVYTEEDAVSYVRKVIPKDYKTMTALAKAISKNVLFAHLDDNERSDIFDAMFPVTHIAGETVI

SEQ ID NO: 74854 - protein, 229 aa, Homo sapiens
MKEAKDARYTNGHLFTTISVSGMTMCYACNKSITAKEALICPTCNVTIHNRCKDTLANCTKVKQKQQKAALLKNNTALQSVSLRSKTTIRERPSSAIYPSDSFRQSLLGSRRGRSSLSLAKSVSTTNIAGHFNDESPLGLRRILSQSTDSLNMRNRTLSVESLIDEAEVIYSELMSDFEMDEKDFAADSWSLAVDSSFLQQHKKEVMKQQDVIYELIQTELHHVRTLKI

SEQ ID NO: 74855 - protein, 205 aa, Homo sapiens
  MOD_RES (1)..(1): Any amino acid
XPLKLYGAQIKQTRAEIKKFKHVQNHEIKQLEKLEKLRQKSPSDQQMISQAETRVQRAAVDSSRTTLQLEETVDGFQRQKLKDLQKFFCDFVTIEMVFHAKAVEVYSSAFQTLEKYDLERDLLDFRAKMQGVYGHYDTRLLANTSPPPSVLQSLASQSAQSTIWSPGKEGEESEDNSMEEAPVEDLRALGQGPHKRELPTTVRRT

SEQ ID NO: 74856 - protein, 1232 aa, Homo sapiens
MSWSPDQELVLLATGQQTLIMMTKDFEPILEQQIHQDDFGESKFITVGWGRKETQFHGSEGRQAAFQMQMHESALPWDDHRPQVTWRGDGQFFAVSVVCPETGARKVRVWNREFALQSTSEPVAGLGPALAWKPSGSLIASTQDKPNQQDIVFFEKNGLLHGHFTLPFLKDEVKVNDLLWNADSSVLAVWLEDLQREESSIPKTCVQLWTVGNYHWYLKQSLSFSTCGKSKIVSLMWDPVTPYRLHVLCQGWHYLAYDWHWTTDRSVGDNSSDLSNVAVIDGNRVLVTVFRQTVVPPPMCTYQLLFPHPVNQVTFLAHPQKSNDLAVLDASNQISVYKCGDCPSADPTVKLGAVGGSGFKVCLRTPHLEKRYKIQFENNEDQDVNPLKLGLLTWIEEDVFLAVSHSEFSPRSVIHHLTAASSEMDEEHGQLNVSSSAAVDGVIISLCCNSKTKSVVLQLADGQIFKYLWESPSLAIKPWKNSGGFPVRFPYPCTQTELAMIGEEECVLGLTDRCRFFINDIEVASNITSFAVYDEFLLLTTHSHTCQCFCLRDASFKTLQAGLSSNHVSHGEVLRKVERGSRIVTVVPQDTKLVLQMPRGNLEVVHHRALVLAQIRKWLDKLMFKEAFECMRKLRINLNLIYDHNPKVFLGNVETFIKQIDSVNHINLFFTELKEEDVTKTMYPAPVTSSVYLSRDPDGNKIDLVCDAMRAVMESINPHKYCLSILTSHVKKTTPELEIVLQKVHELQGNAPSDPDAVSAEEALKYLLHLVDVNELYDHSLGTYDFDLVLMVAEKSQKDPKEYLPFLNTLKKMETNYQRFTIDKYLKRYEKAIGHLSKCGPEYFPECLNLIKDKNLYNEALKLYSPSSQQYQDISIAYGEHLMQEHMYEPAGLMFARCGAHEKALSAFLTCGNWKQALCVAAQLNFTKDQLVGLGRTLAGKLVEQRKHIDAAMVLEECAQDYEEAVLLLLEGAAWEEALRLVYKYNRLDIIETNVKPSILEGEGSILDRIPHLEEAQKNYMAFLDSQTATFSRHKKRLLVVRELKEQAQQAGLDDEVPHGQESDLFSETSSVVSGSEMSGKYSHSNSRISARSSKNRRKAERKKHSLKEGSPLEDLALLEALSEVVQNTENLKDEVYHILKVLFLFEFDEQGRELQKAFEDTLQLMERSLPEIWTLTYQQNSATPVLGPNSTANSIMASYQQQKTSVPVLDAELFIPPKINRRTQWKLSLLD

SEQ ID NO: 74857 - protein, 141 aa, Homo sapiens
MVFARHLREVGDEFRSRHLNSTDDADRIPFQEDWMKMKVKLGSALGGPYLGVHLRRKDFIWGHRQDVPSLEGAVRKIRSLMKTHRLDKVFVATDAVRKEYEELKKLLPEMVRFEPTWEELELYKDGGVAIIDQWICAHASS

SEQ ID NO: 74858 - protein, 378 aa, Homo sapiens
MLPDDTTNHSNSSKEVPSSAVLRSLRVNVGPDGEETRAQTVQKSPEFLSTSESSSLLQDLQPSDSTSFILLNLTRAGLGSSAEHLVFVQDEAEDSGNDFLSSESTDSSIPWFLRVQELAHDSLIAATRAQLAKNAKTSSNGENVHLGSGDGQSKDSGPLPQVEKKLKCTVEGCDRTFVWPAHFKYHLKTHRNDRSFICPAEGCGKSFYVLQRLKVHMRTHNGEKPFMCHESGCGKQFTTAGNLKNHRRIHTGEKPFLCEAQGCGRSFAEYSSLRKHLVVHSGEKPHQCQVCGKTFSQSGSRNVHMRKHHLQLGAAGSQEQEQTEVLAEGSPRSLSSVPDVTHHLVTMQSGRQSYEVSVLTAVNPQELLNQGDLTERRT

SEQ ID NO: 74859 - protein, 368 aa, Homo sapiens
MAVAGAVSGEPLVHWCTQQLRKTFGLDVSEEIIQYVLSIESAEEIREYVTDLLQGNEGKKGQFIEELITKWQKNDQELISDPLQQCFKKDEILDGQKSGDHLKRGRKKGRNRQEVPAFTEPDTTAEVKTPFDLAKAQENSNSVKKKTKFVNLYTREGQDRLAVLLPGRHPCDCLGQKHKLINNCLICGRIVCEQEGSGPCLFCGTLVCTHEEQDILQRDSNKSQKLLKKLMSGVENSGKVDISTKDLLPHQELRIKSGLEKAIKHKDKLLEFDRTSIRRTQVIDDESDYFASDSNQWLSKLERETLQKREEELRELRHASRLSKKVTIDFAGRKILEEENSLAEYHSSGLTTQVQPHRRRLSVLQDLD

SEQ ID NO: 74860 - protein, 1635 aa, Homo sapiens
MTSAQCPALACVMSPLRFWGPWPLLMWQLLWLLVKEAQPLEWVKDPLQLTSNPLGPPEPWSSHSSHFPRESPHAPTLPADPWDFDHLGPSASSEMPAPPQESTENLVPFLDTWDSAGELPLEPEQFLASQQDLKDKLSPQERLPVSPKKLKKDPAQRWSLAEIIGIIRQLSTPQSQKQTLQNEYSSTDTPYPGSLPPELRVKSDEPPGPSEQVGPSQFHLEPETQNPETLEDIQSSSLQQEAPAQLPQLLEEEPSSMQQEAPALPPESSMESLTLPNHEVSVQPPGEDQAYYHLPNITVKPADVEVTITSEPTNETESSQAQQETPIQFPEEVEPSATQQEAPIEPPVPPMEHELSISEQQQPVQPSESPREVESSPTQQETPGQPPEHHEVTVSPPGHHQTHHLASPSVSVKPPDVQLTIAAEPSAEVGTSLVHQEATTRLSGSGNDVEPPAIQHGGPPLLPESSEEAGPLAVQQETSFQSPEPINNENPSPTQQEAAAEHPQTAEEGESSLTHQEAPAQTPEFPNVVVAQPPEHSHLTQATVQPLDLGFTITPESKTEVELSPTMKETPTQPPKKVVPQLRVYQGVTNPTPGQDQAQHPVSPSVTVQLLDLGLTITPEPTTEVGHSTPPKRTIVSPKHPEVTLPHPDQVQTQHSHLTRATVQPLDLGFTITPKSMTEVEPSTALMTTAPPPGHPEVTLPPSDKGQAQHSHLTQATVQPLDLELTITTKPTTEVKPSPTTEETSTQPPDLGLAIIPEPTTETGHSTALEKTTAPRPDRVQTLHRSLTEVTGPPTELEPAQDSLVQSESYTQNKALTAPEEHKASTSTNICELCTCGDEMLSCIDLNPEQRLRQVPVPEPNTHNGTFTILNFQGNYISYIDGNVWKAYSWTEKLILRENNLTELHKDSFEGLLSLQYLDLSCNKIQSIERHTFEPLPFLKFINLSCNVITELSFGTFQAWHGMQFLHKLILNHNPLTTVEDPYLFKLPALKYLDMGTTLVPLTTLKNILMMTVELEKLILPSHMACCLCQFKNSIEAVCKTVKLHCNSACLTNTTHCPEEASVGNPEGAFMKVLQARKNYTSTELIVEPEEPSDSSGINLSGFGSEQLDTNDESDFISTLRYILPYFSAVNLDVKSLLLPLIKLPTTGNSLAKIQTVGQNRQRVKRVLMGPRSIQKRHFKEVGRQSIRREQGAQASVENAAEEKRLGSPAPREVEQPHTQQGPEKLAGNAVYTKPSFTQEHKAAVSVLKPFSKGAPSTSSPAKALPQVRDRWKDLTHAISTLESAKARVTNTKTSKPIVHARKKYRFHKTRSHVTHRTPKVKKSPKVRKKSYLSRLMLANRLPFSAAKSLINSPSQGAFSSLGDLSPQENPFLEVSAPSEHFIEKNNTKHTTARNAFEENDFMENTNMPEGTISENTNYNHPPEADSAGTAFNLGPTVKQTETKWEYNNVGTDLSPEPKSFNYPLLSSPGDQFEIQLTQQLQSLIPNNNVRRLIAHVIRTLKMDCSGTHVQVTCAKLISRTGHLMKLLSGQQEVKASKIEWDTDQWKIENYINESTEAQSEQKEKSLELKKEVPGYGYTDKLILALIVTGILTILIILFCLIVICCHRRSLQEDEEGFSRDSEAPTEEEESEALP

SEQ ID NO: 74861 - protein, 1999 aa, Homo sapiens
  MOD_RES (1)..(1): Any amino acid
XIASFRGTVPYGLSLEIGDTVQILEKCDGWYRGFALKNPNIKGIFPSSYVHLKNACVKNKGQFEMVIPTEDSVITEMTSTLRDWGTMWKQLYVRNEGDLFHRLWHIMNEILDLRRQVLVGHLTHDRMKDVKRHITARLDWGNEQLGLDLVPRKEYAMVDPEDISITELYRLMEHRHRKKDTPVQASSHHLFVQMKSLMCSNLGEELEVIFSLFDSKENRPISERFFLRLNRNGLPKAPDKPERHCSLFVDLGSSELRKDIYITVHIIRIGRMGAGEKKNACSVQYRRPFGCAVLSIADLLTGETKDDLILKVYMCNTESEWYQIHENIIKKLNARYNLTGSNAGLAVSLQLLHGDIEQIRREYSSVFSHGVSITRKLGFSNIIMPGEMRNDLYITIERGEFEKGGKSVARNVEVTMFIVDSSGQTLKDFISFGSGEPPASEYHSFVLYHNNSPRWSELLKLPIPVDKFRGAHIRFEFRHCSTKEKGEKKLFGFSFVPLMQEDGRTLPDGTHELIVHKCEENTNLQDTTRYLKLPFSKGIFLGNNNQAMKATKESFCITSFLCSTKLTQNGDMLDLLKWRTHPDKITGCLSKLKEIDGSEIVKFLQDTLDTLFGILDENSQKYGSKVFDSLVHIINLLQDSKFHHFKPVMDTYIESHFAGALAYRDLIKVLKWYVDRITEAERQEHIQEVLKAQEYIFKYIVQSRRLFSLATGGQNEEEFRCCIQELLMSVRFFLSQESKGSGALSQSQAVFLSSFPAVYSELLKLFDVREVANLVQDTLGSLPTILHVDDSLQAIKLQCIGKTVESQLYTNPDSRYILLPVVLHHLHIHLQEQKDLIMCARILSNVFCLIKKNSSEKSVLEEIDVIVASLLDILLRTILEITSRPQPSSSAMRFQFQDVTRTGFLNRESSHGSTTLSTFSVCADTYGKVPMTSRHTGEFVACLLSLLRQMTDRHYQQLLDSFNTKEELRDFLLQIFTVFRILIRPEMFPKDWTVMRLVANNVIITTVLYLSDALRKNFLNENFDYKIWDSYFYLAVIFINQLCLQLEMFTPSKKKKVLEKYGDMRVTMGCEIFSMWQNLGEHKLHFIPALIGPFLEVTLIPQPDLRNVMIPIFHDMMDWEQRRSGNFKQVEAKLIDKLDSLMSEGKGDETYRELFNSIIPLFGPYPSLLKKIERETWRESGVSLIATVTRLMERLLDYRDCMKMGEVDGKKIGCTVSLLNFYKTELNKEEMYIRYIHKLYDLHLKAQNFTEAAYTLLLYDELLEWSDRPLREFLTYPMQTEWQRKEHLHLTIIQNFDRGKCWENGIILCRKIAEQYESYYDYRNLSKMRMMEASLYDKIMDQQRLEPEFFRVGFYGKKFPFFLRNKEFVCRGHDYERLEAFQQRMLNEFPHAIAMQHANQPDETIFQAEAQYLQIYAVTPIPESQEVLQREGVPDNIKSFYKVNHIWKFRYDRPFHKGTKDKENEFKSLWVERTSLYLVQSLPGISRWFEVEKREVVEMSPLENAIEVLENKNQQLKTLISQCQTRQMQNINPLTMCLNGVIDAAVNGGVSRYQEAFFVKEYILSHPEDGEKIARLRELMLEQAQILEFGLAVHEKFVPQDMRPLHKKLVDQFFVMKSSLGIQEFSACMQASPVHFPNGSPRVCRNSAPASVSPDGTRVIPRRSPLSYPAVNRYSSSSLSSQASAEVSNITGQSESSDEVFNMQPSPSTSSLSSTHSASPNVTSSAPSSARASPLLSDKHKHSRENSCLSPRERPCSAIYPTPVEPSQRMLFNHIGDGALPRSDPNLSAPEKAVNPTPSSWSLDSGKEAKNMSDSGKLISPPVPPRPTQTASPARHTTSVSPSPAGRSPLKGSVQSFTPSPVEYHSPGLISNSPVLSGSYSSGISSLSRCSTSETSGFENQVNEQSAPLPVPVPVPVPSYGGEEPVRKESKTPPPYSVYERTLRRPVPLPHSLSIPVTSEPPALPPKPLAARSSHLENGARRTDPGPRPRPLPRKVSQL

SEQ ID NO: 74862 - protein, 35 aa, Homo sapiens
MKKLIAQKPDLKIHDQMTVIDKGKKRTLEESQKMS

SEQ ID NO: 74863 - protein, 340 aa, Homo sapiens
MMCHPLDQLATRTQKKSATSKPPYSFSLLIYMAIEHSPNKCLPVKEIYSWILDHFPYFATAPTGWKNSVRHNLSLNKCFQKVERSHGKVNGKGSLWCVDPEYKPNLIQALKKQPFSSASSQNGSLSPHYLSSVIKQNQVRNLKESDIDAAAAMMLLNTSIEQGILECEKPLPLKTALQKKRSYGNAFHHPSAVRLQESDSLATSIDPKEDHNYSASSMAAQRCASRSSVSSLSSVDEVYEFIPKNSHVGSDGSEGFHSEEDTDVDYEDDPLGDSGYASQPCAKISEKGQSGKKMRKQTCQEIDEELKEAAGSLLHLAGIRTCLGSLISTAKTQNQKQRKK

SEQ ID NO: 74864 - protein, 77 aa, Homo sapiens
MAQLEGYCFSAALSCTFLVSCLLFSAFSRALREPYMDEIFHLPQAQRYLGSHDYYITWLVPGVSWSGQTCHLDLCMV

SEQ ID NO: 74865 - protein, 180 aa, Homo sapiens
  MOD_RES (1)..(1): Any amino acid
XLPQKSHGRTQDENPVVHFFKNIVTPRTPPPSQGKGRGLSLSRFSWVGDERTSIGFLFRPSPHSPATFVFCSVSVASWPPFLSSRDLSAHSWDRAALSSTGEMKRGLPFRKVWSLASVPGTQPCKARSSSPRGFPGDVTGLPPREGATPRPRKCLTSSNTTSARSPRNPHVEVGLAGPSQ

SEQ ID NO: 74866 - protein, 174 aa, Homo sapiens
  MOD_RES (1)..(1): Any amino acid
XCHGGISGTIYEYGALTIDGEEYIPFKQYAGKYVLFVNVASYCGLTGQYIELNALQEELAPFGLVILGFPCNQFGKQEPGENSEILPTLKTPVLPPRSSWVHLTASSGNPCRFTTSAGTLRSSWWGQMVYPSCAGTTGPRSATSRWTSCPTCGGRQPWGSRGSNCRPSHPMSTM

SEQ ID NO: 74867 - protein, 255 aa, Homo sapiens
MCYRKTEDFFTIWLDLNMFLPLGVDCWIDNTRVVYNRSSGLVSNAPGVQIRVPGFGKTYSVEYLDSSKLAGYLHTLVQNLVNNGYVRDETVRAAPYDWRLEPGQQEEYYRKLAGLVEEMHAAYGKPVFLIGHSLGCLHLLYFLLRQPQAWKDRFIDGFISLGAPWGGSIKPMLVLASGDNQGIPIMSSIKLKEEQRITTTSPWMFPSRMAWPEDHVFISTPSFNYTGRDFQRFFADLHFEEGWYMWLQSRDLLAG

SEQ ID NO: 74868 - protein, 175 aa, Homo sapiens
  MOD_RES (1)..(1): Any amino acid
XRGKAGAKLFQDFQMLSRIWTHPWCLQLDYISKENKGYFDEDSMDEFIASDSDETSMSLSSDDYTKKKKKGKKGKKDSSSSGSGSDNDVEVIKVWNSRSRGGGEGNVDETGNNPSVSLKLEENIYKVLTICPDIRRELISLNGKLKKVKLLLLLIQAAQLQTGTKILLQMLMLRF

SEQ ID NO: 74869 - protein, 126 aa, Homo sapiens
MTTRSVLDVETFVADILKGENLSKKAKEKRESLIKKIKDVKSIYLQEFQDKGDAEDGEEYDDPFAGPPDTISLASERYDKDDEAPSDGAQFPPIAAQDLPFVLKAGYLEKRRKDHSFLGFEWQKRW

SEQ ID NO: 74870 - protein, 1034 aa, Homo sapiens
MRSAAKPWNPAIRAGGHGPDRVRPLPAASSGMKSSKSSTSLAFESRLSRLKRASSEDTLNKPGSTAASGVVRLKKTATAGAISELTESRLRSGTGAFTTTKRTGIPAPREFSVTVSRERSVPRGPSNPRKSVSSPTSSNTPTPTKHLRTPSTKPKQENEGGEKAALESQVRELLAEAKAKDSEINRLRSELKKYKEKRTLNAEGTDALGPNVDGTSVSPGDTEPMIRALEEKNKNFQKELSDLEEENRVLKEKLIYLEHSPNSEGAASHTGDSSCPTSITQESSFGSPTGNQMSSDIDEYKKNIHGNALRTSGSSSSDVTKASLSPDASDFEHITAETPSRPLSSTSNPFKSSKCSTAGSSPNSVSELSLASLTEKIQKMEENHHSTAEELQATLQELSDQQQMVQELTAENEKLVDEKTILETSFHQHRERAEQLSQENEKLMNLLQERVKNEEPTTQEGKIIELEQKCTGILEQGRFEREKLLNIQQQLTCSLRKVEEENQGALEMIKRLKEENEKLNEFLELERHNNNMMAKTLEECRVTLEGLKMENGSLKSHLQGEKQKATEASAVEQTAESCEVQEMLKVARAEKDLLELSCNELRQELLKANGEIKHVSSLLAKVEKDYSYLKEICDHQAEQLSRTSLKLQEKASESDAEIKDMKETIFELEDQVEQHRAVKLHNNQLISELESSVIKLEEQKSDLERQLKTLTKQMKEETEEWRRFQADLQTAVVVANDIKCEAQQELRTVKRKLLEEEEKNARLQKELGDVQGHGRVVTSRAAPPPVDEEPESSEVDAAGRWPGVCVSRTSPTPPESATTVKSLIKSFDLGRPGGAGQNISVHKTPRSPLSGIPVRTAPAAAVSPMQRHSTYSSVRPASRGVTQRLDLPDLPLSDILKGRTETLKPDPHLRKSPSLESLSRPPSLGFGDTRLLSASTRAWKPQSKLSVERKDPLAALAREYGGSKRNALLKWCQKKTQGYANIDITNFSSSWSDGLAFCALLHTYLPAHIPYQELNSQEKSLCLFNLEEESLVGI

SEQ ID NO: 74871 - protein, 26 aa, Homo sapiens
MSNNGLDIQDKPPAPPMRNTSTMIGA

SEQ ID NO: 74872 - protein, 89 aa, Homo sapiens
MFRCGGLAAGALKQKLVPLVRTVCVRSPRQRNRLPGNLFQRWHVPLELQMTRQMASSGASGGKIDNSVLVLIVGLSTVGAGAYLCSLIT

SEQ ID NO: 74873 - protein, 245 aa, Homo sapiens
MASESSPLLAYRLLGEEGVALPANGAGGPGGASARKLSTFLGVVVPTVLSMFSIVVFLRIAGYAEDYTTGAVMNFASVFAVLFNGCTGIMAGANMSGELKDPSRAIPLGTIVAVAYTFFVYVLLFFLSSFTCDRTLLQEDYGFFRAISLWPPLVLIGIYATALSASMSSLIGASRILHALARDDLFGVILAPAKVVSRGGNPWAAVLYSWGLVQLVLLAGKLNTLAAVVTVFYLVAYAAVDLSCL

SEQ ID NO: 74874 - protein, 139 aa, Homo sapiens
  MOD_RES (1)..(1): Any amino acid
XQEELKRLHRAQIIQRQLQQVEERQRRLEERGVAVEKALRGEADYWGESYYSDLIDLHLGGMYGSACADTNPADALSPPTLPSPCSQKQGEINPITKWQKHRPFSSSKQSSVLISPLPTCAPEEDLSLLLLPGVVFNFL

SEQ ID NO: 74875 - protein, 107 aa, Homo sapiens
MMLSPDQAADSDHPSSAHSDPESLGGTDTKVLGSVSDLEPVEEAEGDGKGGSRAALYPHPQQLSREEKRRRRRATAKYRSAHATRERIRVEAFNLAFAELRKLLPTL

SEQ ID NO: 74876 - protein, 213 aa, Homo sapiens
MEGVPSTAIREISLLKELKHPNIVRLLDVVHNERKLYLVFEFLSQDLKKYMDSTPGSELPLHLIKSYLFQLLQGVSFCHSHRVIHRDLKPQNLLINELGAIKLADFGLARAFGVPLRTYTHEVVTLWYRAPEILLGSKFYTTAVDIWSIGCIFAEMVTRKALFPGDSEIDQLFRIFRMLGTPSEDTWPGVTQLPDYKGSFPKWTRKGLEEIVP

SEQ ID NO: 74877 - protein, 80 aa, Homo sapiens
MKLLTGLVFCSLVLSVSSRSFFSFLGEAFDGARDMWRAYSDMREANYIGSDKYFHARGNYDAAKRGPGGAWAAEVIREDD

SEQ ID NO: 74878 - protein, 206 aa, Homo sapiens
ENLKRLKCLRRYRQRYGVEALLHRQLKERRMLATDGAAQQAHTTRSSQRCLAFVDDVRCSNQSLPMTRHCLTHICQDTNQVLFKCCQGSEEVPCNKPVPVSLSEDPCCPLHFQLPPQMYKPEQDLDVVGDGMQCPPSPLLFDPSLTLEDHLVKEIAEDPVDILGQMQMAGDGCRSQGSRNSEKASAPLSQSGLATANGKPEPTSIS

SEQ ID NO: 74879 - protein, 199 aa, Homo sapiens
MPEAPPLLLAAVLLGLVLLVVLLLLLRHWGWGLCLIGWNEFILQPIHNLLMGDTKEQRILNHVLQHAEPGNAQSVLEAIDTYCEQKEWAMNVGDKKGKIVDAVIQEHQPSVLLELGAYCGYSAVRMARLLSPGARLITIEINPDCAAITQRMVDFAGVKDKVCRDGLLSVRTWALTGAVPGHPCGWSVPGHHPPAEEEV

SEQ ID NO: 74880 - protein, 70 aa, Homo sapiens
MSNACKELAIFLTTGIVVSAFGLPIVFARAHLIEWGACALVLTGNTVIFATILGFFLVFGSNDDFSWQQW

SEQ ID NO: 74881 - protein, 77 aa, Homo sapiens
MKKKTVCTLNMGDKKYEDMEGEENGDNTISTGLLYSEADRCPICLNCLLEKEVGFPESCNHVFCMTCILKWAERSYL

SEQ ID NO: 74882 - protein, 59 aa, Homo sapiens
  MOD_RES (1)..(1): Any amino acid
XKMTTLTPAYHAENYSPEDNRFDLRPFLYNTSWPWQFRCIENQVLQLERAEPQSLDGVD

SEQ ID NO: 74883 - protein, 1853 aa, Homo sapiens
MAASELYTKFARVWIPDPEEVWKSAELLKDYKPGDKVLLLHLEEGKDLEYHLDPKTKELPHLRNPDILVGENDLTALSYLHEPAVLHNLRVRFIDSKLIYTYCGIVLVAINPYEQLPIYGEDIINAYSGQNMGDMDPHIFAVAEEAYKQMARDERNQSIIVSGESGAGKTVSAKYAMRYFATVSGSASEANVEEKVLASNPIMESIGNAKTTRNDNSSRFGKYIEIGFDKRYRIIGANMRTYLLEKSRVVFQAEEERNYHIFYQLCASAKLPEFKMLRLGNADNFNYTKQGGSPVIEGVDDAKEMAHTRQACTLLGISESHQMGIFRILAGILHLGNVGFTSRDADSCTIPPKHEPLCIFCELMGVDYEEMCHWLCHRKLATATETYIKPISKLQATNARDALAKHIYAKLFNWIVDNVNQALHSAVKQHSFIGVLDIYGFETFEINSFEQFCINYANEKLQQQFNMHVFKLEQEEYMKEQIPWTLIDFYDNQPCINLIESKLGILDLLDEECKMPKGTDDTWAQKLYNTHLNKCALFEKPRLSNKAFIIQHFADKVEYQCEGFLEKNKDTVFEEQIKVLKSSKFKMLPELFQDDEKAISPTSATSSGRTPLTRTPAKPTKGRPGQMAKEHKKTVGHQFRNSLHLLMETLNATTPHYVRCIKPNDFKFPFTFDEKRAVQQLRACGVLETIRISAAGFPSRWTYQEFFSRYRVLMKQKDVLSDRKQTCKNVLEKLILDKDKYQFGKTKIFFRAGQVAYLEKLRADKLRAACIRIQKTIRGWLLRKKYLRMRKAAITMQRYVRGYQARCYAKFLRRTKAATIIQKYWRMYVVRRRYKIRRAATIVLQSYLRGFLARNRYRKILREHKAVIIQKRVRGWLARTHYKRSMHAIIYLQCCFRRMMAKRELKKLKIEARSVERYKKLHIGMENKIMQLQRKVDEQNKDYKCLVEKLTNLEGIYNSETEKLRSDLERLQLSEEEAKVATGRVLSLQEEIAKLRKDLEQTRSEKKCIEEHADRYKQETEQLVSNLKEENTLLKQEKEALNHRIVQQAKEMTETMEKKLVEETKQLELDLNDERLRYQNLLNEFSRLEERYDDLKEEMTLMVHVPKPGHKRTDSTHSSNESEYIFSSEIAEMEDIPSRTEEPSEKKVPLDMSLFLKLQKRVTELEQEKQVMQDELDRKEEQVLRSKAKEEERPQIRGAELEYESLKRQELESENKKLKNELNELRKALSEKSAPEVTAPGAPAYRVLMEQLTSVSEELDVRKEEVLILRSQLVSQKEAIQPKDDKNTMTDSTILLEDVQKMKDKGEIAQAYIGLKETNRLLESQLQSQKRSHENEAEALRGEIQSLKEENNRQQQLLAQNLQLPPEARIEASLQHEITRLTNENLYFEELYADDPKKYQSYRISLYKRMIDLMEQLEKQDKTVRKLKKQLKVFAKKIGELEVGQMENISPGQIIDEPIRPVNIPRKEKDFQGMLEYKKEDEQKLVKNLILELKPRGVAVNLIPGLPAYILFMCVRHADYLNDDQKVRSLLTSTINSIKKVLKKRGDDFETVSFWLSNTCRFLHCLKQYSGEEGFMKHNTSRQNEHCLTNFDLAEYRQVLSDLAIQIYQQLVRVLENILQPMIVSGMLEHETIQGVSGVKPTGLRKRTSSIADEGTYTLDSILRQLNSFHSVMCQHGMDPELIKQVVKQMFYIIGAITLNNLLLRKDMCSWSKGMQIRYNVSQLEEWLRDKNLMNSGAKETLEPLIQAAQLLQVKKKTDDDAEAICSMCNALTTAQIVKVLNLYTPVNEFEERVSVSFIRTIQMRLRDRKDSPQLLMDAKHIFPVTFPFNPSSLALETIQIPASLGLGFISRV

SEQ ID NO: 74884 - protein, 632 aa, Homo sapiens
MTPALTALLCLGLSLGPRTRVQAGPFPKPTLWAEPGSVISWGSPVTIWCQGSLEAQEYRLDKEGSPEPLDRNNPLEPKNKARFSIPSMTEHHAGRYRCHYYSSAGWSEPSDPLELVMTGFYNKPTLSALPSPVVASGGNMTLRCGSQKGYHHFVLMKEGEHQLPRTLDSQQLHSGGFQALFPVGPVNPSHRWRFTCYYYYMNTPQVWSHPSDPLEILPSGVSRKPSLLTLQGPVLAPGQSLTLQCGSDVGYDRFVLYKEGERDFLQRPGQQPQAGLSQANFTLGPVSPSHGGQYRCYGAHNLSSEWSAPSDPLNILMAGQIYDTVSLSAQPGPTVASGENVTLLCQSWWQFDTFLLTKEGAAHPPLRLRSMYGAHKYQAEFPMSPVTSAHAGTYRCYGSYSSNPHLLSFPSEPLELMVSGHSGGSSLPPTGPPSTPGLGRYLEVLIGVSVAFVLLLFLLLFLLLRRQRHSKHRTSDQRKTDFQRPAGAAETEPKDRGLLRRSSPAADVQEENLYAAVKDTQSEDRVELDSQQSPHDEDPQAVTYAPVKHSSPRREMASPPSSLSGEFLDTKDRQVEEDRQMDTEAAASEASQDVTYAQLHSLTLRRKATEPPPSQEGEPPAEPSIYATLAIH

SEQ ID NO: 74885 - protein, 115 aa, Homo sapiens
MSGAGVAAGTRPPSSPTPGSRRRRQRPSVGVQSLRPQSPQLRQSDPQKRNLDLEKSLQFLQQQHSEMLAKLHEEIEHLKRENKDLRYKLIMNQTSQKKGPLLPWALAGSASTECG

SEQ ID NO: 74886 - protein, 71 aa, Homo sapiens
MGTSALWALWLLLALCWAPRESGATGTGRKAKCEPSQFQCTNGRCITLLWKCDGDEDCVDGSDEKNCEDVC

SEQ ID NO: 74887 - protein, 139 aa, Homo sapiens
MAVAAVKWVMSKRTILKHLFPVQNGALYCVCHKSTYSPLPDDYNCNVELALTSDGRTIVCYHPSVDIPYEHTKPIPRPDPVHNNEETHDQVLKTRLEEKVEHLEEGPMIEQLSKMFFTTKHRWYPHGRCRKNLNPPKDR

SEQ ID NO: 74888 - protein, 110 aa, Homo sapiens
MLSVQPDTKPKGCAGCNRKIKDRYLLKALDKYWHEDCLKCACCDCRLGEVGSTLYTKANLILCRRDYLRLFGVTGNCAACSKLIPAFEMVMRAKDNVYHLDCFACQLCNQ

SEQ ID NO: 74889 - protein, 361 aa, Homo sapiens
  MOD_RES (1)..(1): Any amino acid
XLHIGCDEVYYLGEGEASRRWLQQEQNSTGKLCLSHMRAVASGVKARRPSVTPLVWDDMLRDLPEDQLAASGVPQLVEPVLWDYTADLDVHGKVLLMQKYRRCGFPQLWAASAFKGATGPSQAVPPVEHHLRNHVQWLQVAGSGPTDSLQGIILTGWQRYDHYSVLCELLPAGVPSLAACLQLLLRGMSGLATPSPTGPSPKDPEGRRPSTQCSNHPAGLWWSSQSEDGLTAPAQPPTCPEVHPGWACVWVSRPKPKAGWRVTREAPLRHSESAEMHAGRRWGTAPPLLHTRPAHLAEQVWGSGARPWKAPHPGPSTHTSRSPEGAAGPMGRGRHRGTPWGRQGAWPEELCVWKLAGHTGN

SEQ ID NO: 74890 - protein, 109 aa, Homo sapiens
MVHTSLDVVDEKISAMGKALVDQRELYLGLLYPTEDYKVYGYVTNSKVKFVMVVDSSNTALRDNEIRSMFRKLHNSYTDVMCNPFYNPGDRIQSRAFDNMVTSMMIQVC

SEQ ID NO: 74891 - protein, 106 aa, Homo sapiens
RGKEQRKLARQRSRAWLKEGGGDEPLNFLDPKVAQRVLATQPGPGRGRKKDHGFKVSADGRLIIREEADGNKMEEEEGAKGGPNALVHSFTVFTYSFGDHLLRKRG

SEQ ID NO: 74892 - protein, 180 aa, Homo sapiens
MGNACWELYCLEHGIQPDGQMPSDKTIGGGDDSFTTFFCETGAGKHVPRAVFVDLEPTVIDEIRNGPYRQLFHPEQLITGKEDAANNYARGHYTIGKEIIDPVLDRIRKLSDQCTGLQGFLVFHSFGGGTGSGFTSLLMERLSVDYGKKSKLEFSIYPAPQVSTAVVEPYNSILTTHTTL

SEQ ID NO: 74893 - protein, 229 aa, Homo sapiens
MTFDLTKITKTSSSFEVRTWDPEGVIFYGDTNPKDDWFMLGLRDGRPEIQLHNHWAQLTVGAGPRLDDGRWHQVEVKMEGDSVLLEVDGEEVLRLRQVSGPLTSKRHPIMRIALGGLLFPASNLRLPLVPALDGCLRRDSWLDKQAEISASAPTSLRSCDVESNPGIFLPPGTQAEFNLRGEDSSTSFCLNGLWAQGQRLDVDQALNRSHEIWTHSCPQSPGNGTDASH

SEQ ID NO: 74894 - protein, 89 aa, Homo sapiens
MGSWLHSSHSRCGLCFRLSTMRFQNTVTRFLAQVGYLQPLVAVQVSFAPNNTGKEVTVECKIDGSANLKSQDDRDKFLGRVMFKITARA

SEQ ID NO: 74895 - protein, 92 aa, Homo sapiens
  MOD_RES (1)..(1): Any amino acid
XNDTKEDVFVHQTAIKKNNPRKYLRSVGDGETVEFDVVEGEKGAEAANVTGPDGVPVEGSRYAADRRRYRRGYYGRRRGPPRNISDVWFNRR

SEQ ID NO: 74896 - protein, 86 aa, Homo sapiens
MTEQMTLRGTLKGHNGWVTQIATTPQFPDMILSASRDELKQEVISTSSKAEPPQCTSLAWSADGQTLFAGYTDNLVRVWQVTIGTR

SEQ ID NO: 74897 - protein, 149 aa, Homo sapiens
  MOD_RES (1)..(1): Any amino acid
XTGEPSALEEQRGPLPLNKTLFLGYAFLLTMATTSDKLASRSKLPDGPTGSSEEEEAYCNHPSQSGLNALPSSPFAFYGHLLEQTHVEEFLEIPPFNKQYTESQLRAGAGYILEDFNEAQCNTAYQCLLIADQHCRTRKYFLCLASGIP

SEQ ID NO: 74898 - protein, 22 aa, Homo sapiens
MYILNASNPDTAFNSNPEVKET

SEQ ID NO: 74899 - protein, 108 aa, Homo sapiens
QKSDSECAEQLRQLARRITEDHVIQHGLVVDGTSLSLALREHEKLFMEVCRNCSAVLCCRMAPLQKAKVIRLIKISPEKPITLAVGDGANDESWVKKEDRLQETVTMQ

SEQ ID NO: 74900 - protein, 755 aa, Homo sapiens
MDEDGLELQQEPNSFFDATGADGTHMDGDQIVVEVQETVFVSDVVDSDITVHNFVPDDPDSVVIQDVIEDVVIEDVQCPDIMEEADVSETVIIPEQVLDSDVTEEVSLAHCTVPDDVLASDITSASMSMPEHVLTGDSIHVSDVGHVGHVGHVEHVVHDSVVEAEIVTDPLTTDVVSEEVLVADCASEAVIDANGIPVDQQDDDKGNCEDYLMISCGTVDIVESEPENDHGVELLDQNSSIRVPREKMVYMTVNDSQPEDEDLNVAEIADEVYMEVIVGEEDAAAAAAAAAVHEQQMDDNEIKTFMPIAWAAAYGNNSDGIENRNGTASALLHIDESAGLGRLAKQKPKKRRRPDSRQYQTAIIIGPDGHPLTVYPCMICGKKFKSRGFLKRHMKNHPEHLAKKKYRCTDCDYTTNKKISLHNHLESHKLTSKAEKAIECDECGKHFSHAGALFTHKMVHKEKGANKMHKCKFCEYETAEQGLLNRHLLAVHSKNFPHICVECGKGFRHPSELKKHMRIHTGEKPYQCQYCEYRSADSSNLKTHVKTKHSKEMPFKCDICLLTFSDTKEVQQHALIHQESKTHQCLHCDHKSSNSSDLKRHIISVHTKDYPHKCDMCDKGFHRPSELKKHVAAHKGKKMHQCRHCDFKIADPFVLSRHILSVHTKDLPFRCKRCRKGFRQQSELKKHMKTHSGRKVYQCEYCEYSTTDASGFKRHVISIHTKDYPHRCEYCKKGFRRPSEKNQHIMRHHKEVGLP

SEQ ID NO: 74901 - protein, 199 aa, Homo sapiens
MDPVPGTDSAPLAGLAWSSASAPPPRGFSAISCTVEGAPASFGKSFAQKSGYFLCLSSLGSLENPQENVVADIQIVVDKSPLPLGFSPVCDPMDSRTWAALPSGARRPRPRGQCPSPEVSAGTCRASLWMQPASQVRAASWSGQRQGWALGHPLCGGMTPSTRPPASMASQPWMGFPSHSTHDLRARAAAPWPSLLLGT

SEQ ID NO: 74902 - protein, 151 aa, Homo sapiens
RIQKELADITLDPPPNCSAGPKGDNIYEWRSTILGPPGSVYEGGVFFLDITFTPEYPFKPPKASVFFLGQVTFRTRIYHCNINSQGVICLDILKDNWSPALTISKVLLSICSLLTDCNPADPLVGSIATQYMTNRAEHDRMARQWTKRYAT

SEQ ID NO: 74903 - protein, 38 aa, Homo sapiens
MQGHFPAERREGRPRRGTRGQQQLLKTGRTRLGPVAPS

SEQ ID NO: 74904 - protein, 119 aa, Homo sapiens
  MOD_RES (1)..(1): Any amino acid
XVSTVHLISSTDIWWNRSLDTGLRLLLSWPGAAGTTACVCADTVYYYQMVPRLTAVLQTAMAAGSLGLLLPGSHYLGRFQDRLMWIMILECGYTYCSINIKGLELQETSCHTAEARRVD

SEQ ID NO: 74905 - protein, 454 aa, Homo sapiens
MATNIEQIFRSFVVSKFREIQQELSSGRNEGQLNGETNTPIEGNQAGDAAASARSLPNEEIVQKIEEVLSGVLDTELRYKPDKAQLLEIAKANAAAMCAKAGVPLPPNLKPAPPPTIEEKVAKKSGGATIEELTEKCKQIAQSKEDDDVIVNKPHVSDEEEEEPPFYHHPFKLSEPKPIFFNLNIAAAKPTPPKSQVTLTKEFPVSSGSQHRKKEADSVYGEWVPVEKNGEENKDDDNVFSSNLPSEPVDISTAMSERALAQKRLSENAFDLEAMSMLNRAQERIDAWAQLNSIPGQFTGSTGVQVLTQEQLANTGAQAWIKKDQFLRAAPVTGGMGAVLMRKMGWREGEGLGKNKEGNKEPILVDFKTDRKGLVAVGERAQKRSGNFSAAMKDLSGKHPVSALMEICNKRRWQPPEFLLVHDSGPDHRKHFLFRVLRNGALTRPNCMFFLNRY

SEQ ID NO: 74906 - protein, 203 aa, Homo sapiens
MITSAAGIISLLDEDEPQLKEFALHKLNAVVNDFWAEISESVDKIEVLYEDEGFRSRQFAALVASKVFYHLGAFEESLNYALGAGDLFNVNDNSEYVETIIGNYRLSAKCIDHYTKQCVENADLPEGEKKPIDQRLEGIVNKMFQRCLDDHKYKQAIGIALETRRLDVFEKTILESNDVPGMLAYSLKLCMSLMQNKQFRNKV

SEQ ID NO: 74907 - protein, 1046 aa, Homo sapiens
  MOD_RES (1)..(1): Any amino acid
XLDGPDHQEVLQILQENLDGEILDDEILAELAVPIELAQDLLLTLPQRLNDSALRDLINCHVYKKYGPEALAGNQAYPSLLEAQEDVLLLDAQAQAKDSEDAAKVEAKEPPSQSPNTPLQRLVEGYGPAGKILLDLEQALSSEGTQENKVKPLLLQLQRQPQPFLALMQSLDTPETNRTLHLTVLRILKQLVDFPEALLLPWHEAVDACMACLRSPNTDREVLQELIFFLHRLTSVSRDYAVVLNQLGARDAISKALEKHLGKLELAQELRDMVFKCEKHAHLYRKLITNILGGCIQMVLGQIEDHRRTHQPINIPFFDVFLRYLCQGSSVEVKEDKCWEKVEVSSNPHRASKLTDHNPKTYWESNGSAGSHYITLHMRRGILIRQLTLLVASEDSSYMPARVVVCGGDSTSSLHTELNSVNVMPSASRVILLENLTRFWPIIQIRIKRCQQGGIDTRIRGLEILGPKPTFWPVFREQLCRHTRLFYMVRAQAWSQDMAEDRRSLLHLSSRLNGALRQEQNFADRFLPDDEAAQALGKTCWEALVSPVVQNITSPDEDGISPLGWLLDQYLECQEAVFNPQSRGPAFFSRVRRLTHLLVHVEPCEAPPPVVATPRPKGRNRSHDWSSLATRGLPSSIMRNLTRCWRAVVEKQVNNFLTSSWRDDDFVPRYCEHFNILQNSSSELFGPRAAFLLALQNGCAGALLKLPFLKAAHVSEQFARHIDQQIQGSRIGGAQEMERLAQLQQCLQAVLIFSGLEIATTFEHYYQHYMADRLLGVVSSWLEGAVLEQIGPCFPNRLPQQMLQSLSTSKELQRQFHVYQLQQLDQELLKLEDTEKKIQVGLGASGKEHKSEKEEEAGAAAVVDVAEGEEEEEENEDLYYEGAMPEVSVLVLSRHSWPVASICHTLNPRTCLPSYLRGTLNRYSNFYNKSQSHPALERGSQRRLQWTWLGWAELQFGNQTLHVSTVQMWLLLYLNDLKAVSVESLLAFSGLSADMLNQAIGPLTSSRGPLDLHEQKDIPGDSRWQQGTQVEMGHCAAHPTSDVPAS

SEQ ID NO: 74908 - protein, 262 aa, Homo sapiens
MSPNSPLHCFYLPAVSVLDSADIEVTDSRLPHATIVDHRPQGKARSAPKPSQASGHFSVELVRGYAGFGLTLGGGRDVAGDTPLAVRGLLKDGPAQRCGRLEVGDLVLHINGESTQGLTHAQAVERIRAGGPQLHLVIRRPLETHPGKPRGVGEPRKGVDRSPDPGGPEVTGSRSSSTSLVQHPPSRTTLKKTRGSPEPSPEAAADGPTVSPPERRAEDPNDQIPGSPGPWLVPSEERLSRALGVRGAAQLAQEMAAGRRRH

SEQ ID NO: 74909 - protein, 115 aa, Homo sapiens
MYGRPQAEMEQEAGELSRWQAAHQAAQDNENSAPILNMSSSSGSSGVHTSWNQGLPSIQHFPHSAEMLGSPLVSVEAPGQNVNEGGPQFSMPLPERARTCSTDSREELQASGRDW

SEQ ID NO: 74910 - protein, 102 aa, Homo sapiens
MAALGGDGLRLLSVSRPERPPESAALGGLGPGLCCWVSVFSCLSLACSYVGSLYVWKSELPRDHPAVIKRRFTSVLVVSSLSPLCVLLWRELTGIQAHPCSP

SEQ ID NO: 74911 - protein, 325 aa, Homo sapiens
MQETPSSANGPSREGSRLPPAREGHPVYPQLRPGYIPIPVLHEGAENRQVHPFHVYPQPGMQRFRTEAAAAAPQRSQSPLRGMPETTQPDKQCGQVAAAAAAQPPASHGPERSQSPAASDCSSSSSSASLPSSGRSSLGSHQLPRGYISIPVIHEQNVTRPAAQPSFHQAQKTHYPAQQGEYQTHQPVYHKIQGDDWEPRPLRAASPFRSSVQGASSREGSPARSSTPLHSPSPIRVHTVVDRPQPMTHRETAPVSQPENKPESKPGPVGPELPPGHIPIQVIRKEVDSKPVSQKPPPPSEKVEVKVPPAPVPCPPPSPGPSAVP

SEQ ID NO: 74912 - protein, 12 aa, Homo sapiens
CHGVKGQKISRP

SEQ ID NO: 74913 - protein, 32 aa, Homo sapiens
NFTNLFGQPLVCLLSPTAYPKALQGTGSHHVA

SEQ ID NO: 74914 - protein, 77 aa, Homo sapiens
  MOD_RES (1)..(1): Any amino acid
XLGSVWSQRDRPGAAGASPTVRATVAQFNTVTGCVLGSVLGAPGLAAPQRAQRLEKWIRIAQGTAIYFQETFADFLR

SEQ ID NO: 74915 - protein, 278 aa, Homo sapiens
MAFMKKYLLPILGLFMAYYYYSANEEFRPEMLQGKKVIVTGASKGIGREMAYHLAKMGAHVVVTARSKETLQKVVSHCLELGAASAHYIAGTMEDMTFAEQFVAQAGKLMGGLDMLILNHITNTSLNLFHDDIHHVRKSMEVNFLSYVVLTVAALPMLKQSNGSIVVVSSLAGKVAYPMVAAYSASKFALDGFFSSIRKEYSVSRVNVSITLCVLGLIDTETAMKAVSGIVHMQAAPKEECALEIIKGGALRQEEVYYDSSLWTTLLIRNPCRKILEF

SEQ ID NO: 74916 - protein, 121 aa, Homo sapiens
MEETIKDPPTSAVLLDHCHFSQVIFNSVEKFYIPGGDVTCHYTFTQHFIPRRKDWIGIFRVGWKTTREYYTFMWVTLPIDLNNKSAKQQEVQFKAYYLPKDDEYYQFCYVDEDGVVRGASI

SEQ ID NO: 74917 - protein, 214 aa, Homo sapiens
MTGSSVFDYIHPGDHSEVLEQLGLRTPTPGPPTPPSVSSSSSSSSSLADTPEIEASLTKVPPSSLVQERSFFVRMKSTLTKRGLHVKASGYKVIHVTGRLRAHALGLVALGHTLPPAPLAELPLHGHMIVFRLSLGLTILACESRVSDHMDLGPSELVGRSCYQFVHGQDATRIRQSHVDSCRGLRVAAVCGHSGWEREEPRGAPCALGQPRAQ

SEQ ID NO: 74918 - protein, 120 aa, Homo sapiens
  MOD_RES (1)..(1): Any amino acid
XLLPLLLLLLPPPPRVGGFNLDAEAPAVLSGPPGSFFGFSVEFYRPGTDGVSVLVGAPKANTSQPGVLQGGAVYLCPWGASPTQCTPIEFDSKGMRSTVQLAHREGATERPRGHLLPLHR

SEQ ID NO: 74919 - protein, 34 aa, Homo sapiens
  MOD_RES (1)..(1): Any amino acid
XTQSPLQKLFARKMKILGDIHSGALFCSLILEPS

SEQ ID NO: 74920 - protein, 45 aa, Homo sapiens
MNFASVFAVLFNGCTGIMAGANMSGPCCRKTMGSSAPSACGPHWC

SEQ ID NO: 74921 - protein, 216 aa, Homo sapiens
MRPLQIVPSRLISQLYCGLKPPASTRNQICLKMARPSSSMADFRKFFAKAKHIVIISGAGVSAESGVPTFRGAGGYWRKWQAQDLATPLAFAHNPSRVWEFYHYRREVMGSKEPNAGHRAIAECETRLGKQGRRVVVITQNIDELHRKAGTKNLLEIHVLQNLELKMPASQLRNFPGVKRQAAGACCDLTSCGLEKTWILPFWRRLTESSPTVIYV

SEQ ID NO: 74922 - protein, 175 aa, Homo sapiens
  MOD_RES (1)..(1): Any amino acid
XGVARPAMAPDPVAAETAAQGPTPRYFTWDEVAQRSGCEERWLVIDRKVYNISEFTRRHPGGSRVISHYAGQDATKELTDEFRELRATVERMGLMKANHVFFLLYLLHILLLDGAAWLTLWVFGTSFLPFLLCAVLLSAVQAQAGWLQHDFGHLSVFSTSKWNHLLHHFVIGHLK

SEQ ID NO: 74923 - protein, 1136 aa, Homo sapiens
MFLMPTSSELNSGQNFLTQWMTNPSRAGVILNRGFPILEADKEKRAAVDISTSFPIKGTHFSDSFSFINEEDSLLEEQKLESNNPYKPQSDKSETHTAFPCIKKGPQVAACHSAPGHQEENKNDFIPDLASEFKEGAYKDPLFKKLEQLKEVQQKKQEQLKRQQLEQLQRLMEEQEKLLTMVSGQCTLPGLSLLPDDQSQKHRSPGNTTTGERATCCFPSYVYPDPTQEETYPSNILSHEQSNFCRTAHGDFVLTSKRASPNLFSEAQYQEAPVEKNNLKEENRNHPTGESILCWEKVTEQIQEANDKNLQKHDDSSEVANIEERPIKAAIGERKQTFEDYLEEQIQLEEQELKQKQLKEAEGPLPIKAKPKQPFLKRGEGLARFTNAKSKFQKGKESKLVTNQSTSEDQPLFKMDRQQLQRKTALKNKELCADNPILKKDSKARTKSGSVTLSQKPKMLKCSNRKSLSPSGLKIQTGKKCDGQFRDQIKFENKVTSNNKENVTECPKPCDTGCTGWNKTQGKDRLPLSTGPASRLAAKSPIRETMKESESSLDVSLQKKLETWEREKEKENLELDEFLFLEQAADEISFSSNSSFVLKILERDQQICKGHRMSSTPVKAVPQKTNPADPISHCNRSEDLDHTAREKESECEVAPKQLHSLSSADELREQPCKIRKAVQKSTSENQTEWNARDDEGVPNSDSSTDSEEQLDVTIKPSTEDRERGISSREDSPQVCDDKGPFKDTRTQEDKRRDVDLDLSDKDYSSDESIMESIKHKVSEPSRSSSLSLSKMDFDDERTWTDLEENLCNHDVVLGNESTYGTPQTCYPNNEIGILDKTIKRKIAPVKRGEDLSKSRRSRSPPTSELMMKFFPSLKPKPKSDSHLGNELKLNISQDQPPGDNARSQVLREKIIELETEIEKFKAENASLAKLRIERESALEKLRKEIADFEQQKAKELARIEEFKKEEMRKLQKERKVFEKYTTAARTFPDKKEREEIQTLKQQIADLREDLKRKETKWSSTHSRLRSQIQMLVRENTDLREEIKVMERFRLDAWKRAEAIESSLEVEKKDKLANTSVRFQNSQISSGTQVEKYKKNYLPMQGTAQPPHTPSSLLADHLPPLSSFRPFSRNIQLCYTF

SEQ ID NO: 74924 - protein, 41 aa, Homo sapiens
  MOD_RES (1)..(1): Any amino acid
XSTLLINQPQYAWLKELGLREENEGVYNGSWGGRGEDLAMH

SEQ ID NO: 74925 - protein, 231 aa, Homo sapiens
  MOD_RES (1)..(1): Any amino acid
XKTSRMCFLPCPTLMIISFYAGSEYMEFRKTMDIDHILDWQPPEVIQKYMPGGLCGYDRDGCPVWYDIIGPLDPKGLLFSVTKQDLLKTKMRDCERILHECDLQTERLGKKIETIVMIFDCEGLGLKHFWKPLVEVYQEFFGLLEENYPETLKFMLIVKATKLFPVGYNLMKPFLSEDTRRKIIVLGNNWKEGLLKLISPEELPAQFGGTLTDPDGNPKCLTKINYGGEIP

SEQ ID NO: 74926 - protein, 95 aa, Homo sapiens
MTSKLAVALLAAFLISAALCEGAVLPRSAKELRCQCIKTYSKPFHPKFIKELRVIESGPHCANTEIIVKLSDGRELCLDPKENWVQRVVEKFLKR

SEQ ID NO: 74927 - protein, 123 aa, Homo sapiens
MLMLFVFGVLLHEVSLSGQNEAPPNTHSIPGEPLYNYASIRLPEEHIPFFLHNNRHIATVCRKDSLCPYKKHLEKLKYCWGYEKSCKPEFRFGYPVCSYVDMGWTDTLESAEDIFWKQADFGY

SEQ ID NO: 74928 - protein, 1273 aa, Homo sapiens
MAMGDDKSFDDEESVDGNRPSSAASAFKVPAPKTSGNPANSARKPGSAGGPKVGGASKEGGAGAVDEDDFIKAFTDVPSIQIYSSRELEETLNKIREILSDDKHDWDQRANALKKIRSLLVAGAAQYDCFFQHLRLLDGALKLSAKDLRSQVVREACITVAHLSTVLGNKFDHGAEAIVPTLFNLVPNSAKVMATSGCAAIRFIIRHTHVPRLIPLITSNCTSKSVPVRRRSFEFLDLLLQEWQTHSLERHAAVLVETIKKGIHDADAEARVEARKTYMGLRNHFPGEAETLYNSLEPSYQKSLQTYLKSSGSVASLPQSDRSSSSSQESLNRPFSSKWSTANPSTVAGRVSAGSSKASSLPGSLQRSRSDIDVNAAAGAKAHHAAGQSVRSGRLGAGALNAGSYASLEDTSDKLDGTASEDGRVRAKLSAPLAGMGNAKADSRGRSRTKMVSQSQPGSRSGSPGRVLTTTALSTVSSGVQRVLVNSASAQKRSKIPRSQGCSREASPSRLSVARSSRIPRPSVSQGCSREASRESSRDTSPVRSFQPLGPGYGISQSSRLSSSVSAMRVLNTGSDVEEAVADALKKPARRRYESYGMHSDDDANSDASSACSERSYSSRNGSIPTYMRQTEDVAEVLNRCASSNWSERKEGLLGLQNLLKNQRTLSRVELKRLCEIFTRMFADPHGKRVFSMFLETLVDFIQVHKDDLQDWLFVLLTQLLKKMGADLLGSVQAKVQKALDVTRESFPNDLQFNILMRFTVDQTQTPSLKVKVAILKYIETLAKQMDPGDFINSSETRLAVSRVITWTTEPKSSDVRKAAQSVLISLFELNTPEFTMLLGALPKTFQDGATKLLHNHLRNTGNGTQSSMGSPLTRPTPRSPANWSSPLTSPTNTSQNTLSPSAFDYDTENMNSEDIYSSLRGVTEAIQNFSFRSQEDMNEPLKRDSKKDDGDSMCGGPGMSDPRAGGDATDSSQTALDNKASLLHSMPTHSSPRSRDYNPYNYSDSISPFNKSALKEAMFDDDADQFPDDLSLDHSDLVAELLKELSNHNERVEERKIALYELMKLTQEESFSVWDEHFKTILLLLLETLGDKEPTIRALALKVLREILRHQPARFKNYAELTVMKTLEAHKDPHKEVVRSAEEAASVLATSISPEQCIKVLCPIIQTADYPINLAAIKMQTKVIERVSKETLNLLLPEIMPGLIQGYDNSESSVRKACVFCLVAVHAVIGDELKPHLSQLTGSKMKLLNLYIKRAQTGSGGADPTTDVSGQS

SEQ ID NO: 74929 - protein, 110 aa, Homo sapiens
MEVLQCDGCDFRAPSYEDLKAHIQDVHTAFLQPTDVAEDNVNELRCGSVNASNQTEVEFSSIKDEFAIAEDLSGQNATSLGTGGYYGHSPGYYAFWSLRRGAKDQGEESG

SEQ ID NO: 74930 - protein, 141 aa, Homo sapiens
FGKSNKRKGFNEGLWEIENNPGVKFTGYQAIQQQSSSETEGEGGNTADASSEEEGDRVEEDGKGKRKNEKAGSKRKKSYTSKKSSKQSRKSPGDEDDKDCKEEENKSSSEGGDAGNDTRNTTSDLQKTSEGKMLWTIIEID

SEQ ID NO: 74931 - protein, 79 aa, Homo sapiens
MTELAGASSSCCHRPAGRGAMQSVLHHFQRLRGREGGSHFINTSSPRGEAKMSITSDEVNFLVYRYLQESGFSHSAFTF

SEQ ID NO: 74932 - protein, 43 aa, Homo sapiens
MAVEQMPKKDWYSILGADPSANISDLKQKYQKLILMALAGCFY

SEQ ID NO: 74933 - protein, 51 aa, Homo sapiens
  MOD_RES (1)..(1): Any amino acid
XPAPVEHQICPAVCVLMKLSFDEEHRHAMNELGINPQKRIECLMEFVSTLH

SEQ ID NO: 74934 - protein, 132 aa, Homo sapiens
PVQSLKGEDAEESLEEEEALDPLGIMRSKKPKKHPKVAVKAKPSPRLTIFDEEVDPDEGLFGPGRKLSPQDPSEDVSSVDPLKLFDDPDLGGAIPLGDSLLLPAACESGGPTPSLSHRDASKELFRQIQKEP

SEQ ID NO: 74935 - protein, 97 aa, Homo sapiens
MYSRHAQRIPPGKKMASRKEGTGSTATSSSSTAGAAGKGKGKGGSGDSAVKQVQIDGLVVLKIIKHYQEEGQGTEVVQGVLLGLVVEDRLEITNCFP

SEQ ID NO: 74936 - protein, 1008 aa, Homo sapiens
MKVVNLKQAILQAWKERWSDYQWAINMKKFFPKGATWDILNLADALLEQAMIGPSPNPLILSYLKYAISSQMVSYSSVLTAISKFDDFSRDLCVQALLDIMDMFCDRLSCHGKAEECIGLCRALLSALHWLLRCTAASAERLREGLEAGTPAAGEKQLAMCLQRLEKTLSSTKNRALLHIAKLEEASLHTSQGLGQGGTRANQPTASWTAIEHSLLKLGEILANLSNPQLRSQAEQCGTLIRSIPTMLSVHAEQMHKTGFPTVHAVILLEGTMNLTGETQSLVEQLTMVKRMQHIPTPLFVLEIWKACFVGLIESPEGTEELKWTAFTFLKIPQVLVKLKKYSHGDKDFTEDVNCAFEFLLKLTPLLDKADQRCNCDCTNFLLQECGKQGLLSEASVNNLMAKRKADREHAPQQKSGENANIQPNIQLILRAEPTVTNILKTMDADHSKSPEGLLGVLGHMLSGKSLDLLLAAAAATGKLKSFARKFINLNEFTTYGSEESTKPASVRALLFDISFLMLCHVAQTYGSEVILSESRTGAEVPFFETWMQTCMPEEGKILNPDHPCFRPDSTKVESLVALLNNSSEMKLVQMKWHEACLSISAAILEILNAWENGVLAFESIQKITDNIKGKVCSLAVCAVAWLVAHVRMLGLDEREKSLQMIRQLAGPLFSENTLQFYNERVVIMNSILERMCADVLQQTATQIKFPSTGVDTMPYWNLLPPKRPIKEVLTDIFAKVLEKGWVDSRSIHIFDTLLHMGGVYWFCNNLIKELLKETRKEHTLRAVELLYSIFCLDMQQVTLVLLGHILPGLLTDSSKWHSLMDPPGTALAKLAVWCALSSYSSHKGQASTRQKKRHREDIEDYISLFPLDDVQPSKLMRLLSSNEDDANILSSPTDRSMSSSLSASQLHTVNMRDPLNRVLANLFLLISSILGSRTAGPHTQFVQWFMEECVDCLEQGGRGSVLQFMPFTTVSELVKVSAMSSPKVVLAITDLSLPLGRQVAAKAIAAL

SEQ ID NO: 74937 - protein, 151 aa, Homo sapiens
MGSVTVRYFCYGCLFTSATWTVLLFVYFNFSEVTQPLKNVPVKGSGPHGPSPKKFYPRFTRGPSRVLEPQFKANKIDDVIDSRVEDPEEGHLKFSSELELRDLGYQKHAFNMLISDRLGYHRDVPDTRNAACKEKFYPPDLPAASVVICFY

SEQ ID NO: 74938 - protein, 17 aa, Homo sapiens
  MOD_RES (1)..(1): Any amino acid
XSFIRAGEGALKQGPSK

SEQ ID NO: 74939 - protein, 136 aa, Homo sapiens
LHASSPYFTFTSHCVIPKEWHKASARARSKTYKYSPEKLIYADKKQKRKEKKTADLSQAAFERQFLSSKLSQKNKVGERKGLVLGTRQQRPRSWAAGDSQQHRGPQPVGKRVMTAEVLGQHLASLQKVARQGHPWY

SEQ ID NO: 74940 - protein, 298 aa, Homo sapiens
MEEFLQRAKSKLNRSKRLEKVHVVIGPKSCDLDSLISTFTYAYFLDKVSPPGVLCLPVLNIPRTEFNYFTETRFILEELNISESFHIFRDEINLHQLNDEGKLSITLVGSSVLASEDKTLESAVVKVINPVEQSDANVEFRESSSSLVLKEILQEAPELITEQLAHRLRGSILFKWMTMESEKISEKQEEILSILEEKFPNLPPREDIINVLQETQFSAQGLSIEQTMLKDLKELSDGEIKVAISTVSMNLEMSRIELFPKGTWLVNRDAFQSRNSGSKCMPGTTVLQCTLRSLQRGK

SEQ ID NO: 74941 - protein, 297 aa, Homo sapiens
MLPKRSRRTVSKSIGPTCPFAGSCEVSKTQRRHCPACRLQKCLDAGMRKDMILSAEALALRRAKQAQRRAQQTPVQLSKEQEELIRTLLGAHTRHMGTMFEQFVQFRPPAHLFIHHQPLPTLAPVLPLVTHFADINTFMVLQVIKFTKDLPVFRSLPIEDQISLLKGAAVEICHIVLNTTFCLQTQNFLCGPLRYTIEDGARVGFQVEFLELLFHFHGTLRKLQLQEPEYVLLAAMALFSPDRPGVTQRDEIDQLQEEMALTLQSYIKGQQRRPRDRYGGTLRAWRPHQGRKGLVKH

SEQ ID NO: 74942 - protein, 272 aa, Homo sapiens
MWRVKKLSLSLSPSPQTGKPSMRTPLRELTLQPGALTNSGKRSPACSSLTPSLCKLGLQVRFAWTASRLGCLPREGSNNSSPVDFVNNKRTDLSSEHFSHSSKWLETCQHESDEQPLDPIPQISSTPKTSEEAVDPLGNYMVKTIVLVPSPLGQQQDMIFEARLDTMAETNSISLNGPLRTDDLVREEVAPCMGDRFSEVAAVSEKPIFQESPSHLLEESPPNPCSEQLHCSKESLSSRTEAVREDLVPSESNAFLPSSVLWLSPSTALAAD

SEQ ID NO: 74943 - protein, 99 aa, Homo sapiens
  MOD_RES (1)..(1): Any amino acid
XSSGPSPGPSVPRLRLSYRDRVRQLRAGATASQPDPPASLWHWGLPAHLCPHHSWPPWGACAPPGAWQCGKWPGAVPSRAQPSLCQHLHRRGAVHGSHC

SEQ ID NO: 74944 - protein, 65 aa, Homo sapiens
MGLELYLDLLSQPCRAVYIFAKKNDIPFELRIVDLIKARGCWLPSLRRPTQAGHMAAARGGSSGG

SEQ ID NO: 74945 - protein, 210 aa, Homo sapiens
  MOD_RES (1)..(1): Any amino acid
XVTPQTSQRGSLAAPLGYFQVLFKLEKEEQIHSVDIGNDGSAFVEVLVGSSAGGAGEQDYEVLLVTSSFMSPSESRSGSNPNRVRMFGPDKLVRAAAEKRWDRVKIVCSQPYSKDSPFGLSFVRFHSPPDKDEAEAPSQKVTVTKLGQFRVKEEDESANSLRPGALFFSRINKTSPVTASDPAGPSYAAATLQASSAASSASPVSRAIGS

SEQ ID NO: 74946 - protein, 93 aa, Homo sapiens
MATYSLANERLRALEDIEREIGAILQNAGTVILELSKEKTNERLLDRQAAAFTASVQHVEAELSAQIRYLTQVGVSGGFCERTPALGQSLRLG

SEQ ID NO: 74947 - protein, 404 aa, Homo sapiens
ILERVQQHIESKLLGSNSSRMYFTQTLLPGLAGPSGEMVKSTTSLTSSSTSGSSDKVYAHQMVRTDSREQKLDAFLQPLSKPLSSQPQAIVTEDKTDISSGRARQQDEEMLELPAPAEVAAKNQSLEGDTTKGTSEMSEKRGPTSSNPRKRHREDSDVEMVEDDSRKEMTAACTPRRRIINLTSVLSLQEEINEQGHEVLREMLHNHSFVGCVNPQWALAQHQTKLYLLNTTKLSEELFYQILIYDFANFGVLRLSEPAPLFDLAMLALDSPESGWTEEDGPKEGLAEYIVEFLKKKAEMLADYFSLEIDEVNWDEEKECFESLSKECAMFYSIRKQYISEESTLSGQQSEVPGSIPNSWKWTVEHIVYKALRSHILPPKHFTEDGNILQLANLPDLYKVFERC

SEQ ID NO: 74948 - protein, 72 aa, Homo sapiens
MELEELGIREECGVFGCIASGEWPTQLDVPHVITLGLVGLQHRGQESAGIVTSDGSSVPTFKSHKVCHHRKM

SEQ ID NO: 74949 - protein, 229 aa, Homo sapiens
  MOD_RES (1)..(1): Any amino acid
XKKERKSLPEEDVAEIQHAEEFLIKPESKVAKLDTSQWPLLLKNFDKLNVRTTHYTPLACGSNPLKREIGDYIRTGFINLDKPSNPSSHEVVAWIRRILRVEKTGHSGTLDPKVTGCLIVCIERATRLVKSQQSAGKEYVGIVRLHNAIEGGTQLSRALETLTGALFQRPPLIAAVKRQLRVRTIYESKMIEYDPERRLGAAFLLCVCILGIFWVSCEAGTYIRTLCVH

SEQ ID NO: 74950 - protein, 225 aa, Homo sapiens
  MOD_RES (1)..(1): Any amino acid
XIKEALLALGSLESWITAGEHAKEGECPPHKNPCKELCQGDELCPAEQKCCTTGCGRICRDIPKGRKRDCPRVIRKQSCLKRCITDETCPGVKKCCTLGCNKSCVVPISKQKLAEFGGECPADPLPCEELCDGDASCPQGHKCCSTGCGRTCLGDIEGGRGGDCPKVLVGLCIVGCVMDENCQAGEKCCKSGCGRFCVPPVLPPKLTMNPNWTVRSDSELEIPVP

SEQ ID NO: 74951 - protein, 209 aa, Homo sapiens
PSMGRKLSSPTTPRDMLLSPTLRPRRRCLESSVDDAGCPDLGKEPLVFQNRQFAHLMEEPLGSDPFSWKLPSLDYERKTKVDFDDFLPAIRKPQTPTSLAGSAKGGQDGSQRSSIHFETEEANRSFLSGIKTILKKSPEPKEDPAHLSDSSSSSGSIVSFKSADSIKSRPGIPRLAGDGGERTSPERREPGTGRKDDDVASIMKKYLQK

SEQ ID NO: 74952 - protein, 77 aa, Homo sapiens
MATAAQGPLSLLWGWLWSERFWLPENVSWADLEGPADGYGYPRGRHILSVFPLAAGIFFVRLLFERVQAILLPQPPK

SEQ ID NO: 74953 - protein, 106 aa, Homo sapiens
MKMHLQRALVVLALLNFATVSLSLSTCTTLDFGHIKKKRVEAIRGQILSKLRLTSPPEPTVMTHVPYQVLALYNSTRELLEEMHGEREEGCTQENTESEYYAKEIH

SEQ ID NO: 74954 - protein, 163 aa, Homo sapiens
FIDRDGEIFRYVLSFLRTSKLLLPDDFKDFSLLYEEARYYQLQPMVRELERWQQEQEQRRRSRACDCLVVRVTPDLGERIALSGEKALIEEVFPETGDVMCNSVNAGWNQDPTHVIRFPLNGYCRLNSVQVRAARCPLPAAPPASAEPSRGRVSWREARSLKR

SEQ ID NO: 74955 - protein, 52 aa, Homo sapiens
RNRIGSENPSDVFRFLVEERIQCCQTRKVRYTERVDYLMQLPVAMEAATNKG

SEQ ID NO: 74956 - protein, 518 aa, Homo sapiens
MASTEGANNMPKQVEVRMHDSHLGSEEPKHRHLGLRLCDKLGKNLLLTLTVFGVILGAVCGGLLRLASPIHPDVVMLIAFPGDILMRMLKMLILPLIISSLITGLSGLDAKASGRLGTRAMVYYMSTTIIAAVLGVILVLAIHPGNPKLKKQLGPGKKNDEVSSLDAFLDLIRNLFPENLVQACFQQIQTVTKKVLVAPPPDEEANATSAVVSLLNETVTEVPEETKMVIKKGLEFKDGMNVLGLIGFFIAFGIAMGKMGDQAKLMVDFFNILNEIVMKLVIMIMWYSPLGIACLICGKIIAIKDLEVVARQLGMYMVTVIIGLIIHGGIFLPLIYFVVTRKNPFSFFAGIFQAWITALGTASSAGTLPVTFRCLEENLGIDKRVTRFVLPVGATINMDGTALYEAVAAIFIAQMNGVVLDGGQIVTVRDRMRTSVNVVGDSFGAGIVYHLSKSELDTIDSQHRVHEDIEMTKTQSIYDDMKNHRESNSNQCVYAAHNSVIVDECKVHFPFMDIETCI

SEQ ID NO: 74957 - protein, 144 aa, Homo sapiens
  MOD_RES (1)..(1): Any amino acid
XVAMNLQECQVAVLLDLARSYQSLKRHMESVEHRSASQLSLEEPVEAAILLSLVGVKSILANQWPTLLQDNALRASVLWENLLAVGKPIGETVRLLQKMSGDEAVNQDEASQTLKDKLLLLQSSELLPTTLNLVLYGLPHQAIG

SEQ ID NO: 74958 - protein, 77 aa, Homo sapiens
MFQVGRSTESPIDFVVTDTISGSQNTDEAQITQSTISRFACRIVCDRNEPYTARIFAAGFDSSKNIFLGEKAAKWKN

SEQ ID NO: 74959 - protein, 132 aa, Homo sapiens
  MOD_RES (1)..(1): Any amino acid
XSRLRVVSTTCTLACRHLHIKEKGKPLMLNPRTNKGMAFTLQERQMLGLQGLLPPKIETQDIQALRFHRNLKKMTSPLEKYIYIMGIQERNEKLFYRILQDDIESLMPIVYTPTVGLACSQYGHIFRRPKHS

SEQ ID NO: 74960 - protein, 529 aa, Homo sapiens
MELMIQEKSFGNSLLLNSAMQPDLTVSRTYSGPICLQDPLDKELMTESSLFNPLSDIKVKVQSSFMVSLGVSERAEYHGKNHSRTFPHGNNHSFSTMHPRNKMPYIQNLSSLPTRTELRTTGVFGHLGGRLVMPNTGVSLLIPHGAIPEENSWEIYMSINQGEPSLQSDGSEVLLSPEVTCGPPDMIVTTPFALTIPHCADVSSEHWNIHLKKRTQQGKWEEVMSVEDESTSCYCLLDPFACHVLLDSFGTYALTGEPITDCAVKQLKVAVFGCMSCNSLDYNLRVYCVDNTPCAFQEVVSDERHQGGQLLEEPKLLHFKGNTFSLQISVLDIPPFLWRIKPFTACQEVPFSRVWCSNRQPLHCAFSLERYTPTTTQLSCKICIRQLKGHEQILQVQTSILESERETITFFAQEDSTFPAQTGPKAFKIPYSIRQRICATFDTPNAKGKDWQMLAQKNSINRNLSYFATQSSPSAVILNLWEARHQHDGDLDSLACALEEIGRTHTKLSNISESQLDEADFNYSRQNGL

SEQ ID NO: 74961 - protein, 209 aa, Homo sapiens [sequence omitted]

SEQ ID NO: 74962 - protein, 119 aa, Homo sapiens
MFYLDLTLFHRAEETGEESFSVQNGSIHQKDAVNDDDFEPYLSSQTNQSNSYPPMSDPYMPSYYAPSIGFPYSLGEAAWSTAGDQPMPYLTTYGQMSNGEHHYIPDGVFSQPGALGNTP

SEQ ID NO: 74963 - protein, 176 aa, Homo sapiens
MFIGGPNTRKDYHIEEGEEVFYQLEGDMVLRVLEQGKHRDVVIRQGEIFLLPARVPHSPQRFANTVGLVVERRRLETELDGLRYYVGDTMDVLFEKWFYCKDLGTQLAPIIQEFFSSEQYRTGKPIPDQLLKEPPFPLSTRSIMEPMSLDAWLDSHHRELQAGTPLSLFGDTYETQ

SEQ ID NO: 74964 - protein, 618 aa, Homo sapiens
MLENYRNLAFLGIAVSKPDLITCLEQGKEPWNMKRHEMVDEPPGMCPHFAQDLWPEQGMEDSFQKAILRRYGKYGHENLQLRKGCKSVDEYKVNKEGYNGLNQCFTTAQSKVFQCDKYLKVFYKFLNSNRPKIRHTEKKSFKCKKRVKLFCMLSHKTQHKSIYHREKSYKCKECGKTFNWSSTLTNHRKIYTEEKPYKCEEYNKSPKQLSTLTTHEIIHAGEKLYKCEECGEAFNRSSNLTTHKIIHTGEKPYKCEECGKAFIWSSTLTEHKKIHTRKKPYKCEECGKAFIWSSTLTRHKRMHTGEKPYKCEECGKAFSQSSTLTTHKIIHTGEKRYKCLECGKAFKQLSTLTTHKIIHVGEKLYKCEECGKGFNRSSNLTTHKIIHTGEKPYKCEECGKAFIWSSTLTKHKRIHTREKPYKCEECGKAFIWSSTLTRHKRMHTGEKPYKCEECGKSFSQSSTLTTHKIIHTGEKPYKCEECGKAFNWSSTLTKHKIIHTEEKPYKCEKCGKAFKQSSILTNHKRIHTGEKPYKCEECGKSFNRSSTFTKHKVIHTGVKPYKCEECGKAFFWSSTLTKHKRIHTGEQPYKWEKFGKAFNRSSHLTTDKITHWREILQV

SEQ ID NO: 74965 - protein, 1207 aa, Homo sapiens
MASVAWAVLKVLLLLPTQTWSPVGAGNPPDCDAPLASALPRSSFSSSSELSSSHGPGFSRLNRRDGAGGWTPLVSNKYQWLQIDLGERMEVTAVATQGGYGSSDWVTSYLLMFSDGGRNWKQYRREESIWGFPGNTNADSVVHYRLQPPFEARFLRFLPLAWNPRGRIGMRIEVYGCAYKSEVVYFDGQSALLYRLDKKPLKPIRDVISLKFKAMQSNGILLHREGQHGNHITLELIKGKLVFFLNSGNAKLPSTIAPVTLTLGSLLDDQHWHSVLIELLDTQVNFTVDKHTHHFQAKGDSSYLDLNFEISFGGIPTPGRSRAFRRKSFHGCLENLYYNGVDVTELAKKHKPQILMMGNVSFSCPQPQTVPVTFLSSRSYLALPGNSGEDKVSVTFQFRTWNRAGHLLFGELRRGSGSFVLFLKDGKLKLSLFQPGQSPRNVTAGAGLNDGQWHSVSFSAKWSHMNVVVDDDTAVQPLVAVLIDSGDTYYFGGCLDNSSGSGCKSPLGGFQGCLRLITIGDKAVDPILVQQGALGSFRDLQIDSCGITDRCLPSYCEHGGECSQSWDTFSCDCLGTGYTGETCHSSLYEQSCEAHKHRGNPSGLYYIDADGSGPLGPFLVYCNMTDAAWTVVQHGGPDAVTLRGAPSGHPRSAVSFAYAAGAGQLRSAVNLAERCEQRLALRCGTARRPDSRDGTPLSWWVGRTNETHTSWGGSLPDAQKCTCGLEGNCIDSQYYCNCDAGRNEWTSDTIVLSQKEHLPVTQIVMTDAGRPHSEAAYTLGPLLCRGDQSFWNSASFNTETSYLHFPAFHGELTADVCFFFKTTVSSGVFMENLGITDFIRIELRAPTEVTFSFDVGNGPCEVTVQSPTPFNDNQWHHVRAERNVKGASLQVDQLPQKMQPAPADGHVRLQLNSQLFIEISAYFATGSSMTYHFQEHYTLSENSSSLVSSLHRDVTLTREMITLSFRTTRTPSLLLYVSSFYEEYLSVILANNGSLQIRYKLDRHQNPDAFTFDFKNMADGQLHQVKINREEAVVMVEVNQSTKKQVILSSGTEFNAVKSLILGKVLEAAGADPDTRRAATSGFTGCLSAVRFGRAAPLKAALRPSGPSRVTVRGHVAPMARCAAGAASGSPARELAPRLAGGAGRSGPADEGEPLVNADRRDSAVIGGVIAVVIFILLCITAIAIRIYQQRKLRKENESKVSKKEEC

SEQ ID NO: 74966 - protein, 496 aa, Homo sapiens
MGKEKTHINIVVIGHVDSGKSTTTGHLIYKCGGIDKRTIEKFEKEAAEMGKGSFKYAWVLDKLKAERERGITIDISLWKFETTKYYITIIDAPGHRDFIKNMITGTSQADCAVLIVAAGVGEFEAGISKNGQTREHALLAYTLGVKQLIVGVNKMDSTEPAYSEKRYDEIVKEVSAYIKKIGYNPATVPFVPISGWHGDNMLEPSPNMPWFKGWKVERKEGNASGVSLLEALDTILPPTRPTDKPLRLPLQDVYKIGGIGTVPVGRVETGILRPGMVVTFAPVNITTEVKSVEMHHEALSEALPGDNVGFNVKNVSVKDIRRGNVCGDSKSDPPQEAAQFTSQVIILNHPGQISAGYSPVIDCHTAHIACKFAELKEKIDRRSGKKLEDNPKSLKSGDAAIVEMVPGKPMCVESFSQYPPLGRFAVRDMRQTVAVGVIKNVEKKSGGAGKALGQRLDARHQGPVEVLQEERRPRPRLPRPALATLSARFTNKLSDP

SEQ ID NO: 74967 - protein, 287 aa, Homo sapiens
  MOD_RES (1)..(1): Any amino acid
XGDLLELDPPANHTPCVVQVHTLTGAFLFSLESQTTIGYGFRYISEECPLAIVLLIAQLVLTTILEIFITGTFLAKIARPKKRAETIRFSQHAVVASHNGKPCLMIRVANMRKSLLIGCQVTGKLLQTHQTKEGENIRLNQVNVTFQVDTASDSPFLILPLTFYHVVDETSPLKDLPLRSGEGDFELVLILSGTVESTSATCQVRTSYLPEEILWGYEFTPAISLSASGKYIADFSLFDQVVKVASPSGLRDSTVRYGDPEKLKLEESLREQAEKEGSALSVRISNV

SEQ ID NO: 74968 - protein, 42 aa, Homo sapiens
MRRFLSRKKIRHHIYVLNQVDHFRFNRAALINVGFLESSNST

SEQ ID NO: 74969 - protein, 1424 aa, Homo sapiens
MIKTIYKTPGMIKDEQEIVQKRTFTKWINSHLAKRKPPMVVDDLFEDMKDGVKLLALLEVLSGQKLPCEQGRRMKRIHAVANIGTALKFLEGRKSMHRGSPIKLVNINSTDIADGRPSIVLGLMWTIILYFQIEELTSNLPQLQSLSSSASSVDSIVSSETPSPPSKRKVTTKIQGNAKKALLKWVQYTAGKQTGIEVKDFGKSWRSGVAFHSVIHAIRPELVDLETVKGRSNRENLEDAFTIAETELGIPRLLDPEDVDVDKPDEKSIMTYVAQFLKHYPDIHNASTDGQEDDREDRVIFKEMKVWIEQFERDLTRAQMVESNLQDKYQSFKHFRVQYEMKRKQIEHLIQPLHRDGKLSLDQALVKQSWDRVTSRLFDWHIQLDKSLPAPLGTIGAWLYRAEVALREEITVQQVHEETANTIQRKLEQHKDLLQNTDAHKRAFHEIYRTRSVNGIPVPPDQLEDMAERFHFVSSTSELHLMKMEFLELKYRLLSLLVLAESKLKSWIIKYGRRESVEQLLQNYVSFIENSKFFEQYEVTYQILKQTAEMYVKADGSVEEAENVMKFMNETTAQWRNLSVEVRSVRSMLEEVISNWDRYGNTVASLQAWLEDAEKMLNQSENAKKDFFRNLPHWIQQHTAMNDAGNFLIETCDEMVSRDLKQQLLLLNGRWRELFMEVKQYAQADEMDRMKKEYTDCVVTLSAFATEAHKKLSEPLEVSFMNVKLLIQDLEDIEQRVPVMDAQYKIITKTAHLITKESPQEEGKEMFATMSKLKEQLTKVKECYSPLLYESQQLLIPLEELEKQMTSFYDSLGKINEIITVLEREAQSSALFKQKHQELLACQENCKKTLTLIEKGSQSVQKFVTLSNVLKHFDQTRLQRQIADIHVAFQSMVKKTGDWKKHVETNSRLMKKFEESRAELEKVLRIAQEGLEEKGDPEELLRRHTEFFSQLDQRVLNAFLKACDELTDILPEQEQQGLQEAVRKLHKQWKDLQGEAPYHLLHLKIDVEKNRFLASVEECRTELDRETKLMPQEGSEKIIKEHRVFFSDKGPHHLCEKRLQLIEELCVKLPVRDPVRDTPGTCHVTLKELRAAIDSTYRKLMEDPDKWKDYTSRFSEFSSWISTNETQLKGIKGEAIDTANHGEVKRAVEEIRNGVTKRGETLSWLKSRLKVLTEVSSENEAQKQGDELAKLSSSFKALVTLLSEVEKMLSNFGDCVQYKEIVKNSLEELISGSKEVQEQAEKILDTENLFEAQQLLLHHQQKTKRISAKKRDVQQQIAQAQQGEGGLPDRGHEELRKLESTLDGLERSRERQERRIQVTLRKWERFETNKETVVRYLFQTGSSHERFLSFSSLESLSSELEQTKEFSKRTESIAVQAENLVKEASEIPLGPQNKQLLQQQAKSIKEQVKKLEDTLEEEYVIDKS

SEQ ID NO: 74970 - protein, 45 aa, Homo sapiens
MLDNYRNLVFLGIAVSKPDLITCLEQEKEPWNLKTHDMVAKPPGR

SEQ ID NO: 74971 - protein, 31 aa, Homo sapiens
PEHLPLQTQFKEREVGNLQHSTYYNPGTKTH

SEQ ID NO: 74972 - protein, 51 aa, Homo sapiens
MGDRVKGSKSRRPDLVVEVAHPKIIHESGAQILRHANLLVGSPSALSDQTT

SEQ ID NO: 74973 - protein, 154 aa, Homo sapiens
MALLILLLVPLLLPDSGSEAYSGCEFFKEYKDRDYMAEGLIFNWKQDYVDAPLSIPDFLTHSLNIDWSQYQCWDLVQQTQNYLKLLLSLVNSDDDSGLLVHCISGWDRTPLFISLLRLSLWADGLIHTSLKPTEILYLTVAYDWFLFGHMLVDR

SEQ ID NO: 74974 - protein, 165 aa, Homo sapiens
MVRPGLARMSLPRCWFRYPGWTGAEAGRGRAIVSRRLPSLNPWDAGERHGGLVRICASLGPHKRLPAGLPQCPHLYLAADPLDPQRRQEKSCAALGNDKRRQPDGQRQPQQQQQPHCRRGFQAPALPNPLRVLQGLGRVSMSLGWLERPPALSRAAGCRGAQVEE

SEQ ID NO: 74975 - protein, 114 aa, Homo sapiens
MATLKDQLIYNLLKEEQTPQNKITVVGVGAVGMACAISILMKDLADELALVDVIEDKLKGEMMDLQHGSLFLRTPKIVSGKDYNVTANSKLVIITAGARQQEGESRLNLVQRNV

SEQ ID NO: 74976 - protein, 431 aa, Homo sapiens
MSTLCPPPSPAVAKTEIALSGKSPLLAATFAYWDNILGPRVRHIWAPKTEQVLLSDGEITFLANHTLNGEILRNAESGAIDVKFFVLSEKGVIIVSLIFDGNWNGDRSTYGLSIILPQTELSFYLPLHRVCVDRLTHIIRKGRIWMHKERQENVQKIILEGTERMEDQGQSIIPMLTGEVIPVMELLSSMKSHSVPEEIDIADTVLNDDDIGDSCHEGFLLNAISSHLQTCGCSVVVGSSAEKVNKIVRTLCLFLTPAERKCSRLCEAESSFKYESGLFVQGLLKDSTGSFVLPFRQVMYAPYPTTHIDVDVNTVKQMPPCHEHIYNQRRYMRSELTAFWRATSEEDMAQDTIIYTDESFTPDLNIFQDVLHRDTLVKAFLDQVFQLKPGLSLRSTFLAQFLLVLHRKALTLIKYIEDDTREKSPLNLFGT

SEQ ID NO: 74977 - protein, 55 aa, Homo sapiens
MPAIMTMLADHAARQLLDFSQKLDINLLDNVVNCLYHGEGAQAGAQWLDHSSLQP

SEQ ID NO: 74978 - protein, 137 aa, Homo sapiens
MNLSSASSTEEKAVTTVLWGCELSQERRTWTFRPQLEGKQSCRLLLHTICLGEKAKEEMHRVEILPPANQEDKKMQPVTIASLQASVLPMVSMVGVQLSPPVTFQLRAGSGPVFLSGQERYEASDLTWEEEEEEEGE

SEQ ID NO: 74979 - protein, 397 aa, Homo sapiens
MFKLRNSSSPATGEDPEGSDILNYFESYLAVASTVPSMLCLVANFLLVNRVAVHIRVLASLTVILAIFMVITALVKVDTSSWTRGFFAVTIVCMVILSGASTVFSSSIYGMTGSFPMRNSQALISGGAMGGTVSAVASLVDLAASSDVRNSALAFFLTATVFLVLCMGLYLLLSRLEYARYYMRPVLAAHVFSGEEELPQDSLSAPSVASRFIDSHTPPLRPILKKTASLGFCVTYVFFITSLIYPAICTNIESLNKGSGSLWTTKFFIPLTTFLLYNFADLCGRQLTAWIQVPGPNSKALPGFVLLRTCLIPLFVLCNYQPRVHLKTVVFQSDVYPALLSSLLGLSNGYLSTLALLYGPKIVPRELAEATGVVMSFYVCLGLTLGSACSTLLVHLI

SEQ ID NO: 74980 - protein, 66 aa, Homo sapiens
MFQKAESDLDYIQYRLEYEIKTNHPDSASEKNPVTLLKELSVIKSRYQTLYARFKPVAVEQKESKS

SEQ ID NO: 74981 - protein, 231 aa, Homo sapiens
  MOD_RES (1)..(1): Any amino acid
XRTKAAGCAERRPLQPRTEAAAAPAGRAMPSEYTYVKLRSDCSRPSLQWYTRAQSKMRRPSLLLKDILKCTLLVFGVWILYILKLNYTTEECDMKKMHYVDPDHVKRAQKYAQQVLQKECRPKFAKTSMALLFEHRYSVDLLPFVQKAPKDSEAESKYDPPFGFRKFSSKVQTLLELLPEHDLPEHLKAKTCRRCVVIGSGGILHGLELGHTLNQFDVVIRVLISTGFKQW

SEQ ID NO: 74982 - protein, 366 aa, Homo sapiens
MAAKSQPNIPKAKSLDGVTNDRTASQGQWGRAWEVDWFSLASVIFLLLFAPFIVYYFIMACDQYSCALTGPVVDIVTGHARLSDIWAKTPPITRKAAQLYTLWVTFQVLLYTSLPDFCHKFLPGYVGGIQEGAVTPAGVVNKYQINGLQAWLLTHLLWFANAHLLSWFSPTIIFDNWIPLLWCANILGYAVSTFAMVKGYFFPTSARDCKFTGNFFYNYMMGIEFNPRIGKWFDFKLFFNGRPGIVAWTLINLSFAAKQRELHSHVTNAMVLVNVLQAIYVIDFFWNETWYLKTIDICHDHFGWYLGWGDCVWLPYLYTLQVRRWAELAQRGIWQTHAKLSPCRSVCPWGHQSCPLFLGRREGLVY

SEQ ID NO: 74983 - protein, 438 aa, Homo sapiens
MAGLTVRDPAVDRSLRSVFVGNIPYEATEEQLKDIFSEVGPVVSFRLVYDRETGKPKGYGFCEYQDQETALSAMRNLNGREFSGRALRVDNAASEKNKEELKSLGTGAPVIESPYGETISPEDAPESISKAVASLPPEQMFELMKQMKLCVQNSPQEARNMLLQNPQLAYALLQAQVVMRIVDPEIALKILHRQTNIPTLIAGNPQPVHGAGPGSGSNVSMNQQNPQAPQAQSLGGVPAPGQMPAAVTGPGPGSLAPGGGMQAQVGMPGSGPVSMERGQVPMQDPRAAMQRGSLPANVPTPRGLLGDAPNDPRGGTLLSVTGEVEPRGYLGPPHQGPPMHHVPGHESRGPPPHELRGGPLPEPRPLMAEPRGPMLDQRGPPLDGRGGRDPRGIDARGMEARAMEARGLDARGLEARPSHAGNRNARSKYTGWKPAWRL

SEQ ID NO: 74984 - protein, 1625 aa, Homo sapiens
MGQKSWIEKTFCKRECIFVIPSTKDSNRCCCGQFTNQHIPPLPSATPSKNEEENKQVETQPEKWSVAKHTQSYPTDSYGVLEFQGGGYSNKAMYIRVSYDTKPDSLLHLMVKDWQLELPKLLISVHGGLQNFEMQPKLKQVFGKGLIKAAMTTGAWIFTGGVSTGVISHVGDALKDHSSKSRGRVCAIGIAPWGIVENKEDLVGKDVTRVYQTMSNPLSKLSVLNNSHTHFILADNGTLGKYGAEVKLRRLLEKHISLQKINTRLGQGVPLVGLVVEGGPNVVSIVLEYLQEEPPIPVVICDGSGRASDILSFAHKYCEEGGIINESLREQLLVTIQKTFNYNKAQSHQLFAIIMECMKKKELVTVFRMGSEGQQDIEMAILTALLKGTNVSAPDQLSLALAWNRVDIARSQIFVFGPHWPPLGSLAPPTDSKATEKEKKPPMATTKGGRGKGKGKKKGKVKEEVEEETDPRKIELLNWVNALEQAMLDALVLDRVDFVKLLIENGVNMQHFLTIPRLEELYNTRLGPPNTLHLLVRDVKKSNLPPDYHISLIDIGLVLEYLMGGAYRCNYTRKNFRTLYNNLFGPKRPKALKLLGMEDDEPPAKGKKKKKKKKEEEIDIDVDDPAVSRFQYPFHELMVWAVLMKRQKMAVFLWQRGEESMAKALVACKLYKAMAHESSESDLVDDISQDLDNNSKDFGQLALELLDQSYKHDEQIAMKLLTYELKNWSNSTCLKLAVAAKHRDFIAHTCSQMLLTDMWMGRLRMRKNPGLKVIMGILLPPTILFLEFRTYDDFSYQTSKENEDGKEKEEENTDANADAGSRKGDEENEHKKQRSIPIGTKICEFYNAPIVKFWFYTISYLGYLLLFNYVILVRMDGWPSLQEWIVISYIVSLALEKIREILMSEPGKLSQKIKVWLQEYWNITDLVAISTFMIGAILRLQNQPYMGYGRVIYCVDIIFWYIRVLDIFGVNKYLGPYVMMIGKMMIDMLYFVVIMLVVLMSFGVARQAILHPEEKPSWKLARNIFYMPYWMIYGEVFADQIDLYAMEINPPCGENLYDEEGKRLPPCIPGAWLTPALMACYLLVANILLVNLLIAVFNNTFFEVKSISNQVWKFQRYQLIMTFHDRPVLPPPMIILSHIYIIIMRLSGRCRKKREGDQEERDRGLKLFLSDEELKRLHEFEEQCVQEHFREKEDEQQSSSDERIRVTSERVENMSMRLEEINERETFMKTSLQTVDLRLAQLEELSNRMVNALENLAGIDRSDLIQARSRASSECEATYLLRQSSINSADGYSLYRYHFNGEELLFEDTSLSTSPGTGVRKKTCSFRIKEEKDVKTHLVPECQNSLHLSLGTSTSATPDGSHLAVDDLKNAEESKLGPDIGISKEDDERQTDSKKEETISPSLNKTDVIHGQDKSDVQNTQLTVETTNIEGTISYPLEETKITRYFPDETINACKTMKSRSFVYSRGRKLVGGVNQDVEYSSITDQQLTTEWQCQVQKITRSHSTDIPYIVSEAAVQAEHKEQFADMQDEHHVAEAIPRIPRLSLTITDRNGMENLLSVKPDQTLGFPSLRSKSLHGHPRNVKSIQGKLDRSGHASSVSSLVIVSGMTAEEKKVKKEKASTETEC

SEQ ID NO: 74985 - protein, 213 aa, Homo sapiens
MYVYSWPPPKQGVWPPPPQLLTCTYLAAPLLLPPVQAHSFRSRPGSLHAGEWAAPREYHRFYGPAAPPEAAPPWWACPPAYATTLRRPCAAAGISGLSLQAPAAVAESWAPWPEGGSLQTELRWGRVERARGPPLQLPDFVRRELRRAYGTYPRADVRVTQRRGQFLLQATPRVLEPDHRVEWRVRRRPDSGDSSPAREAAERGRPRKSKGLS

SEQ ID NO: 74986 - protein, 1164 aa, Homo sapiens
MAERKGTAKVDFLKKIEKEIQQKWDTERVFEVNASNLEKQTSKGKYFVTFPYPYMNGRLHLGHTFSLSKCEFAVGYQRLKGKCCLFPFGLHCTGMPIKACADKLKREIELYGCPPDFPDEEEEEEETSVKTEDIIIKDKAKGKKSKAAAKAGSSKYQWGIMKSLGLSDEEIVKFSEAEHWLDYFPPLAIQDLKRMGLKVDWRRSFITTDVNPYYDSFVRWQFLTLRERNKIKFGKRYTIYSPKDGQPCMDHDRQTGEGVGPQEYTLLKLKVLEPYPSKLSGLKGKNIFLVAATLRPETMFGQTNCWVRPDMKYIGFETVNGDIFICTQKAARNMSYQGFTKDNGVVPVVKELMGEEILGASLSAPLTSYKVIYVLPMLTIKEDKGTGVVTSVPSDSPDDIAALRDLKKKQALRAKYGIRDDMVLPFEPVPVIEIPGFGNLSAVTICDELKIQSQNDREKLAEAKEKIYLKGFYEGIMLVDGFKGQKVQDGDALIYMEPEKQVMSRSSDECVVALCDQWYLDYGEENWKKQTSQCLKNLETFCEETRRNFEATLGWLQEHACSRTYGLGTHLPWDEQWLIESLSDSTIYMAFYTVAHLLQGGNLHGQAESPLGIRPQQMTKEVWDYVFFKEAPFPKTQIAKEKLDQLKQEFEFWYPVDLRVSGKDLVPNHLSYYLYNHVAMWPEQSDKWPTAVRANGHLLLNSEKMSKSTGNFLTLTQAIDKFSADGMRLALADAGDTVEDANFVEAMADAGILRLYTWVEWVKEMVANWDSLRSGPASTFNDRVFASELNAGIIKTDQNYEKMMFKEALKTGFFEFQAAKDKYRELAVEGMHRELVFRFIEVQTLLLAPFCPHLCEHIWTLLGKPDSIMNASWPVAGPVNEVLIHSSQYLMEVTHDLRLRLKNYMMPAKGKKTDKQPLQKPSHCTIYVAKNYPPWQHTTLSVLRKHFEANNGKLPDNKVIASELGSMPELKKYMKKVMPFVAMIKENLEKMGPRILDLQLEFDEKAVLMENIVYLTNSLELEHIEVKFASEAEDKIREDCCPGKPLNVFRIEPGVSVSLVNPQPSNGHFSTKIEIRQGDNCDSIIRRLMKMNRGIKDLSKVKLMRFDDPLLGPRRVPVLGKEYTEKTPISEHAVFNVDLMSKKIHLTENGIRVDIGDTIIYLVH

SEQ ID NO: 74987 - protein, 52 aa, Homo sapiens
MGLDLPDGGHLTHGYMSDVKRISATSIFFESMPYKLNGFSCLCVCPAQNWPH

SEQ ID NO: 74988 - protein, 57 aa, Homo sapiens
FREVGPKNSYIAYIEDHSGNGTFVNTELVGKGKRRPLNNNSEIALSLSRNKVVPVER

SEQ ID NO: 74989 - protein, 1130 aa, Homo sapiens
MTKLPDDPGRPNFEEGGPTSVGRKHEFIRSESENWRIFREEQNGEDEDGGWRLAGSRRDGERWRPHSPDGPRSAGWREHMERRRRFEFDFRDRDDERGYRRVRSGSGSIDDDRDSLPEWCLEDAEEEMGTFDSSGAFLSLKKVQKEPIPEEQEMDFRPVDEGEECSDSEGSHNEEAKEPDKTNKKEGEKTDRVGVEASEETPQTSSSSARPGTPSDHQSQEASQFERKDEPKTEQTEKAEEETRMENSLPAKVPSRGDEMVADVQQPLSQIPSDTASPLLILPPPVPNPSPTLRPVETPVVGAPGMGSVSTEPDDEEGLKHLEQQAEKMVAYLQDSALDDERLASKLQEHRAKGVSIPLMHEAMQKWYYKDPQGEIQGPFNNQEMAEWFQAGYFTMSLLVKRACDESFQPLGDIMKMWGRVPFSPGPAPPPHMGELDQERLTRQQELTALYQMQHLQYQQFLIQQQYAQVLAQQQKAALSSQQQQQLALLLQQFQTLKMRISDQNIIPSVTRSVSVPDTGSIWELQPTASQPTVWEGGSVWDLPLDTTTPGPALEQLQQLEKAKAAKLEQERREAEMRAKREEEERKRQEELRRQQEEILRRQQEEERKRREEEELARRKQEEALRRQREQEIALRRQREEEERQQQEEALRRLEERRREEEERRKQEELLRKQEEEAAKWAREEEEAQRRLEENRLRMEEEAARLRHEEEERKRKELEVQRQKELMRQRQQQQEALRRLQQQQQQQQLAQMKLPSSSTWGQQSNTTACQSQATLSLAEIQKLEEERERQLREEQRRQQRELMKALQQQQQQQQQKLSGWGNVSKPSGTTKSLLEIQQEEARQMQKQQQQQQQHQQPNRARNNTHSNLHTSIGNSVWGSINTGPPNQWASDLVSSIWSNADTKNSNMGFWDDAVKEVGPRNSTNKNKNNASLSKSVGVSNRQNKKVEEEEKLLKLFQGVNKAQDGFTQWCEQMLHALNTANNLDVPTFVSFLKEVESPYEVHDYIRAYLGDTSEAKEFAKQFLERRAKQKANQQRQQQQLPQQQQQQPPQQPPQQPQQQDSVWGMNHSTLHSVFQTNQSNNQQSNFEAVQSGKKKKKQKMVRADPSLLGFSVNASSERLNMGEIETLDDY

SEQ ID NO: 74990 - protein, 127 aa, Homo sapiens
MASSSPDSPCSCDCFVSVPPASAIPAVIFAKNSDRPRDEVQEVVFVPAGTHTPGSRLQCTYIEVEQVSKTHAVILSRPSWLWGAEMGANEHGVCIGNEAVWTKEPVGEGEALLGMDLLRPFHGTLKA

SEQ ID NO: 74991 - protein, 754 aa, Homo sapiens
MGRAGAAAVIPGLALLWAVGLGSAAPSPPRLRLSFQELQAWHGLQTFSLERTCCYQALLVDEERGRLFVGAENHVASLNLDNISKRAKKLAWPAPVEWREECNWAGKDIGTECMNFVKLLHAYNRTHLLACGTGAFHPTCAFVEVGHRAEEPVLRLDPGRIEDGKGKSPYDPRHRAASVLVGEELYSGVAADLMGRDFTIFRSLGQRPSLRTEPHDSRWLNEPKFVKVFWIPESENPDDDKIYFFFRETAVEAAPALGRLSVSRVGQICRNDVGGQRSLVNKWTTFLKARLVCSVPGVEGDTHFDQLRPFPAEDVFLLSSRDHRTPLLYAVFSTSSSIFQGSAVCVYSMNDVRRAFLGPFAHKEGPMHQWVSYQGRVPYPRPGMCPSKTFGTFSSTKDFPDDVIQFARNHPLMYNSVLPTGGRPLFLQVGANYTFTQIAADRVAAADGHYDVLFIGTDVGTVLKVISVPKGSRPSAEGLLLEELHVFEDSAAVTSMQISSKRHQLYVASRSAVAQIALHRCAAHGRVCTECCLARDPYCAWDGVACTRFQPSAKRRFRRQDVRNGDPSTLCSGDSSRPALLEHKVFGVEGSSAFLECEPRSLQARVEWTFQRAGVTAHTQVLAEERTERTARGLLLRRLRRRDSGVYLCAAVEQGFTQPLRRLSLHVLSATQAERLARAEEAAPAAPPGPKLWYRDFLQLVEPGGGGSANSLRMCRPQPALQSLPLESRRKGRNRRTHAPEPRAERGPRSATHW

SEQ ID NO: 74992 - protein, 781 aa, Homo sapiens
MPAMPSSGPGDTSSSAAEREEDRKDGEEQEEPRGKEERQEPSTTARKVGRPGRKRKHPPVESGDTPKDPAVISKSPSMAQDSGASELLPNGDLEKRSEPQPEEGSPAGGQKGGAPAEGEGAAETLPEASRAVENGCCTPKEGRGAPAEAGKEQKETNIESMKMEGSRGRLRGGLGWESSLRQRPMPRLTFQAGDPYYISKRKRDEWLARWKREAEKKAKVIAGMNAVEENQGPGESQKVEEASPPAVQQPTDPASPTVATTPEPVGSDAGDKNATKAGDDEPEYEDGRGFGIGELVWGKLRGFSWWPGRIVSWWMTGRSRAAEGTRWVMWFGDGKFSVVCVEKLMPLSSFCSAFHQATYNKQPMYRKAIYEVLQVASSRAGKLFPVCHDSDESDTAKAVEVQNKPMIEWALGGFQPSGPKGLEPPEEEKNPYKEVYTDMWVEPEAAAYAPPPPAKKPRKSTAEKPKVKEIIDERTRERLVYEVRQKCRNIEDICISCGSLNVTLEHPLFVGGMCQNCKNCFLECAYQYDDDGYQSYCTICCGGREVLMCGNNNCCRCFCVECVDLLVGPGAAQAAIKEDPWNCYMCGHKGTYGLLRRREDWPSRLQMFFANNHDQEFDPPKVYPPVPAEKRKPIRVLSLFDGIATGLLVLKDLGIQVDRYIASEVCEDSITVGMVRHQGKIMYVGDVRSVTQKHIQEWGPFDLVIGGSPCNDLSIVNPARKGLYEGTGRLFFEFYRLLHDARPKEGDDRPFFWLFENVVAMGVSDKRDISRFLEVQNSHLY

SEQ ID NO: 74993 - protein, 57 aa, Homo sapiens
LGPNLKAWLRVFSRNGVTSIWENSLQITTISSFVGAWLGALPIPLDWERPWQKQIAR

SEQ ID NO: 74994 - protein, 231 aa, Homo sapiens
MQPPLDLKQILPFPLEPAPTLGLFSNYSTMDPVQKAVLSHTFGGPLLKTKRPVISCNICQIRFNSQSQAEAHYKGNRHARRVKGIEAAKTRGREPGVREPGDPAPPGSTPTNGDGVAPRPVSMENGLGPAPGSPEKQPGSPSPPSIPETGQGVTKGEGGTPAPASLPGGSKEEEEKAKRLLYCALCKVAVNSLSQLEAHNKGTKHKTILEARSGLGPIKAYPRLGPPTPGE

SEQ ID NO: 74995 - protein, 369 aa, Homo sapiens
MYGNCYTFNDKNNSNLWMSSMPGINNGLSLMLRAEQNDFIPLLSTVTGARVMVHGQDEPAFMDDGGFNLRPGVETSISMRKETLDRLGGDYGDCTKNGSDVPVENLYPSKYTQQVCIHSCFQESMIKECGCAYIFYPRPQNVEYCDYRKHSSWGYCYYKLQVDFSSDHLGCFTKCRKPCSVTSYQLSAGYSRWPSVTSQEWVFQMLSRQNNYTVNNKRNGVAKVNIFFKELNYKTNSESPSVTMVTLLSNLGSQWSLWFGSSVLSVVEMAELVFDLLVIMFLMLLRRFRSRYWSPGRGGRGAQEVASTLASSPPSHFCPHPMSLSLSQPGPAPSPALTAPPPAYATLGPRPSPGGSAGASSSTCPLGGP

SEQ ID NO: 74996 - protein, 212 aa, Homo sapiens
LLTLFTVSTGEGWPQVLKHSVDATFENQGPSPGYRMEMSIFYVVYFVVFPFFFVNIFVALIIITFQEQGDKMMEEYSLEKNENNFINLSFLRLFRAARLIKLLRQGYTIRILLWTFVQSFKALPYVCLLIAMLFFIYAIIGMQVFGNIGIDVEDEDSDEDEFQITEHNNFRTFFQALMLLFRSATGEAWHNIMLSCLSGKPCDKNSGILTRE

SEQ ID NO: 74997 - protein, 714 aa, Homo sapiens
  MOD_RES (1)..(1): Any amino acid
XQLITGVAVFLGVSFFVLSLILGYSWLEAVIFLIGIIVANVPEGLLATVTVCLTLTAKRMARKNCLVKNLEAVETLGSTSTICSDKTGTLTQNRMTVAHMWFDNQIHEADTTEDQSGATFDKRSPTWTALSRIAGLCNRAVFKAGQENISVSKRDTAGDASESALLKCIELSCGSVRKMRDRNPKVAEIPFNSTNKYQLSIHEREDSPQSHVLVMKGAPERILDRCSTILVQGKEIPLDKEMQDAFQNAYMELGGLGERVLGFCQLNLPSGKFPRGFKFDTDELNFPTEKLCFVGLMSMIDPPRAAVPDAVGKCRSAGIKVIMVTGDHPITAKAIAKGVGIISEGNETVEDIAARLNIPMSQVNPREAKACVVHGSDLKDMTSEQLDEILKNHTEIVFARTSPQQKLIIVEGCQRQGAIVAVTGDGVNDSPALKKADIGIAMGISGSDVSKQAADMILLDDNFASIVTGVEEGRLIFDNLKKSIAYTLTSNIPEITPFLLFIIANIPLPLGTVTILCIDLGTDMVPAISLAYEAAESDIMKRQPRNSQTDKLVNERLISMAYGQIENGFLPSRLLGIRLDWDDRTMNDLEDSYGQEWTYEQRKVVEFTCHTAFFASIVVVQWADLIICKTRRNSVFQQGMKNKILIFGLLEETALAAFLSYCPGMGVALRMYPLKVTWWFCAFPYSLLIFIYDEVRKLILRRYPGGWVEKETYY

SEQ ID NO: 74998 - protein, 867 aa, Homo sapiens
MPHKIGFVVVSSSGHEDGFSARELMIHAPTVSGWRSPSYVSLCDNEKTGCKARELKSVYVDAVGQFLKLIFHQNHVNKYNIYNQVALVAINIIGDPADFSDESNTASREKLIDHYLGHNSEDPALEGTYARKSDYISPLDDLAFDMYQDPEVAQIIRKLDERKREAVQKERYDYAKKLKQAIADLQKVGERLGRYEVEKRCAVEKEDYDLAKEKKQQMEQYRAEVYEQLELHSLLDAELMRRPFDLPLQPLARSGSPCHQKPMPSLPQLEERGTENQFAEPFLQEKPSSYSLTISPQHSAVDPLLPATDPHPKINAESLPYDERPLPAIRKHYGEAVVEPEMSNADISDARRGGMLGEPEPLTEKALREASSAIDVLGETLVAEAYCKTWSYREDALLALSKKLMEMPVGTPKEDLKNTLRASVFLVRRAIKDIVTSVFQASLKLLKMIITQYIPKHKLSKLETAHCVERTIPVLLTRTGDSSARLRVTAANFIQEMALFKEVKSLQIIPSYLVQPLKANSSVHLAMSQMGLLARLLKDLGTGSSGFTIDNVMKFSVSALEHRVYEVRETAVRIILDMYRQHQASILEYLPPDDSNTRRNILYKTIFEGFAKIDGRATDAEMRARRKAATEEAEKQKKEEIKALQGQLAALKEIQAEVQEKESDAVKPKNQDIQGGKAAPAEALGIPDEHYLDNLCIFCGERSESFTEEGLDLHYWKHCLMLTRCDHCKQVVEISSLTEHLLTECDKKDGFGKCYRCSEAVFKEELPRHIKHKDCNPAKPEKLANRCPLCHENFSPGEEAWKAHLMGPAGCTMNLRKTHILQKAPALQPGKSSAVAASGPLGSKAGSKIPTPKGGLSKSSSRTYAKR

SEQ ID NO: 74999 - protein, 230 aa, Homo sapiens
MWLKVGGLLRGTGGQLGQTVGWPCGALGPGPHRWGPCGGSWAQKFYQDGPGRGLGEEDIRRAREARPRKTPRPQLSDRSRERKVPASRISRLANFGGLAVGLGLGVLAEMAKKSMPGGRLQSEGGSGLDSSPFLSEANAERIVQTLCTVRGAALKVGQMLSIQDNSFISPQLQHIFERVRQSADFMPRWQMLRVLEEELGRDWQAKVASLEEVPFAAASIGQVHQGLLRD

SEQ ID NO: 75000 - protein, 98 aa, Homo sapiens
MASVVGIFSHSSVSVPVKDKKLLEVKLGELPSWILMRDFSPSGIFGAFQRGYYRYYNKYINVKKGSISGITMVLACYVLFSYSFSYKHLKHERLRKYH

SEQ ID NO: 75001 - protein, 121 aa, Homo sapiens
MSATAATAPPAAPAGEGGPPAPPPNLTSNRRLQQTQAQVDEVVDIMRVNVDKVLERDQKLSELDDRADALQAGASQFETSAAKLKRKYWWKNLKMMIILGVICAIILIIIIGTGCDRTSQP

SEQ ID NO: 75002 - protein, 701 aa, Homo sapiens
  MOD_RES (1)..(1): Any amino acid
XLLSYKIPIKYLRVFHPYHFELVKPTESGKADEATAKTQLYATVVRKSSFIPRYIGCNHMALEIFLRGVNEPLANNPNPIVVIARVVPNYKEFKVSQANRDLASVGLPITPLSFPIPSMMNFDVPRVSQNGCPQLSKPGGPPEQPLWNQSFLFQGRDGATSFSEDTALVLEYYSSTSMKGSQPWTLNQPLGISVLPLKSRLYQKMLTGKGLDGLHVERLPIMDTSLKTINDEAPTVALSFQLLSSERPENFLTPNNSKALPTLDPKILDKKLRTIQESWSKDTVSSTMDLSTSTPREAEEEPLVPEMSHDTEMNNYRRAMQKMAEDILSLRRQASILEGENRILRSRLAQQEEEEGQGKASEAQNTVSMKQKLLLSELDMKKLRDRVQHLQNELIRKNDREKELLLLYQAQQPQAALLKQYQGKLQKMKALEETVRHQEKVIEKMERVLEDRLQDRSKPPPLNRQQGKPYTGFPMLSASGLPLGSMGENLPVELYSVLLAENAKLRTELDKNRHQQAPIILQQQALPVDPGELGAGGDLTERLQETHGPGHSECTETLPAQDLLSGTSDKFNLLAKLEHAQSRILSLESQLEDSARRWGREKQDLATRLQEQEKGFRHPSNSIIIEQPPYSLPPAPGASIFGKPRATVDPGGWREEAFQSRGQGDGPLPDPEKKQGHQRPALLGNTREACPFHLPQNIYHV

SEQ ID NO: 75003 - protein, 288 aa, Homo sapiens
MAELYRVLEAGKIGIFESPTGTGKSLSLICGALSWLRDFEQKKREEEARLLETGTGPLHDEKDESLCLSSSCEGAAGTPRPAGEPAWVTQFVQKKEERDLVDRLKAEQARRKQREERLQQLQHRVQLKYAAKRLRQEEEERENLLRLSREMLETGPEAERLEQLESGEEELVLAEYESDEEKKVASRVDEDEDDLEEEHITKIYYCSRTHSQLAQFVHEVKKSPFGKDVRLVSLGSRQNLCVNEDVKSLGSVQLINDRCVDMQRSRHVAVLSVFSLCACATLREEERS

SEQ ID NO: 75004 - protein, 386 aa, Homo sapiens
MNCCIGLGEKARGSHRASYPSLSALFTEASILGFGSFAVKAQWTEDCRKSTYPPSGPTYRGAVPWYTINLDLPPYKRWHELMLDKAPVLKVIVNSLKNMINTFVPSGKIMQVVDEKLPGLLGNFPGPFEEEMKGIAAVTDIPLGHLIHGRNMDFGVFLGWNINNDTWVITEQLKPLTVNLDFQRNNKTVFKASSFAGYVGMLTGFKPGLFSLTLNERFSINGGYLGILEWILGKKDVMWIGFLTRTVLENSTSYEEAKNLLTKTKILAPAYFILGGNQSGEGCVITRDRKESLDVYELDAKQGRWYVVQTNYDRWKHPFFLDDRRTPAKMCLNRTSQENISFETMYDVLSTKPVLNKLTVYTTLIDVTKGQFETYLRDCPDPCIGW

SEQ ID NO: 75005 - protein, 816 aa, Homo sapiens
MNNSNGNWKSSVRSTNNWNYSGPGDKFQPGRNRNSNCQMEDMTMLWNKKSNKSNKYSHDRYNWQRQENDKLGTVATYRGPSEGFTSDKFPSEGLLDFNFEQLESQTTKQADTATSKVSGKNGSAAREKPRRWTPYPSQKTLDLQSGLKDITGNKSEMIEKPLFDFSLITTGIQEPQTDETRNSPTQKTQKEIHTGSLNHKASSDSAASFEVVRQCPTAEKPEQEHTPNKMPSLKSPLLPCPATKSLSQKQDPKNISKNTKTNFFSPGEHSNPSNKPTVEDNHGPYISKLRSSCPHVLKGNKSTFGSQKQSGDNLNDTLRKAKEVLQCHESLQNPLLSTSKSTRNYAKASRNVEESEKGSLKIEFQVHALEDESDGETSDTEKHGTKIGTLGSATTELLSGSTRTADEKEEDDRILKTSRELSTSPCNPIVRQKESELQMTSAASPHPGLLLDLKTSLEDAQVDDSIKSHVSYETEGFESASLDAELQKSDISQPSGPLLPELSKLGFPASLQRDLTRHISLKSKTGVHLPEPNLNSARRIRNISGHRKSETEKESGLKPTLRQILNASRRNVNWEQVIQQVTKKKQELGKGLPRFGIEMVPLVQNEQEALDLDGEPDLSSLEGFQWEGVSISSSPGLARKRSLSESSVIMDRAPSVYSFFSEEGTGKENEPQQMVSPSNSLRAGQSQKATMHLKQEVTPRAASLRTGERAENVATQRRHSAQLSSDHIIPLMHLAKDLNSQERSIPPSENQNSQESNGEGNCLSSSASSALAISSLADAATDSSCTSGAEQNDGQSIRKKRRATGDGSSPELPSLE

SEQ ID NO: 75006 - protein, 157 aa, Homo sapiens
IPGYGLEGEMSIVELRERLALLKENQRRKEEEKRDQIIQGKHTKSQELQNMVEQISLCRAAMGRSAALRWEEKKALAAAPAAPSQDERVQQLRRRISERAAERSRQAALLHVSAPRTARPKPRAQLEAQHWLELERSRERRLQALQQGGSGPGPARR

SEQ ID NO: 75007 - protein, 145 aa, Homo sapiens
MLSVQPKGKQKGCAGCNRKIKDRYLLKALDKYWHEDCLKCACCDCRLGEVGSTLYTKANLILCRRDYLRLFGTTGNCAACSKLIPAFEMVMRARDNVYHLDCFACQLCNQRFCVGDKFFLKNNMILCQMDYEEGQLNGTFESQVQ

SEQ ID NO: 75008 - protein, 395 aa, Homo sapiens
MNHKSKKRIREAKRSARPELKDSLDWTRHNYYESFSLSPAAVADNVERADALQLSVEEFVERYERPYKPVVLLNAQEGWSAQEKWTLERLKRKYRNQKFKCGEDNDGYSVKMKMKYYIEYMESTRDDSPLYIFDSSYGEHPKRRKLLEDYKVPKFFTDDLFQYAGEKRRPPYRWFVMGPPRSGTGIHIDPLGTSAWNALVQGHKRWCLFPTSTPRELIKVTRDEGGNQQDEAITWFNVIYPRTQLPTWPPEFKPLEILQKPGETVFVPGGWWHVVLNLDTTIAITQNFASSTNFPVVWHKTVRGRPKLSRKWYSASLDPRAMGQCTAGRRGGRAAWWETGTPPPRTTVSAKSAAPPGDPARLLSVWKDTLAARAGPGEGGLSSPADKGRPDRAQE

SEQ ID NO: 75009 - protein, 365 aa, Homo sapiens
MMTVILKTLLGQIQGLSGNPHSTTSRMYFLCFCTSLLRFKVHWVSRLIRKLYMASPSNDSTAPVSEFLLICFPNFQSWQHWLSLPLSLLFLLAMGANTTLLITIQLEASLHQPLYYLLSLLSLLDIVLCLTVIPKVLAIFWFDLRSISFPACFLQMFIMNSFLTMESCTFMVMAYDRYVAICHPLRYPSIITDQFVARAVVFVIARNAFVSLPVPMLSARLRYCAGNIIKNCICSNLSVSKLSCDDITFNQLYQFVAGWTLLGSDLILIVISYSFILKVVLRIKAEGAVAKALSTCGSHFILILFFSTVLLVLVITNLARKRIPPDVPILLNILHHLIPPALNPIVYGVRTKEIKQGIQNLLKRL

SEQ ID NO: 75010 - protein, 141 aa, Homo sapiens
MSHRMEGVGQLPASYRHNRPLLSGVSDAEARQPGKSPPFSMNWVVGSADLEIINATTGRRSCGGPSRLCKHVLSARWARLYGRLSTRTPSPGDTPSMYCEAKLGAHTYQSVKQQLFKAFQKAGLGTWVRKPPEQQQFLLTL

SEQ ID NO: 75011 - protein, 1879 aa, Homo sapiens
MMNEDAAQKSDSGEKFNGSSQRRKRPKKSDSNASFLRAARAGNLDKVVEYLKGGIDINTCNQNGLNALHLAAKEGHVGLVQELLGRGSSVDSATKKGNTALHIASLAGQAEVVKVLVKEGANINAQSQNGFTPLYMAAQENHIDVVKYLLENGANQSTATEDGFTPLAVALQQGHNQAVAILLENDTKGKVRLPALHIAARKDDTKSAALLLQNDHNADVQSKMMVNRTTESGFTPLHIAAHYGNVNVATLLLNRGAAVDFTARNGITPLHVASKRGNTNMVKLLLDRGGQIDAKTRDGLTPLHCAARSGHDQVVELLLERGAPLLARTKNGLSPLHMAAQGDHVECVKHLLQHKAPVDDVTLDYLTALHVAAHCGHYRVTKLLLDKRANPNARALNGFTPLHIACKKNRIKVMELLVKYGASIQAITESGLTPIHVAAFMGHLNIVLLLLQNGASPDVTNIRGETALHMAARAGQVEVVRCLLRNGALVDARAREEQTPLHIASRLGKTEIVQLLLQHMAHPDAATTNGYTPLHISAREGQVDVASVLLEAGAAHSLATKKGFTPLHVAAKYGSLDVAKLLLQRRAAADSAGKNGYTPLHIAAKKNQMQIASTLLNYGAETNIVTKQGVTPLHLASQEGHTDMVTLLLDKGANIHMSTKSGLTSLHLAAQEDKVNVADILTKHGADQDAHTKLGYTPLIVACHYGNVKMVNFLLKQGANVNAKTKNGYTPLHQAAQQGHTHIINVLLQHGAKPNATTANGNTALAIAKRLGYISVVDTLKVVTEEVTTTTTTITEKHKLNVPETMTEVLDVSDEEGDDTMTGDGGEYLRPEDLKELGDDSLPSSQFLDGMNYLRYSLEGGRSDSLRSFSSDRSHTLSHASYLRDSAVMDDSVVIPSHQVSTLAKEAERNSYRLSWGTENLDNVALSSSPIHSGRASPCLERDNSSFLVSFMVDARGGAMRGCRHNGLRIIIPPRKCTAPTRVTCRLVKRHRLATMPPMVEGEGLASRLIEVGPSGAQFLGPVIVEIPHFAALRGKERELVVLRSENGDSWKEHFCDYTEDELNEILNGMDEVLDSPEDLEKKRICRIITRDFPQYFAVVSRIKQDSNLIGPEGGVLSSTVVPQVQAVFPEGALTKRIRVGLQAQPMHSELVKKILGNKATFSPIVTLEPRRRKFHKPITMTIPVPKASSDVMLNGFGGDAPTLRLLCSITGGTTPAQWEDITGTTPLTFVNECVSFTTNVSARFWLIDCRQIQESVTFASQVYREIICVPYMAKFVVFAKSHDPIEARLRCFCMTDDKVDKTLEQQENFAEVARSRDVEVLEGKPIYVDCFGNLVPLTKSGQHHIFSFFAFKENRLPLFVKVRDTTQEPCGRLSFMKEPKSTRGLVHQAICNLNITLPIYTKESESDQEQEEEIDMTSEKNPQDEQERIEERLAYIADHLGFSWTELARELDFTEEQIHQIRIENPNSLQDQSHALLKYWLERDGKHATDTNLVECLTKINRMDIVHLMETNTEPLQERISHSYAEIEQTITLDHSEGFSVLQEELCTAQHKQKEEQAVSKESETCDHPPIVSEEDISVGYSTFQDGVPKTEGDSSATALFPQTHKEQVQQDFSGKMQDLPEESSLEYQQEYFVTTPGTETSETQKAMIVPSSPSKTPEEVSTPAEEEKLYLQTPTSSERGGSPIIQEPEEPSEHREESSPRKTSLVIVESADNQPETCERLDEDAAFEKGDDMPEIPPETVTEEEYIDEHGHTVVKKVTRKIIRRYVSSEGTEKEEIMVQGMPQEPVNIEEGDGYSKVIKRVVLKSDTEQSEVTLCEPSILSSTSQFQAEPVEGRRVSKVVKTTVVLGERMEKHLGDSSLATDLPSAKDDFEEDNNE

SEQ ID NO: 75012 - protein, 99 aa, Homo sapiens
MAGASVKVAVRVRPFNSREMSRDSKCIIQMSGSTTTIVNPKQPKETPKSFSFDYSYWSHTSPEDINYASQKQVYRDIGEEMLQHAFEGYNVCIFAYGQT

SEQ ID NO: 75013 - protein, 80 aa, Homo sapiens
SNLGHPESPPRKRLKSKGSDKDFVIVRRPKLNRENFPGVSWDSLPDELLLGIFSCLCLPELLKVSGVCKRWYRLASLYFS

SEQ ID NO: 75014 - protein, 131 aa, Homo sapiens
MADNLQATFGESLLSDMLDDFPDTLPSPEALKFKILVKNKKIGTLKETHERKGSDKRGDNQDKETGVKKLPGVMLFKKKKTRKLKIALALSDLVIYTKAEKFKSFQHSRLYQQFNENNSIGETQARKLSKL

SEQ ID NO: 75015 - protein, 257 aa, Homo sapiens
MTVVGNPRSWSCQWLPILILLLGTGHGPGVEGVTHYKAGDPVILYVNKVGPYHNPQETYHYYQLPVCCPEKIRHKSLSLGEVLDGDRMAESLYEIRFRENVEKRILCHMQLSSAQVEQLRQAIEELYYFEFVVDDLPIRGFVGYMEESGFLPHSHKIGLWTHLDFHLEFHGDRIIFANVSVRDVKPHSLDGLRPDEFLGLTHTYSVRWSETSVERRSDRRRGDDGGFFPRTLEIHWLSIINSMVLVFLLVGFVAVIL

SEQ ID NO: 75016 - protein, 654 aa, Homo sapiens
MVVSEVDIAKADPAAASHPLLLNGDATVAQKNPGSVAENNLCSQYEEKVRPCIDLIDSLRALGVEQDLALPAIAVIGDQSSGKSSVLEALSGVALPRGSGIVTRCPLVLKLKKLVNEDKWRGKVSYQDYEIEISDASEVEKEINKAQNAIAGEGMGISHELITLEISSRDVPDLTLIDLPGITRVAVGNQPADIGYKIKTLIKKYIQRQETISLVVVPSNVDIATTEALSMAQEVDPEGDRTIGILTKPDLVDKGTEDKVVDVVRNLVFHLKKGYMIVKCRGQQEIQDQLSLSEALQREKIFFENHPYFRDLLEEGKATVPCLAEKLTSELITHICKSLPLLENQIKETHQRITEELQKYGVDIPEDENEKMFFLIDKVNAFNQDITALMQGEETVGEEDIRLFTRLRHEFHKWSTIIENNFQEGHKILSRKIQKFENQYRGRELPGFVNYRTFETIVKQQIKALEEPAVDMLHTVTDVSIKNFEEFFNLHRTAKSKIEDIRAEQEREGEKLIRLHFQMEQIVYCQDQVYRGALQKVREKELEEEKKKKSWDFGAFQSSSATDSSMEEIFQHLMAYHQEASKRISSHIPLIIQFFMLQTYGQQLQKAMLQLLQDKDTYSWLLKERSDTSDKRKFLKERLARLTQARRRLAQFPG

SEQ ID NO: 75017 - protein, 93 aa, Homo sapiens
MIRLGGWCARRLCSAAVPAGRRGAAGGLGLAGGRALRVLVDMDGVLADFEGGFLRKFRARFPDQPFIALEDRRGFWVSEQYGRLRPGLSSWPC

SEQ ID NO: 75018 - protein, 113 aa, Homo sapiens
MTEGRHCQVHLLDDRRLELLVQPKLLARELLDLVASHFNLKEKEYFGITFIDDTGQQNWLQLDHRVLDHDLPKKPGPTILHFAVRFYIESISFLKDKTTVELFFLNAKACVHK

SEQ ID NO: 75019 - protein, 176 aa, Homo sapiens
  MOD_RES (1)..(1): Any amino acid
XQPAGLRLFTVQIPHKRLRQPPPCYLTAWDGSNFLPLRTKSCGHEVVSCLDVSESGTFLGLGTVTGSVAIYIAFSLQCLYYVREAHGIVVTDVAFLPEKGRGPELLGSHETALFSVAVDSRCQLHLLPSRECSCVAPAPAVCRAYYCDHPAAPECLSRFPLASLLPGNQEPGHCHL

SEQ ID NO: 75020 - protein, 260 aa, Homo sapiens
MALQGISVVELSGLAPGPFCAMVLADFGARVVRVDRPGSRYDVSRLGRGKRSLVLDLKQPRGAAVLRRLCKRSDVLLEPFRRGVMEKLQLGPEILQRENPRLIYARLSGFGQSGSFCRLAGHDINYLALSGVLSKIGRSGENPYAPLNLLADFAGGGLMCALGIIMALFDRTRTGKGQVIDANMVEGTAYLSSFLWKTQKLSLWEAPRGQNMLDGGAPFYTTYRTADGEFMAVGAIEPQFYELLIKGCWGMLQFPSQKTK

SEQ ID NO: 75021 - protein, 256 aa, Homo sapiens
MEEEGKKGKKPGIVSPFKRVFLKGEKSRDKKAHEKVTERRPLHTVVLSLPERVEPDRLLSDYIEKEVKYLGQLTSIPGYLNPSSRTEILHFIDNAKRAHQLPGHLTQEHDAVLSLSAYNVKLAWRDGEDIILRVPIHDIAAVSYVRDDAAHLVVLKTAQDPGISPSQSLCAESSRGLSAGSLSESAVGPVEACCLVILAAESKVAAEELCCLLGQVFQVVYTESTIDFLDRAIFDGASTPTHHLSLHSDFAVHISP

SEQ ID NO: 75022 - protein, 696 aa, Homo sapiens
  MOD_RES (1)..(1): Any amino acid
XGLGGELFLWDGEDSSFLVVRLRGPSGGGEEPALSQYQRLLCINPPLFEIYQVLLSPTQHHVALIGIKGLMVLELPKRWGKNSEFEGGKSTVNCSTTPVAERFFTSSTSLTLKHAAWYPSEILDPHVVLLTSDNVIRIYSLREPQTPTNVIILSEAEEESLVLNKGRAYTASLGETAVAFDFGPLAAVPKTLFGQNGKDEVVAYPLYILYENGETFLTYISLLHSPGNIGKLLGPLPMHPAAEDNYGYDACAVLCLPCVPNILVIATESGMLYHCVVLEGEEEDDHTSEKSWDSRIDLIPSLYVFECVELELALKLASGEDDPFDSDFSCPVKLHRDPKCPSRYHCTHEAGVHSVGLTWIHKLHKFLGSDEEDKDSLQELSTEQKCFVEHILCTKPLPCRQPAPIRGFWIVPDILGPTMICITSTYECLIWPLLSTVHPASPPLLCTREDVEVAESPLRVLAETPDSFEKHIRSILQRSVANPAFLNCFTQLRKIKVETLFLRASEKDIAPPPEECLQLLSRATQVFREQYILKQDLAKEEIQRRVKLLCDQKKKQLEDLSYCREERKSLREMAERLADKYEEAKEKQEDIMNRMKKLLHSFHSELPVLSDSERDMKKELQLIPDQLRHLGNAIKQVTMKKDYQQQKMEKVLSLPKPTIILSAYQRKCIQSILKEEGEHIREMVKQINDIRNHVNF

SEQ ID NO: 75023 - protein, 542 aa, Homo sapiens [sequence omitted]

SEQ ID NO: 75024 - protein, 35 aa, Homo sapiens
MAGGAWGRLACYLEFLKKEELKEFQLLLANKAHSR

SEQ ID NO: 75025 - protein, 204 aa, Homo sapiens
SLSRPSLPSCLCSFLLLLLLQVSSSYAGQFRVIGPRHPIRALVGDEVELPCRISPGKNATGMEVGWYRPPFSRVVHLYRNGKDQDGDQAPEYRGRTELLKDAIGEGKVTLRIRNVRFSDEGGFTCFFRDHSYQEEAAMELKVEDPFYWVSPGVLVLLAVLPVLLLQITLGLVFLCLQYRLRGKLRAEIENLHRTFVFHLEALSG

SEQ ID NO: 75026 - protein, 44 aa, Homo sapiens
KHKRQRDDGEGRGEPDGQGRPDPAAAAPAAGPAPPHPLPHQAHE

SEQ ID NO: 75027 - protein, 114 aa, Homo sapiens
ESAKKQSGGKVADYIPQLAKFSPDLWGVSVCTVDGQRHSTGDTKVPFCLQSCVKPLKYAIAVNDLGTEYVHRYVGKEPSGLRFNKLFLNEDDKPHNPMVNAGAIVVTSLIKDWW

SEQ ID NO: 75028 - protein, 77 aa, Homo sapiens
MFHSLDRNQDGHIDVSEIQQSFRALGISISLEQAEKILHSMDRDGTMTIDWQEWRDHFLLHSLENVEDVLYFWKHST

SEQ ID NO: 75029 - protein, 78 aa, Homo sapiens
MQSKYKQKLKREESVRIKKEAEEAELQKMKAIQREKSNKLEEKKRLQENLRREAFREHQQYKTAEFLSKLNTESPDRS

SEQ ID NO: 75030 - protein, 999 aa, Homo sapiens
MRDFGFGVLQTAPLRSSSPGPLFCGEAYGPYAVGSVNPLPSATPFGPLSPPPLPVTGFLEAASPFSVPLGGGAGSPAAAASSSSPFLAHQQTMQDELLLGLTQQPARPLSGAAATEKLPDHHPGGGTIAGVTHLLPSQDFKPSLHHPSSSSASSCCCCRTSSPQDFSKRQQQQLSSQKRKEFSPPHLPHPPDSKPPPPPPPLHCPGRFSPPPPPAGPLLQPAQLAQRQQQQPPQQFSLLHQQHLSPQDFAPRQRPADLPPLPQLPPSPPAAPRRRHGGAGSPRKTPAAGEGSAAESPNAGLASSTPVNPAPGSMESPNHPLLNSPSNLLPGGALGAGAFSSLQSPDLPHPGGGGGGGGGGPPGGGGGGGSASPPPLPGFGTPWSVQTASPPPQPQQPPPTQPQQQPPPPQQPPQPQPQPPGSSATTPGGGSGGSLSAMPPPSPDSENGFYPGLPSSMNPAFFPSFSPVSPHGCTGLSVPTSGGGGGGFGGPFSATAVPPPPPPAMNIPQQQPPPPAAPQQPQSRRSPVSPQLQQQHQAAAAAFLQQRNSYNHHQPLLKQSPWSNHQSSGWGTGSMSWGAMHGRDHRRTGNMGIPGTMNQISPLKKPFSGNVIAPPKFTRSTPSLTPKSWIEDNVFRTDNNSNTLLPLQVRMDRSRMYDSLNMHSLENSLIDIMRAEHDPLKGRLSYPHPGTDNLLMLNGRSSLFPIDDGLLDDGHSDQVGVLNSPTCYSAHQNGERIERFSRKVFVGGLPPDIDEDEITASFRRFGPLVVDWPHKAESKSYFPPKGYAFLLFQEESSVQALIDACIEEDGKLYLCVSSPTIKDKPVQIRPWNLSDSDFVMDGSQPLDPRKTIFVGGVPRPLRAVELAMIMDRLYGGVCYAGIDTDPELKYPKGAGRVAFSNQQSYIAAISARFVQLQHGDIDKRVEVKPYVLDDQMCDECQGARCGGKFAPFFCANVTCLQYYCEFCWANIHSRAGREFHKPLVKEGADRPRQIHFRWN

SEQ ID NO: 75031 - protein, 330 aa, Homo sapiens
GRNRTGLEAIMETYAFWRPPVRTLTFEDFTTMQKQQASKKTSQGYTVNQHSSETDAIELYERRVWLMERRGSTGTSPTTSSTGTPSPSASSHLLSPSCSPPTFHLAPNTFNVGCRESQLCNLNLSDYPPCARSNMAALQSYPGLSDSGYNRLQSGTTSATQPSETFMPQRTPSLISGIPTPPSLPGNSKMEAYGGQLGSFPTSQFQYVMQAGNAASSSSSPHMFGGSHMQQSSYNAFSLHNPYNLYGYNFPTSPRLAASPEKLSASQSTLLCSSPSNGAFGERQYLPSGMEHSMHMISPSPNNQQATNTCDGRQYGAVPGSSSQMSVHMV

SEQ ID NO: 75032 - protein, 151 aa, Homo sapiens
MSTVDLARVGACILKHAVTGEAVELRSLWREHACVVAGLRRFGCVVCRWIAQDLSSLAGLLDQHGVRLVGVGPEALGLQEFLDGDYFAGELYLDESKQLYKELGFKRYNSLSILPAALGKPVRDVAAKVVIKCSCISSRSPQATTSPRSTS

SEQ ID NO: 75033 - protein, 266 aa, Homo sapiens
MQELKSKDISKTFRKIINKREGITAIGGTSTISSEGTQHSYSEEEKVAFVNWINKALENDPDCKHLIPMNPNDDSLFKSLADGILLCKMINLSEPDTIDERAINKKKLTPFTISENLNLALNSASAIGCTVVNIGASDLKEGKPHLVLGLLWQIIKVGLFADIEISRNEALIALLNEGEELEELMKLSPEELLLRWVNYHLTNAGWHTISNFSQDIKDSRAYFHLLNQIAPKGGEDGPAIAIDLSGINETNDLKRAGLMLQEADKL

SEQ ID NO: 75034 - protein, 95 aa, Homo sapiens
MAGITTIEAVKRKIQVLQQQADDAEERAERLQREVEGERRAREQAEAEVASLNRRIQLVEEELDRAQERLATALQKLEEAEKAADESERWMSRLD

SEQ ID NO: 75035 - protein, 47 aa, Homo sapiens
MPSEKTFKQRRTFEQRVEDVRLIREQHPTKIPGGRITVYRKDVRSVQ

SEQ ID NO: 75036 - protein, 233 aa, Homo sapiens
MPPKVTSELLRQLRQAMRNSEYVTEPIQAYIIPSGDAHQSEYIAPCDCRRAFVSGFDGSAGTAIITEEHAAMWTDGRYFLQAAKQMDSNWTLMKMGLKDTPTQEDWLVSVLPEGSRVGVDPLIIPTDYWKKMAKVLRSAGHHLIPVKENLVDKIWTDRPERPCKPLLTLGLDYTGLFNLRGSDVEHNPVFFSYAIIGLETIMLFIDGDRIDAPSVKEHLLLDLGLEAEYRIQV

SEQ ID NO: 75037 - protein, 794 aa, Homo sapiens
MEAVSRVFPALAGQAPEEQGEIIKVKVKEEDHTWDQESALRRNLSYTRELSRQRFRQFCYQETPGPREALSQLRELCRQWLNPEIHTKEQILELLVLEQFLTILPEELQSWVREHNPESGEEVVTLLEDLERELDEPRQQVSQGTYGQEVSMEEMIPLDSAKESLGTQLQSMEDRMECESPEPHPLQDNGSFLWFSMMSQSMGGDNLSSLDTNEAEIEPENMREKFFRSLARLLENKSNNTKIFSKAKYCQLIKEVKEAKAKAKKESVDYRRLARFDVILVQGNEKLIEAVNGETDKIRYYLHSEDLFDILHNTHLSIGHGGRTRMEKELQAKYKNITKEVIMLYLTLCKPCQQKNSKLKKVLTSKSIKEVSSRCQVDLIDMQLNPDGEYRFILHYQDLCTKLTFLRSLKSKRPTEVAHALLDIFTIIGAPSVLQSDNGREFSSQVVSELSNIWPELKIVHGKSQTCQSQSSAEQTEDIRKRIFSWMQTNNSSHWTEFLWFIQMSQNQPYHRSMQQTPCESAFSSEAKLGLSHSQLTEELVASLHTENELDQADKELENTLRAQYEENIETGTDSSDIEENLSVTPKVAEKSPPESRLRFLSCVVCEKECTGVNSCISCDGNIHAICGVPSQHGTEGCGRQITCSLCYETSTMKRKHDEIQRSLPVKPSKMLKPSGTPFSPDKVGDWMAKQASLDFFVKKRHAFSEHSSSNKRNVNNRSYPEEGKTKRVHASFTRKYDPSYIEFGFVAVIDGEVLKPQCIICGDVLANEAMKPSKLKRHLYSKHKEISSQPKEF

SEQ ID NO: 75038 - protein, 66 aa, Homo sapiens
  MOD_RES (1)..(1): Any amino acid
XPLPGTKPALHAGNQELVSRLLHLHFKDDKTKEAAVRGVRQAQAEDALRVDVDQLEKVLPQLLLDF

SEQ ID NO: 75039 - protein, 410 aa, Homo sapiens
MAMRELVEAECGGANPLMKLAGHFTQDKALRQEGLRPGPWPPGAPASEAVSVLEVESPGAASEAASKPLGVASEDELVAEFLQDQNAPLVSRAPQTFKMDDLLAEMQQIEQSNFRQAPQRAPGVADLALSENWAQEFLAAGDAVDVTQDYNETDWSQEFISEVTDPLSVSPARWAEEYLEQSEEKLWLGEPEGTATDRWYDEYHPEEDLQHTASDFVAKVDDPKLANSEGTSDAWVDQFTRPVNTSALDMEFERAKSAIELQAELEEMAKRDAEAHPWLSDYDDLTSATYDKGYQFEEENPLRDHPQPFEEGLRRLQEGDLPNAVLLFEAAVQQDPKHMEAWQYLGTTQAENEQELLAISALRRCLELKPDNQTALMALAVSFTNESLQRQACETLRDWLRYTPAYAHLV

SEQ ID NO: 75040 - protein, 85 aa, Homo sapiens
MACPLDQAIGLLVAIFHKYSGREGDKHTLSKKELKELIQKELTIGSKLQDAEIARLMEDLDRNKDQEVNFQEYVTFLGALALIYN

SEQ ID NO: 75041 - protein, 1349 aa, Homo sapiens
AAAVMQAAANSAQSRQGSFPGMNQSGLMASSSPYSQPMNNSSSLMNTQAPPYSMAPAMVNSSAASVGLADMMSPGESKLPLPLKADGKEEGTPQPESKSKDSYSSQGISQPPTPGNLPVPSPMSPSSASISSFHGDESDSISSPGWPKTPSSPKSSSSTTTGEKITKVYELGNEPERKLWVDRYLTFMEERGSPVSSLPAVGKKPLDLFRLYVCVKEIGGLAQVNKNKKWRELATNLNVGTSSSAASSLKKQYIQYLFAFECKIERGEEPPPEVFSTGDTKKQPKLQPPSPANSGSLQGPQTPQSTGSNSMAEVPGDLKPPTPASTPHGQMTPMQGGSSTISVHDPFSDVSDSSFPKRNSMTPNAPYQQGMSMPDVMGRMPYEPNKDPFGGMRKVPGSSEPFMTQGQMPNSSMQDMYNQSPSGAMSNLGMGQRQQFPYGASYDRRHEPYGQQYPGQGPPSGQPPYGGHQPGLYPQQPNYKRHMDGMYGPPAKRHEGDMYNMQYSSQQQEMYNQYGGSYSGPDRRPIQGQYPYPYSRERMQGPGQIQTHGIPPQMMGGPLQSSSSEGPQQNMWAARNDMPYPYQNRQGPGGPTQAPPYPGMNRTDDMMVPDQRINHESQWPSHVSQRQPYMSSSASMQPITRPPQPSYQTPPSLPNHISRAPSPASFQRSLENRMSPSKSPFLPSMKMQKVMPTVPTSQVTGPPPQPPPIRREITFPPGSVEASQPVLKQRRKITSKDIVTPEAWRVMMSLKSGLLAESTWALDTINILLYDDSTVATFNLSQLSGFLELLVEYFRKCLIDIFGILMEYEVGDPSQKALDHNAARKDDSQSLADDSGKEEEDAECIDDDEEDEEDEEEDSEKTESDEKSSIALTAPDAAADPKEKPKQASKFDKLPIKIVKKNNLFVVDRSDKLGRVQEFNSGLLHWQLGGGDTTEHIQTHFESKMEIPPRRRPPPPLSSAGRKKEQEGKGDSEEQQEKSIIATIDDVLSARPGALPEDANPGPQTESSKFPFGIQQAKSHRNIKLLEDEPRSRDETPLCTIAHWQDSLAKRCICVSNIVRSLSFVPGNDAEMSKHPGLVLILGKLILLHHEHPERKRAPQTYEKEEDEDKGVACSKDEWWWDCLEVLRDNTLVTLANISGQLDLSAYTESICLPILDGLLHWMVCPSAEAQDPFPTVGPNSVLSPQRLVLETLCKLSIQDNNVDLILATPPFSRQEKFYATLVRYVGDRKNPVCREMSMALLSNLAQGDALAARAIAVQKGSIGNLISFLEDGVTMAQYQQSQHNLMHMQPPPLEPPSVDMMCRAAKALLAMARVDENRSEFLLHEGRLLDISISAVLNSLVASVICDV

SEQ ID NO: 75042 - protein, 160 aa, Homo sapiens
MSSHGNSLFLRESGQRLGRVGWLQRLQESLQQRALRTRLRLQTMTLEHVLRFLRRNAFILLTVSAVVIGVSLAFALRPYQLTYRQIKYFSFPGELLMRMLQMLVLPLIVSSLVTGMASLDNKATGRMGMRAAVYYMVTTIIAVFIGILMVTIIHPGKGSK

SEQ ID NO: 75043 - protein, 389 aa, Homo sapiens
MIRAAPPPLFLLLLLLLLLVSWASRGEAAPDQDEIQRLPGLAKQPSFRQYSGYLKGSGSKHLHYWFVESQKDPENSPVVLWLNGGPGCSSLDGLLTEHGPFLVQPDGVTLEYNPYSWNLIANVLYLESPAGVGFSYSDDKFYATNDTEVAQSNFEALQDFFRLFPEYKNNKLFLTGESYAGIYIPTLAVLVMQDPSMNLQGLAVGNGLSSYEQNDNSLVYFAYYHGLLGNRLWSSLQTHCCSQNKCNFYDNKDLECVTNLQEVARIVGNSGLNIYNLYAPCAGGVPSHFRYEKDTVVVQDLGNIFTRLPLKRMWHQALLRSGDKVRMDPPCTNTTAASTYLNNPYVRKALNIPEQLPQWDMCKWSLAVTQAGVQCCDLGSLQPPPPGFK

SEQ ID NO: 75044 - protein, 161 aa, Homo sapiens
  MOD_RES (1)..(1): Any amino acid
XAVPGRQAAFREGLEQAVRYAKALGCPRIHLMAGRVPQGADRIAVKAEMEAVFLENLRHAAGVLAQEDLVGLLEPINTRITDPQYFLDTPQQAAAILQKDIFHWQIMDGNLTGNIREFLPIVGHVQVAQVPGRGEPSSPGELNFPYLFQLLEDEGYKGFVG

SEQ ID NO: 75045 - protein, 35 aa, Homo sapiens
MLSSRAEAAMTAADRAIQRFLRTGAAVSLVLPRSY

SEQ ID NO: 75046 - protein, 503 aa, Homo sapiens
MAETSLLEAGASAASTAAALENLQVEASCSVCLEYLKEPVIIECGHNFCKACITRWWEDLERDFPCPVCRKTSRYRSLRPNRQLGSMVEIAKQLQAVKRKIRDESLCPQHHEALSLFCYEDQEAVCLICAISHTHRAHTVVPLDDATQEYKEKLQKCLEPLEQKLQEITRCKSSEEKKPGELKRLVESRRQQILREFEELHRRLDEEQQVLLSRLEEEEQDILQRLRENAAHLGDKRRDLAHLAAEVEGKCLQSGFEMLKDVKSTLEKCEKVKTMEVTSVSIELEKNFSNFPRQYFALRKILKQLIADVTLDPETAHPNLVLSEDRKSVKFVETRLRDLPDTPRRFTFYPCVLATEGFTSGRHYWEVEAAHCVLAQDPENQALARFYCYTERTIAKRLVLRRDPSVKRTLCRGCSSLLVPGLTCTQRQRRCRGQRWTVQTCLTCQRSQRFLNDPGHLLWGDRPEAQLGSQADSKPLQPLPNTAHSISDRLPEEKMQTKGSSNQ

SEQ ID NO: 75047 - protein, 88 aa, Homo sapiens
MGLGVSAEQPAGGAEGFHLHGENSPAQQAGLEPYFDFIITIGHSRLNKENDTLKALLKANVEKPVKLEVFNMKTMRVREVEVVPSNMW

SEQ ID NO: 75048 - protein, 128 aa, Homo sapiens
MAALTTLFKYIDENQDRYIKKLAKWVAIQSVSAWPEKRGEIRRMMEVAAADVKQLGGSVELVDIGKQKLPDGSEIPLPPILLGRLGSDPQKKTVCIYGHLDVQPAALEDGWDSEPFTLVERDGKLYGR

SEQ ID NO: 75049 - protein, 207 aa, Homo sapiens
MAEAGTGLLPATVQPFHLRGMSSTFSQRSRDIFDCLEGAARRAPSSVAHTSMSDNGGFKRPLAPSGRSPVEGLGRAHRSPASPRVPPVPDYVAHPERWTKYSLEDVTEVSEQSNQATALAFLGSQSLAAPTDCVSSFNQDPSSCGEGRVIFTKPVRGVEARHERKRVLGKVGEPGRGGLGNPATDRGEGPVELAHLAGPGSPEAEEW

SEQ ID NO: 75050 - protein, 131 aa, Homo sapiens
MTRDDSSGGWLPLGGSGLSSVTVFKVPHQEENGCADFFIRGERLRDKMVVLECMLKKDLIYNKVTPTFHHWKIDDKKFGLTFQSPADARAFDRGIRRAIEDISQGCPESKNEAEGADDLQANEEDSSSSLV

SEQ ID NO: 75051 - protein, 108 aa, Homo sapiens
MFQQVPMVEIDGMKLVQTRAILNYIASKYNLYGKDIKERALIDMYTEGMADLNEMILLLPLCRPEEKDAKIALIKEKTKSRYFPAFRADISLVELLYYVEELDSSLIS

SEQ ID NO: 75052 - protein, 123 aa, Homo sapiens
MWCVPHPKKPEHTLVLLDTEGLGDVKKGDNQNDSWIFTLAVLLSSTLVYNSMGTINQQAMDQLYYVTELTHRIRSKSSPDENENEDSADFVSFFPDFVWTLRDFSLDLEADGQPLTPDEYLEY

SEQ ID NO: 75053 - protein, 174 aa, Homo sapiens
  MOD_RES (1)..(1): Any amino acid
XGDVHDRYESRHGVRLHVTAAPRIVNISVLPSPAHAFRALCTAEGEPPPALAWSGPALGNSLAAVRSPREGHGHLVTAELPALTHDGRYTCTAANSLGRSEASVYLFRFHGASGASTVALLLGALGFKALLLLGVLAARAARRRPEHLDTPDTPPRPTTCPVSLFADLLSHQRP

SEQ ID NO: 75054 - protein, 97 aa, Homo sapiens
MKAQTALSFFLILITSLSGSQGIFPLAFFIYVPMNEQIVIGRLDEDIILPSSFERGSEVVIHWKYQDSYKVHSYYKGSDHLESQDPRYANRTSLFYN

SEQ ID NO: 75055 - protein, 212 aa, Homo sapiens
MVEMLPTAILLVLAVSVVAKDNATCDGPCGLRFRQNPQGGVRIVGGKAAQHGAWPWMVSLQIFTYNSHRYHTCGGSLLNSRWVLTAAHCFVGKNNVHDWRLVFGAKEITYGNNKPVKAPLQERYVEKIIIHEKYNSATEGNDIALVEITPPISCGRFIGPGCLPHFKAGLPRGSQSCWVAGWGYIEEKGFLECPAGTSPFKTGVAVALELCP

SEQ ID NO: 75056 - protein, 75 aa, Homo sapiens
MASWLYECLCEAELAQYYSHFTALGLQKIDELAKITMKDYSKLGVHDMNDRKRLFQLIKIIKIMQEEDKAVSIPE

SEQ ID NO: 75057 - protein, 74 aa, Homo sapiens
MVVLNPMTLGIYLQLFFLSIVSQPTFINSVLPISAALPSLDQKKRGGHKACCLLTPPPPPLFPPPFFRGGRSPT

SEQ ID NO: 75058 - protein, 100 aa, Homo sapiens
MRGEHNSTSYDSAVIYRGFWAVLMLLGVVAVVIASFLIICAAPFASHFLYKAGGGSYIAAGKKKKGHLIKVPRYNAGSYVHLVLDPECKRSLSACFKKHS

SEQ ID NO: 75059 - protein, 8 aa, Homo sapiens
MSGMGENT

SEQ ID NO: 75060 - protein, 114 aa, Homo sapiens
MVAAKKTKKSLESINSRLQLVMKSGKYVLGYKQTLKMIRQGKAKLVILANNCPALRKSEIEYYAMLAKTGVHHYSGNNIELGTACGKYYRVCTLAIIDPGDSDIIRSMPEQTGE

SEQ ID NO: 75061 - protein, 145 aa, Homo sapiens
MANSGLQLLGFSMALLGWVGLVACTAIPQWQMSSYAGDNIITAQAMYKGLWMDCVTQSTGMMSCKMYDSVLALSAALQATRALMVVSLVLGFLAMFVATMGMKCTRCGGDDKVKKARIAMGGGIIFIVAGMSLALPSLLAGQGLP

SEQ ID NO: 75062 - protein, 147 aa, Homo sapiens
MAAPEKMTFPEKPSHKKYRAALKKEKRKKRRQELARLRDSGLSQKEEEEDTFIEEQQLEEEKLLERERLECSGVISAHRNLHLPGSHDSPASASRVAGITGTHRHTQLIFFCTFSRDGVSPCWPGWSRSLDLMICPPRPHKVLRLQV

SEQ ID NO: 75063 - protein, 139 aa, Homo sapiens
MTPQEIAVNLRPGDKTTFQLQVRQVEDYPVDLYYLMDLSLSMKDDLDNIRSLGTKLAEEMRKLTSNFRLGFGSFVDKDISPFSYTAPRYQTNPCIGYKLFPNCVPSFGFRHLLPLTDRVDSFNEEVRKQRVSRNRDAPE

SEQ ID NO: 75064 - protein, 347 aa, Homo sapiens
  MOD_RES (1)..(1): Any amino acid
XSSSSVSSSSATAPSSVVAATSGGGRPGLGRGRNSNKGLPQSTISFDGIYANMRMVHILTSVVGSKCEVQVKNGGIYEGVFKTYSPKCDLVLDAAHEKSTESSSGPKREEIMESILFKCSDFVVVQFKDMDSSYAKRDAFTDSAISAKVNGEHKEKDLEPWDAGELTANEELEALENDVSNGWDPNDMFRYNEENYGVVSTYDSSLSSYTVPLERDNSEEFLKREARANQLAEEIESSAQYKARVALENDDRSEEEKYTAVQRNSSEREGHSINTRYLKEIMMQYFGYTTQGKINIFLLDKEIEKSYPGEVGDRIHRVWASLDRAPCHQDPLLTLQISTRILVQTKE

SEQ ID NO: 75065 - protein, 377 aa, Homo sapiens
MKPAQRNLYRDVMLENYSNLVTVGCQVTKPDVIFKLEQEEEPWVMEEEMFGRHCPEVWEVDEQIKKQQETLVRKVTSISKKILIKEKVIECKKVAKIFPLSSDIVTSRQSFYDCDSLDKGLEHNLDLLRYEKGCVREKQSNEFGKPFYHCASYVVTPFKCNQCGQDFSHKFDLIRHERIHAGEKPYECKECGKAFSRKENLITHQKIHTGEKPYKCNECGKAFIQMSNLIRHHRIHTGEKPYACKDCWKAFSQKSNLIEHERIHTGEKPYECKECGKSFSQKQNLIEHEKIHTGEKPYACNECGRAFSRMSSVTLHMRSHTGEKPYKCNKCGKAFSQCSVFIIHMRSHTGEKPYVCSECGKAFSQSSSLTVHAKSYS

SEQ ID NO: 75066 - protein, 1170 aa, Homo sapiens
VYKGRHVKTGQLAAIKVMDVTEDEEEEIKLEINMLKKYSHHRNIATYYGAFIKKSPPGHDDQLWLVMEFCGAGSITDLVKNTKGNTLKEDWIAYISREILRGLAHLHIHHVIHRDIKGQNVLLTENAEVKLVDFGVSAQLDRTVGRRNTFIGTPYWMAPEVIACDENPDATYDYRSDLWSCGITAIEMAEGAPPLCDMHPMRALFLIPRNPPPRLKSKKWSKKFFSFIEGCLVKNYMQRPSTEQLLKHPFIRDQPNERQVRIQLKDHIDRTRKKRGEKDETEYEYSGSEEEEEEVPEQEGEPSSIVNVPGESTLRRDFLRLQQENKERSEALRRQQLLQEQQLREQEEYKRQLLAERQKRIEQQKEQRRRLEEQQRREREARRQQEREQRRREQEEKRRLEELERRRKEEEERRRAEEEKRRVEREQEYIRRQLEEEQRHLEVLQQQLLQEQAMLLHDHRRPHPQHSQQPPPPQQERSKPSFHAPEPKAHYEPADRAREVEDRFRKTNHSSPEAQSKQTGRVLEPPVPSRSESFSNGNSESVHPALQRPAEPQVPVRTTSRSPVLSRRDSPLQGSGQQNSQAGQRNSTSIEPRLLWERVEKLVPRPGSGSSSGSSNSGSQPGSHPGSQSGSGERFRVRSSSKSEGSPSQRLENAVKKPEDKKEVFRPLKPADLTALAKELRAVEDVRPPHKVTDYSSSSEESGTTDEEDDDVEQEGADESTSGPEDTRAASSLNLSNGETESVKTMIVHDDVESEPAMTPSKEGTLIVRQTQSASSTLQKHKSSSSFTPFIDPRLLQISPSSGTTVTSVVGFSCDGMRPEAIRQDPTRKGSVVNVNPTNTRPQSDTPEIRKYKKRFNSEILCAALWGVNLLVGTESGLMLLDRSGQGKVYPLINRRRFQQMDVLEGLNVLVTISGKKDKLRVYYLSWLRNKILHNDPEVEKKQGWTTVGDLEGCVHYKVVKYERIKFLVIALKSSVEVYAWAPKPYHKFMAFKSFGELVHKPLLVDLTVEEGQRLKVIYGSCAGFHAVDVDSGSVYDIYLPTHIQCSIKPHAIIILPNTDGMELLVCYEDEGVYVNTYGRITKDVVLQWGEMPTSVAYIRSNQTMGWGEKAIEIRSVETGHLDGVFMHKRAQRLKFLCERNDKVFFASVRSGGSSQVYFMTLGRTSLLSW

SEQ ID NO: 75067 - protein, 508 aa, Homo sapiens
MDYTVSMFLNTLTPKFYVALTGTSSLISGLILIFEWWYFRKYGTSFIEQVSVSHLRPLLGGVDNNSSNNSNSSNGDSDSNRQSVSECKVWRNPLNLFRGAEYNRYTWVTGREPLTYYDMNLSAQDHQTFFTCDSDHLRPADAIMQKAWRERNPQARISAAHEALEINECATAYILLAEEEATTIAEAEKLFKQALKAGDGCYRRSQQLQHHGSQYEAQHRRDTNVLVYIKRRLAMCARRLGRTREAVKMMRDLMKEFPLLSMFNIHENLLEALLELQAYADVQAVLAKYDDISLPKSATICYTAALLKARAVSDKFSPEAASRRGLSTAEMNAVEAIHRAVEFNPHVPKYLLEMKSLILPPEHILKRGDSEAIAYAFFHLAHWKRVEGALNLLHCTWEGTFRMIPYPLEKGHLFYPYPICTETADRELLPSFHEVSVYPKKELPFFILFTAGLCSFTAMLALLTHQFPELMGVFAKAFLSTLFAPLNFVMEKVESILPSSLWHQLTRI

SEQ ID NO: 75068 - protein, 122 aa, Homo sapiens
MREYKLVVLGSGGVGKSALTVQFVQGIFVEKYDPTIEDSYRKQVEVDAQQCMLEILDTAGTEQFTAMRDLYMKNGQGFALVYSITAQSTFNDLQDLREQILRVKDTDDVPMILVGNKCDLED

SEQ ID NO: 75069 - protein, 169 aa, Homo sapiens
TREQEELEEALEVERQENEQRRLFIQKEEQLQQILKRKNKQAFLDELESSDLPVALLLAQHKDRSTQLEMQLEKPKPVKPVTFSTGIKMGQHISLAPIHKLEEALYEYQPLQIETYGPHVPELEMLGRLGYLNHVRAASPQDLAGGYTSSLACHRALQDAFSGLFWQPS

SEQ ID NO: 75070 - protein, 99 aa, Homo sapiens
MAQGLVTFADVAIDFSQEEWACLNSAQRDLYWDVMLENYSNLVSLDLESAYENKSLPTEKNIHEIRASKRNSDRRSKSLGRNWICEGTLERPQRSRGRY

SEQ ID NO: 75071 - protein, 175 aa, Homo sapiens
  MOD_RES (1)..(1): Any amino acid
XHVVHGFLDTNPAIREQTVKSMLLLAPKLNEANLNVELMKHFARLQAKDEQGPIRCNTTVCLGKIGSYLSASTRHRVLTSAFSRATRDPFAPSRVAGVLGFAATHNLYSMNDCAQKILPVLCGLTVDPEKSVRDQAFKAIRSFLSKLESVSEDPTQLEEVGCPCSLQPWHGRSRS

SEQ ID NO: 75072 - protein, 175 aa, Homo sapiens
MNDRCPRPGSSSLARGCLLSVADGAGREGGPGPALPGLGRCCWRLALHQASLWQESELCRGRRLRMMPQLQFKDAFWCRDFTAHTGYEVLLQRLLDGRKMCKDMEELLRQRAQAEERYGKELVQIARKAGGQTEINSLRASFDSLKQQMENVGSSHIQLALTLREELRSLEEFRE

SEQ ID NO: 75073 - protein, 360 aa, Homo sapiens
  MOD_RES (1)..(1): Any amino acid
XEAILQCLRDASWHAGMLSQPVALLVPSGVDLTTLHRLLALATSGSFPGQYTEADLDRIGEHLPRENLGVKQNIKKEMVLQRFHQQVCSHLHLFFLIGDKQAHKQLPSTLFLRLLQLATASIDRYEPWDQAALAKVAQHHLEGAQSVPLDDGSWKYPDLQASIPSVAKAMALIHLSATHYHEHLCPALPLVTPKTFLDFLDTFLMLQQQTILKIKNKAQRVQNALENLRMLIKEHGTHANLIFDLEQQLKDSGKSLSMFQQQLEQSKLLYKQQLEECRHQENLIENLARQRDALQAQREAFLEQVGSSCRLPCTAPLSKEGNPSKDTKRRGWSDSSWNLLGGGDKDEQGISGASEPAAGG

SEQ ID NO: 75074 - protein, 68 aa, Homo sapiens
MALTLFDTDEYRPPVWKSYLYQLQQEAPHPRRITCTCEVENRPKYYGREWSFAFVAQAGVQWCDLGSL

SEQ ID NO: 75075 - protein, 239 aa, Homo sapiens
MLACLPGPGDLSFQLLSHTQMNTGLQKWDTTQKMRTAHYPTPAELDAYAKKVANNPLTIKIFPNSVKVPQRKHVRRTVNGLDTSAQRYSPYPTQAATKAGLLAIVKVPAKSILKDFDGTRARLLPEAIMNPPVAPYATVAPSTLAHPQAQALARQQALQHAQTLAHAPPQTLQHPQGIPPPQALSHPQSLQQPQGLGHPQPMAQTQGLVHPQALAHQGLQHPHNPLLHGGRKMPDSDAP

SEQ ID NO: 75076 - protein, 59 aa, Homo sapiens
MTILGTTFGMVFSLLQVVSGESGYAQNGDLEDAELDDYSFSCYSQLEVNGSQHSLTCAF

SEQ ID NO: 75077 - protein, 149 aa, Homo sapiens
MSSNSASAANGNDSKKFKGDSRSAGVPSRVIHIRKLPIDVTEGEVISLGLPFGKVTNLLMLKGKNQAFIEMNTEEAANTMVNYYTSVTPVLRGQPIYIQFSNHKELKTDSSPNQARAQAALQAVNSVQSGNLALAASAAAVDAGMAMAG

SEQ ID NO: 75078 - protein, 150 aa, Homo sapiens
MTILGTTFGMVFSLLQVVSGESGYAQNGDLEDAELDDYSFSCYSQLEVNGSQHSLTCAFEDPDVNITNLEFEICGALVEVKCLNFRKLQEIYFIETKKFLLIGKSNICVKVGEKSLTCKKIDLTTIGKKLYIKVWLSLLGYLKTLCLDIL

SEQ ID NO: 75079 - protein, 280 aa, Homo sapiens
  MOD_RES (1)..(1): Any amino acid
XANDACGQPIPWEHCCPWMYFDGKLFQSKLLKASREKTPLIDLCDGQADQAAKVEKMRQSVLEGLSFSRQSHTLPFPPPPALPFYPASAYPRHFGPVPPSQGRGRGFAGVCGFGGPYGETVATGPYRAFRVAAASGHCGAFSGSDSSRTSKSQGVQPIPSQGGKLEIAGTVVGHWAGSRRGRGGRGPFPLQVVSVGGPARGRPRGVISTPVIRTFGRGGRYYGRGYKNQAAIQGRPPYAASAEEVAKELKSKSGESKSSAMSSDGSLAENGVMAEEKPAP

SEQ ID NO: 75080 - protein, 209 aa, Homo sapiens
KYITVVVFEEEVILNEPVENWPLCDCLISFHSKGFPLDKAVAYAKLRNPFVINDLNMQYLIQDRREVYSILQAEGILLPRYAILNRDPNNPKECNLIEGEDHVEVNGEVFQKPFVEKPVSAEDHNVYIYYPTSAGGGSQRLFRKIGSRSSVYSPESNVRKTGSYIYEEFMPTDGTDVKGFLMFCNNNIFSSLKPMDSFLRVVFLNALNM

SEQ ID NO: 75081 - protein, 427 aa, Homo sapiens
MLLMVVSMACVGFFLVQRAGPHVGGQDKPFLSAWPSAVVPRGGHVTLRCHYRHRFNNFMLYKEDRIHVPIFHGRLFQESFNMSPVTTAHAGNYTCRGSHPHSPTGWSAPSNPVVIMVTGNHRKPSLLAHPGPLVKSGERVILQCWSDIMFEHFFLHKEGISKDPSSLVGQIHDGVSKANFSIGPMMLALAGTYRCYGSVTHTPYQLSAPSDPLDIVVTGPYEKPSLSAQPGPKVQAGESVTLSCSSRSSYDMYHLSREGGAHERRLPAVRKVNRTFQADFPLGPATHGGTYRCFGSFRHSPYEWSDPSDPLLVSVTGNPRHLHILIGTSVVIILFILLLFFLLHLWCSNKKNAAVMDQEPAGNRTANSEDSDEQDPQEVTYAQLDHCVFTQRKITRPSQRPKTPPTDTILYTELPNAKPRSKVVSCP

SEQ ID NO: 75082 - protein, 147 aa, Homo sapiens
GTAHFFNFLLNTTDYRILLKDEDHDRMYVGSKDYVLSLDLHDINREPLIIHWAASPQRIEECVLSGKDVNPSLWPQGECGNFVRLIQPWNRTHLYVCGTGAYNPMCTYVNRGRRAQDYIFYLEPERLESGKGKCPYDPKLDTASALI

SEQ ID NO: 75083 - protein, 96 aa, Homo sapiens
MNTDSGGCARKRAAMSVTLTSVKRVQSSPNLLAAGRDSQSPDSAWRSYNDGNQETLNGDATYSSLAAKGFRSVRPNLQDKRSPTQSQITVNGNSGG

SEQ ID NO: 75084 - protein, 589 aa, Homo sapiens
MTKSNGEEPKMGGRMERFQQGVRKRTLLAKKKVQNITKEDVKSYLFRNAFVLLTVTAVIVGTILGFTLRPYRMSYREVKYFSFPGELLMRMLQMLVLPLIISSLVTGMAALDSKASGKMGMRAVVYYMTTTIIAVVIGIIIVIIIHPGKGTKENMHREGKIVRVTAADAFLDLIRNMFPPNLVEACFKQFKTNYEKRSFKVPIQANETLVGAVINNVSEAMETLTRITEELVPVPGSVNGVNALGLVVFSMCFGFVIGNMKEQGQALREFFDSLNEAIMRLVAVIMWSKRKTLCPRAILSEGKARFCKNQGKFIFTKEKKEVHSFCKKRSPQFLYAPVGILFLIAGKIVEMEDMGVIGGQLAMYTVTVIVGLLIHAVIVLPLLYFLVTRKNPWVFIGGLLQALITALGTSSSSATLPITFKCLEENNGVDKRVTRFVLPVGATINMDGTALYEALAAIFIAQVNNFELNFGQIITISITATAASIGAAGIPQAGLVTMVIVLTSVGLPTDDITLIIAVDWFLDRLRTTTNVLGDSLGAGIVEHLSRHELKNRDVEMGNSVIEENEMKKPYQLIAQDNETEKPIDSETKM

SEQ ID NO: 75085 - protein, 135 aa, Homo sapiens
MATASPSVFLLMVNGQVESAQFPEYDDLYCKYCFVYGQDWAPTAGLEEGISQITSKSQDVRQALVWNFPIDVTFKSTNPYGWPQIVLSVYGPDVFGNDVVRGYGAVHVPFSPGRHKRTIPMFVPESTSKLQKFTR

SEQ ID NO: 75086 - protein, 5256 aa, Homo sapiens
MECPSCQHVSKEETPKFCSQCGERLPPAAPIADSENNNSTMASASEGEMECGQELKEEGGPCLFPGSDSWQENPEEPCSKASWTVQEGATSEVLVDAAVDLISDEWEAANAIPSKRRKQDAAPLEAASVPSADCEQSKKKKRKKKKKGNKSASSELASLPLSPASPCHLTLLSNPWPQDTALPHSQAQQSGPTGQPSQPPGTATTPLEGDGLSAPTEVGDSPLQAQALGEAGVATGSEAQSSPQFQDHTEGEDQDASIPSGGRGLSQEGTGPPTSAGEGHSRTEDAAQELLLPESKGGSSEPGTELQTTEQQAGASASMAVDAVAEPANAVKGAGKEMKEKTQRMKQPPATTPPFKTHCQEAETKTKDEMAAAEEKVGKNEQGEPEDLKKPEGKNRSAAAVKNEKEQKNQEADVQEVKASTLSPGGGVTVFFHAIISLHFPFNPDLHKVFIRGGEEFGESKWDSNICELHYTRDLGHDRVLVEGIVCISKKHLDKYIPYKYVIYNGESFEYEFIYKHQQKKGEYVNRCLFIKSSLLGSGDWHQYYDIVYMKPHGRLQKVMNHITDGPRKDLVKGKQIAAALMLDSTFSILQTWDTINLNSFFTQFEQFCFVLQQPMIYEGQAQLWTDLQYREKEVKRYLWQHLKKHVVPLPDGKSTDFLPVDCPVRSKLKTGLIVLFVVEKIELLLEGSLDWLCHLLTSDASSPDEFHRDLSHILGIPQSWRLYLVNLCQRCMDTRTYTWLGALPVLHCCMELAPRHKDAWRQPEDTWAALEGLSFSPFREQMLDTSSLLQFMREKQHLLSIDEPLFRSWFSLLPLSHLVMYMENFIEHLGRFPAHILDCLSGIYYRLPGLEQVLNTQDVQDVQNVQNILEMLLRLLDTYRDKIPEEALSPSYLTVCLKLHEAICSSTKLLKFYELPALSAEIVCRMIRLLSLVDSAGQRDETGNNSVQTVFQGTLAATKRWLREVFTKNMLTSSGASFTYVKEIEVWRRLVEIQFPAEHGWKESLLGDMEWRLTKEEPLSQITAYCNSCWDTKGLEDSVAKTFEKCIIEAVSSACQSQTSILQGFSYSDLRKFGIVLSAVITKSWPRTADNFDDILKHLLTLADVKHVFRLCGTDEKILANVTEDAKRLIAVADSVLTKVVGDLLSGTILVGQLELIIKHKNQFLDIWQLREKSLSPQDEQCAVEEALDWRREELLLLKKEKRCVDSLLKMCGNVKHLIQVDFGVLAVRHSQDLSSKRLNDTVTVRLSTSSNSQRATHYHLSSQVQEMAGKIDLLRDSHIFQLFWREAAEPLSEPKEDQEAAELLSEPEEESERHILELEEVYDYLYQPSYRKFIKLHQDLKSGEVTLAEIDVIFKDFVNKYTDLDSELKIMCTVDHQDQRDWIKDRVEQIKEYHHLHQAVHAAKVILQVKESLGLNGDFSVLNTLLNFTDNFDDFRRETLDQINQELIQAKKLLQDISEARCKGLQALSLRKEFICWVREALGGINELKVFVDLASISAGENDIDVDRVACFHDAVQGYASLLFKLDPSVDFSAFMKHLKKLWKALDKDQYLPRKLCDSARNLEWLKTVNESHGSVERSSLTLATAINQRGIYVIQAPKGGQKISPDTVLHLILPESPGSHEESREYSLEEVKELLNKLMLMSGKKDRNNTEVERFSEVFCSVQRLSQAFIDLHSAGNMLFRTWIAMAYCSPKQGVSLQMDFGLDLVTELKEGGDVTELLAALCRQMEHFLDSWKRFVTQKRMEHFYLNFYTAEQLVYLSTELRKQPPSDAALTMLSFIKSNCTLRDVLRASVGCGSEAARYRMRRVMEELPLMLLSEFSLVDKLRIIMEQSMRCLPAFLPDCLDLETLGHCLAHLAGMGGSPVERCLPRGLQVGQPNLVVCGHSEVLPAALAVYMQTPSQPLPTYDEVLLCTPATTFEEVALLLRRCLTLGSLGHKVYSLLFADQLSYEVARQAEELFHNLCTQQHREDYQLVMVCDGDWEHCYLPSAFSQHKVFVTPQAPLEAIQAYLAGHYRVPKQTLSAAAVFNDRLCVGIVASERAGVGKSLYVKRLHDKMKMQLNVKNVPLKTIRLIDPQVDESRVLGALLPFLDAQYQKVPVLFHLDVTSSVQTGIWVFLFKLLILQYLMDINGKMWLRNPCHLYIVEILERRTSVPSRSSSALRTRVPQFSFLDIFPKVTCRPPKEVIDMELSALRSDTEPGMDLWEFCSETFQRPYQYLRRFNQNQDLDTFQYQEGSVEGTPEECLQHFLFHCGVINPSWSELRNFARFLNYQLRDCEASLFCNPSFIGDTLRGFKKFVVTFMIFMARDFATPSLHTSDQSPGKHMVTMDGVREEDLAPFSLRKRWESEPHPYVFFNDDHTTMTFIGFHLQPNINGSVDAISHLTGKVIKRDVMTRDLYQGLLLQRVPFNVDFDKLPRHKKLERLCLTLGIPQATDPDKTYELTTDNMLKILAIEMRFRCGIPVIIMGETGCGKTRLIKFLSDLRRGGTNADTIKLVKVHGGTTADMIYSRVREAENVAFANKDQHQLDTILFFDEANTTEAISCIKEVLCDHMVDGQPLAEDSGLHIIAACNPYRKHSEEMICRLESAGLGYRVSMEETADRLGSIPLRQLVYRVHALPPSLIPLVWDFGQLSDVAEKLYIQQIVQRLVESISLDENGTRVITEVLCASQGFMRKTEDECSFVSLRDVERCVKVFRWFHEHSAMLLAQLNAFLSKSSVSKNHTERDPVLWSLMLAIGVCYHASLEKKDSYRKAIARFFPKPYDDSRLLLDEITRAQDLFLDGVPLRKTIAKNLALKENVFMMVVCIELKIPLFLVGKPGSSKSLAKTIVADAMQGPAAYSDLFRSLKQVHLVSFQCSPHSTPQGIISTFRQCARFQQGKDLQQYVSVVVLDEVGLAEDSPKMPLKTLHPLLEDGCIEDDPAPHKKVGFVGISNWALDPAKMNRGIFVSRGSPNETELIESAKGICSSDILVQDRVQGYFASFAKAYETVCKRQDKEFFGLRDYYSLIKMVFAAAKASNRKPSPQDIAQAVLRNFSGKDDIQALDIFLANLPEAKCSEEVSPMQLIKQNIFGPSQKVPGGEQEDAESRYLLVLTKNYVALQILQQTFFEGDQQPEIIFGSGFPKDQEYTQLCRNINRVKICMETGKMVLLLNLQNLYESLYDALNQYYVHLGGQKYVDLGLGTHRVKCRVHPNFRLIVIEEKDVVYKHFPIPLINRLEKHYLDINTVLEKWQKSIVEELCAWVEKFINVKAHHFQKRHKYSPSDVFIGYHSDACASVVLQVIERQGPRALTEELHQKVSEEAKSILLNCATPDAVVRLSAYSLGGFAAEWLSQEYFHRQRHNSFADFLQAHLHTADLERHAIFTEITTFSRLLTSHDCEILESEVTGRAPKPTLLWLQQFDTEYSFLKEVRNCLTNTAKCKILIFQTDFEDGIRSAQLIASAKYSVINEINKIRENEDRIFVYFITKLSRVGRGTAYVGFHGGLWQSVHIDDLRRSTLMVSDVTRLQHVTISQLFAPGDLPELGLEHRAEDGHEEAMETEASTSGEVAEVAEEAMETESSEKVGKETSELGGSDVSILDTTRLLRSCVQSAVGMLRDQNESCTRNMRRVVLLLGLLNEDDACHASFLRVSKMRLSVFLKKQEESQFHPLEWLAREACNQDALQEAGTFRHTLWKRVQGAVTPLLASMISFIDRDGNLELLTRPDTPPWARDLWMFIFSDTMLLNIPLVMNNERHKGEMAYIVVQNHMNLSENASNNVPFSWKIKDYLEELWVQAQYITDAEGLPKKFVDIFQQTPLGRFLAQLHGEPQQELLQCYLKDFILLTMRVSTEEELKFLQMALWSCTRKLKAASEAPEEEVSLPWVHLAYQRFRSRLQNFSRILTIYPQVLHSLMEARWNHELAGCEMTLDAFAAMACTEMLTRNTLKPSPQAWLQLVKNLSMPLELICSDEHMQGSGSLAQAVIREVRAQWSRIFSTALFVEHVLLGTESRVPELQGLVTEHVFLLDKCLRENSDVKTHGPFEAVMRTLCECKETASKTLSRFGIQPCSICLGDAKDPVCLPCDHVHCLRCLRAWFASEQMICPYCLTALPDEFSPAVSQAHREAIEKHARFRQMCNSFFVDLVSTICFKDNAPPEKEVIESLLSLLFVQKGRLRDAAQRHCEHTKSLSPFNDVVDKTPVIRSVILKLLLKYSFHDVKDYIQEYLTLLKKKAFITEDKTELYMLFINCLEDSILEKTSAYSRNDELNHLEEEGRFLKAYSPASRGREPANEASVEYLQEVARIRLCLDRAADFLSEPEGGPEMAKEKQCYLQQVKQFCIRVENDWHRVYLVRKLSSQRGMEFVQGLSKPGRPHQWVFPKDVVKQQGLRQDHPGQMDRYLVYGDEYKALRDAVAKAVLECKPLGIKTALKACKTPQSQQSAYFLLTLFREVAILYRSHNASLHPTPEQCEAVSKFIGECKILSPPDISRFATSLVDNSVPLLRAGPSDSNLDGTVTEMAIHAAAVLLCGQNELLEPLKNLAFSPATMAHAFLPTMPEDLLAQARRWKGLERVHWYTCPNGHPCSVGECGRPMEQSICIDCHAPIGGIDHKPRDGFHLVKDKADRTQTGHVLGNPQRRDVVTCDRGLPPVVFLLIRLLTHLALLLGASQSSQALINIIKPPVRDPKGFLQQHILKDLEQLAKMLGHSADETIGVVHLVLRRLLQEQHQLSSRRLLNFDTELSTKEMRNNWEKEIAAVISPELEHLDKTLPTMNNLISQDKRISSNPVAKIIYGDPVTFLPHLPRKSVVHCSKIWSCRKRITVEYLQHIVEQKNGKERVPILWHFLQKEAELRLVKFLPEILALQRDLVKQFQNVQQVEYSSIRGFLSKHSSDGLRQLLHNRITVFLSTWNKLRRSLETNGEINLPKDYCSTDLDLDTEFEILLPRRRGLGLCATALVSYLIRLHNEIVYAVEKLSKENNSYSVDAAEVTELHVISYEVERDLTPLILSNCQYQVEEGRETVQEFDLEKIQRQIVSRFLQGKPRLSLKGIPTLVYRHDWNYEHLFMDIKNKMAQDSLPSSVISAISGQLQSYSDACEVLSVVEVTLGFLSTAGGDPNMQLNVYTQDILQMGDQTIHVLKALNRCQLKHTIALWQFLSAHKSEQLLRLHKEPFGEISSRYKADLSPENAKLLSTFLNQTGLDAFLLELHEMIILKLKNPQTQTEERFRPQWSLRDTLVSYMQTKESEILPEMASQFPEEILLASCVSVWKTAAVLKWNREMR

SEQ ID NO: 75087 - protein, 1098 aa, Homo sapiens
  MOD_RES (1)..(1): Any amino acid
XPGGGGGPSAALREQERVYEWFGLVLGSAQRLEFMCGLLDLCNPLELRFLGSCLEDLARKDYHYLRDSEAKANGLSDPGPLADFREPAVRSRLIVYLALLGSENREAAGRLHRLLPQVDSVLKSLRAARGEGSRGGAEDERGEDGDGEQDAEKDGSGPEGGIVEPRVGGGLGSRAQEELLLLFTMASLHPAFSFHQRVTLREHLERLRAALRGGPEDAEVEVEPCKFAGPRAQNNSAHGDYMQNNESSLIEQAPIPQDGLTVAPHRAQREAVHIEKIMLKGVQRKRADKYWEYTFKVNWSDLSVTTVTKTHQELQEFLLKLPKELSSETFDKTILRALNQGSLKREERRHPDLEPILRQLFSSSSQAFLQSQKVHSFFQSISSDSLHSINNLQSSLKTSKILEHLKEDSSEASSQEEDVLQHAIIHKKHTGKSPIVNNIGTSCSPLDGLTMQYSEQNGIVDWRKQSCTTIQHPEHCVTSADQHSAEKRSLSSINKKKGKPQTEKEKIKKTDNRLNSRINGIRLSTPQHAHGGTVKDVNLDIGSGHDTCGETSSESYSSPSSPRHDGRESFESEEEKDRDTDSNSEDSGNPSTTRFTGYGSVNQTVTVKPPVQIASLGNENGNLLEDPLNSPKYQHISFMPTLHCVMHNGAQKSEVVVPAPKPADGKTIGMLVPSPVAISAIRESANSTPVGILGPTACTGESEKHLELLASPLPIPSTFLPHSSTPALHLTVQRLKLPPPQGSSESCTVNIPQQPPGSLSIASPNTAFIPIHNPGSFPGSPVATTDPITKSASQVVGLNQMVPQIEGNTGTVPQPTNVKVVLPAAGLSAAQPPASYPLPGSPLAAGVLPSQNSSVLSTAATSPQPASAGISQAQATVPPAVPTHTPGPAPSPSPALTHSTAQSDSTSYISAVGNTNANGTVVPPQQMGSGPCGSCGRRCSCGTNGNLQLNSYYYPNPMPGPMYRVPSFFTLPSICNGSYLNQAHQSNGNQLPFFLPQTPYANGLVHDPVMGSQANYGMQQMAGFGRFYPVYPAPNVVANTSGSGPKKNGNVSCYNCGVSGHYAQDCKQSSMEANQQGTYRLRYAPPLPPSNDTLDSAD

SEQ ID NO: 75088 - protein, 287 aa, Homo sapiens
MCYLFRLHPVIKAFLCGSISGTCSTLLFQPLDLLKTRLQTLQPSDHGSRRVGMLAVLLKVVRTESLLGLWKGMSPSIVRCVPGVGIYFGTLYSLKQYFLRGHPPTALESVMLGVGSRSVAGVCMSPITVIKTRYESGKYGYESIYAALRSIYHSEGHRGLFSGLTATLLRDAPFSGIYLMFYNQTKNIVPHDQVDATLIPITNFSCGIFAGILASLVTQPADVIKTHMQLYPLKFQWIGQAVTLIFKDYGLRGFFQGGIPRALRRTLMAAMAWTVYEEMMAKMGLKS

SEQ ID NO: 75089 - protein, 20 aa, Homo sapiens
GPPPDSVYSDICGKDPKRSI

SEQ ID NO: 75090 - protein, 177 aa, Homo sapiens
MRFRFCGDLDCPDWVLAEISTLAKMYEKILKLTADAKFESGDVKATVAVLSFILSSAAKHSVDGESLSSELQQLGLPKEHAASLCRCYEEKQSPLQKHLRVCSLRMNRLAGVGWRVDYTLSSSLLQSVEEPMVHLRLEVAAAPGTPAQPVAMSLSADKFQVLLAELKQAQTLMSSLG

SEQ ID NO: 75091 - protein, 187 aa, Homo sapiens [sequence omitted]

SEQ ID NO: 75092 - protein, 177 aa, Homo sapiens
MEMGRRIHLELRNRTPSDVKELVLDNSRSNEGKLEGLTDEFEELEFLSTINVGLTSIANLPKLNKLKKLELSDNRVSGGLEVLAEKCPNLTHLNLSGNKIKDLSTIEPLKKLENLKSLDLFNCEVTNLNDYRENVFKLLPQLTYLDGYDRDDKEAPDSDAEGYVEGLDDEEEDEDGG

SEQ ID NO: 75093 - protein, 91 aa, Homo sapiens
MASEKPLAAVTCTAPVNIAVIKYWGKRDEELVLPINSSLSVTLHQDQLKTTTTAVISKDFTEDRIWLNGREEDVGQPRLQACLRESELGSP

SEQ ID NO: 75094 - protein, 17 aa, Homo sapiens
MLQFPHISQCEELRLSL

SEQ ID NO: 75095 - protein, 198 aa, Homo sapiens
MNTSPGTVGSDPVILATAGYDHTVRFWQAHSGICTRTVQHQDSQVNALEVTPDRSMIAAAGYQHIRMYDLNSNNPNPIISYDGVNKNIASVGFHEDGRWMYTGGEDCTARIWDLRSRNLQCQRIFQVNAPINCVCLHPNQAELIVGDQSGAIHIWDLKTDHNEQLIPEPEVSITSAHIDPDASYMAAVNSTAPRHLLG

SEQ ID NO: 75096 - protein, 217 aa, Homo sapiens
MAAVRVLVASRLAAASAFTSLSPGGRTPSQRAALHLSVPRPAARVALVLSGCGVYDGTEIHEASAILVHLSRGGAEVQIFAPDVPQMHVIDHTKGQPSEGESRNVLTESARIARGKITDLANLSAANHDAAIFPGGFGAAKNLSTFAVDGKDCKVNKEVERVLKEFHQAGKPIGCDASTSLPAPAPWWSWNAALCCPGLSCVWCWQGESRTCVGEHQ

SEQ ID NO: 75097 - protein, 441 aa, Homo sapiens
MGTFCSVIKFENLQELKRLCHWGPIIALGVIAICSTMAMIDSVLWYWPLHTTGGSVNFIMLINWTVMILYNYFNAMFVGPGFVPLGWKPEISQDTMYLQYCKVCQAYKAPRSHHCRKCNRCVMKMDHHCPWINNCCGYQNHASFTLFLLLAPLGCIHAAFIFVMTMYTQLYHRCPGRWLMEQMHTIKYKQIKPARDQVDLWLSFGWNTVKIDMSAARRDPLPIVPFGLAAFATTLFALGLALGTTIAVGMLFFIQMKIILRNKTSIESWIEEKAKDRIQYYQLDEVFVFPYDMGSRWRNFKQVFTWSGVPEGDGLEWPVREGCHQYSLTIEQLKQKADKRVRSVRYKVIEDYSGACCPLNKGIKTFFTSPCTEEPRIQLQKGEFILATRGLRYWLYGDKILDDSFIEGVSRIRGWFPRKCVEKCPCDAETDQAPEGEKKNR

SEQ ID NO: 75098 - protein, 73 aa, Homo sapiens
MEAAVAPGRDAPAPAASQPSGCGKHNSPERKVYMDYNATTPLEPEVIQAMTKAMWEAWGNPSSPYSAERPRIL

SEQ ID NO: 75099 - protein, 203 aa, Homo sapiens
MSEDFLLDALSEDFSGPQNASSLKFEDAKLAAAISEVVSQTPASTTQAGAPPRDTSQSDKDLDDALDKLSDSLGQRQPDPDENKPMEDKVKEKAKAEHRDKLGERDDTIPPEYRHLLDDNGQDKPVKPPTKKSEDSKKPADDQDPIDALSGDLDSCPSTTETSQNTAKDKCKKAASSSKAPKNGGKAKDSAKTTEETSKPKDD

SEQ ID NO: 75100 - protein, 327 aa, Homo sapiens
  MOD_RES (1)..(1): Any amino acid
XNHRNEDEENTLSVDCTRISFEYDLRLVLYQHWSLHDSLCNTSYTAARFKLWSVHGQKRLQEFLADMGLPLKQVKQKFQAMDISLKENLREMIEESANKFGMKDMRVQTFSIHFGFKHKFLASDVVFATMSLMESPEKDGSGTDHFIQALDSLSRSNLDKLYHGLELAKKQLRATQQTIASCLCTNLVISQGPFLYCSLMEGTPDVMLFSRPASLSLLSKHLLKSFVCSTKNRRCKLLPLVMAAPLSMEHGTVTVVGIPPETDSSDRKKPPGPRHVLCVSSFFGRAFEKAAESTSSRMLHNHFDLSVIELKAEDRSKFLDALISLLS

SEQ ID NO: 75101 - protein, 121 aa, Homo sapiens
MQDTKGPRGLQQGSGDRTSKLGNWLDLYGRVILPVSVDEYQVGQLYSVAEASKNETGGGEGVEVLVNEPYEKDGEKGQYTHKIYHLQSKVPTFVRMLAPEGALNIHEKAWNAYPYCRTVIT

SEQ ID NO: 75102 - protein, 122 aa, Homo sapiens
  MOD_RES (1)..(1): Any amino acid
XQRNKNYEVLCRNRLGNDLYVERMMQTFNGAPKNKDVQCDKIIMEDKGIMSTAWDLYDSYNAMELVSLSVKQSVVESSSKANVLPKDQDQRLPGSTTEKTVVWERDVMTEEGQRECNQCCCL

SEQ ID NO: 75103 - protein, 55 aa, Homo sapiens
MLRRVREGIGKSSMNLPPDKARLLRQYDNEKKWDLICDQERFQVKNPPHTYIQKL

SEQ ID NO: 75104 - protein, 438 aa, Homo sapiens
MEVGGDTAAPAPGGAEDLEDTQFPSEEAREGGGVHAVPPDPEDEGLEETEDHKLVFLQQGPLLLVAMSRTSQSAAQLRGELLAVHAQIVSTLTRASVARIFAHKQNYDLRRLLAGSERTLDRLLDSMEQDPGALLLGAVRCVPLARPLRDALGALLRRCTAPGLALSVLAVGGRLITAAQERNVLAECRLDPADLQLLLDWVGAPAFAAGEAWAPVCLPRFNPDGFFYAYVARLDAMPVCLLLLGTQREAFHAMAACRRLVEDGMHALGAMRALGEAASFSNASSASAPAYSVQAVGAPGLRHFLYKPLDIPDHHRQLPQFTSPELEAPYSREEERQRLSDLYHRLHARLHSTSRPLRLIYHVAEKETLLAWVTSKFELYTCLSPLVTKAGAILVVTKLLRWVKKEEDRLFIRYPPKYSTPPATSTDQAAHNGLFTGL

SEQ ID NO: 75105 - protein, 158 aa, Homo sapiens
MTCQDTALSICVRCPATTVSPKTRGLAKIIMDSLGAVSTRLGFDLFKELKKTNDGNIFFSPVGILTAIGMVLLGTRGATASQLEEVFHSEKETKSSRIKAEEKEVIENTEAVHQQFQKFLTEISKLTNDYELNITNRLFGEKTYLFLQKYLDYVEKYY

SEQ ID NO: 75106 - protein, 169 aa, Homo sapiens
MTVGKSSKMLQHIDYRMRCILQDGRIFIGTFKAFDKHMNLILCDCDEFRKIKPKNAKQPEREEKRVLGLVLLRGENLVSMTVEGPPPKDTGIARVPLAGAAGGPGVGRAAGRGVPAGVPIPQAPAGLAGPVRGVGGPSQQVMTPQGRGTVAAAAVAATASIAGAPTQYP

SEQ ID NO: 75107 - protein, 232 aa, Homo sapiens
MAPSVPAAEPEYPKGIRAVLLGPPGAGKGTQAPRLAENFCVCHLATGDMLRAMVASGSELGKKLKATMDAGKLVSDEMVVELIEKNLETPLCKNGFLLDGFPRTVRQAEMLDDLMEKRKEKLDSVIEFSIPDSLLIRRITGRLIHPKSGRSYHEEFNPPKEPMKDDITGEPLIRRSDDNEKALKIRLQAYHTQTTPLIEYYRKRGIHSAIDASQTPDVVFASILAAFSKATC

SEQ ID NO: 75108 - protein, 165 aa, Homo sapiens
  MOD_RES (1)..(1): Any amino acid
XSSSSSSGNPLVYLDVDANGKPLGRVVLELKADVVPKTAENFRALCTGEKGFGYKGSTFHRVIPSFMCQAGDFTNHNGTGGKSIYGSRFPDENFTLKHVGPGVLSMANAGPNTNGSQFFICTIKTDWSMALDDIALHCCSPGSPVLTGWMASMLCSVTSKRAWTS

SEQ ID NO: 75109 - protein, 191 aa, Homo sapiens
MSQRQVLQVFEQYQKARTQFVQMVAELATRPQNIETLQNAGVMSLLRTLLLDVVPTIQQTAALALGRLANYNDDLAEAVVKCDILPQLVYSLAEQNGVPQLSVCLSEEPEDHIKAAAAWALGQIGRHTPEHARAVAVTNTLPVLLSLYMSTESSEDLQVKSKKAIKNILQKCTYLPALEPFLYDAPPNILK

SEQ ID NO: 75110 - protein, 53 aa, Homo sapiens
AKAAWSLGNLTDTLIVNMETPDPSFQEEFSGLLLLKMLRSAIEASKDKDKKLP

SEQ ID NO: 75111 - protein, 107 aa, Homo sapiens
MSSLTGAYTSGIPSSSRNAITSSYSSTRGISQLWKRNGPSSSPFSSPASSRSQTPERPAKKIREEELCHHSSSSTPLAADKESQGEKAADTTPRKKQNSNSQSTPGS

SEQ ID NO: 75112 - protein, 604 aa, Homo sapiens
MNPSAPSYPMASLYVGDLHPDVTEAMLYEKFSPAGPILSIRVCRDMITRRSLGYAYVNFQQPADAERALDTMNFDVIKGKPVRIMWSQRDPSLRKSGVVCDENGSKGYGFVHFETQEAAERAIEKMNGMLLNDRKVFVGRFKSRKEREAELGARAKEFTNVYIKNFGEDMDDERLKDLFGKFGPALSVKVMTDESGKSKGFGFVSFERHEDAQKAVDEMNGKELNGKQIYVGRAQKKVERQTELKRKFEQMKQDRITRYQGVNLYVKNLDDGIDDERLRKEFSPFGTITSAKVMMEGGRSKGFGFVCFSSPEEATKAVTEMNGRIVATKPLYVALAQRKEERQAHLTNQYMQRMASVRAVPNPVINPYQPAPPSGYFMAAIPQTQNRAAYYPPSQIAQLRPSPRWTAQGARPHPFQNMPGAIRPAAPRPPFSTMRPASSQVPRVMSTQRVANTSTQTMGPRPAAAAAAATPAVRTVPQYKYAAGVRNPQQHLNAQPQVTMQQPAVHVQGQEPLTASMLASAPPQEQKQMLGERLFPLIQAMHPTLAGKITGMLLEIDNSELLHMLESPESLRSKVDEAVAVLQAHQAKEAAQKAVNSATGVPTV

SEQ ID NO: 75113 - protein, 256 aa, Homo sapiens
MSTVHEILCKLSLEGDHSTPPSAYGSVKAYTNFDAERDALNIETAIKTKGVDEVTIVNILTNRSNAQRQDIAFAYQRRTKKELASALKSALSGHLETVILGLLKTPAQYDASELKASMKGLGTDEDSLIEIICSRTNQELQEINRVYKEMYKTDLEKDIISDTSGDFRKLMVALAKGRRAEDGSVIDYELIDQDARDLYDAGVKRKGTDVPKWISIMTERSVPHLQKVFDRYKSYSPYDMLESIRKEVKGDLENAF

SEQ ID NO: 75114 - protein, 76 aa, Homo sapiens
MVVMNSLRVILQASPGKLLWRKFQIPRFMPARPCSLYTCTYKTRNRALHPLWESVDLVPGGDRQSPINIRWRDSVY

SEQ ID NO: 75115 - protein, 349 aa, Homo sapiens
MEIIRSNFKSNLHKVYQAIEEADFFAIDGEFSGISDGPSVSALTNGFDTPEERYQKLKKHSMDFLLFQFGLCTFKYDYTDSKYITKSFNFYVFPKPFNRSSPDVKFVCQSSSIDFLASQGFDFNKVFRNGIPYLNQEEERQLREQYDEKRSQANGAGALSYVSPNTSKCPVTIPEDQKKFIDQVVEKIEDLLQSEENKNLDLEPCTGFQRKLIYQTLSWKYPKGIHVETLETEKKERYIVISKVDEEERKRREQQKHAKEQEELNDAVGFSRVIHAIANSGKLVIGHNMLLDVMHTVHQFYCPLPAMESHSFTRLECSGMISAPCNIRLLGSSDSPASASRVAGTTGLK

SEQ ID NO: 75116 - protein, 317 aa, Homo sapiens
MADIHHLKEQLAELRQEFLRQEDQLQDYRKNNTYLVKRLEYESFQCGQQMKELRAQHEENIKKLADQFLEEQKQETQKIQSNDGKELDINNQVVPKNIPKVAENVADKNEEPSSNHIPHGKEQIKRGGDAGMPGIEENDLAKVDDLPPALRKPPISVSQHESHQAISHLPTGQPLSPNMPPDSHINHNGNPGTSKQNPSSPLQRLIPGSNLDSEPRIQTDILKQATKDRVSDFHKLKQSRFFDENESPVDPQHGSKLADYNGDDGNVGEYEADKQAELAYNEEEDGDGGEEDVQDDEERELQMDPADYGKQHFNDVL

SEQ ID NO: 75117 - protein, 173 aa, Homo sapiens
MAALDSLSLFTSLGLSEQKARETLKNSALSAQLREAATQAQQTLGSTIDKATGILLYGLASRLRDTRRLSFLVSYIASKKIHTEPQLSAALEYVRSHPLDPIDTVDFERECGVGVIVTPEQIEEAVEAAINRHRPQLLVERYHFNMGLLMGEARAVLKWADGETADQTLSLME

SEQ ID NO: 75118 - protein, 162 aa, Homo sapiens
MSRESDVEAQQSHGSSACSQPHGSVTQSQGSSSQSQGISSSSTSTMPNSSQSSHSSSGTLSSLETVSTQELYSIPEDQEPEDQEPEEPTPAPWARLWALQDGFANLECVNDNYWFGRDKSCEYCFDEPLLKRTDKYRTYSKKHFRIFREVGPKNSYIAYIED

SEQ ID NO: 75119 - protein, 100 aa, Homo sapiens
  MOD_RES (1)..(1): Any amino acid
XAVAIEKVKLRVLKQYDYDSSTIRKKIFQEALVQITLPTVQKALASTCKPELQKYEQFIFADHTNMIHVENVYEEILHQILLDETLKGAYIPIKCSSLKS

SEQ ID NO: 75120 - protein, 230 aa, Homo sapiens
MAFPKKKLQGLVAATITPMTENGEINFSVIGQYVDYLVKEQGVKNIFVNGTTGEGLSLSVSERRQVAEEWVTKGKDKLDQVIIHVGALSLKESQELAQHAAEIGADGIAVIAPFFLKPWTKDILINFLKEVAAAAPALPFYYYHIPALTGVKIRAEELLDGILDKIPTFQGLKFSDTDLLDFGQCVDQNRQQQFAFLFGVDEQLLSALVMGATGAVGSFVSRDLSTLLSN

SEQ ID NO: 75121 - protein, 57 aa, Homo sapiens
MAAVRALVASRLAAASAFTSLSPGGRTPSQRAALHLSVPRPAARVALDPGAPEPWRG

SEQ ID NO: 75122 - protein, 1039 aa, Homo sapiens
MVSSAQMGFNLQALLEQLSQDELSKFKYLITTFSLAHELQKIPHKEMASLQVFEKMHRMDLSERAKDEVREAALKSFNKRKPLSLGITRKERPPLDVDEMLERFKTEAQAFTETKGNVICLGKEVFKGKKPDKDNRCRYILKTKFREMWKSWPGDSKEVQVMAERYKMLIPFSNPRVLPGPFSYTVVLYGPAGLGKTTLAQKLMLDWAEDNLIHKFKYAFYLSCRELSRLGPCSFAELVFRDWPELQDDIPHILAQARKILFVIDGFDELGAAPGALIEDICGDWEKKKPVPVLLGSLLNRVMLPKAALLVTTRPRALRDLRILAEEPIYIRVEGFLEEDRRAYFLRHFGDEDQAMRAFELMRSNAALFQLGSAPAVCWIVCTTLKLQMEKGEDPVPTCLTRTGLFLRFLCSRFPQGAQLRGALRTLSLLAAQGLWAQTSVLHREDLERLGVQESDLRLFLDGDILRQDRVSKGCYSFIHLSFQQFLTALFYTLEKEEEEDRDGHAWDIGDVQKLLSGVERLRNPDLIQAGYYSFGLANEKRAKELEATFGCRMSPDIKQELLRCDISCKGGHSTVTDLQELLGCLYESQEEELVKEVMAQFKEISLHLNAVDVVPSSFCVKHCRNLQKMSLQVIKENLPENVTASESDAEVERSQDDQHMLPFWTDLCSIFGSNKDLMGLAINDSFLSASLVRILCEQIASDTCHLQRVVFKNISPADAHRNLCLALRGHKTVTYLTLQGNDQDDMFPALCEVLRHPECNLRYLGLVSCSATTQQWADLSLALEVNQSLTCVNLSDNELLDEGAKLLYTTLRHPKCFLQRLSLENCHLTEANCKDLAAVLVVSRELTHLCLAKNPIGNTGVKFLCEGLRYPECKLQTLVLWNCDITSDGCCDLTKLLQEKSSLLCLDLGLNHIGVKGMKFLCEALRKPLCNLRCLWLWGCSIPPFSCEDLCSALSCNQSLVTLDLGQNPLGSSGVKMLFETLTCSSGTLRTLRLKIDDFNDELNKLLEEIEEKNPQLIIDTEKHHPWAERPSSHDFMI

SEQ ID NO: 75123 - protein, 26 aa, Homo sapiens
MELQTLQEALKVEIQVHQKLVAQMKQ

SEQ ID NO: 75124 - protein, 142 aa, Homo sapiens
MGCCYSSENEDSDQDREERKLLLDPSSPPTKALNGAEPNYHSLPSARTDEQALLSSILAKTASNIIDVSAADSQGMEQHEYMDRARQYSTRLAVLSSSLTHWKKLPPLPSLTSQPHQVLASEPIPFSDLQQVQLFQSTPCSQ

SEQ ID NO: 75125 - protein, 191 aa, Homo sapiens
  MOD_RES (1)..(1): Any amino acid
XMRKVREVRAQLKDIMVQQRMSLASCGTDWDIVRKCICAAYFHQAAKLKGIGEYVNIRTGMPCHLHPTSSLFGMGYTPDYIVYHELVMTTKEYMQCVTAVDGEWLAELGPMFYSVKQAGKSRQENRRRAKEEASAMEEEMALAEEQLRARRQEQEKRSPLGSVRSTKIYTPGRKEQGEPMTPRRTPARFGL

SEQ ID NO: 75126 - protein, 293 aa, Homo sapiens
MGPPSACPHRECIPWQGLLLTASLLTFWNAPTTAWLFIASAPFEVAEGENVHLSVVYLPENLYSYGWYKGKTVEPNQLIAAYVIDTHVRTPGPAYSGRETISPSGDLHFQNVTLEDTGYYNLQVTYRNSQIEQASHHLRVYESVAQPSIQASSTTVTEKGSVVLTCHTNNTGTSFQWIFNNQRLQVTKRMKLSWFNHVLTIDPIRQEDAGEYQCEVSNPVSSNRSDPLKLTVKSDDNTLGILIGVLVGSLLVAALVCFLLLRKTGRASDQSDFREQQPPASTPGHGPSDSSIS

SEQ ID NO: 75127 - protein, 51 aa, Homo sapiens
MAFWAGGSPSVVDYFPSEDFYRCGYCKNESGSRSNGADLYNFSLQNLTRRF

SEQ ID NO: 75128 - protein, 711 aa, Homo sapiens
MFKFLSFRVRSIQEEVSIKEIAITHHVKEGHEKADPSQFELLKVLGQGSFGKVFLVKKISGSDARQLYAMKVLKKATLKVRDRVRTKMERDILVEVNHPFIVKLHYAFQTEGKLYLILDFLRGGDLFTRLSKEVMFTEEDVKFYLAELALALDHLHSLGIIYRDLKPENILLDEEGHIKLTDFGLSKESIDHEKKAYSFCGTVEYMAPEVVNRRGHTQSADWWSFGVLMFEMLTGTLPFQGKDRKETMTMILKAKLGMPQFLSPEAQSLLRMLFKRNPANRLGAGPDGVEEIKRHSFFSTIDWNKLYRREIHPPFKPATGRPEDTFYFDPEFTAKTPKDSPGIPPSANAHQLFRGFSFVAITSDDESQAMQTVGVHSIVQQLHRNSIQFTDGYEVKEDIGVGSYSVCKRCIHKATNMEFAVKIIDKSKRDPTEEIEILLRYGQHPNIITLKDVYDDGKYVYVVTELMKGGELLDKILRQKFFSEREASAVLFTITKTVEYLHAQGVVHRDLKPSNILYVDESGNPESIRICDFGFAKQLRAENGLLMTPCYTANFVAPEVLKRQGYDAACDIWSLGVLLYTMLTGYTPFANGPDDTPEEILARIGSGKFSLSGGYWNSVSDTAKDLVSKMLHVDPHQRLTAALVLRHPWIVHWDQLPQYQLNRQDAPHLVKGAMAATYSALNRNQSPVLEPVGRSTLAQRRGIKKITSTAL

SEQ ID NO: 75129 - protein, 100 aa, Homo sapiens
MFGLFVEHGPYVVTSNMTLRDRDFPWTTTLSMLYIDNPVGTGFSFTDDTHGYAVNEDDVARDLYSALIQFFQIFPEYKNNDFYVTGESYAGKYVPAIAHL

SEQ ID NO: 75130 - protein, 46 aa, Homo sapiens
MKTVLMVAEKPSLAQSIAKILSRGSLSSHKGLNGACSVHEYTGTFA

SEQ ID NO: 75131 - protein, 258 aa, Homo sapiens
  MOD_RES (1)..(1): Any amino acid
XNSLSTLEKNDVVQHYWDVLVQAFVQNGTVSTNEFLCDKDKTSTVAPTIHTTVPSPTTTPTPKEKPEAGTYSVNNGNDTCLLATMGLQLNITQDKVASVININPNTTHSTGSCRSHTALLRLNSSTIKYLDFVFAVKNENRFYLKEVNISMYLVNGSVFSIANNNLSYWDAPLGSSYMCNKEQTVSVSGAFQINTFDLRVQPFNVTQGKYSTAQECSLDDDTILIPIIVGAGLSGLIIVIVIAYVIGRRKSYAGYQTL

SEQ ID NO: 75132 - protein, 271 aa, Homo sapiens
MEEEGKKGKKPGIVSPFKRVFLKGEKSRDKKAHEKVTERRPLHTVVLSLPERVEPDRLLSDYIEKEVKYLGQLTSIPGYLNPSSRTEILHFIDNAKRAHQLPGHLTQEHDAVLSLSAYNVKLAWRDGEDIILRVPIHDIAAVSYVRDDAAHLVVLKTAQDPGISPSQSLCAESSRGLSAGSLSESAVGPVEACCLVILAAESKVAAEELCCLLGQVFQVVYTESTIDFLDRAIFDGASTPTHHLSLHSAASLNLWMWVVHHPTARPSVRAS

SEQ ID NO: 75133 - protein, 112 aa, Homo sapiens
MAAETQTLNFGPEWLRALSSGGSITSPPLSPALPKYKLADYRYGREEMLALFLKDNKIPSDLLDKEFLPILQEEPLPPLALVPFTEEEQRNFSMSVNSAAVLRLTGRGGGGT

SEQ ID NO: 75134 - protein, 621 aa, Homo sapiens
MEDPRGINGQSVQTSQASSDVAVSSSCRSMEMQDLTSPHSRLSGSSESPSGPKLGNSHINSNSMTPNGTEVKTEPMSSSETASTTADGSLNNFSGSAIGSSSFSPRPTHQFSPPQIYPSNRPYPHILPTPSSQTMAAYGQTQFTTGMQQATAYATYPQPGQPYGISSYGALWAGIKTEGGLSQSQSPGQTGFLSYGTSFSTPQPGQAPYSYQMQGSSFTTSSGIYTGNNSLTNSSGFNSSQQDYPSYPSFGQGQYAQYYNSSPYPAHYMTSSNTSPTTPSTNATYQLQEPPSGITSQAVTDPTAEYSTIHSPSTPIKDSDSDRLRRGSDGKSRGRGRRNNNPSPPPDSDLERVFIWDLDETIIVFHSLLTGSYANRYGRDPPTSVSLGLRMEEMIFNLADTHLFFNDLEECDQVHIDDVSSDDNGQDLSTYNFGTDGFPAAATSANLCLATGVRGGVDWMRKLAFRYRRVKEIYNTYKNNVGGLLGPAKREAWLQLRAEIEALTDSWLTLALKALSLIHSRTNCVNILVTTTQLIPALAKVLLYGLGIVFPIENIYSATKIGKESCFERIIQRFGRKVVYVVIGDGVEEEQGAKKHAMPFWRISSHSDLMALHHALELEYL

SEQ ID NO: 75135 - protein, 111 aa, Homo sapiens
MPFPVTTQGSQQTQPPQKHYGITSPISLAAPKETDCVLTQKLIETLKPFGVFEEEEELQRRILILGKLNNLVKEWIREISESKNLPQSVIENVGGKIFTFGSYRLGVHTKD

SEQ ID NO: 75136 - protein, 178 aa, Homo sapiens
MASRWQNMGTSVRRRSLQHQEQLEDSKELQPVVSHQETSVGALGSLCRQFQRRLPLRAVNLNLRAGPSWKRLETPEPENPGVLPKWHQVAGGDPGEGQEAEERSTEGQWIPNSQPEPEEHPAVWSRPCPLSRRPLGEGASPPLCPDGLTCPPITAIKAGGCLPEPLLLNRAPLLSQRV

SEQ ID NO: 75137 - protein, 57 aa, Homo sapiens
MAAATAAAALAAADPPPAMPQAAGAGGPTTRRDFYWLRSFLAGEEEEVTSNRTWQLD

SEQ ID NO: 75138 - protein, 129 aa, Homo sapiens
MAEAEGVPTTPGPASGSTFRGRRDVSGSWERDQQVEAAQRALVEVLGPYEPLLSRVQAALVWERPARSALWCLGLNAAFWFFALTSLRLVFLLAFGLMIIVCIDQWKNKIWPEIKVPRPDALDNESSAC

SEQ ID NO: 75139 - protein, 198 aa, Homo sapiens
  MOD_RES (1)..(1): Any amino acid
XPDQRSKFENEEFFRKLSRECEIKYTGFRDRPHEERQARFQNACRDGRSEIVSRLARGARGSLVARGRGGPGRFRTAARLLRLPELSGRRLTSYSGFKMRNQMPRAGTRGETLFLGLAAVARVGQRSTASGARTRARLNKRRALFRRRHRRRVQGICSKQTPIRKKKWSFIQGFCGHRNQSVSPVFSGQLAGRTATNT

SEQ ID NO: 75140 - protein, 94 aa, Homo sapiens
MAELNTHVNVKEKIYAVRSVVPNKSNNEIVLVLQQFDFNVDKAVQAFVDGSAIQVLKEWNMTGKKKNNKRKRSKSKQHQGNKDAKDKVERPEAG

SEQ ID NO: 75141 - protein, 57 aa, Homo sapiens
MTSDQDAKVVAEPQTQRVQEGKDSAHLMNGPISQTTSQTSSIPPLSQVPATKVSELN

SEQ ID NO: 75142 - protein, 716 aa, Homo sapiens [sequence omitted]

SEQ ID NO: 75143 - protein, 1347 aa, Homo sapiens
  MOD_RES (1)..(1): Any amino acid
XINLGSELIAACGEPDKPIVKKSIDELNSAWDSLNKAWKDRIDKLEEAMQAAVQYQDGLQAVFDWVDIAGGKLASMSPIGTDLETVKQQIEELKQFKSEAYQQQIEMERLNHQAELLLKKVTEESDKHTVQDPLMELKLIWDSLEERIINRQHKLEGALLALGQFQHALDELLAWLTHTEGLLSEQKPVGGDPKAIEIELAKHHVLQNDVLAHQSTVEAVNKAGNDLIESSAGEEASNLQNKLEVLNQRWQNVLEKTEQRKQQLDGALRQAKGFHGEIEDLQQWLTDTERHLLASKPLGGLPETAKEQLNVHMEVCAAFEAKEETYKSLMQKGQQMLARCPKSAETNIDQDINNLKEKWESVETKLNERKTKLEEALNLAMEFHNSLQDFINWLTQAEQTLNVASRPSLILDTVLFQIDEHKVFANEVNSHREQIIELDKTGTHLKYFSQKQDVVLIKNLLISVQSRWEKVVQRLVERGRSLDDARKRAKQFHEAWSKLMEWLEESEKSLDSELEIANDPDKIKTQLAQHKEFQKSLGAKHSVYDTTNRTGRSLKEKTSLADDNLKLDDMLSELRDKWDTICGKSVERQNKLEEALLFSGQFTDALQALIDWLYRVEPQLAEDQPVHGDIDLVMNLIDNHKAFQKELGKRTSSVQALKRSARELIEGSRDDSSWVKVQMQELSTRWETVCALSISKQTRLEAALRQAEEFHSVVHALLEWLAEAEQTLRFHGVLPDDEDALRTLIDQHKEFMKKLEEKRAELNKATTMGDTVLAICHPDSITTIKHWITIIRARFEEVLAWAKQHQQRLASALAGLIAKQELLEALLAWLQWAETTLTDKDKEVIPQEIEEVKALIAEHQTFMEEMTRKQPDVDKVTKTYKRRAADPSSLQSHIPVLDKGRAGRKRFPASSLYPSGSQTQIETKNPRVNLLVSKWQQVWLLALERRRKLNDALDRLEELREFANFDFDIWRKKYMRWMNHKKSRVMDFFRRIDKDQDGKITRQEFIDGILSSKFPTSRLEMSAVADIFDRDGDGYIDYYEFVAALHPNKDAYKPITDADKIEDEVTRQVAKCKCAKRFQVEQIGDNKYRFGDSQQLRLVRILRSTVMVRVGGGWMALDEFLVKNDPCRVHHHGSKMLRSESNSSITTTQPTIAKGRTNMELREKFILADGASQGMAAFRPRGRRSRPSSRGASPNRSTSVSSQAAQAASPQVPATTTPKGTPIQGSKLRLPGYLSGKGFHSGEDSGLITTAAARVRTQFADSKKTPSRPGSRAGSKAGSRASSRRGSDASDFDISEIQSVCSDVETVPQTHRPTPRAGSRPSTAKPSKIPTPQRKSPASKLDKSSKR

SEQ ID NO: 75144 - protein, 211 aa, Homo sapiens
  MOD_RES (1)..(1): Any amino acid
XKILLKHGAQVNGVTADWHTPLFNACVSGSWDCVNLLLQHGASVQPESDLASPIHEAARRGHVECVNSLIAYGGNIDHKISHLGTPLYLACENQQRACVKKLLESGADVNQGKGQDSPLHAVARTASEELACLLMDFGADTQAKNAEGKRPVELVPPESPLAQLFLEREDGVTLCRPGWSAVARSRLIATSASRNSDKMCSPGQQSFMLLV

SEQ ID NO: 75145 - protein, 177 aa, Homo sapiens
MAAAALGSSSGSASPAVAELCQNTPETFLEASKLLLTYADNILRNPNDEKYRSIRIGNTAFSTRLLPVRGAVECLFEMGFEEGETHLIFPKKASVEQLQKIRDLIAIERSSRLDGSNKSHKVKSSQQPAASTQLPTTPSSNPSGLNQHTRNRQGQSSDPPSASTIPRSGTTGLYGCC

SEQ ID NO: 75146 - protein, 145 aa, Homo sapiens
MSNDGRSRNRDRRYDEVPSDLPYQDTTIRTHPTLHDSERAVSADPLPPPPLPLQPPFGPDFYSSDTEEPAIAPDLKPVRRFVPDSWKNFFRGKKKDPEWDKPVSDIRYISDGVECSPPASPARPNHRSPLNSCKDPYGGSEGTFS

SEQ ID NO: 75147 - protein, 101 aa, Homo sapiens
MVMVKGVNKLALPPGSVISYPLENRVYMVGKANSVFEDLSVTLRQLRNRLFQENSVLSSLPLNSLSRNNEVDLLFLSELQVLHDISSLGETTYLPRTQAWA

SEQ ID NO: 75148 - protein, 79 aa, Homo sapiens
MPDRDSYANGTGSSGGGPGGGGSEEASGAGVGSGGASSDAICRDFLRNVCKRGKRCRYRHPDMSEVSNLGVSKNEFIFC

SEQ ID NO: 75149 - protein, 131 aa, Homo sapiens
MAAPGGRSEPPQLPEYSCSYMVSRPVYSELAFQQQHERRLQERKTLRESLAKCCSCSRKRAFGVLKTLVPILEWLPKYRVKEWLLSDVISGVSTGLVATLQGMAYALLAAVPVGYGLYSAFFPILTYFIFG

SEQ ID NO: 75150 - protein, 44 aa, Homo sapiens
MQTCPLAFPGHVSQALGTLLFLAASLSAQNEGWDSPICTEGVVS

SEQ ID NO: 75151 - protein, 191 aa, Homo sapiens
MLRMRVPALLVLLFCFRGRAGPSPHFLQQPEDLVVLLGEEARLPCALGAYWGLVQWTKSGLALGGQRDLPGWSRYWISGNAANGQHDLHIRPVELEDEASYECQATQAGLRSRPAQLHVLVPPEAPQVLGGPSVSLVAGVPANLTCRSRGDARPTPELLWFRDGVLLDGATFHQTLLKEGTPGSVESTLTL

SEQ ID NO: 75152 - protein, 201 aa, Homo sapiens
MTLHATRGAALLSWVNSLHVADPVEAVLQLQDCSIFIKIIDRIHGTEEGQQILKQPVSERLDFVCSFLQKNRKHPSSPECLVSAQKVLEGSELELAKMTMLLLYHSTMSSKSPRDWEQFEYKIQAELAVILKFVLDHEDGLNLNEDLENFLQKAPVPSTCSSTFPEELSPPSHQAKREIRFLELQKVASSSSGNNFLSGSP

SEQ ID NO: 75153 - protein, 52 aa, Homo sapiens
MSKQQPTQFINPETPGYVGFANLPNQVHRKSVKKGFEFTLMVVGESGLGKST

SEQ ID NO: 75154 - protein, 89 aa, Homo sapiens
MWGYGRSLAKAMLQGPGWPSFLTPVWPPSAGCFKDDRIVFWTWMFSTYFMEKWAPRQDDMLFYVRRKLAYSGSESGADGRKMRKRRARR

SEQ ID NO: 75155 - protein, 88 aa, Homo sapiens
MSALGAVIALLLWGQLFAVDSGNDVTDIADDGCPKPPEIAHGYVEHSVRYQCKNYYKLRTEGDGVYTLNNEKQWINKAVGDKLPECEA

SEQ ID NO: 75156 - protein, 76 aa, Homo sapiens
MEATRRRQHLGATGGPGAQLGASFLQASWYSLSSGFHSTSPVLGTTSTWPTTSSRPFSCSSSSSGPPAPCHAPSRT

SEQ ID NO: 75157 - protein, 231 aa, Homo sapiens
MEDLEEDVRFIVDETLDFGGLSPSDSREEEDITVLVTPEKPLRRGLSHRSDPNAVAPAPQGVRLSLGPLSPEKLEEILDEANRLAAQLEQCALQDRESAGEGLGPRRVKPSPRRETFVLKDSPVRDLLPTVNSLTRSTPSPSSLTPRLRSNDRKGSVRALRATSGKRPSNMKRESPTCNLFPASKSPASSPLTRSTPPVRGRAGPSGRAAASPPTPIRSVLAPQPSTSNSQ

SEQ ID NO: 75158 - protein, 156 aa, Homo sapiens
MGRTVVVLGGGISGLAASYHLSRAPCPPKVMLGGSWLQTLEASGCVLSQELFQQRAQEAAATQLGLKEMPSHCLVHLHKTKNQLKWRQSHDRTVEWPKEYPGRSRKQAPSILHVPGCQLLRCRDRDHLGAVSEQPRSSAESRVGVASSTFSTFPLF

SEQ ID NO: 75159 - protein, 129 aa, Homo sapiens
TACFREERDVLVNGDCQWITALHYAFQDENHLYLVMDYYVGGDLLTLLSKFEDKLPEDMARFYIGEMVLAIDSIHQLHYVHRDIKPDNVLLDVNGHIRLADFGSCLKMNDDGTVGIFVGDFPFGFGFGI

SEQ ID NO: 75160 - protein, 268 aa, Homo sapiens
  MOD_RES (1)..(1): Any amino acid
XRYTMSRSLDGAEFSRPASVSENHDAGPDGDKRDEDGESGGQRSEAEEGEVRTPTKIKELKFLDKPEDVLLKHQASINELKRTLKEPNSKLIHRDRDWERERRLPSSPASPSPKGTPEKANEPVKTETMTVSSLAIRKKIEPEAVLQTRVSAMDNTQVDGSASVGREFIATTPSITTETISTTMENSLKSGKGAAAMIPGPQTVATEIRSLSPIIGKDVLTSTYGATAETLSTSTTTHVTKTVKGGFSETRIEKRIIITGDEDVDQDQ

SEQ ID NO: 75161 - protein, 31 aa, Homo sapiens
MSERQGAGATNGKDKTSGENVGCPILFLTHS

SEQ ID NO: 75162 - protein, 233 aa, Homo sapiens
MAAPVVTAPGRALLRAGAGRLLRGGVQELLRPRHEGNAPDLACNFSLSQNRGTVIVERWWKVPLAGEGRKPRLHRRHRVYKLVEDTKHRPKENLELILTQSVENVGVRGDLVSVKKSLGRNRLLPQGLAVYASPENKKLFEEEKLLRQEGKLEKIQTKAGEALGVVVAPHTLKLPEEPITRWGEYWCEVTVNGLDTVRVPMSVVNFEKPKTKRYKYWLAQQAAKAMAPTSPQI

SEQ ID NO: 75163 - protein, 751 aa, Homo sapiens
  MOD_RES (1)..(1): Any amino acid
XSYDAKREDFGAQDATKLDTWVFDNVKDFFHHARNNQSLFSKINEEKIVFFLHLLGIDTNGHAHRPSSRDYKHNIKKVDDGVKEIVSMFNHFYGNDGKTTFIFTSDHGMTDWGSHGAGHPSETLTPLVTWGAGIKYPQRVSAQQFDDAFLKEWRLENWKRLDVNQGILPVDYLNNTDLFKAESMFTNAVQILEQFKVKMTQKKEVTLPFLFTPFKLLSDSKQFNILRKARSYIKHRKFDEVVSLCKELIHLALKGLSYYHTYDRFFLGVNVVIGFVGWISYASLLIIKSHSNLIKGVSKEVKKPSHLLPCSFVAIGILVAFFLLIQACPWTYYVYGLLPLPIWYAVLREFQVIQDLVVSVLTYPLSHFVGYLLAFTLGIEVLVLSFFYRYMLTAGLTAFAAWPFLTRLWTRAKMTSLSWTFFSLLLAVFPLMPVVGRKPDISLVMGAGLLVLLLSLCVVTSLMKRKDSFIKEELLVHLLQVLSTVLSMYVVYSTQSSLLRKQGLPLMNQIISWATLASSLVVPLLSSPVLFQRLFSILLSLMSTYLLLSTGYEALFPLVLSCLMFVWINIEQETLQQSGVCCKQKLTSIQFSYNTDITQFRQLYLDDIRRAFFLVFFLVTAFFGTGNIASINSFDLASVYCFLTVFSPFMMGALMMWKILIPFVLVMCAFEAVQLTTQLSSKSLFLIVLVISDIMALHFFFLVKDYGSWLDIGTRHFTGPDCRSTAWRCRKHLTKMELKAMVSDERGQSSK

SEQ ID NO: 75164 - protein, 806 aa, Homo sapiens
MAALSGGGGGGAEPGQALFNGDMEPEAGAGAGAAASSAADPAIPEEVWNIKQMIKLTQEHIEALLDKFGGEHNPPSIYLEAYEEYTSKLDALQQREQQLLESLGNGTDFSVSSSASMDTVTSSSSSSLSVLPSSLSVFQNPTDVARSNPKSPQKPIVRVFLPNKQRTVVPARCGVTVRDSLKKALMMRGLIPECCAVYRIQDGEKKPIGWDTDISWLTGEELHVEVLENVPLTTHNFVRKTFFTLAFCDFCRKLLFQGFRCQTCGYKFHQRCSTEVPLMCVNYDQLDLLFVSKFFEHHPIPQEEASLAETALTSGSSPSAPASDSIGPQILTSPSPSKSIPIPQPFRPADEDHRNQFGQRDRSSSAPNVHINTIEPVNIDDLIRDQGFRGDGAPLNQLMRCLRKYQSRTPSPLLHSVPSEIVFDFEPGPVFRGSTTGLSATPPASLPGSLTNVKALQKSPGPQRERKSSSSSEDRNRMKTLGRRDSSDDWEIPDGQITVGQRIGSGSFGTVYKGKWHGDVAVKMLNVTAPTPQQLQAFKNEVGVLRKTRHVNILLFMGYSTKPQLAIVTQWCEGSSLYHHLHIIETKFEMIKLIDIARQTAQGMDYLHAKSIIHRDLKSNNIFLHEDLTVKIGDFGLATVKSRWSGSHQFEQLSGSILWMAPEVIRMQDKNPYSFQSDVYAFGIVLYELMTGQLPYSNINNRDQIIFMVGRGYLSPDLSKVRSNCPKAMKRLMAECLKKKRDERPLFPQILASIELLARSLPKIHRSASEPSLNRAGFQTEDFSLYACASPKTPIQAGGYGAFPVH

SEQ ID NO: 75165 - protein, 327 aa, Homo sapiens
MNNSGADEIGKLFVGGLDWSTTQETLRSYFSQYGEVVDCVIMKDKTTNQSRGFGFVKFKDPNCVGTVLASRPHTLDGRNQKGPRSDNSKSNKIFVGGIPHNCGETELREYFKKFGVVTEVVMIYDAEKQRPRGFGFITFEDEQSVDQAVNMHFHDIMGKKVEVKRAEPRDSKSQAPGQPGASQWGSRVVPNAANGWAGQPPPTWQQGYGPQGMWVPAGQAIGGYGPPPAGRGAPPPPPPFTSYIVSTPPGGFPPPQGFPQGYGAPPQFSFGYGPPPPPPDQFAPPGVPPPPATPGAAPLAFPPPPSQAAPDMSKPPTAQPDFPYGQY

SEQ ID NO: 75166 - protein, 57 aa, Homo sapiens
MDAILNYRSEDTEDYYTLLGCDELSSVEQILAEFKVRALECHPDKHPENPKAGRPRS

SEQ ID NO: 75167 - protein, 221 aa, Homo sapiens
MESYDVIANQPVVIDNGSGVIKAGFAGDQIPKYCFPNYVGRPKHVRVMAGALEGDIFIGPKAEEHRGLLSIRYPMEHGIVKDWNDMERIWQYVYSKDQLQTFSEEHPVLLTEAPLNPRKNRERAAEVFFETFNVPALFISMQAVLSLYATGRTTGVVLDSGDGVTHAVPIYEGFAMPHSIMRIDIAGRDVSRFLRLYLRKEGYDFHSSSEFEIVKAIKELA

SEQ ID NO: 75168 - protein, 156 aa, Homo sapiens
  MOD_RES (1)..(1): Any amino acid
XTPFTLKDILLGDREISAGISSYQLLNYEDESDVSLYGRRGNHIVNDVGINVAGSDSIAVKASFGIVTKHEVEVSTLLKEITTRKINFDHSLIRQSRSSRKAVLCVVMESIRTTRQCSLSVHAGIRGEAMRTFVSLQCQKEDLKGKKRQHLHCCTG

SEQ ID NO: 75169 - protein, 95 aa, Homo sapiens
  MOD_RES (1)..(1): Any amino acid
XEGEMGDEEAPTTCSIPIDYNLYRKFWSLQDYFRNPVQCYEKISWKTFLKYSEEVLAVFKSYKLDDTQASRKKMEELKTGGEHVYFAKFLTSEKV

SEQ ID NO: 75170 - protein, 71 aa, Homo sapiens
MDSLPDEFFVRHPAVEDQRKEETENKLEKSSGQLNKQENDIPTDLVPVNLLLEVKKLLNAINTLPKGVVPH

SEQ ID NO: 75171 - protein, 89 aa, Homo sapiens
MSLLRSLRVFLVARTGSYPAGSLLRQSPQPRHTFYAGPRLSASASSKELLMKLRRKTGYSFVNCKKALETCGGDLKQTESCSVAQAGVQ

SEQ ID NO: 75172 - protein, 120 aa, Homo sapiens
MEADSGEEECRSQPRSISESFLTVKGAALFLPRGNGSSTPRISHRRNKHAGDLQQHLQAMFILLRPEDNIRLAVRLESTYQNRTRYMVVVSTNGRQDTEESIVLGMDFSSNDSSTCTMGL

SEQ ID NO: 75173 - protein, 57 aa, Homo sapiens
MADTPRDAGLKQAPASRNEKAPVDFGYVGIDSILEQMRRKAMKQGFEFNIMVVERLG

SEQ ID NO: 75174 - protein, 160 aa, Homo sapiens
GDVGLAMGKLYGNDFSQTTISRFEALNLSFKNMCKLKPLLEKWLNDAESSPSDPSVSTPSSYPSLSEVFGRKRKKRTSIETNIRLTLEKRFQDVSPSGSLGPLSVPPVHSTMPGTVTSSCSPGNNSRPSSPGSGLHASSPTASQNNSKAAVNSASSFNSS

SEQ ID NO: 75175 - protein, 205 aa, Homo sapiens
MGKDYYKILGIPSGANEDEIKKAYRKMALKYHPDKNKEPNAEEKFKEIAEAYDVLSDPKKRGLYDQYGEEGLKTGGGTSGGSSGSFHYTFHGDPHATFASFFGGSNPFDIFFASSRSTRPFSGFDPDDMDVDEDEDPFGAFGRFGFNGLSRGPRRAPEPLYPRRKVQDPPVVHELRVSLEEIYHGSTKRMKITRRRLNPDGRTVR

SEQ ID NO: 75176 - protein, 61 aa, Homo sapiens
MSKLSFRARALDASKPLPVFRCEDLPDLHEYASINRAVPQMPTGMEKEEESVQPFKQGAVY

SEQ ID NO: 75177 - protein, 55 aa, Homo sapiens
DLLKNAIQEIQRKNNSGLSFEELYRNAYTMVLHKHGEKLYTGLREVVTEHLINKE

SEQ ID NO: 75178 - protein, 277 aa, Homo sapiens
RREYLKLDKWLTDKIREHGEPFIQACMTFLKRRCPSILGGLAPEKDQPKSAQLPPETLATMLACLQACAGSVSQELSETILTMVANCSNVMNKARQPPPGVMPKGRPPSASSLDAISPVQIDPLAGMTSLSIGGSAAPHTQSMQGFPPNLGSAFSTPQSPAKAFPPLSTPNQTTAFSGIGGLSSQLPGGLGTGSLTGIGTGALGLPAVNNDPFVQRKLGTSGLNQPTFQQSKMKPSDLSQVWPEANQHFSKEIDDEANSYFQRIYNHPPHPTMSVDE

SEQ ID NO: 75179 - protein, 1120 aa, Homo sapiens
MELSDVRCLTGSEELYTIHPTPPAGDGRSASRPQRLLWQTAVRHITEQRFIHGHRGGSGSGSGGSGKASDPAGGGPNHHAPQLSGDSALPLYSLGPGERAHSTCGTKVFPERSGSGSASGSGGGGDLGFLHLDCAPSNSDFFLNGGYSYRGVIFPTLRNSFKSRDLERLYQRYFLGQRRKSEVVMNVLDVLTKLTLLVLHLSLASAPMDPLKGILLGFFTGIEVVICALVVVRKDTTSHTYLQYSGVVTWVAMTTQILAAGLGYGLLGDGIGYVLFTLFATYSMLPLPLTWAILAGLGTSLLQVILQVVIPRLAVISINQVVAQAVLFMCMNTAGIFISYLSDRAQRQAFLETRRCVEARLRLETENQRQERLVLSVLPRFVVLEMINDMTNVEDEHLQHQFHRIYIHRYENVSILFADVKGFTNLSTTLSAQELVRMLNELFARFDRLAHEHHCLRIKILGDCYYCVSGLPEPRQDHAHCCVEMGLSMIKTIRYVRSRTKHDVDMRIGIHSGSVLCGVLGLRKWQFDVWSWDVDIANKLESGGIPGRIHISKATLDCLNGDYNVEEGHGKERNEFLRKHNIETYLIKQPEDSLLSLPEDIVKESVSSSDRRNSGATFTEGSWSPELPFDNIVGKQNTLAALTRNSINLLPNHLAQALHVQSGPEEINKRIEHTIDLRSGDKLRREHIKPFSLMFKDSSLEHKYFVFTGVLAMVTCAVFLRLNSVLKLAVLLIMIAIYALLTETVYAGLFLRYDNLNHSGEDFLGTKEVSLLLMAMFLLAVFYHGQQLEYTARLDFLWRVQAKEEINEMKELREHNENMLRNILPSHVARHFLEKDRDNEELYSQSYDAVGVMFASIPGFADFYSQTEMNNQGVECLRLLNEIIADFDELLGEDRFQDIEKIKTIGSTYMAVSGLSPEKQQCEDKWGHLCALADFSLALTESIQEINKHSFNNFELRIGISHGSVVAGVIGAKKPQYDIWGKTVNLASRMDSTGVSGRIQVPEETYLILKDQGFAFDYRGEIYVKGISEQEGKIKTYFLLGRVQPNPFILPPRRLPGQYSLAAVVLGLVQSLNRQRQKQLLNENNNTGIIKGHYNRRTLLSPSGTEPGAQAEGTDKSDLP

SEQ ID NO: 75180 - protein, 338 aa, Homo sapiens
MPPPSDIVKVAIEWPGANAQLLEIDQKRPLASIIKEVCDGWSLPNPEYYTLRYADGPQLYITEQTRSDIKNGTILQLAISPSRAARQLMERTQSSNMETRLDAMKELAKLSADVTFATEFINMDGIIVLTRLVESGTKLLSHYSEMLAFTLTAFLELMDHGIVSWDMVSITFIKQIAGYVSQPMVDVSILQRSLAILESMVLNSQSLYQKIAEEITVGQLISHLQVSNQEIQTYAIALINALFLKAPEDKRQDMANAFAQKHLRSIILNHVIRGNRPIKTEMAHQLYVLQVLTFNLLEERMMTKMDPNDQAQRDIIFELRRIAFDAESDPSNAPGSGT

SEQ ID NO: 75181 - protein, 79 aa, Homo sapiens
  MOD_RES (1)..(1): Any amino acid
XLEQNGSLKKLRQTSGEVGLAPTDPVLREMEQKLQQEEEDRQLALQLQRMFDNERRTVSRRKGSVDQYLLRSSNMAGAK

SEQ ID NO: 75182 - protein, 1358 aa, Homo sapiens
MGEVEPGPAGPLEPPEPPEAPASRRPGGIRVLKRNMKRNGSRNCLNRRSRFGSRERDWLREDVKRGCVYLYGADTTTATTTTTTSSSSSSSSSSSDLHLVLCTVETPASEICAGEGRESLYLQLHGDLVRRLEPTERPLQIVYDYLSRLGFDDPVRIQEEATNPDLGCMIRFYGEKPCHMDRLDRILLSGIYNVRKGKTQLHKWAERLVVLCGTCLIVSSVKDCQTGKMHILPLVGGKIEEVKRRQYSLAFSSAGAQAQTYHVSFETLAEYQRWQRQASKVVSQRISTVDLSCYSLEEVPEHLFYSQDITYLNLRHNFMQLERPGGLDTLYKFSQLKGLNLSHNKLGLFPILLCEISTLTELNLSCNGFHDLPSQIGNLLNLQTLCLDGNFLTTLPEELGNLQQLSSLGISFNNFSQIPEVYEKLTMLDRVVMAGNCLEVLNLGVLNRMNHIKHVDLRMNHLKTMVIENLEGNKHITHVDLRDNRLTDLDLSSLCSLEQLHCGRNQLRELTLSGFSLRTLYASSNRLTAVNVYPVPSLLTFLDLSRNLLECVPDWACEAKKIEVLDVSYNLLTEVPVRILSSLSLRKLMLGHNHVQNLPTLVEHIPLEVLDLQHNALTRLPDTLFSKALNLRYLNASANSLESLPSACTGEESLSMLQLLYLTNNLLTDQCIPVLVGHLHLRILHLANNQLQTFPASKLNKLEQLEELNLSGNKLKTIPTTIANCKRLHTLVAHSNNISIFPEILQLPQIQFVDLSCNDLTEILIPEALPATLQDLDLTGNTNLVLEHKTLDIFSHITTLKIDQKPLPTTDSTVTSTFWSHGLAEMAGQRNKLCVSALAMDSFAEGVGAVYGMFDGDRNEELPRLLQCTMADVLLEEVQQSTNDTVFMANTFLVSHRKLGMAGQKLGSSALLCYIRPDTADPASSFSLTVANVGTCQAVLCRGGKPVPLSKVFSLEQDPEEAQRVKDQKAIITEDNKVNGVTCCTRMLGCTYLYPWILPKPHISSTPLTIQDELLILGNKALWEHLSYTEAVNAVRHVQDPLAAAKKLCTLAQSYGCQDNVGAMVVYLNIGEEGCTCEMNGLTLPGPVGFASTTTIKDAPKPATPSSSSGIASEFSSEMSTSEVSSEVGSTASDEHNAGGLDTALLPRPERRCSLHPTPTSGLFQRQPSSATFSSNQSDNGLDSDDDQPVEGVITNGSKVEVEVDIHCCRGRDLENSPPLIESSPTLCSEEHARGSCFGIRRQNSVNSGMLLPMSKDRMELQKSPSTSCLYGKKLSNGSIVPLEDSLNLIEVATEVPKRKTGYFAAPTQMEPEDQFVVPHDLEEEVKEQMKQHQDSRLEPEPHEEDRTEPPEEFDTAL

SEQ ID NO: 75183 - protein, 134 aa, Homo sapiens
MALSVLRLALLLLAVTFAGSARSGPGERGPPEKSGFGSQTGGGPCPAPGGLGDGTRAPVTGGSPEDLPASLIPQFGLFSKYRTPNCSQYRLPGCPRHFNPVCGSDMSTYANECTLCMKIREGGHNIKIIRNGPC

SEQ ID NO: 75184 - protein, 532 aa, Homo sapiens
  MOD_RES (1)..(1): Any amino acid
XHLSKSVSKSDSDLIAYPSNEKTSRVNWSESSTAEHSSKGNSERTPSFTSEWEEIDKIMSSIDVGINNELKEMNGETTRPRCPVQTVGQWLESIGLPQYENHLMANGFDNVQFMGSNVMEDQDLLEIGILNSGHRQRILQAIQLLPKMRPIGHDGYHPTSVAEWLDSIELGDYTKAFLINGYTSMDLLKKIWEVELINVLKINLIGHRKRILASLGDRLHDDPPQKPPRSITLREPSGNHTPPQLSPSLSQSTYTTGGSLDVPHIIMQGDARRRRNENYFDDIPRSKLERQMAQTGDWGEPSITLRPPNEATASTPVQYWQHHPEKLIFQSCDYKAFYLGSMLIKELRGTESTQDACAKMRANCQKSTEQMKKVPTIILSVSYKGVKFIDATNKNIIAEHEIRNISCAAQDPEDLSTFAYITKDLKSNHHYCHVFTAFDVNLAYEIILTLGQAFEVAYQLALQARKGGHSSTLPESFENKPSKPIPKPRVSIRKSVQIDPSEQKTLANLPWIVEPGQEAKRGINTKYETTIF

SEQ ID NO: 75185 - protein, 110 aa, Homo sapiens
MEEQDARVPALEPFRVEQVFNAPKPKWTQLSGRKLQNWGGLPHPRGMVPERLPPWLQRYVDKVSNLSLFGGLPANHVLVNQYLPGEGIMHHQPGLPHRAGLLRAAAARGR

SEQ ID NO: 75186 - protein, 400 aa, Homo sapiens
MRRLTRRLVLPVFGVLWITVLLFFWVTKRKLEVPTGPEVQTPKPSDADWDDLWDQFDERRYLNAKKWRVGDDPYKLYAFNQRESERISSNRAIPDTRHLSVLNRTPTHLIREIILVDDFSNDPDDCKQLIKLPKVKCLRNNERQGLVRSRIRGADIAQGTTLTFLDSHCEVNRDWLQPLLHRVKEDYTRVVCPVIDIINLDTFTYIESASELRGGFDWSLHFQWEQLSPEQKARRLDPTEPIRTPIIAGGLFVIDKAWFDYLGKYDMDMDIWGGENFEISFRVWMCGGSLEIVPCSRVGHVFRKKHPYVFPDGNANTYIKNTKRTAEVWMDEYKQYYYAARPFALERPFGNVESRLDLRKNLRCQSFKWYLENIYPELSIPKESSIQKGNIRQRQKCLES

SEQ ID NO: 75187 - protein, 109 aa, Homo sapiens
IAELQELQPSAKDFEVRSLVGCGHFAEVQVVREKATGDIYAMKVMKKKALLAQEQVSFFEEERNILSRSTSPWIPQLQYAFQDKNHLYLVLYSHEKVKMEGTISQQTKL

SEQ ID NO: 75188 - protein, 53 aa, Homo sapiens
MVVSKMNKDAQMRAAINQKLIETGERERLKELLRAKLIECGWKDQLKAHCKGN

SEQ ID NO: 75189 - protein, 1176 aa, Homo sapiens
ISETLSSKEFLENAYVLAVLLFLALILQRTFLQASYYVTIETGINLRGALLAMIYNKILRLSTSNLSMGEMTLGQINNLVAIETNQLMWFLFLCPNLWAMPVQIIMGVILLYNLLGSSALVGAAVIVLLAPIQYFIATKLAEAQKSTLDYSTERLKKTNEILKGIKLLKLYAWEHIFCKSVEETRMKELSSLKTFALYTSLSIFMNAAIPIAAVLATFVTHAYASGNNLKPAEAFASLSLFHILVTPLFLLSTVVRFAVKAIISVQKLNEFLLSDEIGDDSWRTGESSLPFESCKKHTGVVTNGYFSWGSGLATLSNIDIRIPTGQLTMIVGQVGCGKSSLLLAILGEMQTLEGKVHWSNVNESEPSFEATRSRNRYSVAYAAQKPWLLNATVEENITFGSPFNKQRYKAVTDACSLQPDIDLLPFGDQTEIGERGINLSGGQRQRICVARALYQNTNIVFLDDPFSALDIHLSDHLMQEGILKFLQDDKRTLVLVTHKLQYLTHADWIIAMKDGSVLREGTLKDIQTKDVELYEHWKTLMNRQDQELEKDMEADQTTLERKTLRRAMYSREAKAQMEDEDEEEEEEEDEDDNMSTVMRLRTKMPWKTCWRYLTSGGFFLLILMIFSKLLKHSVIVAIDYWLATWTSEYSINNTGKADQTYYVAGFSILCGAGIFLCLVTSLTVEWMGLTAAKNLHHNLLNKIILGPIRFFDTTPLGLILNRFSADTNIIDQHIPPTLESLTRSTLLCLSAIGMISYATPVFLVALLPLGVAFYFIQKYFRVASKDLQELDDSTQLPLLCHFSETAEGLTTIRAFRHETRFKQRMLELTDTNNIAYLFLSAANRWLEVRTDYLGACIVLTASIASISGSSNSGLVGLGLLYALTITNYLNWVVRNLADLEVQMGAVKKVNSFLTMESENYEGTMDPSQVPEHWPQEGEIKIHDLCVRYENNLKPVLKHVKAYIKPGQKVGICGRTGSGKSSLSLAFFRMVDIFDGKIVIDGIDISKLPLHTLRSRLSIILQDPILFSGSIRFNLDPECKCTDDRLWEALEIAQLKNMVKSLPGGLDAVVTEGGENFSVGQRQLFCLARAFVRKSSILIMDEATASIDMATENILQKVVMTAFADRTVVTIAHRVSSIMDAGLVLVFSEGILVECDTVPNLLAHKNGLFSTLVMTNK

SEQ ID NO: 75190 - protein, 215 aa, Homo sapiens
MWPPGSASQPPPSPAAATGLHPAARPVSLQCRLSMCPARSLLLVATLVLLDHLSLARNLPVATPDPGMFPCLHHSQNLLRAVSNMLQKNESCLNSRETSFITNGSCLASRKTSFMMALCLSSIYEDLKMYQVEFKTMNAKLLMDPKRQIFLDQNMLAVIDELMQALNFNSETVPQKSSLEEPDFYKTKIKLCILLHAFRIRAVTIDRVMSYLNAS

SEQ ID NO: 75191 - protein, 177 aa, Homo sapiens
MSGGWELELNGTEAKLVRKVAGEKITVTFNINNSIPPTFDGEEEPSQGQKVEEQEPELTSTPNFVVEVIKNDDGKKALVLDCHYPEDEVGQEDEAESDIFSIREVSFQSTGESEWKDTNYTLNTDSLDWALYDHLMDFLADRGVDNTFADELVELSTALEHQEYITFLEDLKSFVKS

SEQ ID NO: 75192 - protein, 568 aa, Homo sapiens
MLIDERLRCEHHKANYQTLKAEHTRLQNEHVKLQNELKHLFNEKQTQQEKLQLLLEELRGELVEKTKDLEEMKLQILTPQKLELLRAQIQQELETPMRERFRNLDEEVEKYRAVYNKLRYEHTFLKSEFEHQKEEYARILDEGKIKYESEIARLEEDKEELRNQLLNVDLTKDSKRVEQLAREKVYLCQKLKGLEAEVAELKAEKENSEAQVENAQRIQVRQLAEMQATVRSLEAEKQSANLRAERLEKELQSSSEQNTFLINKLHKAEREINTLSSKVKELKHSNKLEITDIKLETARAKSELERERNKIQSELDGLQSDNEILKAAVEHHKVLLVEKDRELIRKVQAAKEEGYQKLVVLQDEKLELENRLADLEKMKVEHDVWRQSEKDQYEEKLRASQMAEEITRKELQSVRLKLQQQIVTIENAEKEKNENSDLKQQISSLQIQVTSLAQSENDLLNSNQMLKEMVERLKQECRNFRSQAEKAQLEAEKTLEEKQIQWLEEKHKLHERITDREEKYNQAKEKLQRAAIAQKKLEQDLELGCPSVTDTYRESVFPPPPLKRDLLK

SEQ ID NO: 75193 - protein, 144 aa, Homo sapiens
MQSAGDMGRQEELEAASWKDLGAPSGRKDWLGRIPGCFPGSALPKTLCSLQPWRASFSQFLSEVDLEPEGKVFVVITLTGSFTEATLQRDRIFKHFTRKRQRAMRRRVHQINGHKFMATYLRQPTYCSHCREFIWGVFGKQGYQ

SEQ ID NO: 75194 - protein, 226 aa, Homo sapiens
MSEETVPEAASPPPPQGQPYFDRFSEDDPEYMRLRNRAADLRQDFNLMEQKKRVTMILQSPSFREELEGLIQEQMKKGNNSSNIWALRQIADFMASTSHAVFPTSSMNVSMMTPINDLHTADSLNLAKGERLMRCKISSVYRLLDLYGWAQLSDTYVTLRVSKEQDHFLISPKGVSCSEVTASSLIKVNILGEVVEKGSSCFPVDTTGFCLHSAIYAARPDVRCII

SEQ ID NO: 75195 - protein, 43 aa, Homo sapiens
MGKRQHQKDKMYITCAEYTHFYGGKKPDLPQTNFRRLPFDHCR

SEQ ID NO: 75196 - protein, 138 aa, Homo sapiens
MTSFQEVPLQTSNFAHVIFQNVAKSYLPNAHLECHYTLTPYIHPHPKDWVGIFKVGWSTARDYYTFLWSPMPEHYVEGSTVNCVLAFQGYYLPNDDGEFYQFCYVTHKGEIRGASTPFQFRASSPVEELLTMEDEGNS

SEQ ID NO: 75197 - protein, 150 aa, Homo sapiens
MRLLVLLWGCLLLPGYEALEGPEEISGFEGDTVSLQCTYREELRDHRKYWCRKGGILFSRCSGTIYAEEEGQETMKGRVSIRDSRQELSLIVTLWNLTLQDAGEYWCGVEKRGPDESLLISLFVFPGNRYLSFPRLGTGAAEGRGRGGGA

SEQ ID NO: 75198 - protein, 104 aa, Homo sapiens
MVDSQKCSDVSELSSSPPGPYHQEPYVCKPEERFRAPPILPPHLLQVILNKDTGISCDPALLPEPNHVMLNHLYALSIKDGVMVLSATHRYKKKYVTTLLYKPI

SEQ ID NO: 75199 - protein, 510 aa, Homo sapiens
MSTGFSFGSGTLGSTTVAAGGTSTGGVFSFGTGASSNPSVGLNFGNLGSTSTPATTSAPSSGFGTGLFGSKPATGFTLGGTNTGIATTITTGLTLGTPATTSAATTGFSLGFNKPAASATPFALPITSTSASGLTLSSALTSTPAASTGFTLNNLGGTTATTTTASTGLSLGGALAGLGGSLFQSTNTGTSGLGQNALGLTLGTTAATSTAGNEGLGGIDFSSSSDKKSDKTGTRPEDSKALKDENLPPVICQDVENLQKFVKEQKQVQEEISRMSSKAMLKVQEDIKALKQLLSLAANGIQRNTLNIDKLKIETAQELKNAEIALRTQKTPPGLQHEYAAPADYFRILVQQFEVQLQQYRQQIEELENHLATQANNSHITPQDLSMAMQKIYQTFVALAAQLQSIHENVKVLKEQYLGYRKMFLGDAVDVFETRRAEAKKWQNTPRVTTGPTPFSTMPNAAAVAMAATLTQQQQPATGDKWCNVAELKNRTQLSLFVNKLELSCYCVID

SEQ ID NO: 75200 - protein, 220 aa, Homo sapiens
MSDPSQLTQNVCLTQEMELSKAFSGQRTLLSAILSMLSLSFSTTSLLSNYWFVGTQKVPKPLCEKGLAAKCFDMPVSLDGDTNTSTQEVVQYNWETGDDRFSFRSFRSGMWLSCEETVEEPAKSEMEEELKKCVYLHLYLLLCHLALLHPQSWKQFRALRSSGTAAAKGERCRSFIELTPPAKREILWLSLGTQITYIGLQFISFLLLLTDLLLTGNPAC

SEQ ID NO: 75201 - protein, 144 aa, Homo sapiens
MTTETFVKDIKPGLKNLNLIFIVLETGRVTKTKDGHEVRTCKVADKTGSINISVWDDVGNLIQPGDIIRLTKGYASVFKGCLTLYTGRGGDLQKIGEFCMVYSEVPNFSEPNPEYSTQQAPNKAVQNDSNPSASQPTTGPSAAS

SEQ ID NO: 75202 - protein, 123 aa, Homo sapiens
MPRLHDHFWSCSCAHSARRRGPPRASAAGLAAKVGEMINVSVSGPSLLAAHGAPDADPAPRGRSAAMSGPEPGSPYPNTWHHRLLQRSLVLFSVGVVLALVLNLLQIQRNVTLFPEEVIATIF

SEQ ID NO: 75203 - protein, 98 aa, Homo sapiens
MKEEAFLRRRFSLCPPSSTPQKVDPRKLTRNLLLSGDNELYPLSPGKDMEPNGPSLPRDEGPPTPSSATKVPPAEYRLCNGSDKECVSPTARVTKKET

SEQ ID NO: 75204 - protein, 251 aa, Homo sapiens
MGEPSREEYKIQSFDAETQQLLKTALKDPGAVDLEKVANVIVDHSLQDCVFSKEAGRMCYAIIQAESKQAGQSVFRRGLLNRLQQEYQAREQLRARSLQGWVCYVTFICNIFDYLRVNNMPMMALVNPVYDCLFRLAQPDSLSKEEEVGGPSPGTSTEGCRMDSPAQPCVSPLLTEVDCLVLQLHRVGEQLEKMNGQRMDELFVLIRDGFLLPTGLSSLAQLLLLEIIEFRAAGWKTTPAAHKYYYSEVSD

SEQ ID NO: 75205 - protein, 36 aa, Homo sapiens
MAASAAETRVFLERTERRRYAHEYFHNAIFTPDENP

SEQ ID NO: 75206 - protein, 77 aa, Homo sapiens
MRTLLPPALLTCWLLAPVNSIHPECRFHLEIQEEETKCAELLRSQTEKHKGHTKGFILIHAGGLKRILDPHTYPLAP

SEQ ID NO: 75207 - protein, 54 aa, Homo sapiens
MRLPGVNSKDLLCQREQLCGKDEENGEEHHRVLRLPDGDCRGVCQPPVQGRPPL

SEQ ID NO: 75208 - protein, 99 aa, Homo sapiens
MLLLKKHTEDISSVYEIRERLGSGAFSEVVLAQERGSAHLVALKCIPKKALRGKEALVENEIAVLRRRFLAIAGSVTPTSSLWRMSTRALPTSTWPWNW

SEQ ID NO: 75209 - protein, 67 aa, Homo sapiens
MDVGGLSDPYVKVHLLQGGKKVRKKKTTIKKNTLNPYYNEAFSFEVPCDQVQKVQVELTVLDYDKLG

SEQ ID NO: 75210 - protein, 292 aa, Homo sapiens
MCGPAMFPAGPPWPRVRVVQVLWALLAVLLASWRLWAIKDFQECTWQVVLNEFKRVGESGVSDSFFEQEPVDTVSSLFHMLVDSPIDPSEKYLGFPYYLKINYSCEEKSPVNFYRWKIEQLQIQMEAAPFRSKEPCMAEEVCSMSWYTPMPIKKGSVVMRVDISSNGLGTFIPDKRFQMNINGFLKRDRDNNIQFTVGEELFNLMPQYFVGVSSRPLWHTVDQSPVLILGGIPNEKYVLMTDTSFKDFSLVEAPIPHSMRETAAVAVGFVSWPASASRSCALCISIAMALST

SEQ ID NO: 75211 - protein, 106 aa, Homo sapiens
KIYTRCKLAKIFSRAGLDNYWGFSLGNWICMAYYESGYNTTAQTVLDDGSIDYGIFQINSFAWCRRGKLKENNHCHVACSALITDDLTDAIICARKIVKETQGMNY

SEQ ID NO: 75212 - protein, 149 aa, Homo sapiens
MMMKPSCSWCKDYEQFEENKQLSILVNCYKKLCEYITQTTLARDIIEAVDCSSDILALLNDGSLFCEETEKPSDSSFTLCLTHSPLPSTSEPTTDPQASLSPMSESTLSIAIGSSVINGLPTYNGLSIDRFGINIPSPEHSNTIDVCNT

SEQ ID NO: 75213 - protein, 121 aa, Homo sapiens
AECNRLHPAEEGDFWAESSMLGLKITYFALMDGKVYDITEWAGCQRVGISPDTHRVPYHISFGSRIPGTRGRQRATPDAPPADLQDFLSRIFQSLQLLPASSDPRPAMGAAPATTPEVSRK

SEQ ID NO: 75214 - protein, 49 aa, Homo sapiens
MHRRGAQERAPGIAHSSCAAEPRPLSLRTDISSALVWPRASCARSCPEM

SEQ ID NO: 75215 - protein, 62 aa, Homo sapiens
MRLHLLLLLALCGAGTTAAELSYSLRGNWSICNGNGSLELPGAVPGCVHSALFQQGLIQKEQ

SEQ ID NO: 75216 - protein, 667 aa, Homo sapiens
MVVSADPLSSERAEMNILEINQELRSQLAESNQQFRDLKEKFLITQATAYSLANQLKKYKCEEYKDIIDSVLRDELQSMEKLAEKLRQAEELRQYKALVHSQAKELTQLREKLREGRDASRWLNKHLKTLLTPDDPDKSQGQDLREQLAEGHRLAEHLVHKLSPENDEDEDEDEDDKDEEVEKVQESPAPREVQKTEEKEVPQDSLEECAVTCSNSHNPSNSNQPHRSTKITFKEHEVDSALVVESEHPHDEEEEALNIPPENQNDHEEEEGKAPVPPRNRQSLEPGELTNLRDFLISPVVSHVANPGHHDKSNSYRHREVSFLALDEQKVCSAQDVARDYSNPKWDETSLGFLEKQSDLEEVKGQETVAPRLSRGPLRVDKHEIPQESLDGCCLTPSILPDLTPSYHPYWSTLYSFEDKQVSLALVDKIKKDQEEIEDQSPPCPRLSQELPEVKEQEVPEDSVNEVYLTPSVHHDVSDCHQPYSSTLSSLEDQLACSALDVASPTEAACPQGTWSGDLSHHQSEVQVSQAQLEPSTLVPSCLRLQLDQGFHCGNGLAQRGLSSTTCSFSANADSGNQWPFQELVLEPSLGMKNPPQLEDDALEGSASNTQGRQVTGRIRASLVLILKTIRRRLPFSKWRLAFRFAGPHAESAEIPNTAGRTQRMAG

SEQ ID NO: 75217 - protein, 109 aa, Homo sapiens
MSVLNKTKWKGGTLQIQLAKESFLHRLAQEREAAKAKKEESTTGNANLLEKTGGVDFHMKAVPGTEVPGHKNWVVSKFGRVLPVLHLKNQHKRKIIKYDPSKYCHNLKK

SEQ ID NO: 75218 - protein, 107 aa, Homo sapiens
MIARRNPEPLRFLPDEARSLPPPKLTDPRLLYIGFLGYCSGLIDNLIRRRPIATAGLHRQLLYITAFFFAGYYLVKREDYLYAVRDREMFGYMKLHPEDFPEEGISS

SEQ ID NO: 75219 - protein, 153 aa, Homo sapiens
  MOD_RES (1)..(1): Any amino acid
XCAENNNNMAMLICLIIIAVLFLICTFLFLSTVVLANKVSSLRRSKQVGKRQPRSNGDFLASGLWPAESDTWKRTKQLTGPNLVMQSTGVLTATRERKDEEGTEKLTNKQIEEETVTQKCRVLPKVIQVNRTHHSLLMRRNLTKLFQFARGTF

SEQ ID NO: 75220 - protein, 584 aa, Homo sapiens
MNFDVIKGKPIRIMWSQRDPSLRKSGVGNVFIKNLDKSIDNKALYDTFSAFGNILSCKVVCDENGSKGYAFVHFETQEAADKAIEKMNGMLLNDRKVFVGRFKSRKEREAELGAKAKEFTNVYIKNFGEEVDDESLKELFSQFGKTLSVKVMRDPNGKSKGFGFVSYEKHEDANKAVEEMNGKEISGKIIFVGRAQKKVERQAELKRKFEQLKQERISRYQGVNLYIKNLDDTIDDEKLRKEFSPFGSITSAKVMLEDGRSKGFGFVCFSSPEEATKAVTEMNGRIVGSKPLYVALAQRKEERKAHLTNQYMQRVAGMRALPANAILNQFQPAAGGYFVPAVPQAQGRPPYYTPNQLAQMRPNPRWQQGFQGMPSAIRQSGPRPTLRHLAPTGNAPASRGLPTTTQRVGSECPDRLAMDFGGAGAAQQGLTDSCQSGGVPTAVQNLAPRAAVAAAAPRAVAPYKYASSVRSPHPAIQPLQAPQPAVHVQGQEPLTASMLAAAPPQEQKQMLGERLFPLIQTMHSNLAGKITGMLLEIDNSELLHMLESPESLRSKVDEAVAVLQAHHAKKEAAQKVGAVAAATS

SEQ ID NO: 75221 - protein, 102 aa, Homo sapiens
  MOD_RES (1)..(1): Any amino acid
XDKDGSKVTTVVATPGQGPDRPQEVSYTDTKVIGNGSFGVVYQAKLCDSGELVAIKKVLQDKRFKKDEVYLNLVLDYVPETVYRVARHYSRAKQTLPVIYVK

SEQ ID NO: 75222 - protein, 52 aa, Homo sapiens
MTVEFEECVKDSPRFRAARGEQAAGAAFKAWGRPLTRWRRTWWRLRPNWTSW

SEQ ID NO: 75223 - protein, 612 aa, Homo sapiens
MWTGGRRPGRLRRAASAADMEKLSALQEQKGELRKRLSYTTHKLEKLETEFDSTRHYLEIELRRAQEELEKVTEKLRRIQSNYMALQRINQELEDKLYRMGQHYEEEKRALSHEIVALNSHLLEAKVTIDKLSEDNELYRKDCNLAAQLLQCSQTYGRVHKVSELPSDFQERVSLHMEKHGCSLPSPLCHPAYADSVPTCVIAKVLEKPDPASLSSRLSDASARDLAFCDGVEKPGPRPPYKGDIYCSDTALYCPEERRRDRRPSVDAPVTDVGFLRAQNSTDSAAEEEEEAEAAAFPAGFQHEAFPSYAGSLPTSSSYSSFSATSEEKEHAQASTLTASQQAIYLNSRDELFDRKPPATTYEGSPRFAKATAAVAAPLEAEVAPGFGRTMSPYPAETFRFPASPGPQQALMPPNLWSLRAKPGTARLPGEDMRGQWRPLSVEDIGAYSYPVSAAGRASPCSFSERYYGGAGGSPGKKADGRASPLYASYKADSFSEGDDLSQGHLAEPCFLRAGGDLSLSPGRSADPLPGYAPSEGGDGDRLGVQLCGTASSPEPEQGSRDSLEPSSMEASPEMHPAARLSPQQAFPRTGGSGLSRKDSLTKAQLYGTLLN

SEQ ID NO: 75224 - protein, 108 aa, Homo sapiens
MTTSALRRQVKNIVHNYSEAEIKVREATSNDPWGPPSSLMSEIADLTFNTVAFTEVMGMLWRRLNDSGKNWRHVYKALTLLDYLLKTGSERVAHQCRENLYTIQTLKD

SEQ ID NO: 75225 - protein, 66 aa, Homo sapiens
  MOD_RES (1)..(1): Any amino acid
XAQSLKSVDYEVFGRVQGVCFRMYTEDEARKIGVVGWVKNTSKGTVTGQVQGPEDKVNSILAFPFY

SEQ ID NO: 75226 - protein, 17 aa, Homo sapiens
  MOD_RES (1)..(1): Any amino acid
XHLVASRTPELPPSARS

SEQ ID NO: 75227 - protein, 111 aa, Homo sapiens
LMDLDSGDVKRRVHLFETQRRTKEEDPIIPFSDGPIISKWGAISRSSRTGYHTTDPVQATASQGSATKPISVSGGVHMATRPHHQHTMLKGTDSLLLIYLVIESIPVLGTF

SEQ ID NO: 75228 - protein, 133 aa, Homo sapiens
  MOD_RES (1)..(1): Any amino acid
XTDEDLAWDSDNDSSSSVLQYAGVLKKLGRGPAKASPQPALTVKAKATSSATTAAAPTLRRLALSSRSGLERKPESLSKVSIIKRLGAAALVPEAQDSQVTSTKSPTVRCVLPDPPVPPASQRPPRRRWRRAC

SEQ ID NO: 75229 - protein, 94 aa, Homo sapiens
MPFNVAEGKEVLLLVHNLPQQLFGYSWYKGERVDGNRQIVGYAIGTQQATPGPANSGRETIYPNASLLIQNVTQNDTGFYTLQVIKSDLVNEEA

SEQ ID NO: 75230 - protein, 372 aa, Homo sapiens
MAPAKATNVVRLLLGSTALWLSQLGSGTVAASKSVTAHLAAKWPETPLLLEASEFMAEESNEKFWQFLETVQELAIYKQTESDYSYYNLILKKAGQFLDNLHINLLKFAFSIRAYSPAIQMFQQIAADEPPPDGCNAFVVIHKKHTCKINEIKKLLKKAASRTRPYLFKGDHKFPTNKENLPVVILYAEMGTRTFSAFHKVLSEKAQNEEILYVLRHYIQKPSSRKMYLSGYGVELAIKSTEYKALDDTQVKTVTNTTVEDETETNEVQGFLFGKLKEIYSDLRDNLTAFQKYLIESNKQMMPLKVWELQDLSFQAASQIMSAPVYDSIKLMKDISQNFPIKARLRMNILICLFQSTLNVKNLRSRHLYNKT

SEQ ID NO: 75231 - protein, 183 aa, Homo sapiens
  MOD_RES (1)..(1): Any amino acid
XSRYRSRSRSRSRSRGRSYCGRAYAIARGQRYYGFGRTVYPEEHSRWRDRSRTRSRSRTPFRLSEKDRMELLEIAKTNAAKALGTTNIDLPASLRTVPSAKETSRGIGVSSNGAKPELSEKVTEDGTRNPNEKPTQQRSIAFSSNNSVAKPIQKSAKAATEEASSRSPKIDQKKSPYGLWIPI

SEQ ID NO: 75232 - protein, 65 aa, Homo sapiens
HILYGKIIHLEKPFAVLVKHTPGDQDCDELGRETGTRYLVTALIKDKILFKTRPKPIITSVPKKV

SEQ ID NO: 75233 - protein, 80 aa, Homo sapiens
MKKKLVVLGLLAVVLVLVIVGLCLWLPSASKEPDNHVYTRAAVAADAKQCSKIGRDALRDGGSAVDAAIAALLCVGLMNA

SEQ ID NO: 75234 - protein, 265 aa, Homo sapiens
MMTSVGTNRARGNWEQPQNQNQTQHKQRPQATAEQIRLAQMISDHNDADFEEKVKQLIDITGKNQDECVIALHDCNGDVNRAINVLLEGNPDTHSWEMVGKKKGVSGQKDGGQTESNEEGKENRDRDRDYSRRRGGPPRRGRVRGQENGLDGTKSGGPSGRGTERGRRGRGRGRGGSGRRGGRFSAQGMGTFNPADYAEPANTDDNYGNSSGNTWNNTGHFEPDDGTSAWRTATEEWGTEDWNEDLSETKIFTASNVSSVPLPAE

SEQ ID NO: 75235 - protein, 79 aa, Homo sapiens
MKIRDVTKCLEEFELLGKAYGKAKSIVDKEGVPRFYIRILADLEDYLNELWEDKEGKKKMNKNNAKALSTLRQKIRKYN

SEQ ID NO: 75236 - protein, 690 aa, Homo sapiens
MTTTVATDYDNIEIQQQYSDVNNRWDVDDWDNENSSARLFERSRIKALADEREAVQKKTFTKWVNSHLARVSCRITDLYTDLRDGRMLIKLLEVLSGERLPKPTKGRMRIHCLENVDKALQFLKEQRVHLENMGSHDIVDGNHRLTLGLIWTIILRFQIQDISVETEDNKEKKSAKDALLLWCQMKTAGYPNVNIHNFTTSWRDGMAFNALIHKHRPDLIDFDKLKKSNAHYNLQNAFNLAEQHLGLTKLLDPEDISVDHPDEKSIITYVVTYYHYFSKMKALAVEGKRIGKVLDNAIETEKMIEKYESLASDLLEWIEQTIIILNNRKFANSLVGVQQQLQAFNTYRTVEKPPKFTEKGNLEVLLFTIQSKMRANNQKVYMPREGKLISDINKAWERLEKAEHERELALRNELIRQEKLEQLARRFDRKAAMRETWLSENQRLVSQDNFGFDLPAVEAATKKHEAIETDIAAYEERVQAVVAVARELEAENYHDIKRITARKDNVIRLWEYLLELLRARRQRLEMNLGLQKIFQEMLYIMDWMDEMKVLVLSQDYGKHLLGVEDLLQKHTLVEADIGIQAERVRGVNASAQKFATDGEGYKPCDPQVIRDRVAHMEFCYQELCQLAAERRARLEESRRLWKFFWEMAEEEGWIREKEKILSSDDYGKDLTSVMRLLSKHRAFEDEMSGR

SEQ ID NO: 75237 - protein, 258 aa, Homo sapiens
  MOD_RES (1)..(1): Any amino acid
XQDNPVIDEIDFLEAFKNIQPSSFRSVIGLMDIKPVDWEEIGGLEDVKLKLKQIFRQARASTPAILFLDEIDSILGARSASKTGCDVQERVLSVLLNELDGVGLKTIERRGSKSSQQEFQEVFNRSVMIIAATNRPDVLDTALLRPGRLDKIIYIPPPDHKGRLSILKVCTKTMPIGPDVSLENLAAETCFFSGADLRNLCTEAALLALQENGLDATTVKQEHFLKSLKTVKPSLSCKDLALYENLFKKEGFSNVEGI

SEQ ID NO: 75238 - protein, 140 aa, Homo sapiens
MVSAAAPSLLILLLLLLGSVPATDARSVPLKATFLEDVAGSGEAEGSSASSPSLPPPWTPALSPTSMGPQPITLGGPSPPTNFLDGIVDFFRQYVMLIAVVGSLAFLLMFIVCAAVITRQKQKASAYYPSSFPKKKYVDQ

SEQ ID NO: 75239 - protein, 84 aa, Homo sapiens
ILPRSSQYIKWIVSAGLAQVSEFSFVLGSRARRAGVISREVYLLILSVTTLSLLLAPVLWRAAITRPHLPTLAVHIEGTEAFEP

SEQ ID NO: 75240 - protein, 70 aa, Homo sapiens
MDHLNEATQGKEHSEMSNNVSDPKGPPAKIARLEQNGSPLGRGRLGSTGAKMQGVPLKHSGHLMKTNLRK

SEQ ID NO: 75241 - protein, 123 aa, Homo sapiens
MESTLSASNMQDPSSSPLEKCLGSANGNGDLDSEEGSSLEETGFNWGEYLEETGASAAPHTSFKHVEISIQSNFQPGMKLEVANKNNPDTYWVATIITTCGQLLLLRYCGYGEDRRADFWCDV

SEQ ID NO: 75242 - protein, 126 aa, Homo sapiens
MAAGWLTTWSQNSVTFQEVAVDFSQEEWALLDPAQKNLYKDVMLENFRNLASVGYQLCRHSLISKVDQEQLKTDERGILQGDCADWETQLKPKDTIAMQNIPGGKTSNGINTNCVRTHSGEMPYEC

SEQ ID NO: 75243 - protein, 87 aa, Homo sapiens
MSLSPPCFTEEDRFSLEALQTIHKQMDDDKDGGIEVEESDEFIREDMKYKDATNKHSHLHREDKHITIEDLWKRWKTSEVHNWTLED

SEQ ID NO: 75244 - protein, 231 aa, Homo sapiens
MLRLSYPLELQVSAGCEVHPGNASNNFFHVAFQGKDILSFQGTSWEPTQEAPLWVNLAIQVLNQDKWTRETVQWLLNGTCPQFVSGLLESGKSELKKQVKPKAWLSRGPSPGPGRLLLVCHVSGFYPKPVWVKWMRGEQEQQGTQPGDILPNADETWYLRATLDVVAGEAAGLSCRVKHSSLEGQDIVLYWGGSYTSMGLIALAVLACLLFLLIVGFTSRFKRQTSYQGVL

SEQ ID NO: 75245 - protein, 167 aa, Homo sapiens
MSQLSSTLKRYTESARYTDAHYAKSGYGAYTPSSYGANLAASLLEKEKLGFKPVPTSSFLTRPRTYGPSSLLDYDRGRPLLRPDITGGGKRAESQTRGTERPLGSGLSGGSGFPYGVTNNCLSYLPINAYDQGVTLTQKLDSQSDLARDFSSLRTSDSYRIDPRNLG

SEQ ID NO: 75246 - protein, 89 aa, Homo sapiens
MLKVSAVLCVCAAAWCSQSLAAAAAVAAAGGRSDGGNFLDDKQWLTTISQYDKEVGQWNKFRDDDYFRTWSPGKPFDQALSFHDLGIFV

SEQ ID NO: 75247 - protein, 177 aa, Homo sapiens
MAASAFAGAVRAASGILRPLNILASSTYRNCVKNASLISALSTGRFSHIQTPVVSSTPRLTTSERNLTCGHTSVILNRMAPVLPSVLKLPVRSLTYFSARKGKRKTVKAVIDRFLRLHCGLWVRRKAGYKKKLWKKTPARKKRLREFVFCNKTQSKLLDKMTTSFWKRRNWHSPICR

SEQ ID NO: 75248 - protein, 554 aa, Homo sapiens
MNEVSSECGKKCEPLGCSSTNGDLQGEAGAVVSIFLRMVPRIKSNEGYGYSNRNWRKENTMHSLDRNIVDGGQALGQWKRKSKGRSSWAAAPHCSPRCSLTSQGVKKMRSSTLQDPRRRDPQDDVYVDITDRLRFAILYSRPKSASNVHYFSIDNELEYENFSEDFGPLNLAMVYRYCCKINKKLKSITMLRKKIVHFTGSDQRKQANAAFLVGCYMVIYLGRTPEAAYRILIFGDTPYIPFRDAAYGSCNFYITLLDCFHAVKKAMQYGFLNFNSFNLDEYEHYEKAENGDLNWIIPDRFIAFCGPHSRARLESGYHQHSPETYIQYFKNHNVTTIIRLNKRMYDAKRFTDAGFDHHDLFFADGSTPTDAIVKRFLDICENAEGAIAVHCKAGLGRTGTLIACYIMKHYRMTAAETIAWVRICRPGLVIGPQQQFLVMKQTSLWLEGDYFRQRLKGQENGQHRAAFSKLLSGVDDISINGVENQDQQEPKPYSDDDEINGVTQGDRSRALKRRRQSKTNDILLPSPLAVLTFTLCSVVIWWIVCDYILPILLF

SEQ ID NO: 75249 - protein, 380 aa, Homo sapiens
  MOD_RES (1)..(1): Any amino acid
XAAAAAAAAAAAAAGVGGERSSRPAPSVAPEPDGCPVCVWRQHSRELRLESIKSQILSKLRLKEAPNISREVVKQLLPKAPPLQQILDLHDFQGDALQPEDFLEEDEYHATTETVISMAQETDPAVQTDGSPLCCHFHFSPKVMFTKVLKAQLWVYLRPVPRPATVYLQILRLKPLTGEGTAGGGGGGRRHIRIRSLKIELHSRSGHWQSIDFKQVLHSWFRQPQSNWGIEINAFDPSGTDLAVTSLGPGAEGLHPFMELRVLENTKRSRRNLGLDCDEHSSESRCCRYPLTVDFEAFGWDWIIAPKRYKANYCSGQCEYMFMQKYPHTHLVQQANPRGSAGPCCTPTKMSPINMLYFNDKQQIIYGKIPGMVVDRCGCS

SEQ ID NO: 75250 - protein, 66 aa, Homo sapiens
MTHLNSLDVQLAQELGDFTDDDLDVVFTPKECRTLQPSLPEEGVELDPHVRDCVQTYIREWLIVNR

SEQ ID NO: 75251 - protein, 30 aa, Homo sapiens
EYKGKGHTLGRGRSVCVCTRAFAWFSKGWH

SEQ ID NO: 75252 - protein, 26 aa, Homo sapiens
MNAGFQREQRFSFGHRKWCLQHRRRA

SEQ ID NO: 75253 - protein, 105 aa, Homo sapiens
MAPRRVRSFLRGLPALLLLLLFLGPWPAASHGGKYSREKNQPKPSPKRESGEEFRMEKLNQLWEKAQRNLPVASLLRGQFLAVSWSVLLVAHRLLPFVRSCIFLP

SEQ ID NO: 75254 - protein, 114 aa, Homo sapiens
MGFSSELCSPQGHGVLQQMQEAELRLLEGMRKWMAQRVKSDREYAGLLHHMSLQDSGGQSRAISPDSPISQSWAEITSQTEGLSRLLRQHAEDLNSGPLSKLSLLIRERQQLRK

SEQ ID NO: 75255 - protein, 839 aa, Homo sapiens
  MOD_RES (1)..(1): Any amino acid
XTVLRILKQLVDFPEALLLPWHEAVDACMACLRSPNTDREVLQELIFFLHRLTSVSRDYAVVLNQLGARDAISKALEKHLGKLELAQELRDMVFKCEKHAHLYRKLITNILGGCIQMVLGQIEDHRRTHQPINIPFFDVFLRYLCQGSSVEVKEDKCWEKVEVSSNPHRASKLTDHNPKTYWESNGSAGSHYITLHMRRGILIRQLTLLVASEDSSYMPARVVVCGGDSTSSLHTELNSVNVMPSASRVILLENLTRFWPIIQIRIKRCQQGGIDTRIRGLEILGPKPTFWPVFREQLCRHTRLFYMVRAQAWSQDMAEDRRSLLHLSSRLNGALRQEQNFADRFLPDDEAAQALGKTCWEALVSPVVQNITSPDEDGISPLGWLLDQYLECQEAVFNPQSRGPAFFSRVRRLTHLLVHVEPCEAPPPVVATPRPKGRNRSHDWSSLATRGLPSSIMRNLTRCWRAVVEKQNSSSELFGPRAAFLLALQNGCAGALLKLPFLKAAHVSEQFARHIDQQIQGSRIGGAQEMERLAQLQQCLQAVLIFSGLEIATTFEHYYQHYMADRLLGVVSSWLEGAVLEQIGPCFPNRLPQQMLQSLSTSKELQRQFHVYQLQQLDQELLKLEDTEKKIQVGLGASGKEHKSEKEEEAGAAAVVDVAEGEEEEEENEDLYYEGAMPEVSVLVLSRHSWPVASICHTLNPRTCLPSYLRGTLNRYSNFYNKSQSHPALERGSQRRLQWTWLGWAELQFGNQTLHVSTVQMWLLLYLNDLKAVSVESLLAFSGLSADMLNQAIGPLTSSRGPLDLHEQKDIPGDSRWQQGTQVEMGHCAAHPTSDVPAS

SEQ ID NO: 75256 - protein, 209 aa, Homo sapiens
MDRNPSPPPPGRDKEEEEEVAGGDCIGSTVYSKHWLFGVLSGLIQIVSPENTKSSSDDEEQLTELDEEMENEICRVWDMSMDEDVALFLQEFNAPDIFMGVLAKSKCPRLREICVGILGNMACFQEICVSISSDKNLGCYCTVCMIQTHLLCWKQAEVASVWVERIQEHPAIYDSICFIMSSSTNVDLLVKVGEVVDKLFDLDEKLMLE

SEQ ID NO: 75257 - protein, 1190 aa, Homo sapiens
MAVCAKKRPPEEERRARANDREYNEKFQYASNCIKTSKYNILTFLPVNLFEQFQEVANTYFLFLLILQLIPQISSLSWFTTIVPLVLVLTITAVKDATDDYFRHKSDNQVNNRQSQVLINGILQQEQWMNVCVGDIIKLENNQFVAADLLLLSSSEPHGLCYIETAELDGETNMKVRQAIPVTSELGDISKLAKFDGEVICEPPNNKLDKFSGTLYWKENKFPLSNQNMLLRGCVLRNTEWCFGLVIFAGPDTKLMQNSGRTKFKRTSIDRLMNTLVLWIFGFLVCMGVILAIGNAIWEHEVGMRFQVYLPWDEAVDSAFFSGFLSFWSYIIILNTVVPISLYVSVEVIRLGHSYFINWDKKMFCMKKRTPAEARTTTLNEELGQVEYIFSDKTGTLTQNIMVFNKCSINGHSYGDVFDVLGHKAELGERPEPVDFSFNPLADKKFLFWDPSLLEAVKIGDPHTHEFFRLLSLCHTVMSEEKNEGELYYKAQSPDEGALVTAARNFGFVFRSRTPKTITVHEMGTAITYQLLAILDFNNIRKRMSVIVRNPEGKIRLYCKGADTILLDRLHHSTQELLNTTMDHLNEYAGEGLRTLVLAYKDLDEEYYEEWAERRLQASLAQDSREDRLASIYEEVENNMMLLGATAIEDKLQQGVPETIALLTLANIKIWVLTGDKQETAVNIGYSCKMLTDDMTEVFIVTGHTVLEVREELRKAREKMMDSSRSVGNGFTYQDKLSSSKLTSVLEAVAGEYALVINGHSLAHALEADMELEFLETACACKAVICCRVTPLQKAQVVELVKKYKKAVTLAIGDGANDVSMIKTAHIGVGISGQEGIQAVLASDYSFSQFKFLQRLLLVHGRWSYLRMCKFLCYFFYKNFAFTMVHFWFGFFCGFSAQTVYDQYFITLYNIVYTSLPVLAMGVFDQDVPEQRSMEYPKLYEPGQLNLLFNKREFFICIAQGIYTSVLMFFIPYGVFADATRDDGTQLADYQSFAVTVATSLVIVVSVQIGLDTGYWTAINHFFIWGSLAVYFAILFAMHSNGLFDMFPNQFRFVGNAQNTLAQPTVWLTIVLTTVVCIMPVVAFRFLRLNLKPDLSDTVRYTQLVRKKQKAQHRCMRRVGRTGSRRSGYAFSHQEGFGELIMSGKNMRLSSLALSSFTTRSSSSWIESLRRKKSDSASSPSGGADKPLKG

SEQ ID NO: 75258 - protein, 229 aa, Homo sapiens
MSFLIDSSIMITSQIRQYVVQVIFSVTFAFSCTMFELIIFEILGVLNSSSRYFHWKMNLCVILLILVFMVPFYIGYFIVSNIRLLHKQRLLFSCLLWLTFMYFFWKLGDPFPILSPKHGILSIEQLISRVGVIGVTLMALLSGFGAVNCPYTYMSYFLRNVTDTDILALERRLLQTMDMIISKKKRMAMARRTMFQKGEVHNKPSGFWGMIKSVTTSASGSESILCPSA

SEQ ID NO: 75259 - protein, 103 aa, Homo sapiens
  MOD_RES (1)..(1): Any amino acid
XKTEEEAKQLAEEMNIAFYTSRTDDILLHQDVDLVCISIPPPLTRQISVKALGSTCGVPEWSLDGCGGEAQVHTLPRWASTRRVLGRMWFARRQQHRWMPSGW

SEQ ID NO: 75260 - protein, 220 aa, Homo sapiens
MEYYLVKWKGWPDSTNTWEPLQNLKCPLLLQQFSNDKHNYLSQVKKGKAITPKDNNKTLKPAIAEYIVKKAKQRIALQRWQDELNRRKNHKGMIFVENTVDLEGPPSDFYYINEYKPAPGISLVNEATFGCSCTDCFFQKCCPAEAGVLLAYNKNQQIKIPPGTPIYECNSRCQCGPDCPNRIVQKGTQYSLCIFRTSNGRGWGVKTLVKIKRMSFVMEY

SEQ ID NO: 75261 - protein, 64 aa, Homo sapiens
MPPRKKRRQPSQKAPLLFHQQPLEGPKHSCASTQLPITHTRQVPSKPIDHSTITSWVSPDFDTA

SEQ ID NO: 75262 - protein, 87 aa, Homo sapiens
MAVPETRPNHTIYINNLNEKIKKDELKKSLYAIFSQFGQILDILVSRSLKMRGQAFVIFKEVSSATNALRSMQGFPFYDKPMWCHLS

SEQ ID NO: 75263 - protein, 216 aa, Homo sapiens
MMEEEELEFVEELEAVLQLTPEVQLAIEQVFPSQDPLDRADFNAVEYINTLFPTEQSLANIDEVVNKIRLKIRRLDDNIRTVVRGQTNVGQDGRQALEEAQKAIQQLFGKIKDIKDKAEKSEQMVKEITRDIKQLDHAKRHLTTSITTLNHLHMLAGGVDSLEAMTRRRQYGEVANLLQGVMNVLEHFHKYMGIPQIRQLSERLPGWTKSTDAMPG

SEQ ID NO: 75264 - protein, 41 aa, Homo sapiens
MPDENIFLFVPNLIAACWTLSMDTLLALLIKEPGLGPCWTC

SEQ ID NO: 75265 - protein, 518 aa, Homo sapiens
  MOD_RES (1)..(1): Any amino acid
XRKWSRQFLLSFWCTVCSAHQGTIFLSLKIQFADQKQEFNKRPTKIGRRSLSRSISQSSTDSYSSAASYTDSSDDETSPRDKQQKNSKGSSDFCVKNIKQAEFGRREIEIAEQEMPALMALRKRAQGEKPLAGAKIVGCTHITAQTAVLMETLGALGAQCRWAACNIYSTLNEVAAALAESGFPVFAWKGESEDDFWWCIDRCVNVEGWQPNMILDDGGDLTHWIYKKYPNMFKKIKGIVEESVTGVHRLYQLSKAGKLCVPAMNVNDSVTKQKFDNLYCCRESILDGLKRTTDMMFGGKQVVVCGYGEVGKGCCAALKAMGSIVYVTEIDPICALQACMDGFRLVKLNEVIRQVDIVITCTGNKNVVTREHLDRMKNSCIVCNMGHSNTEIDVASLRTPELTWERVRSQVDHVIWPDGKRIVLLAEGRLLNLSCSTVPTFVLSITATTQALALIELYNAPEGRYKQDVYLLPKKMDEYVASLHLPTFDAHLTELTDEQAKYLGLNKNGPFKPNYYRY

SEQ ID NO: 75266 - protein, 1579 aa, Homo sapiens
MASSAREHLLFVRRRNPQMRYTLSPENLQSLAAQSSMPENMTLQRANSDTDLVTSESRSSLTASMYEYTLGQAQNLIIFWDIKEEVDPSDWIGLYHIDENSPANFWDSKNRGVTGTQKGQIVWRIEPGPYFMEPEIKICFKYYHGISGALRATTPCITVKNPAVMMGAEGMEGGASGNLHSRKLVSFTLSDLRAVGLKKGMFFNPDPYLKMSIQPGKKSSFPTCAHHGQERRSTIISNTTNPIWHREKYSFFALLTDVLEIEIKDKFAKSRPIIKRFLGKLTIPVQRLLERQAIGDQMLSYNLGRRLPADHVSGYLQFKVEVTSSVHEEMLFSHSDASPEAVGTILGVNSVNGDLGSPSDDEDMPGSHHDSQVCSNGPVSEDSAADGTPKHSFRTSSTLEIDTEELTSTSSRTSPPRGRQDSLNDYLDAIEHNGHSRPGTATCSERSMGASPKLRSSFPTDTRLNAMLHIDSDEEDHEFQQDLGYPSSLEEEGGLIMFSRASRADDGSLTSQTKLEDNPVENEEASTHEAASFEDKPENLPELAESSLPAGPAPEEGEGGPEPQPSADQGSAELCGSQEVDQPTSGADTGTSDASGGSRRAVSETESLDQGSEPSQVSSETEPSDPARTESVSEASTRPEGESDLECADSSCNESVTTQLSSVDTRCSSLESARFPETPAFSSQEEEDGACAAEPTSSGPAEGSQESVCTAGSLPVVQVPSGEDEGPGAESATVPDQEELGEVWQRRGSLEGAAAAAESPPQEEGSAGEAQGTCEGATAQEEGATGGSQANGHQPLRSLPSVRQDVSRYQRVDEALPPNWEARIDSHGRIFYVDHVNRTTTWQRPTAPPAPQVLQRSNSIQQMEQLNRRYQSIRRTMTNERPEENTNAIDGAGEEADFHQASADFRRENILPHSTSRSRITLLLQSPPVKFLISPEFFTVLHSNPSAYRMFTNNTCLKHMITKVRRDTHHFERYQHNRDLVGFLNMFANKQLELPRGWEMKHDHQGKAFFVDHNSRTTTFIDPRLPLQSSRPTSALVHRQHLTRQRSHSAGEVGEDSRHAGPPVLPRPSSTFNTVSRPQYQDMVPVAYNDKIVAFLRQPNIFEILQERQPDLTRNHSLREKIQFIRTEGTPGLVRLSSDADLVMLLSLFEEEIMSYVPPHALLHPSYCQSPRGSPVSSPQNSPGTQRANARAPAPYKRDFEAKLRNFYRKLETKGYGQGPGKLKLIIRRDHLLEDAFNQIMGYSRKDLQRNKLYVTFVGEEGLDYSGPSREFFFLVSRELFNPYYGLFEYSANDTYTVQISPMSAFVDNHHEWFRFSGRILGLALIHQYLLDAFFTRPFYKALLRILCDLSDLEYLDEEFHQSLQWMKDNDIHDILDLTFTVNEEVFGQITERELKPGGANIPVTEKNKKEYIERMVKWRIERGVVQQTESLVRGFYEVVDARLVSVFDARELELVIAGTAEIDLSDWRNNTEYRGGYHDNHIVIRWFWAAVERFNNEQRLRLLQFVTGTSSIPYEGFASLRGSNGPRRFCVEKWGKITALPRAHTCFNRLDLPPYPSFSMLYEKLLTAVEETSTFGLE

SEQ ID NO: 75267 - protein, 152 aa, Homo sapiens
VSQDHETMAQVLFSRNMRLNVALTFWRKRSISELVAYLLRIEDLGVVVDCLPVLTNCLQEEKQYISLGCCVDLLPLVKSLLKSKFEEYVIVGLNWLQAVIKRWWSELSSKTEIINDGNIQILKQQLSGLWEQENHLTLVPGYTGNIAKVLCV

SEQ ID NO: 75268 - protein, 285 aa, Homo sapiens
MSGARTASTPTPPQTGGGLEPQANGETPQVAVIVRPDDRSQGAIIADRPGLPGPEHSPSESQPSSPSPTPSPSPVLEPGSEPNLAVLSIPGDTMTTIQMSVEESTPISRETGEPYRLSPEPTPLAEPILEVEVTLSKPVPESEFSSSPLQAPTPLASHTVEIHEPNGMVPSEDLEPEVESSPELAPPPACPSESPVPIAPTAQPEELLNGAPSPPAVDLSPVSEPEEQAKEVTASMAPPTIPSATPATAPSATSPAQEEEMEEEEEEEEGEAGEAGEAESEKGGE

SEQ ID NO: 75269 - protein, 49 aa, Homo sapiens
MAQEEEDVRDYNLTEEQKAIKAKYPPVNRKYECEFGSYSRCPWIVLHRA

SEQ ID NO: 75270 - protein, 221 aa, Homo sapiens
MAFLASGPYLTHQQKVLRLYKRALRHLESWCVQRDKYRYFACLMRARFEEHKNEKDMAKATQLLKEAEEEFWYRQHPQPYIFPDSPGGTSYERYDCYKVPEWCLDDWHPSEKAMYPDYFAKREQWKKLRRESWEREQLSKRQVRQELGTMEETSHVLYRSAKLGPRAGLERSMEKFCAQGNNSNSDILLGLREMSWYLRISFQNACSASSQLRHANDFLKN

SEQ ID NO: 75271 - protein, 89 aa, Homo sapiens
MAAPKVRFMTKIYHPNVDKLGRICLDILKDKWSPALQIRTVLLSIQALLSAPNPDDPLANDVAEQWKTNEAQAIETARAWTRLYAMNNI

SEQ ID NO: 75272 - protein, 530 aa, Homo sapiens
  MOD_RES (1)..(1): Any amino acid
XCCTGRLVGGHPLQGRGQDLLWCSEGSSCQENYDDPHKTPASPVVHIRGLIDGVVEADLVEALQEFGPISYVVVMPKKRQALVEFEDVLGACNAVNYAADNQIYIAGHPAFVNYSTSQKISRPGDSDDSRSVNSVLLFTILNPIYSITTDVLYTICNPCGPVQRIVIFRKNGVQAMVEFDSVQSAQRAKASLNGADIYSGCCTLKIEYAKPTRLNVFKNDQDTWDYTNPNLSGQGDPGSNPNKRQRQPPLLGDHPAEYGGPHGGYHSHYHDEGYGPPPPHYEGRRMGPPVGGHRRGPSRYGPQYGHPPPPPPPPEYGPHADSPVLMVYGLDQSKMNCDRVFNVFCLYGNVEKVKFMKSKPGAAMVEMADGYAVDRAITHLNNNFMFGQKLNVCVSKQPAIMPGQSYGLEDGSCSYKDFSESRNNRFSTPEQAAKNRIQHPSNVLHFFNAPLEVTEENFFEICDELGVKRPSSVKVFSGKSERSSSGLLEWESKSDALETLGFLNHYQMKNPNGPYPYTLKLCFSTAQHAS

SEQ ID NO: 75273 - protein, 262 aa, Homo sapiens
MPTGDFDSKPSWADQVEEEGEDDKCVTSELLKGIPLATGDTSPEPELLPGAPLPPPKEVINGNIKTVTEYKIDEDGKKFKVRIVRTFRIETRKASKAVARRKNWKKFGNSEFDPPGPNVATTTVSDDVSMTFITSKEDLNCQEEEDPMNKLKGQKIVSCRICKGDHWTTRCPYKDTLGPMQKELAEQLGLSTGEKEKLPGELEPVQATQNKTGKYVPPSLRDGASRRGESMQPNRRADDNATIRVTNLSEDTRETDLQELFR

SEQ ID NO: 75274 - protein, 94 aa, Homo sapiens
  MOD_RES (1)..(1): Any amino acid
XILGTVVNKTLMGPIVMKLVHQEKLEGDFRFKHMQIRVNAEPAAFYSPVDIPAFPCQSWACGAHEDRPQAAETPSDPEGADVQGALAVHRHQHL

SEQ ID NO: 75275 - protein, 189 aa, Homo sapiens
MTILHGGFLLAEQLFHPKALAELTKSDWERVGRPIVEALREISSAAAHSQPFAWKKKALIIIWAKVLQPHPVTPSDTETRWQEDLFFSVGNMIPTINHTILFELLKSLEASGLFIQLLMALPTTICHAELERFLEHVTVDTSAEDVAFFLDVWWEVMKHKGHPQDPLLSQFSAMAHKYLPALDEFPHPP

SEQ ID NO: 75276 - protein, 69 aa, Homo sapiens
MRDNTSPISVILANADPSVINCLHNLSRRIATVLQHEERRCQYLTREAKLILALQDEVSAMADACARRA

SEQ ID NO: 75277 - protein, 165 aa, Homo sapiens
MELLQVTILFLLPSICSSNSTGVLEAANNSLVVTTTKPSITTPNTESLQKNVVTPTTGTTPKGTITNELLKMSLMSTATFLTSKDEGLKATTTDVRKNDSIISNVTVTSVTLPNAVSTLQSSKPKTETQSSIKTTEIPGIILPVVIALIVITLSVFVLVGLYRMC

SEQ ID NO: 75278 - protein, 135 aa, Homo sapiens
  MOD_RES (1)..(1): Any amino acid
XKRQASRAFSLYANIDILRPYFDVEPAQVRSRTLCLPAGHGGSRLESQHFGRPRRADHKVRRSRPSWLTRLLESMIPIKMVNFPQKIAGELYGPLMLVFTLVAILLHGMKTSDTIIREGTLMGTAIGTCFGYWLG

SEQ ID NO: 75279 - protein, 177 aa, Homo sapiens
  MOD_RES (1)..(1): Any amino acid
XEDTQHILCHLNITMPPCAKGSGAEDRRRTPTPLALRYSILSESTPGSLSGTEQAEMKMAVISEHLGLSWAELARELQFSVEDINRIRVENPNSLLEQSVALLNLWVIREGQNANMENLYTALQSIDRGEIVNMLEGSGRQSRNLKPDRRHTDRDYSLSPSQMNGGRSEVRREAARF

SEQ ID NO: 75280 - protein, 130 aa, Homo sapiens
MKRRLDDQESPVYAAQQRRIPGSTEAFPHQHRVLAPAPPVYEAVSETMQSATGIQYSVTPSYQVSAMPQSSGSHGPAIAAVHSSHHHPTAVQPHGGQVVQSHAHPAPPVAPVQGQQQFQRLKVEDALSYL

SEQ ID NO: 75281 - protein, 637 aa, Homo sapiens
AQGLEVALTDLQSSRNNVRHHTEEITVDHLLVRRGQAFNLTLYFRNRSFQPGLDNIIFVVETEDAVYLDSEPQRQEYVMNDYGFIYQGSKNWIRPCPWNYGQFEDKIIDICLKLLDKSLHFQTDPATDCALRGSPVYVSRVVCAMINSNDDNGVLNGNWSENYTDGANPAEWTGSVAILKQWNATGCQPVRYGQCWVFAAVMCTVMRCLGIPTRVITNFDSGHDTDGNLIIDEYYDNTGRILGNKKKDTIWNFHVWNECWMARKDLPPAYGGWQVLDATPQEMSNGVYCCGPASVRAIKEGEVDLNYDTPFVFSMVNADCMSWLVQGGKEQKLHQDTSSVGNFISTKSIQSDERDDITENYKYEEGSLQERQVFLKALQKLKARSFHGSQRGAELQPSRPTSLSQDSPRSLHTPSLRPSDVVQVSLKFKLLDPPNMGQDICFVLLALNMSSQFKDLKVNLSAQSLLHDGSPLSPFWQDTAFITLSPKEAKTYPCKISYSQYSQYLSTDKLIRISALGEEKSSPEKILVNKIITLSYPSITINVLGAAVVNQPLSIQVIFSNPLSEQVEDCVLTVEGSGLFKKQQKVFLGVLKPQHQASIILETVPFKSGQRQIQANMRSNKFKDIKGYRNVYVDFAL

SEQ ID NO: 75282 - protein, 161 aa, Homo sapiens
MLHLHHSCLCFRSWLPAMLAVLLSLAPSASSDISASRPNILLLMADDLGIGDIGCYGNNTMRTPNIDRLAEDGVKLTQHISAASLCTPSRAAFLTGRYPVRSGMVSSIGYRVLQWTGASGGLPTNETTFAKILKEKGYATGLIGRILDTLDVEGLSNSTLI

SEQ ID NO: 75283 - protein, 129 aa, Homo sapiens
MFNSMTPPPISSYGEPCCLRPLPSQGAPSVGTEGLSGPPFCHQANLMSGPHSYGPARETNSCTEGPLFSSPRSAVKLTKKRALSISPLSDASLDLQTVIRTSPSSLVAFINSRCTSPGGSYGHLSIGTM

SEQ ID NO: 75284 - protein, 48 aa, Homo sapiens
MGALLLHPSRRGPAGVVASWTSSPAGRDGGVGIAEPLEAFRGMLPVGK

SEQ ID NO: 75285 - protein, 65 aa, Homo sapiens
  MOD_RES (1)..(1): Any amino acid
XRGEDYLKETHCYDPGSNTWHTLADGPVRRAWHGMATLLNKLYVIGGSNNDAGYRRDVHQVRDQV

SEQ ID NO: 75286 - protein, 93 aa, Homo sapiens
  MOD_RES (1)..(1): Any amino acid
XTRLPPGGWSPDPKYQICLCFGEEDPGPTQHPKEQLIMADVQVQLRPGSSSCTLSASTERPDGSSTPGNPDGITHLQCSCLHPKRAASSSCTR

SEQ ID NO: 75287 - protein, 432 aa, Homo sapiens
  MOD_RES (1)..(1): Any amino acid
XAHVPLSQRRKAVSRKPVPPLEEALKQIQESNLKSEVNLPFSRRPTINWRSIPACPAVSTPDPYLPDQLSPPRVPLRSHHFQILPSYPTVSPARQPHILPIHPSVPSTLPKTFAPVPLLPYPIKYHPCPPTPATSSISSSFPRLPAPIPSCPPGHPPHAPQSSPIIPDPESQHKLFYKTFRPKHFLPAQHSTAATLMPTLVRRSLPAPLVVSPTPLEPLPVLKPSCLSSHPPYPPVPTLSYVTPLPAHPASLDPFQSVQQSVPQATALSNQPEAFADHPPASVLSLASPCHSPSSSLPSSPSTSTSFSSACILFSSSSSILSSSSTSCSTSPSLPPSSIPLFSSPLHSSSSPGLPPTYLAFPSPVSPVSSSFMISSSFPPILHSPSVSTSPSPFIPIHPFNPPHWGKKVEKRREESGVEKKGIEKKVETRQL

SEQ ID NO: 75288 - protein, 123 aa, Homo sapiens
MMAEREEDDDTEEAWMQLRPTEPLPSQCCGSGCSPCVFDLYHRDLARWEAAQASKDRSLLRGPESQSCPSKLNPETFVAFCIIAMDRLTKDTYRVRFALPGNSQLGLRPGQHLILRYTQRDSR

SEQ ID NO: 75289 - protein, 242 aa, Homo sapiens
  MOD_RES (1)..(1): Any amino acid
XGPGAIRYIINTADISTVIVDKPQKAVLLLEHVERKETPGLKLIILMDPFEEALKERGQKCGVVIKSMQAVEDCGQENHQAPVPPQPDDLSIVCFTSGTTGNPKGAMLTHGNVVADFSGFLKVTEKVIFPRQDDVLISFLPLAHMFERVIQSVVYCHGGRVGFFQGDIRLLSDDMKALCPTIFPVVPRLLNRMYDKIFSQANTPLKRWLLEFAAKRKQAEVRSGIIRNDSIWDELFFNKIQP

SEQ ID NO: 75290 - protein, 173 aa, Homo sapiens
GGGSGEDEQFLGFGSDEEVRVRSPTRSPSVKTSPRKPRGRPRSGSDRNSAILSDPSVFSPLNKSETKSGDKIKKKDSKSIEKKRGRPPTFPGVKIKITHGKDISELPKGNKEDSLKKIKRTPSATFQQATKIKKLRAGSMLAQADKLPMTDKRVASLLKKAKAQLCKIEKSKS

SEQ ID NO: 75291 - protein, 287 aa, Homo sapiens
MSRLGALGGARAGLGLLLGTAAGLGFLCLLYSQRWKRTQRHGRSQSLPNSLDYTQTSDPGRHVMLLRAVPGGAGDASVLPSLPREGQEKVLDRLDFVLTSLVALRREVEELRSSLRGLAGEIVGEVRCHMEENQRVARRRRFPFVRERSDSTGSSSVYFTASSGATFTDAESEGGYTTANAESDNERDSDKESEDGEDEVSCETVKMGRKDSLDLEEEAASGASSALEAGGSSGLEDVLPLLQQADELHRGDEQGKREGFQLLLNNKLVYGSRQDFLWRLARAYSDM

SEQ ID NO: 75292 - protein, 42 aa, Homo sapiens
MAGGVLPLRGLRALCRVLLFLSQFCILSGGGESKAGFSAGWG

SEQ ID NO: 75293 - protein, 54 aa, Homo sapiens
MAAALFVLLGFALLGTHGASGAGWTPTTSGESTPASSSPSPWARPTSSSTGLPE

SEQ ID NO: 75294 - protein, 803 aa, Homo sapiens
MTNQEKWAHLSPSEFSQLQKYAEYSTKKLKDVLEEFHGNGVLAKYNPEGKQDILNQTIDFEGFKLFMKTFLEAELPDDFTAHLFMSFSNKFPHSSPMVKSKPALLSGGLRMNKGAITPPRTTSPANTCSPEVIHLKDIVCYLSLLERGRPEDKLEFMFRLYDTDGNGFLDSSELENIISQMMHVAEYLEWDVTELNPILHEMMEEIDYDHDGTVSLEEWIQGGMTTIPLLVLLGLENNVKDDGQHVWRLKHFNKPAYCNLCLNMLIGVGKQGLCCSFCKYTVHERCVARAPPSCIKTYVKSKRNTDVMHHYWVEGNCPTKCDKCHKTVKCYQGLTGLHCVWCQITLHNKCASHLKPECDCGPLKDHILPPTTICPVVLTLPTSGVSVPEERQSTVKKEKSGSQQPNKVIDKNKMQRANSVTVDGQGLQVTPVPGTHPLLVFVNPKSGGKQGERIYRKFQYLLNPRQVYSLSGNGPMPGLNFFRDVPDFRVLACGGDGTVGWVLDCIEKANVGKHPPVAILPLGTGNDLARCLRWGGGYEGENLMKILKDIENSTEIMLDRWKFEVIPNDKDEKGDPVPYSIINNYFSIGVDASIAHRFHIMREKHPEKFNSRMKNKFWYFEFGTSETFSATCKKLHESVEIECDGVQIDLINISLEGIAILNIPSMHGGSNLWGESKKRRSHRRIEKKGSDKRTTVTDAKELKFASQDLSDQLLEVVGLEGAMEMGQIYTGLKSAGRRLAQCSCVVIRTSKSLPMQIDGEPWMQTPCTIKITHKNQAPMLMGPPPKTGLFCSLVKRTRNRSKE

SEQ ID NO: 75295 - protein, 134 aa, Homo sapiens
MQGARAPRDQGQSPGRMSALGRSSVILLTYVLAATELTCLFMQFSIVPYLSRKLGLDSIAFGYLQTTFGVLQLLGGPVFGRFADQRGARAALTLSFLAALALYLLLAAASSPALPGVYLLFASRLPGALMHTLP

SEQ ID NO: 75296 - protein, 588 aa, Homo sapiens
  MOD_RES (1)..(1): Any amino acid
XGRGFEDSRAEDKRSFFQDEHVADSENAENRPFRRRRPPRQDKPPRFRRLRQERESLGLWGPEEEPHLLAGQWPGRPKLCSGDKSGTVGRRSPELSYQNSSDHANEEWETASESSDFSERRERREGPGSEPDSQVDGGLSGASLGEKKELAKRSFSSQRPVVDRQSRKLEPGGFGEKPVRPGGGDTSPRYESQQNGTPLKVKRSPDEALPGGLSGCSSGSGHSPYALERAAHASADLPEASSKKAEKEAKLAAPRAGEQGEAMKQFDLNYGSAIIENCGSSPGEESEVGSMVGEGFIEVLTKKQRRLLEEERRKKEQAVQVPVKGRGLSSRIPPRFAKKQNNLCLEQGDVTVPGSSLGTEIWESSSQALPVQAPANDSWRKAVTAFSSTETGSAEGFKSSQGDSGVDLSAESRESSATSSQRSSPYGTLKPEEMSGPGLAEPKADSHKEQAPKPSEQKDSEQGSGQSKEHRPGPIGNERSLKNRKGSEGAERLQGAVVPPVNGVEIHVDSVLPVPPIEFGVSPKDSDFSLPPGSASGPTGSPVVKLQDALASNAGLTQSIPILRRDHHIQRAIGLSPMSFPTADLTLK

SEQ ID NO: 75297 - protein, 274 aa, Homo sapiens
  MOD_RES (1)..(1): Any amino acid
XDHIQQAKYQGRLHVSHKVPGDVSLQLSTLEMDDRSHYTCEVTWQTPDGNQVVRDKITELRVQKLSVSKPTVTTGSGYGFTVPQGMRISLQCQARGSPPISYIWYKQQTNNQEPIKVATLSTLLFKPAVIADSGSYFCTAKGQVGSEQHSDIVKFVVKDSSKLLKTKTEAPTTMTYPLKATSTVKQSWDWTTDMDGYLGETSAGPGKSLPVFAIILIISLCCMVVFTMAYIMLCRKTSQQEHVYEAASPKCPPTNTGAAGSHWLCPGICQMHLK

SEQ ID NO: 75298 - protein, 414 aa, Homo sapiens
MSYTSPYSPNASSPYSSGFNSPSSTPVRPPIVKQLILPGNSGNLKSSDRNPPLSPQSSIDSELSASELDEDSIGSNYKLNDVTDVQILARMQEESLRQEYAATTSRRSSGSSCNSTRRGTFSDQELDAQSLDDEDDNMHHAVYPAVNRFSPSPRNSPRPSPKQSPRNSPRSRSPARGIEYSRVSPQPMISRLQQPRLSLQGHPTDLQTSNVKNEEKLRRSLPNLSRTSNTQVDSVKSSRSDSNFQVPNGGIPRMQPQASATSQRLKNLPRTSLKAKQLLQTSSTKRVPSPGKFRSPAAPSPLALRQPVKAFSNHGSGSPGSQEITQLTQTTSSPGPPMVQSTVSANPPSNINSATLTRPAGTTAMRSGLPRPSAPSAGGIPVPRSKLAQPVRRSLPAPKTYGSMKDDSWKDGCY

SEQ ID NO: 75299 - protein, 319 aa, Homo sapiens
MGCGCSSHPEDDWMENIDVCENCHYPIVPLDGKGTLLIRNGSEVRDPLVTYEGSNPPASPLQDNLVIALHSYEPSHDGDLGFEKGEQLRILEQSGEWWKAQSLTTGQEGFIPFNFVAKANSLEPEPWFFKNLSRKDAERQLLAPGNTHGSFLIRESESTAGSFSLSVRDFDQNQGEVVKHYKIRNLDNGGFYISPRITFPGLHELVRHYTRYYNGHTKVAVKSLKQGSMSPDAFLAEANLMKQLQHQRLVRLYAVVTQEPIYIITEYMENGSLVDFLKTPSGIKLTINKLLDMAAQIAEGMAFIEERNYIHRDLRAANI

SEQ ID NO: 75300 - protein, 347 aa, Homo sapiens
MATAERRALGIGFQWLSLATLVLICAGQGGRREDGGPACYGGFDLYFILDKSGSVLHHWNEIYYFVEQLAHKFISPQLRMSFIVFSTRGTTLMKLTEDREQIRQGLEELQKVLPGGDTYMHEGFERASEQIYYENRQGYRTASVIIALTDGELHEDLFFYSEREANRSRDLGAIVYCVGVKDFNETQLARIADSKDHVFPVNDGFQALQGIIHSILKKSCIEILAAEPSTICAGESFQVVVRGNGFRHARNVDRVLCSFKINDSVTLNEKPFSVEDTYLLCPAPILKEVGMKAALQVSMNDGLSFISSSVIITTTHCDGLWFYIQSLETVKDHRNIRVRNSDLKYCL

SEQ ID NO: 75301 - protein, 57 aa, Homo sapiens
KTTLPVLTLFTKDPCPLCDEAKEVLKPYENRFLMMHRVNTSKLEKQLLKLEQQSTGG

SEQ ID NO: 75302 - protein, 694 aa, Homo sapiens
MSRKGPRAEVCADCSAPDPGWASISRGVLVCDECCSVHRSLGRHISIVKHLRHSAWPPTLLQMVHTLASNGANSIWEHSLLDPAQVQSGRRKANPQDKVHPIKSEFIRAKYQMLAFVHKLPCRDDDGVTAKDLSKQLHSSVRTGNLETCLRLLSLGAQANFFHPEKGTTPLHVAAKAGQTLQAELLVVYGADPGSPDVNGRTPIDYARQAGHHELAERLVECQYELTDRLAFYLCGRKPDHKNGHYIIPQMADSLDLSELAKAAKKKLQALSNRLFEELAMDVYDEVDRRENDAVWLATQNHSTLVTERSAVPFLPVNPEYSATRNQGRQKLARFNAREFATLIIDILSEAKRRQQGKSLSSPTDNLELSLRSQSDLDDQHDYDSVASDEDTDQEPLRSTGATRSNRARSMDSSDLSDGAVTLQEYLELKKALATSEAKVQQLMKVNSSLSDELRRLQREIHKLQAENLQLRQPPGPVPTPPLPSERAEHTPMAPGGSTHRRDRQAFSMYEPGSALKPFGGPPGDELTTRLQPFHSTELEDDAIYSVHVPAGLYRIRKGVSASAVPFTPSSPLLSCSQEGSRHTSKLSRHGSGADSDYENTQSGDPLLGLEGKRFLELGKEEDFHPELESLDGDLDPGLPSTEDVILKTEQVTKNIQELLRAAQEFKHDSFVPCSEKIHLAVTEMASLFPKLVA

SEQ ID NO: 75303 - protein, 198 aa, Homo sapiens
  MOD_RES (1)..(1): Any amino acid
XDVHMPKHPELADKNVPNLHVMKAMQSLKSRGYVKEQFAWRHFYWYLTNEGIQYLRDYLHLPPEIVPATLRRSRPETGRPRPKGLEGERPARLTRGEADRDTYRRSAVPPGADKKAEAGAGSATEFQFAGVKGTLGRLVGIFENQERKHRTYVYVLIVTEVLEDWEDSVNIGRKREWFKIEDAIKVLQYHKPVQASYF

SEQ ID NO: 75304 - protein, 125 aa, Homo sapiens
MSSSGYPPNQGAFSTEQSRYPPHSVQYTFPNTRHQQEFAVPDYRSSHLEVSQASQLLQQQQQQQLRRRPSLLSEFHPGSDRPQERRTSYEPFHPGPSPVDHDSLESKRPRLEQVSDSHFQRVSAA

SEQ ID NO: 75305 - protein, 554 aa, Homo sapiens
MWRLPRALCVHAAKTSKLSGPWSRPAAFMSTLLINQPQYAWLKELGLREENEGVYNGSWGGRGEVITTYCPANNEPIARVRQASVADYEETVKKAREAWKIWADIPAPKRGEIVRQIGDALREKIQVLGSLVSLEMGKILVEGVGEVQEYVDICDYAVGLSRMIGGPILPSERSCCVVQAGLKLLSSRSGHALIEQWNPVGLVGIITAFNFPVAVYGWNNAIAMICGNVCLWKGAPTTSLISVAVTKIIAKVLEDNKLPGAICSLTCGGADIGTAMAKDERVNLLSFTGSTQVGKQVGLMVQERFGRSLLELGGNNAIIAFEDADLSLVVPSALFAAVGTAGQRCTTARRLFIHESIHDEVVNRLKKAYAQIRVGNPWDPNVLYGPLHTKQAVSMFLGAVEEAKKEGGTVVYGGKVMDRPGNYVEPTIVTGLGHDASIAHTETFAPILYVFKFKNEEEVFAWNNEVKQGLSSSIFTKDLGRIFRWLGPKGSDCGIVNVNIPTSGAEIGGAFGGEKHTGGGRESGSDAWKQYMRRSTCTINYSKDLPLAQGIKFQ

SEQ ID NO: 75306 - protein, 107 aa, Homo sapiens
MHWDPTLCLCSAGREGKALSLCNYFESQNVDFRGKKVIELGAGTGIVGILAALQGAYGLVRETEDDVIEQELWRGMRGACGHALSMSTMTPWESIKGSSVRGGCYHH

SEQ ID NO: 75307 - protein, 459 aa, Homo sapiens
MSQLKIVTNHLYLYEIARRHPYFYAPELLFFAKRYKAAFTECCQAADKAACLLPKLDELRDEGKASSAKQRLKCASLQKFGERAFKAWAVARLSQRFPKAEFAEVSKLVTDLTKVHTECCHGDLLECADDRADLAKYICENQDSISSKLKECCEKPLLEKSHCIAEVENDEMPADLPSLAADFVESKDVCKNYAEAKDVFLGMFLYEYARRHPDYSVVLLLRLAKTYETTLEKCCAAADPHECYAKVFDEFKPLVEEPQNLIKQNCELFEQLGEYKFQNALLVRYTKKVPQVSTPTLVEVSRNLGKVGSKCCKHPEAKRMPCAEDYLSVVLNQLCVLHEKTPVSDRVTKCCTESLVNRRPCFSALEVDETYVPKEFNAETFTFHADICTLSEKERQIKKQTALVELVKHKPKATKEQLKAVMDDFAAFVEKCCKADDKETCFAEEGKKLVAASQAALGL

SEQ ID NO: 75308 - protein, 20 aa, Homo sapiens
MVFKAQLFALTGVQPARQKV

SEQ ID NO: 75309 - protein, 165 aa, Homo sapiens
MTSSTSDHHLDAAAARQPNGVCRAGFERQHSLPSSEHLGADGGLYQIPLPSSQIPPQPRRAAPTTPPPPVKRRDREALMASGSGGHNTMPSGGNSVSSGSSVSSTSLDTLYTSSSPSEPGSSCSPTPPPVPRRGTHTTVSQVQPPPSKASAPEPPAEEEVATGTT

SEQ ID NO: 75310 - protein, 110 aa, Homo sapiens
MAVEGGMKCVKFLLYVLLLAFCACAVGLIAVGVGAQLVLSQTIIQGATPGSLLPVVIIAVGVFLFLVAFVGCCGACKENYCLMITLPSFCLLSCWWRWPQPLLAMCLEIR

SEQ ID NO: 75311 - protein, 192 aa, Homo sapiens
MDRDLLRQSLNCHGSSLLSLLRSEQQDNPHFRSLLGSAAEPARGPPPQHPLQGRKEKRVDNIEIQKFISKKADLLFALSWKSDAPATSEINEDSEDHYAIMPPLEQFMEIPSMDRRELFFRDIERGDIVIGRISSIREFGFFMVLICLGSGIMRDIAHLEITALCPLRDVPSHSNHGDPLSYYQTGDIIRGD

SEQ ID NO: 75312 - protein, 147 aa, Homo sapiens
  MOD_RES (1)..(1): Any amino acid
XWDEQWLIESLSDSTIYMAFYTVAHLLQGGNLHGQAESPLGIRPQQMTKEVWDYVFFKEAPFPKTQIAKEKLDQLKQEFEFWYPVDLRVSGKDLVPNHLSYYLYNHVAMWPEQSDKWPTAVRANGHLLLNSEKRRDFTVFARMVSVS

SEQ ID NO: 75313 - protein, 68 aa, Homo sapiens
  MOD_RES (1)..(1): Any amino acid
XFANSCTSSGATSSGGPLASYQKANMDNGVTCRVAMRLRTRPSFSLSTKRQQPANLPHPRLHTCTFSF

SEQ ID NO: 75314 - protein, 11 aa, Homo sapiens
  MOD_RES (1)..(1): Any amino acid
XNATDINDNSF

SEQ ID NO: 75315 - protein, 41 aa, Homo sapiens
MGCASAKHVATVQNEEEAQKGKNYQNGDVFGGSNQWKRSNT

SEQ ID NO: 75316 - protein, 95 aa, Homo sapiens
VGKDDVDNSKPGPSRPGPSPLINQYSLTVGLDLGPHDTKSLLKCVESLSFIVRDAAHITPDNFELCVKTLRIFVEASLNGGGMQVPGETWQESQI

SEQ ID NO: 75317 - protein, 225 aa, Homo sapiens
  MOD_RES (1)..(1): Any amino acid
XPDPPPGRVPGAFTEHAYDGKDYISLNEDLRSWTAADTVAQITQRFYEAEEYAEEFRTYLEGECLELLRRYLENGKETLQRADPPKAHVAHHPISDHEATLRCWALGFYPAEITLTWQRDGEEQTQDTELVETRPAGDGTFQKWAAVVVPSGEEQRYTCHVQHEGLPQPLILRWEQSPQPTIPIVGIVAGLVVLGAVVTGAVVAAVMWRKKSSDRNRGSYSQAAV

SEQ ID NO: 75318 - protein, 350 aa, Homo sapiens
MAMASPAIGQRPYPLLLDPEPPRYLQSLSGPELPPPPPDRSSRLCVPAPLSTAPGAREGRSARRAARGNLEPPPRASRPARPLRPGLQQRLRRRPGAPRPRDVRSIFEQPQDPRVPAERGEGHCFAELVLPGGPGWCDLCGREVLRQALRCTNCKFTCHPECRSLIQLDCSQQEGLSRDRPSPESTLTVTFSQNVCKPVEETQRPPTLQEIKQKIDSYNTREKNCLGMKLSEDGTYTGFIKVHLKLRRPVTVPAGIRPQSIYDAIKEVNLAATTDKRTSFYLPLDAIKQLHISSTTTVSEVIQGLLKKFMVVDNPQKFALFKRIHKDGQGRRKSEPNQTVPFLPVSKPTH

SEQ ID NO: 75319 - protein, 104 aa, Homo sapiens
  MOD_RES (1)..(1): Any amino acid
XVTSIADRLNVDFALIHKERKKANEVDRMVLVGDVKDRVAILVDDMADTCGTICHAADKLECSSTITAHCSLEILGSRNPPVSDSRVAGTTDFSQLAPPEFMPS

SEQ ID NO: 75320 - protein, 68 aa, Homo sapiens
  MOD_RES (1)..(1): Any amino acid
XAVSQSSGLAAKFVIHCHIPQWGSDKCEEQLEETIKNCLSAAEDKKLKSVAFPPFPSGSCVLGSPRGK

SEQ ID NO: 75321 - protein, 96 aa, Homo sapiens
  MOD_RES (1)..(1): Any amino acid
XLSIQPSLNAILIPPHLRSPAGTTTLTPSSQAASHEGRVQLQEPACFTGPQCSLAQLQGVLKRQWLGCLNDGDGLPQLCAHDSLLRLWRWGWGRRW

SEQ ID NO: 75322 - protein, 1415 aa, Homo sapiens
  MOD_RES (1)..(1): Any amino acid
XDQLLSARVFFENFKYEDALRLLQCAEPYKVSFCLKRTVPTGDLALRPGTVSGYEIKGPRAKVAKLPPTVPPPPASLLSPQNIQSLSPVKKKKMVPGALGVPADLAPVDVEFSFPKFSRLRRGLKAEAVKGPVPAAPARRRLQLPRLRVREVAEEAQAARLAAAAPPPRKAKVEAEVAAGARFTAPQVELVGPRLPGAEVGVPQVSAPKAAPSAEAAGGFALHLPTLGLGAPAPPAVEAPAVGIQVPQVELPALPSLPTLPTLPCLETREGAVSVVVPTLDVAAPTVGVDLALPGAEVEARGEAPEVALKMPRLSFPRFGARAKEVAEAKVAKVSPEARVKGPRLRMPTFGLSLLEPRPAAPEVVESKLKLPTIKMPSLGIGVSGPEVKVPKGPEVKLPKAPEVKLPKVPEAALPEVRLPEVELPKVSEMKLPKVPEMAVPEVRLPEVELPKVSEMKLPKVPEMAVPEVRLPEVQLLKVSEMKLPKVPEMAVPEVRLPEVQLPKVSEMKLPEVSEVAVPEVRLPEVQLPKVPEMKVPEMKLPKVPEMKLPEMKLPEVQLPKVPEMAVPDVHLPEVQLPKVPEMKLPEMKLPEVKLPKVPEMAVPDVHLPEVQLPKVPEMKLPKMPEMAVPEVRLPEVQLPKVSEMKLPKVPEMAVPDVHLPEVQLPKVCEMKVPDMKLPEIKLPKVPEMAVPDVHLPEVQLPKVSEIRLPEMQVPKVPDVHLPKAPEVKLPRAPEVQLKATKAEQAEGMEFGFKMPKMTMPKLGRAESPSRGKPGEAGAEVSGKLVTLPCLQPEVDGEAHVGVPSLTLPSVELDLPGALGLQGQVPAAKMGKGERVEGPEVAAGVREVGFRVPSVEIVTPQLPAVEIEEGRLEMIETKVKPSSKFSLPKFGLSGPKVAKAEAEGAGRATKLKVSKFAISLPKARVGAEAEAKGAGEAGLLPALDLSIPQLSLDAHLPSGKVEVAGADLKFKGPRFALPKFGVRGRDTEAAELVPGVAELEGKGWGWDGRVKMPKLKMPSFGLARGKEAEVQGDRASPGEKAESTAVQLKIPEVELVTLGAQEEGRAEGAVAVSGMQLSGLKVSTAGQVVTEGHDAGLRMPPLGISLPQVELTGFGEAGTPGQQAQSTVPSAEGTAGYRVQVPQVTLSLPGAQVAGGELLVGEGVFKMPTVTVPQLELDVGLSREAQAGEAATGEGGLRLKLPTLGARARVGGEGAEEQPPGAERTFCLSLPDVELSPSGGNHAEYQVAEGEGEAGHKLKVRLPRFGLVRAKEGAEEGEKAKSPKLRLPRVGFSQSEMVTGEGSPSPEEEEEEEEEGSGEGASGRRGRVRVRLPRVGLAAPSKASRGQEGDAAPKSPVREKSPKFRFPRVSLSPKARSGSGDQEEGGLRVRLPSVGFSETGAPGPARMEGAQAAAV

SEQ ID NO: 75323 - protein, 127 aa, Homo sapiens
MKNQAEEKAAEQFRMRLKNKQDEMKLEGDLRRSQRACQQLDVQKNIQVPREAWYWLRLEEETEEDEEEKEQDEDEYKSEDLSVLEKLQILTSYLREEHLYCIWCGTAYEDKEDLSSNCPGPTSADHD

SEQ ID NO: 75324 - protein, 110 aa, Homo sapiens
MPQGAPRSAPEQQSLQQQQPARREQQQRRRRRRRRRRRPVPAARSGHVQAGLGAAASLPPSDVFSALRLHLPVFTLPAAVLPGTGAGCRGERGLPHPRGEPDAGSGRCEP

SEQ ID NO: 75325 - protein, 218 aa, Homo sapiens
  MOD_RES (1)..(1): Any amino acid
XTDVQQRARRSNCRRQEGIKIVLEDIFTLWRQVETKVRAKIRKMKVTTKVNRHDKINGKRKTAKEHLRKLSMKEREHGEKERQVSEAEENGKLDMKEIHTYMEMFQRAQALRRRAEDYYRCKITPSARKPLCNRVSLLVFLAFGHSLPGQDMDTFFSLRLCAQALQREMAERKAAYKHHSPIPVGNCVAQKHLHPHPVGPPSNILSIRGSVFVIANGP

SEQ ID NO: 75326 - protein, 124 aa, Homo sapiens; identical to SEQ ID NO: 43774
  MOD_RES (1)..(1): Any amino acid

SEQ ID NO: 75327 - protein, 170 aa, Homo sapiens
MDKGRERMAAAAAAAAAAAAAAQCRSPRCAAERRGFRRELDSWRHRLMHCVGFESILEGLYGPRLRRDLSLFEDCEPEELTDWSMDEKCSFCNLQREAVSDCIPSLDSSQSTPTEELSSQGQSNTDKIECQAENYLNALFRKKADSSIWVSKRSPTNGWIFLRTVILTFP

SEQ ID NO: 75328 - protein, 314 aa, Homo sapiens
  MOD_RES (1)..(1): Any amino acid
XSTTGHEPEMVELVNIEPVCVRGGLYEVDVTQGECYPVYWNQADKIPVMRGQWFIDGTWQPLEEEESNLIEQEHLNCFRGQQMQENFDIEVSKSIDGKDGSGINYSVVYHLPPFSLPSLFKWRRYKESTDATGLKRKHSQAVHSFKLSRNHVDWHSVDEVYLYSDATTSKIARTVTQKLGFSKASSSGTRLHRGYVEEATLEDKPSQTTHIVFVVHGIGQKMDQGRIIKNTAMMREAARKIEERHFSNHATHVEFLPVEWRSKLTLDGDTVDSITPDKVRGLRDMLNSSAMDIMYYTSPLYRDETLKKKGVKSQ

SEQ ID NO: 75329 - protein, 102 aa, Homo sapiens
MEEPAAPSEAHEAAGAQAGAEAAREGVSGPDLPVCEPSGESAAPDSALPHAARGWAPFPVAPVPAHLRRGGLRPAPASGGGAWPSPLPSRSSGIWTKQIICR

SEQ ID NO: 75330 - protein, 371 aa, Homo sapiens
MSSTPHDPFYSSPFGPFYRRHTPYMVQPEYRIYEMNKRLQSRTEDSDNLWWDAFATEFFEDDATLTLSFCLEDGPKRYTIGRTLIPRYFSTVFEGGVTDLYYILKHSKESYHNSSITVDCDQCTMVTQHGKPMFTKVCTEGRLILEFTFDDLMRIKTWHFTIRQYRELVPRSILAMHAQDPQVLDQLSKNITRMGLTNFTLNYLRLCVILEPMQELMSRHKTYNLSPRDCLKTCLFQKWQRMVAPPAEPTRQPTTKRRKRKNSTSSTSNSSAGNNANSTGSKKKTTAANLSLSSQDVMVVGEPTLMGGEFGDEDERLITRLENTQYDAANGMDDEEDFNNSPALGNNSPWNSKPPATQETKSENPPPQASQ

SEQ ID NO: 75331 - protein, 1687 aa, Homo sapiens
MSSRRKRAPPVRVDEEKRQQLHWNMHEDRRNEPIIISDDDEQPCPGSDTSSAHYIILSDSLKEEVAHRDKKRCSKVVSFSKPIEKEETVGIFSPLSVKLNIVISPYHFDNSWKAFLGELTLQLLPAQSLIENFSERSITLMSSESSNQFLIYVHSKGEDVEKQKKEPMSICDKGILVESSFSGEMLEDLGWLQKKRRIKLYQKPEGNHIIKVGIYLLEAGLAKLDFLSDANSRMKKFNQLMKKVMEKLHNSIIPDVLEEDEDDPESEPEGQDIDELYHFVKQTHQQETQSIQVDVQHPALIPVLRPYQREAVNWMLQQECFRSSPATESALHFLWREIVTSEGLKLYYNPYTGCIIREYPNSGPQLLGGILADEMGLGKTVEVLALILTHTRQDVKQDALTLPEGKVVNYFIPSHYFGGKLKKTEIQNIEFEPKEKVQCPPTRVMILTAVKEMNGKKGVSILSIYKYVSSIYRYDVQRNRSLLKRMLKCLIFEGLVKQIKGHGFSGTFTLGKNYKEEDICDKTKKQAVGSPRKIQKETRKSGNKDTDSEYLPSDTSDDDDDPYYYYYKSRRNRSKLRKKLVPSTKKGKSQPFINPDSQGHCPATSDSGITDVAMSKSTCISEFNQEHETEDCAESLNHADSDVPPSNTMSPFNTSDYRFECICGELDQIDRKPRVQCLKCHLWQHAKCVNYDEKNLKIKPFYCPHCLVAMEPVSTRATLIISPSSICHQWVDEINRHVRSSSLRVLVYQGVKKDGFLQPHFLAEQDIVIITYDVLRSELNYVDIPHSNSEDGRRLRNQKRYMAIPSPLVAVEWWRICLDEAQMVECPTVKAAEMAQRLSGINRWCISGTPVQRGLEDLFGLVVFLGIEPYCVKHWWVRLLYRPYCKKNPQHLYSFIAKILWRSAKKDVIDQIQIPPQTEEIHWLHFSPVERHFYHRQHEVCCQDVVVKLRKISDWALKLSSLDRRTVTSILYPLLRLRQACCHPQAVRGEFLPLQKSFEQSTFSFSTMTMEELLTSLQKKCGTECEEAHRQLVCALNGLAGIHIIKGEYALAAELYREVLRSSEEHKGKLKTDSLQRLHATHNLMELLIARHPGIPPTLRDGRLEEEAKQLREHYMSKCNTEVAEAQQALYPVQQTIHELQRKIHSNSPWWLNVIHRAIEFTIDEELVQRVRNEITSNYKQQTGKLSMSEKGLQFLLTTQMEELNKCQKLVREAVKNLEGPPSRNVIESATVCHLRPARLPLNCCVFCKADELFTEYESKLFSNTVKGQTAIFEEMIEDEEGLVDDRAPTTTRGLWAISETERSMKAILSFAKSHRFDVEFVDEGSTSMDLFEAWKKEYKLLHEYWMALRNRVSAVDELAMATERLRVRDPREPKPNPPVLHIIEPHEVEQNRIKLLNDKAVATSQLQKKLGQLLYLTNLEKSQDKTSGGVNPEPCPICARQLGKQWAVLTCGHCFCNECISIIIEQYSVGSHRSSIKCAICRQTTSHKEISYVFTSEKANQEEDIPVKGSHSTKVEAVVRTLMKIQLRDPGAKALVFSTWQDVLDIISKALTDNNMEFAQISRVKTFQENLSAFKRDPQINILLLPLHTGSNGLTIIEATHVLLVEPILNPAHELQAIGRVHRIGQTKPTIVHRFLIKATIEERMQAMLKTAERSHTNSSAKHSEASVLTVADLADLFTKETEELE

SEQ ID NO: 75332 - protein, 300 aa, Homo sapiens
MSGALDVLQMKEEDVLKFLAAGTHLGGTNLDFQMEQYIYKRKSDGIYIINLKRTWEKLLLAARAIVAIENPADVSVISSRNTGQVCGTVRAVLKFAAATGATPIAGRFTPGTFTNQIQAAFREPRLLVVTDPRADHQPLTEASYVNLPTIALCNTDSPLRYVDIAIPCNNKGAHSVGLMWWMLAREVLRMRGTISREHPWEVMPDLYFYRDPEEIEKEEQAAAEKAVTKEEFQGEWTAPAPEFTATQPEVADWSEGVQVPSVPIQQFPTEDWSAQPATEDWSAAPTAQATEWVGATTDWS

SEQ ID NO: 75333 - protein, 755 aa, Homo sapiens
MEALTLWLLPWICQCVSVRADSIIHIGAIFEENAAKDDRVFQLAVSDLSLNDDILQSEKITYSIKVIEANNPFQAVQEACDLMTQGILALVTSTGCASANALQSLTDAMHIPHLFVQRNPGGSPRTACHLNPSPDGEAYTLASRPPVRLNDVMLRLVTELRWQKFVMFYDSEYDIRGLQSFLDQASRLGLDVSLQKVDKNISHVFTSLFTTMKTEELNRYRDTLRRAILLLSPQGAHSFINEAVETNLASKDSHWVFVNEEISDPEILDLVHSALGRMTVVRQIFPSAKDNQKCTRNNHRISSLLCDPQEGYLQMLQISNLYLYDSVLMLANAFHRKLEDRKWHSMASLNCIRKSTKPWNGGRSMLDTIKKGHITGLTGVMEFREDSSNPYVQFEILGTTYSETFGKDMRKLATWDSEKGLNGSLQERPMGSRLQGLTLKVVTVLEEPFVMVAENILGQPKRYKGFSIDVLDALAKALGFKYEIYQAPDGRYGHQLHNTSWNGMIGELISKRADLAISAITITPERESVVDFSKRYMDYSVGILIKKPEEKISIFSLFAPFDFAVWACIAAAIPVVGVLIFVLNRIQAVRAQSAAQPRPSASATLHSAIWIVYGAFVQQGGESSVNSMAMRIVMGSWWLFTLIVCSSYTANLAAFLTVSRMDNPIRTFQDLSKQVEMSYGTVRDSAVYEYFRAKGTNPLEQDSTFAELWRTISKNGGADNCVSSPSEGIRKDPGAAGHRGPGCAEAEVVAAHGPL

SEQ ID NO: 75334 - protein, 198 aa, Homo sapiens
MEGKWLLCMLLVLGTAIVEAHDGHDDDVIDIEDDLDDVIEEVEDSKPDTTAPPSSPKVTYKAPVPTGEVYFADSFDRGTLSGWILSKAKKDDTDDEIAKYDGKWEVEEMKESKLPGDKGLVLMSRAKHHAISAKLNKPFLFDTKPLIVQISSMTRPLIRLCLVQINVERTINCTSSSDTKTPKRVSMKKNMLRGQMQI

SEQ ID NO: 75335 - protein, 66 aa, Homo sapiens
MGWLCSGLLFPVSCLVLLQVASSGLFRMPCGERKRVEARRSGGRSGVEEMRGSGSLWEVDLRTDWN

SEQ ID NO: 75336 - protein, 74 aa, Homo sapiens
MGLSHSKTHLRVIKVAPLQNKEVETPSAGRVDFAFNQNLEEKTSYSLARLQDQNKALEGQLPPLQENCIQRHVF

SEQ ID NO: 75337 - protein, 47 aa, Homo sapiens
MAFLASGPYLTHQQKVLRLYKRALRHLESWCVQRQIPILCLFDESPV

SEQ ID NO: 75338 - protein, 351 aa, Homo sapiens
MVEWCLPQDIDLEGVEFKSMASGSHKIQSDFIYFRKGPFFGLACFANMPVESELERGARMKSVGILSPSYTLLYRYMHFLENQVRHQLEMPGHYSHLAAFYEDKKGVLHAGPGRGSSLPPVYWLPSIHRYMYPEMKFFGEQILILWKFALLRKRILIFSPPPVGVVCYRVYCCCCLANVSLPGIGGTIPESKPFFYVNVADIESLEVEVSYVACTTEKIFEEKRELYDVYVDNQNVKTHHDHLQPLLKINSADREKYRRLNEQRQMLLYSQEVEEDYNPCEEDLFVLFFLEQNNRIFQTLLEVSASQDKTLTAEHARGMGLDPQGDRSFLLDLLEAYGIDVMLVIDNPCCP

SEQ ID NO: 75339 - protein, 208 aa, Homo sapiens
MLRKARRKLIYEKAKHYHKEYRQMYRTEIRMARMARKAGNFYVPAEPKLAFVIRIRGINGVSPKVRKVLQLLRLRQIFNGTFVKLNKASINMLRIVEPYIAWGYPNLKSVNELIYKRGYGKINKKRIALTDNALIARSLGKYGIICMEDLIHEIYTVGKRFKEANNFLWPFKLSSPRGGMKKKTTHFVEGGDAGNREDQINRLIRRMN

SEQ ID NO: 75340 - protein, 145 aa, Homo sapiens
MLDNFSSVAALGFCSPRPDLVSRLEQWEEPWVEDRERPEFQAVQRGPRPGARKSADPKRPCDHPAWAHKKTHVRRERAREGSSFRKGFRLDTDDGQLPRAAPERTDAKPTAFPCQVLTQRCGRRPGRRERRKQRAVELSFICGTC

SEQ ID NO: 75341 - protein, 510 aa, Homo sapiens
MTPIVTVLICLGLSLGPRTHVQTGTIPKPTLWAEPDSVITQGSPVTLSCQGSLEAQEYRLYREKKSASWITRIRPELVKNGQFHIPSITWEHTGRYGCQYYSRARWSELSDPLVLVMTGAYPKPTLSAQPSPVVTSGGRVTLQCESQVAFGGFILCKEGEDEHPQCLNSQPHARGSSRAIFSVGPVSPNRRWSHRCYGYDLNSPYVWSSPSDLLELLVPGVSKKPSLSVQPGPVVAPGESLTLQCVSDVGYDRFVLYKEGERDLRQLPGRQPQAGLSQANFTLGPVSRSYGGQYRCYGAYNLSSEWSAPSDPLDILITGQIHGTPFISVQPGPTVASGENVTLLCQSWRQFHTFLLTKAGAADAPLRLRSIHEYPKYQAEFPMSPVTSAHAGTYRCYGSLNSDPYLLSHPSEPLELVVSGPSMGSSPPPTGPISTPAGPEDQPLTPTGSDPQSGLGRHLGVVIGILVAVVLLLLLLLLLFLILRHRRQGKHWTSSPAQLPTPRKKTSMLP

SEQ ID NO: 75342 - protein, 764 aa, Homo sapiens
MKHVKDSKTGSEGTVVQLLANHFRVISRPQWVAYKYNVDYKPDIEDGNLRTILLDQHRRKFGERHIFDGNSLLLSRPLKERRVEWLSTTKDKNIVKITVEFSKELTPTSPDCLRYYNILFRRTFKLLDFEQVGRNYYTKKKAIQLYRHGTSLEIWLGYVTSVLQYENSITLCADVSHKLLRIETAYDFIKRTSAQAQTGNIREEVTNKLIGSIVLTKYNNKTYRVDDIDWKQNPEDTFNKSDGSKITYIDYYRQQHKEIVTVKKQPLLVSQGRWKKGLTGTQREPILLIPQLCHMTGLTDEICKDYSIVKELAKHTRLSPRRRHHTLKEFINTLQDNKKVRELLQLWDLKFDTNFLSVPGRVLKNANIVQGRRMVKANSQGDWSREIRELPLLNAMPLHSWLILYSRSSHREAMSLKGHLQSVTAPMGITMKPAEMIEVDGDANSYIDTLRKYTRPTLQMVICILPNDDKRRYDSIKRYLCTKCPIPSQCVVKKTLEKVQARTIVTKIAQQMNCKMGGALWKVETDVQRTMFVGIDCFHDIVNRQKSIAGFVASTNAELTKWYSQCVIQKTGEELVKELEICLKAALDVWCKNESSMPHSVIVYRDGVGDGQLQALLDHEAKKMSTYLKTISPNNFTLAFIVVKKRINTRFFLKHGSNFQNPPPGTVIDVELTRNEWYDFFIVSQSVQDGTVTPTHYNVIYDTIGLSPDTVQRLTYCLCHMYYNLPGIIRVPAPCHYAHKLAYLVGQSIHQEPNRSLSTRLFYL

SEQ ID NO: 75343 - protein, 471 aa, Homo sapiens
MTVGTVKIVIRGDRNTGKTALWHRLQGRPFVEEYIPTQEIQVTSIHWSYKTTDDIVKVEVWDVVDKGKCKKRGDGLKMENDPQEAESEMALDAEFLDVYKNCNGVVMMFDITKQWTFNYILRELPKVPTHVPVCVLGNYRDMGEHRVILPDDVRDFIDNLDRPPGSSYFRYAESSMKNSFGLKYLHKFFNIPFLQLQRETLLRQLETNQLDMDATLEELSVQQETEDQNYGIFLEMMEARSRGHASPLAANGQSPSPGSQSPVVPAGAVSTGSSSPGTPQPAPQLPLNAAPPSSVPPVPPSEALPPPACPSAPAPRRSIISRLFGTSPATEAAPPPPEPVPAAEGPATVQSVEDFVPDDRLDRSFLEDTTPARDEKKVGAKAAQQDSDSDGEALGGNPMVAGFQDDVDLEDQPRGSPPLPAGPVPSQDITLSSEEEAEVAAPTKGPAPAPQQCSEPETKWSGEAQQHQAPC

SEQ ID NO: 75344 - protein, 57 aa, Homo sapiens
MGVEIETISPGDGRTFPKKGQTCVVHYTASLVGMIKEAWKANSFPLLPARAIHGASF

SEQ ID NO: 75345 - protein, 382 aa, Homo sapiens
MGLYGQACPSVTSLRMTSELESSLTSMDWLPQLTMRAAIQKSDATQNAHGTGISKKNALLDPNTTLDQEEVQQHKDGKPPYSYASLITFAINSSPKKKMTLSEIYQWICDNFPYYREAGSGWKNSIRHNLSLNKCFLKVPRSKDDPGKGSYWAIDTNPKEDVLPTRPKKRARSVERVTLYNTDQDGSDSPRSSLNNSLSDQSLASVNLNSVGSVHSYTPVTSHPESVSQSLTPQQQPQYNLPERDKQLLFSEYNFEDLSASFRSLYKSVFEQSLSQQGLMNIPSESSQQSHTSCTYQHSPSSTVSTHPHSNQSSLSNSHGSGLNTTGSNSVAQVSLSHPQMHTQPSPHPPHRPHGLPQHPQRSPHPAPHPQQHSQLQSPHPQ

SEQ ID NO: 75346 - protein, 102 aa, Homo sapiens
MMSIRQRREIRATEVSEDFPAQEENVKLENKLPSGCTSRRLWKILSLTIGGTIALCIGLLTSVYLATLHENDLWFSNIKVWSFFDHCIIHSVGSPVVSHVDE

SEQ ID NO: 75347 - protein, 153 aa, Homo sapiens
MGQTSVSTLSPQPGSVDGLDKASIANSDGPTAGSQTPPFKRKGKLSTIGKIFKPWKWRKKKTSDKFRETSAVLERKISTRQSREELIRRGVLKELPDQDGDVTVNFENSNGHMIPIGEESTREENVVKSEEGNGSVSEKTPPLEEQAEDKKDC

SEQ ID NO: 75348 - protein, 398 aa, Homo sapiens
MAFSGRARPCIIPENEEIPRAALNTVHEANGTEDERAVSKLQRRHSDVKVYKEFCDFYAKFNMANALASATCERCKGGFAPAETIVNSNGELYHEQCFVCAQCFQQFPEGLFYEFEGRKYCEHDFQMLFAPCCHQCGEFIIGRVIKAMNNSWHPECFRCDLCQEVLADIGFVKNAGRHLCRPCHNREKARGLGKYICQKCHAIIDEQPLIFKNDPYHPDHFNCANCGKDLTADAQELKGELYCLPCHDKMGVPICGACRRPIEGRVVNAMGKQWHVEHFVCAKCEKPFLGHRHYERKGLAYCETHYNQLFGDVCFHCNRVIEGDVVSALNKAWCVNCFACSTCNTKLTLKDKFVEIDLKPVCKHCYEKMPEEFKRRLAKREREAKDKDKQKKKKPVCL

SEQ ID NO: 75349 - protein, 641 aa, Homo sapiens
MATAKGIAIGIDLGTTYSCVGVFQHGKVEIIANDQGNRTTPSYVAFTDTERLIGDAAKNQVAMNPQNTVFDAKRLIGRKFNDPVVQADMKLWPFQVINEGGKPKVLVSYKGENKAFYPEEISSMVLTKLKETAEAFLGHPVTNAVITVPAYFNDSQRQATKDAGVIAGLNVLRIINEPTAAAIAYGLDKGGQGERHVLIFDLGGGTFDVSILTIDDGIFEVKATAGDTHLGGEDFDNRLVSHFVEEFKRKHKKDISQNKRAVRRLRTACERAKRTLSSSTQANLEIDSLYEGIDFYTSITRARFEELCADLFRGTLEPVEKALRDAKMDKAKIHDIVLVGGSTRIPKVQRLLQDYFNGRDLNKSINPDEAVAYGAAVQAAILMGDKSEKVQDLLLLDVAPLSLGLETAGGVMTALIKRNSTIPTKQTQIFTTYSDNQPGVLIQVYEGERAMTKDNNLLGRFDLTGIPPAPRGVPQIEVTFDIDANGILNVTAMDKSTGKVNKITITNDKGRLSKEEIERMVLDAEKYKAEDEVQREKIAAKNALESYAFNMKSVVSDEGLKGKISESDKNKILDKCNELLSWLEVNQLAEKDEFDHKRKELKQMCNPIITKLYQGGCTGPACGTGYVPGRPATGPTIEEVD

SEQ ID NO: 75350 - protein, 213 aa, Homo sapiens
MAASHFTGLTAVADVIKDLDTQIALIGLGPHSSKKKQDLDKLYELKSKARQIMNQFGPSALINLSNFSSIKPEPASTPPQGSMANSTAVVKIPGTPGAGGRLSPENNQVLTKKKLQDLVREVDPNEQLDEDVEEMLLQIADDFIESVVTAACQLARHRKSSTLEVKDVQLHLERQWNMWIPGFGSEEIRPYKKACTTEAHKQRMALIRKTTKK

SEQ ID NO: 75351 - protein, 38 aa, Homo sapiens
MRSAAVLALLLCAGQVTALPVNSPMNKGDTEMNGSFPF

SEQ ID NO: 75352 - protein, 91 aa, Homo sapiens
MFTQNIREGFRSLGGTRLFRWLYEKFRYPFAPMYGGFPVKLRTYLGDPIPYDPQITAEELAEKTKNAVQALIDKHQRIPGNIMSALLERFH

SEQ ID NO: 75353 - protein, 150 aa, Homo sapiens
MALTQGQLSFSDVAIEFSQEEWKCLDPGQKALYRDVMLENYRNLVSLDFSLLAWDARVFRVEAWRASGGAEEPTGPNFVGNDSPLPSPLALLPFPSVSASLGDAKRARLTAEGRGHGTLRAGPAPRPRSAAPHAPDAVQRWPPEQRLPRS

SEQ ID NO: 75354 - protein, 174 aa, Homo sapiens
MSTLYVSPHPDAFPSLRALIAARYGEAGEGPGWGGAHPRICLQPPPTSRTPFPPPRLPALEQGPGGLWVWGATAVAQLLWPAGLGGPGGSRAAVLVQQWVSYADTELIPAACGATLPALGLRSSAQDPQAVLGALGRALSPLEEWLRLHTYLAGEAPTLADLAAVTALLLPFRY

SEQ ID NO: 75355 - protein, 165 aa, Homo sapiens
MDPEVTLLLQCPGGGLPQEQIQAELSPAHDRRPLPGGDEAITAIWETRLKAQPWLFDAPKFRLHSATLAPIGSRGPQLLLRLGLTSYRDFLGTNWSSSAAWLRQQGATDWGDTQAYLADPLGVGAALATADDFLVFLRRSRQVAEAPGLVDVPGGHPEPQVQPDF

SEQ ID NO: 75356 - protein, 56 aa, Homo sapiens
MRSVSYVQRVALEFSGSLFPHAICLGDVDNDTMEMGVVSWWWATQTVWCELSAGRS

SEQ ID NO: 75357 - protein, 547 aa, Homo sapiens
MARLTKRRQADTKAIQHLWAAIEIIRNQKQIANIDRITKYMSRVHGMHPKETTRQLSLAVKDGLIVETLTVGCKGSKAGIEQEGYWLPGDEISIKKKNTNKQEMGTYLRFIVSRMKERAIDLNKKGKDNKHPMYRRLVHSAVDVPTIQEKVNEGKYRSYEEFKADAQLLLHNTVIFYGDSEQADIARMLYKDTCHELDELQLCKNCFYLSNARPDNWFCYPCIPNHELVWAKMKGFGFWPAKVMQKEDNQVDVRFFGHHHQRAWIPSENIQDITVNIHRLHVKRSMGWKKACDELELHQRFLREGRFWKSKNEDRGEEEAESSISSTSNEQLKVTQEPRAKKGRRNQSVEPKKEEPEPETEAVSSSQEIPTMPQPIEKVSVSTQTKKLSASSPRMLHRSTQTTNDGVCQSMCHDKYTKIFNDFKDRMKSDHKRETERVVREALEKLRSEMEEEKRQAVNKAVANMQGEMDRKCKQVKEKCKEEFVEEIKKLATQHKQLISQTKKKQWCYNCEEEAMYHCCWNTSYCSIKCQQEHWHAEHKRTCRRKR

SEQ ID NO: 75358 - protein, 1226 aa, Homo sapiens
MSSPLQRAVGDTKRALSASSSSSASLPFDDRDSNHTSEGNGDSLLADEDTDFEDSLNRNVKKRAAKRPPKTTPVAKHPKKGSRVVHRHSRKQSEPPANDLFNAVKAAKSDMQSLVDEWLDSYKQDQDAGFLELVNFFIQSCGCKGIVTPEMFKKMSNSEIIQHLTEQFNEDSGDYPLIAPGPSWKKFQGSFCEFVRTLVCQCQYSLLYDGFPMDDLISLLTGLSDSQVRAFRHTSTLAAMKLMTSLVKVALQLSVHQDNNQRQYEAERNKGPGQRAPERLESLLEKRKELQEHQEEIEGMMNALFRGVFVHRYRDVLPEIRAICIEEIGCWMQSYSTSFLTDSYLKYIGWTLHDKHREVRLKCVKALKGLYGNRDLTTRLELFTSRFKDRMVSMVMDREYDVAVEAVRLLILILKNMEGVLTDADCESVYPVVYASHRGLASAAGEFLYWKLFYPECEIRMMGGREQRQSPGAQRTFFQLLLSFFVESELHDHAAYLVDSLWDCAGARLKDWEGLTSLLLEKDQNLGDVQESTLIEILVSSARQASEGHPPVGRVTGRKGLTSKERKTQADDRVKLTEHLIPLLPQLLAKFSADAEKVTPLLQLLSCFDLHIYCTGRLEKHLELFLQQLQEVVVKHAEPAVLEAGAHALYLLCNPEFTFFSRADFARSQLVDLLTDRFQQELEELLQSSFLDEDEVYNLAATLKRLSAFYNTHDLTRWELYEPCCQLLQKAVDTGEVPHQVILPALTLVYFSILWTLTHISKSDASQKQLSSLRDRMVAFCELCQSCLSDVDTEIQEQAFVLLSDLLLIFSPQMIVGGRDFLRPLVFFPEATLQSELASFLMDHVFIQPGDLGSGDSQEDHLQIERLHQRRRLLAGFCKLLLYGVLEMDAASDVFKHYNKFYNDYGDIIKETLTRARQIDRSHCSRILLLSLKQLYTELLQEHGPQGLNELPAFIEMRDLARRFALSFGPQQLQNRDLVVMLHKEGIQFSLSELPPAGSSNQPPNLAFLELLSEFSPRLFHQDKQLLLSYLEKCLQHVSQAPGHPWGPVTTYCHSLSPVENTAETSPQVLPSSKRRRVEGPAKPNREDVSSSQEESLQLNSIPPTPTLTSTAVKSRQPLWGLKEMEEEDGSELDFAQGSQPVAGTERSRFLGPQYFQTPHNPSGPGLGNQLMRLSLMEEDEEEELEIQDESNEERQDTDMQASSYSSTSERGLDLLDSTELDIEDF

SEQ ID NO: 75359 - protein, 308 aa, Homo sapiens
MKCVNHKNIISLLNVFTPQKTLEEFQDVYLVMELMDANLCQVIQMELDHERMSYLLYQMLCGIKHLHSAGIIHRDLKPSNIVVKSDCTLKILDFGLARTAGTSFMMTPYVVTRYYRAPEVILGMGYKENVDIWSVGCIMGEMVRHKILFPGRDYIDQWNKVIEQLGTPCPEFMKKLQPTVRNYVENRPKYAGLTFPKLFPDSLFPADSEHNKLKASQARDLLSKMLVIDPAKRISVDDALQHPYINVWYDPAEVEAPPPQIYDKQLDEREHTIEEWKELIYKEVMNSEEKTKNGVVKGQPSPSAQVQQ

SEQ ID NO: 75360 - protein, 2265 aa, Homo sapiens
MAAEEGVASAASAGGSWGTAAMGRVLPMLLVPVPAEAMGQLGSRAQLRTQPEALGSLTAAGSLQVLSLTPGSRGGGRCCLEGPFWHFLWEDSRNSSTPTEKPKLLALGENYELLIYEFNLKDGRCDATILYSCSREALQKLIDDQDISISLLSLRILSFHNNTSLLFINKCVILHIIFPERDAAIRVLNCFTLPLPAQAVDMIIDTQLCRGILFVLSSLGWIYIFDVVDGTYVAHVDLALHKEDMCNEQQQEPAKISSFTSLKVSQDLDVAVIVSSSNSAVALNLNLYFRQHPGHLLCERILEDLPIQGPKGVDEDDPVNSAYNMKLAKFSFQIDRSWKAQLSSLNETIKNSKLEVSCCAPWFQDILHLESPESGNHSTSVQSWAFIPQDIMHGQYNVLQKDHAKTSDPGRSWKIMHISEQEEPIELKCVSVTGFTALFTWEVERMGYTITLWDLETQGMQCFSLGTKCIPVDSSGDQQLCFVLTENGLSLILFGLTQEEFLNRLMIHGSASTVDTLCHLNGWGRCSIPIHALEAGIENRQLDTVNFFLKSKENLFNPSSKSSVSDQFDHLSSHLYLRNVEELIPALDLLCSAIRESYSEPQSKHFSEQLLNLTLSFLNNQIKELFIHTEELDEHLQKGVNILTSYINELRTFMIKFPWKLTDAIDEYDVHENVPKVKESNIWKKLSFEEVIASAILNNKIPEAQTFFRIDSHSAQKLEELIGIGLNLVFDNLKKNNIKEASELLKNMGFDVKGQLLKICFYTTNKNIRDFLVEILKEKNYFSEKEKRTIDFVHQVEKLYLGHFQENMQIQSFPRYWIKEQDFFKHKSVLDSFLKYDCKDEFNKQDHRIVLNWALWWDQLTQESILLPRISPEEYKSYSPEALWRYLTARHDWLNIILWIGEFQTQHSYASLQQNKWPLLTVDVINQNTSCNNYMRNEILDKLARNGVFLASELEDFECFLLRLSRIGGVIQDTLPVQNYKTKEGWDFHSQFILYCLEHSLQHLLYVYLDCYKLSPENCPFLEKKELHEAHPWFEFLVQCRQVASNLTDPKLIFQASLANAQILIPTNQASVSSMLLEGHTLLALATTMYSPGGVSQVVQNEENENCLKKVDPQLLKMALTPYPKLKTALFPQCTPPSVLPSDITIYHLIQSLSPFDPSRLFGWQSANTLAIGDAWSHLPHFSSPDLVNKYAIVERLNFAYYLHNGRPSFAFGTFLVQELIKSKTPKQLIQQVGNEAYVIGLSSFHIPSIGAACVCFLELLGLDSLKLRVDMKVANIILSYKCRNEDAQYSFIRESVAEKLSKLADGEKTTTEELLVLLEEGTWNSIQQQEIKRLSSESSSQWALVVQFCRLHNMKLSISYLRECAKANDWLQFIIHSQLHNYHPAEVKSLIQYFSPVIQDHLRLAFENLPSVPTSKMDSDQVCNKCPQELQGSKQEMTDLFEILLQCSEEPDSWHWLLVEAVKQQAPILSVLASCLQGASAISCLCVWIITSVEDNVATEAMGHIQDSTEDHTWNLEDLSVIWRTLLTRQKSKTLIRGFQLFFKDSPLLLVMEMYELCMFFRNYKEAEAKLLEFQKSLETLNTAATKVHPVIPAMWLEDQVCFLLKLMLQQCKTQYELGKLLQLFVEREHLFSDGPDVKKLCILCQILKDTSIAINHTIITSYSIENLQHECRSILERLQTDGQFALARRVAELAELPVDNLVIKEITQEMQTLKHIEQWSLKQARIDFWKKCHENFKKNSISSKAASSFFSTQAHVACEHPTGWSSMEERHLLLTLAGHWLAQEDVVPLDKLEELEKQIWLCRITQHTLGRNQEETEPRFSRQISTSGELSFDSLASEFSFSKLAALNTSKYLELNSLPSKETCENRLDWKEQESLNFLIGRLLDDGCVHEASRVCRYFHFYNPDVALVLHCRALASGEASMEDLHPEIHALLQSAELLEEEAPDIPLRRVHSTSSLDSQKFVTVPSSNEVVTNLEVLTSKCLHGKNYCRQVLCLYDLAKELGCSYTDVAAQDGEAMLRKILASQQPDRCKRAQAFISTQGLKPDTVAELVAEEVTRELLTSSQGTGHKQMFNPTEESQTFLQLTTLCQDRTLVGMKLLDKISSVPHGELSCTTELLILAHHCFTLTCHMEGIIRVLQAAHMLTDNHLAPSEEYGLVVRLLTGIGRYNEMTYIFDLLHKKHYFEVLMRKKLDPSGTLKTALLDYIKRCRPGDSEKHNMIALCFSMCREIGENHEAAARIQLKLIESQPWDINNISLLTWSWKT

SEQ ID NO: 75361 - protein, 165 aa, Homo sapiens
MEILLIIRFCCNCTYGNPALLYKPIDRVTRSTLVLHDLLKHTPVDHPDYPLLQDALRISQNFLSSINEDIDPRRTAVTTPKGETRQLVKDGFLVEVSESSRKLRHVFLFTDVLLCAKLKKTSAGKHQQYDCKWYIPLADLVFPSPEESEASPQVHPFPDHELEDM

SEQ ID NO: 75362 - protein, 35 aa, Homo sapiens
MATNFLAHEKIWFDKFKYDDAERRFYEQMNGPVAG

SEQ ID NO: 75363 - protein, 52 aa, Homo sapiens
MWQLTSLLLFVATWGISGTPAPLGAADPQTCQLLPGGAPSQQPGAGVHRGDL

SEQ ID NO: 75364 - protein, 134 aa, Homo sapiens
MVPEAWRSGLQAPPNTDWRFSQAQRPGTSGSQNGDDTGTWPNNQFDTEMLQAMILASASEAADGSSTLGGGAGTMGLSARYGPQFTLQHVPDYRQNVYIPGSNATLTNAAGKRDGKAPAGGNGNKKKSGKKEKK

SEQ ID NO: 75365 - protein, 69 aa, Homo sapiens
MASLLQDQLTTDQDLLLMQEGMPMRKSQSLMWRQYVMAMIPSCCVAWQRSSPWSRASPLSSMAAAPTWT

SEQ ID NO: 75366 - protein, 95 aa, Homo sapiens
MQPPPGMPLPPADIGPPPYEPPGHPMPQPGFIPPHMSADGTYMPPGFYPPPGPHPPMGYYPPGPYTPGPYPGPGGHTATVLVPSGAATTVTVLQG

SEQ ID NO: 75367 - protein, 63 aa, Homo sapiens
MLENYRNLVFLGIALTKPDLITCLEQGKEPWNIKRHEMVAKPPVICSHFPQDLWAEQDIKDSF

SEQ ID NO: 75368 - protein, 81 aa, Homo sapiens
MGKKSRVKTQKSGTGATATVSPKEILNLTSELLQKCSSPAPGPGKEWEEYVQIRTLVEKIRKKQKGRRIVFMGSTKIANDC

SEQ ID NO: 75369 - protein, 261 aa, Homo sapiens
AGSARTLGTARGGHGAGKGLSPTALLPARVASCARSQKAWPLCIIDVNECELYGQEGRPRLCMHACVNTPGSYRCTCPGGYRTLADGKSCEDVDECVGLQPVCPQGTTCINTGGSFQCVSPECPEGSGNVSYVKTSPFQCERNPCPMDSRPCRHLPKTISFHYLSLPSNLKTPITLFRMATASAPGRAGPNSLRFGIVGGNSRGHFVMQRSDRQTGDLILVQNLEGPQTLEVDVDMSEYLDRSFQANHVSKVTIFVSPYDF

SEQ ID NO: 75370 - protein, 107 aa, Homo sapiens
MAEEEETAALTEKVIRTQRVFINLLDSYSSGNIGKFLSNCVVGASLEEITEEEEEEDENKSAMLEASSTKVKEGTFQIVGTLSKPDSPRPDFAVETYSVSPGGSGQE

SEQ ID NO: 75371 - protein, 625 aa, Homo sapiens
MAAHGKLRRERGLQAEYETQVKEMRWQLSEQLRCLELQGELRRELLQELAEFMRRRAEVELEYSRGLEKLAERFSSRGGRLGSSREHQSFRKEPSLLSPLHCWAVLLQHTRQQSRESAALSEVLAGPLAQRLSHIAEDVGRLVKKSRDLEQQLQDELLEVVSELQTAKKTYQAYHMESVNAEAKLREAERQEEKRAGRSVPTTTAGATEAGPLRKSSLKKGGRLVEKRQAKFMEHKLKCTKARNEYLLSLASVNAAVSNYYLHDVLDLMDCCDTGFHLALGQVLRSYTAAESRTQASQVQGLGSLEEAVEALDPPGDKAKVLEVHATVFCPPLRFDYHPHDGDEVAEICVEMELRDEILPRAQNIQSRLDRQTIETEEVNKTLKATLQALLEVVASDDGDVLDSFQTSPSTESLKSTSSDPGSRQAGRRRGQQQETETFYLTKLQEYLSGRSILAKLQAKHEKLQEALQRGDKEEQEVSWTQYTQRKFQKSRQPRPSSQYNQRLFGGDMEKFIQSSGQPVPLVVESCIRFINLNGEDPLVEGCTAHDLDSVAGVLKLYFRSLEPPLFPPDLFGELLASSGTPSWRAWGRTMSRSWKPRCPHRRMTWRGSWRLWPALPTRAAQPRS

SEQ ID NO: 75372 - protein, 854 aa, Homo sapiens
MKYITSLNEDSTVHGFLVQLPLDSENSINTEEVINAIAPEKDVDGLTSINAGKLARGDLNDCFIPCTPKGCLELIKETGVPIAGRHAVVVGRSKIVGAPMHDLLLWNNATVTTCHSKTAHLDEEVNKGDILVVATGQPEMVKGEWIKPGAIVIDCGINYVPDDKKPNGRKVVGDVAYDEAKERASFITPVPGGVGPMTVAMLMQSTVESAKRFLEKFKPGKWMIQYNNLNLKTPVPSDIDISRSCKPKPIGKLAREIGLLSEEVELYGETKAKVLLSALERLKHRPDGKYVVVTGITPTPLGEGKSTTTIGLVQALGAHLYQNVFACVRQPSQGPTFGIKGGAAGGGYSQVIPMEEFNLHLTGDIHAITAANNLVAAAIDARIFHELTQTDKALFNRLVPSVNGVRRFSDIQIRRLKRLGIEKTDPTTLTDEEINRFARLDIDPETITWQRVLDTNDRFLRKITIGQAPTEKGHTRTAQFDISVASEIMAVLALTTSLEDMRERLGKMVVASSKKGEPVSAEDLGVSGALTVLMKDAIKPNLMQTLEGTPVFVHAGPFANIAHGNSSIIADRIALKLVGPEGFVVTEAGFGADIGMEKFFNIKCRYSGLCPHVVVLVATVRALKMHGGGPTVTAGLPLPKAYIQENLELVEKGFSNLKKQIENARMFGIPVVVAVNAFKTDTESELDLISRLSREHGAFDAVKCTHWAEGGKGALALAQAVQRAAQAPSSFQLLYDLKLPVEDKIRIIAQKIYGADDIELLPEAQHKAEVYTKQGFGNLPICMAKTHLSLSHNPEQKGVPTGFILPIRDIRASVGAGFLYPLVGTMSTMPGLPTRPCFYDIDLDPETEQVNGLF

SEQ ID NO: 75373 - protein, 516 aa, Homo sapiens
MSHALNFIKAKQYPPSTQVEVQNDGAESAVFQQLFQKWTASNRTSGLGKTHTVGSVAKVEQVKFDATSMHVKPQVAAQQKMVDDGSGEVQVWRIENLELVPVDSKWLGHFYGGDCYLLLYTYLIGEKQHYLLYVWQGSQASQDEITASAYQAVILDQKYNGEPVQIRVPMGKEPPHLMSIFKGRMVVYQGGTSRTNNLETGPSTRLFQVQGTGANNTKAFEVPARANFLNSNDVFVLKTQSCCYLWCGKGCSGDEREMAKMVADTISRTEKQVVVEGQEPANFWMALGGKAPYANTKRLQEENLVITPRLFECSNKTGRFLATEIPDFNQDDLEEDDVFLLDVWDQVFFWIGKHANEEEKKAAATTAQEYLKTHPSGRDPETPIIVVKQGHEPPTFTGWFLAWDPFKWSNTKSYEDLKAELGNSRDWSQITAEVTSPKVDVFNANSNLSSGPLPIFPLEQLVNKPVEELPEGVDPSRKEEHLSIEDFTQAFGMTPAAFSALPRWKQQNLKKEKGLF

SEQ ID NO: 75374 - protein, 280 aa, Homo sapiens
MAALAPLPPLPAQFKSIQHHLRTAQEHDKRDPVVAYYCRLYAMQTGMKIDSKTPECRKFLSKLMDQLEALKKQLGDNEAITQEIVGCAHLENYALKMFLYADNEDRAGRFHKNMIKSFYTASLLIDVITVFGELTDENVKHRKYARWKATYIHNCLKNGETPQAGPVGIEEDNDIEENEDAGAASLPTQPTQPSSSSTYDPSNMPSGNYTGIQIPPGAHAPANTPAEVPHSTGDVRLTPEDFARAQKYCKYAGSALQYEDVSTAVQNLQKALKLLTTGRE

SEQ ID NO: 75375 - protein, 49 aa, Homo sapiens
MDINRRRYPAHLARSSSRKYTELPHGAISEDQAVGPADIPCDSTGQTST

SEQ ID NO: 75376 - protein, 516 aa, Homo sapiens
MFRTAAAISVHLVGPLQGRKAGAPLTWFLHQTQVAEKNVGSPAPRPTSHLGLANPQERKVPQGPQSPCEVPAAEGILRTGGAKLPIQGHPAKLAMAKQLQARRLDGIDYNPWVEFVKLASEHDVVNLGQGFPDFPPPDFAVEAFQHAVSGDFMLNQYTKTFGYPPLTKILASFFGELLGQEIDPLRNVLVTVGGYGALFTAFQALVDEGDEVIIIEPFFDCYEPMTMMAGGRPVFVSLKPGPIQNGELGSSSNWQLDPMELAGKFTSRTKALVLNTPNNPLGKVFSREELELVASLCQQHDVVCITDEVYQWMVYDGHQHISIASLPGMWERTLTIGSAGKTFSATGWKVGWVLGPDHIMKHLRTVHQNSVFHCPTQSQAAVAESFEREQLLFRQPSSYFVQFPQAMQRCRDHMIRSLQSVGLKPIIPQGSYFLITDISDFKRKMPDLPGAVDEPYDRRFVKWMIKNKGLVAIPVSIFYSVPHQKHFDHYIRFCFVKDEATLQAMDEKLRKWKVEL

SEQ ID NO: 75377 - protein, 164 aa, Homo sapiens
MGVDIRHNKDRKVRRKEPKSQDIYLRLLVKLYRFLARRTNSTFNQVVLKRLFMSRTNRPPLSLSRMIRKMKLPGRENKTAVVVGTITDDVRVQEVPKLKVCALRVTSRARSRILRAGGKILTFDQLALDSPKGCGTVLLSGPRKGREVYRHFGKAPGTPHSHTK

SEQ ID NO: 75378 - protein, 33 aa, Homo sapiens
MEEDQELERKAIEELLKEAKRGKTRAETMGPMG

SEQ ID NO: 75379 - protein, 173 aa, Homo sapiens
ENTPENHPDHSHLKHALEKAEELCSQVNEGVREKENSDRLEWIQAHVQCEGLSEPIFLNEVLVKLPTDPSGDEPIFHISHIDRVYTLRAESINERTAWVQKIKAASELYIETEKKKREKAYLVRSQRATGIGRLMVNVVEGIELKPCRSHGKSNPYCEVTMGSQCHITKTIQD

SEQ ID NO: 75380 - protein, 244 aa, Homo sapiens
MPRVKAAQAGRQSSAKRHLAEQFAVGEIITDMAKKEWKVGLPIGQGGFGCIYLADMNSSESVGSDAPCVVKVEPSDNGPLFTELKFYQRAAKPEQIQKWIRTRKLKYLGVPKYWGSGLHDKNGKSYRFMIMDRFGSDLQKIYEANAKRFSRKTVLQLSLRILDILEYIHEHEYVHGDIKASNLLLNYKNPDQVYLVDYGLAYRYCPEGVHKEYKEDPKRCHDGTIEFTSIDAHNGVDTEKILQV

SEQ ID NO: 75381 - protein, 1213 aa, Homo sapiens
MKQPIMADGPRCKRRKQANPRRKNVVNYDNVVDTGSETDEEDKLHIAEDDGIANPLDQETSPASVPNHESSPHVSQALLPREEEEDEIREGGVEHPWHNNEILQASVDGPEMKEDYDTMGPEATIQTAINNGTVKNANCTSDFEEYFAKRKLEERDGHAVSIEEYLQRSDTAIIYPEAPEELSRLGTPEANGQEENDLPPGTPDAFAQLLTCPYCDRGYKRLTSLKEHIKYRHEKNEENFSCPLCSYTFAYRTQLERHMVTHKPGTDQHQMLTQGAGNRKFKCTECGKAFKYKHHLKEHLRIHSGEKPYECPNCKKRFSHSGSYSSHISSKKCIGLISVNGRMRNNIKTGSSPNSVSSSPTNSAITQLRNKLENGKPLSMSEQTGLLKIKTEPLDFNDYKVLMATHGFSGTSPFMNGGLGATSPLGVHPSAQSPMQHLGVGMEAPLLGFPTMNSNLSEVQKVLQIVDNTVSRQKMDCKAEEISKLKGYHMKDPCSQPEEQGVTSPNIPPVGLPVVSHNGATKSIIDYTLEKVNEAKACLQSLTTDSRRQISNIKKEKLRTLIDLVTDDKMIENHNISTPFSCQFCKESFPGPIPLHQHERYLCKMNEEIKAVLQPHENIVPNKAGVFVDNKALLLSSVLSEKGMTSPINPYKDHMSVLKAYYAMNMEPNSDELLKISIAVGLPQEFVKEWFEQRKVYQYSNSRSPSLERSSKPLAPNSNPPTKDSLLPRSPVKPMDSITSPSIAELHNSVTNCDPPLRLTKPSHFTNIKPVEKLDHSRSNTPSPLNLSSTSSKNSHSSSYTPNSFSSEELQAEPLDLSLPKQMKEPKSIIATKNKTKASSISLDHNSVSSSSENSDEPLNLTFIKKEFSNSNNLDNKSTNPVFSMNPFSAKPLYTALPPQSAFPPATFMPPVQTSIPGLRPYPGLDQMSFLPHMAYTYPTGAATFADMQQRRKYQRKQGFQGELLDGAQDYMSGLDDMTDSDSCLSRKKIKKTESGMYACDLCDKTFQKSSSLLRHKYEHTGKRPHQCQICKKAFKHKHHLIEHSRLHSGEKPYQCDKCGKRFSHSGSYSQHMNHRYSYCKREAEEREAAEREAREKGHLEPTELLMNRAYLQSITPQGYSDSEERESMPRDGESEKEHEKEGEDGYGKLGRQDGDEEFEEEEEESENKSMDTDPETIRDEEETGDHSMDDSSEDGKMETKSDHEEDNMEDGM

SEQ ID NO: 75382 - protein, 121 aa, Homo sapiens
MAAAAVARLWWRGILGASALTRGTGRPSVLLLPVRRESAGADTRPTVRPRNDVAHKQLSAFGEYVAEILPKYVQQVQVILTNVIWVWVKKEPCSQGMWEWADLFQRNYRFLHPKLGLFSQH

SEQ ID NO: 75383 - protein, 62 aa, Homo sapiens
MSDEDDLEDSEPDQDDSEKEEDEKETEEGEDYRKEGEEFPEEGPDRHLLAALLHPSALCGYF

SEQ ID NO: 75384 - protein, 414 aa, Homo sapiens
MKNQIEQLGKKYNINPVSMDICKQEEKLGFLVAKQDLVISLLPYVLHPLVAKACITNKVNMVTASYITPALKELEKSVEDAGITIIGELGLDPGLDHMLAMETIDKAKEVGATIESYISYCGGLPAPEHSNNPLRYKFSWSPVGVLMNVMQSATYLLDGKVVNVAGGISFLDAVTSMDFFPGLNLEGYPNRDSTKYAEIYGISSAHTLLRGTLRYKGYMKALNGFVKLGLINREALPAFRPEANPLTWKQLLCDLVGISPSSEHDVLKEAVLKKLGGDNTQLEAAEWLGLLGDEQVPQAESILDALSKHLVMKLSYGPEEKDMIVMRDSFGIRHPSGHLEHKTIDLVAYGDINGFSAMAKTVGLPTAMAAKMLLDGEIGAKGLMGPFSKEIYGPILERIKAEGIIYTTQSTIKP

SEQ ID NO: 75385 - protein, 672 aa, Homo sapiens
MWRVLFLLSGLGGLRMDSNFDSLPVQITVPEKIRSIIKEGIESQASYKIVIEGKPYTVNLMQKNFLPHNFRVYSYSGTGIMKPLDQDFQNFCHYQGYIEGYPKSVVMVSTCTGLRGVLQFENVSYGIEPLESSVGFEHVIYQVKHKKADVSLYNEKDIESRDLSFKLQSVEPQQDFAKYIEMHVIVEKQLYNHMGSDTTVVAQKVFQLIGLTNAIFVSFNITIILSSLELWIDENKIATTGEANELLHTFLRWKTSYLVLRPHDVAFLLVYREKSNYVGATFQGKMCDANYAGGVVLHPRTISLESLAVILAQLLSLSMGITYDDINKCQCSGAVCIMNPEAIHFSGVKIFSNCSFEDFAHFISKQKSQCLHNQPRLDPFFKQQAVCGNAKLEAGEECDCGTEQDCALIGETCCDIATCRFKAGSNCAEGPCCENCLFMSKERMCRPSFEECDLPEYCNGSSASCPENHYVQTGHPCGLNQWICIDGVCMSGDKQCTDTFGKEVEFGPSECYSHLNSKTDVSGNCGISDSGYTQCEVCRNQRCVSSSYLGYDCTTDKCNDRGVCNNKKHCHCSASYLPPDCSVQSDLWPGGSIDSGNFPPVAIPARLPERRYIENIYHSKPMRWPFFLFIPFFIIFCVLIAIMVKVNFQRKKWRTEDYSSDEQPESESEPKG

SEQ ID NO: 75386 - protein, 154 aa, Homo sapiens
AVLNGQVKEIPPDWDQRPVKTLVGKNFEQVAFDETKNVFVKFYAPWCTHCKEMAPAWEALAEKYQDHEDIIIAELDATANELDAFAVHGFPTLKYFPAGPGRKVIEYKSTRDLETFSKFLDNGGVLPTEEPPEEPAAPFPEPPANSTMGSKEEL

SEQ ID NO: 75387 - protein, 118 aa, Homo sapiens
MSLTVVSMACVGFFLLQGAWPLMGGQDKPFLSARPSTVVPRGGHVALQCHYRRGFNNFMLYKEDRSHVPIFHGRIFQESFIMGPVTPAHAGTYRCRGSRPHSLTGWSTPSNPLVIMVT

SEQ ID NO: 75388 - protein, 498 aa, Homo sapiens
MQSPPHLAVCRSNKSPWVCLTCSSVHCGRYVNGHAKKHYEDAQVPLTNHKKSEKQDKVQHTVCMDCSSYSTYCYRCDDFVVNDTKLGLVQKVREHLQNLENSAFTADRHKKRKLLENSTLNSKLLKVNGSTTAICATGLRNLGNTCFMNAILQSLSNIEQFCCYFKELPAVELRNGKTAGRRTYHTRSQGDNNVSLVEEFRKTLCALWQGSQTAFSPESLFYVVWKIMPNFRGYQQQDAHEFMRYLLDHLHLELQGGFNGVSRSAILQENSTLSASNKCCINGASTVVTAIFGGILQNEVNCLICGTESRKFDPFLDLSLDIPSQFRSKRSKNQENGPVCSLRDCLRSFTDLEELDETELYMCHKCKKKQKSTKKFWIQKLPKVLCLHLKRFHWTAYLRNKVDTYVEFPLRGLDMKCYLLEPENSGPESCLYDLAAVVVHHGSGVGSGHYTAYATHEGRWFHFNDSTVTLTDEETVVKAKAYILFYVEHQAKAGSDKL

SEQ ID NO: 75389 - protein, 72 aa, Homo sapiens
MDDFERRRELRRQKREEMRLEAERIAYQRNDDDEEEAARERRRRARQERLRQKQEEESLGQVTDQVEVNAQN

SEQ ID NO: 75390 - protein, 64 aa, Homo sapiens
  MOD_RES (1)..(1): Any amino acid
XFFSDEEDKGERTPVGDKEPQAVPNIEYLLPNIGRTVPPGDPGSDSTTCSSAKSKVRMKAILKA

SEQ ID NO: 75391 - protein, 96 aa, Homo sapiens
MGDKKSPTRPKRQPKPSSDEGYWDCSVCTFRNSAEAFKCMMCDVRKGTSTRSTLFEVIVSASRTKEPLKFPISGRDNRKRAWLPFGGTILLAQASA

SEQ ID NO: 75392 - protein, 82 aa, Homo sapiens
MSDHGDVSLPPEDRVRALSQLGSAVEVNEDIPPRRYFRSGVEIIRMASIYSEEGNIEHAFILYNKYITDRISLCHPGWSAVV

SEQ ID NO: 75393 - protein, 44 aa, Homo sapiens
MAGFLDNFRWPECECIDWSERRNAVASVVAGILVLEFGFSLVSC

SEQ ID NO: 75394 - protein, 40 aa, Homo sapiens
MGLTKQYLRYVASAVFGVIGSQKGLASQASSSFVFFATEF

SEQ ID NO: 75395 - protein, 425 aa, Homo sapiens
MVSKLTSLQQELLSALLSSGVTKEVLVQALEELLPSPNFGVKLETLPLSPGSGAEPDTKPVFHTLTNGHAKGRLSGDEGSEDGDDYDTPPILKELQALNTEEAAEQRAEVDRMLSEDPWRAAKMIKGYMQQHNIPQREVVDVTGLNQSHLSQHLNKGTPMKTQKRAALYTWYVRKQREILRQFNQTVQSSGNMTDKSSQDQLLFLFPEFSQQSHGPGQSDDACSEPTNKKMRRNRFKWGPASQQILYQAYDRQKNPSKEEREALVEECNRAECLQRGVSPSKAHGLGSNLVTEVRVYNWFANRRKEEAFRQKLAMDAYSSNQTHSLNPLLSHGSPHHQPSSSPPNKLSGVRYSQQGNNEITSSSTISHHGNSAMVTSQSVLQQVSPASLDPGHNLLSPDGKMDLSLRRRFAPSQHLDEYPQPLPP

SEQ ID NO: 75396 - protein, 190 aa, Homo sapiens
MSTLFPSLFPRVTETLWFNLDRPCVEETELQQQEQQHQAWLQSIAEKDNNLVPIGKPASEHYDDEEEEDDEDDEDSEEDSEDDEDMQDMDEMNDYNESPDDGEVNEVHLSVLPTCGLYHSHPKQLCPESIKLSHSFMPHVYMWLALPFPPPSPSAWPTQNFQIQFKCCSFSMKSQAETTTLSFRFMKGLC

SEQ ID NO: 75397 - protein, 250 aa, Homo sapiens
MRKTRLWGLLWMLFVSELRAATKLTEEKYELKEGQTLDVKCDYTLEKFASSQKAWQIIRDGEMPKTLACTERPSKNSHPVQVGRIILEDYHDHGLLRVRMVNLQVEDSGLYQCVIYQPPKEPHMLFDRIRLVVTKGFSGTPGSNENSTQNVYKIPPTTTKALCPLYTSPRTVTQAPPKSTADVSTPDSEINLTNVTDIIREKSMTFGIRRLDVESHPLPPLHTGHFRISQFFSQAGTQSLHSCYKGKPTP

SEQ ID NO: 75398 - protein, 525 aa, Homo sapiens
MEEMFHKKSEAVRRLVEAAEEAHLKHEFDADLQYEYFNAVLINERDKDGNFLELGKEFILAPNDHFNNLPVNISLSDVQVPTNMYNKDPAIVNGVYWSESLNKVFVDNFDRDPSLIWQYFGSAKGFFRQYPGIKWEPDENGVIAFDCRNRKWYIQAATSPKDVVILVDVSGSMKGLRLTIAKQTVSSILDTLGDDDFFNIIAYNEELHYVEPCLNGTLVQADRTNKEHFREHLDKLFAKGIGMLDIALNEAFNILSDFNHTGQGSICSQAIMLITDGAVDTYDTIFAKYNWPDRKVRIFTYLIGREAAFADNLKWMACANKGFFTQISTLADVQENVMEYLHVLSRPKVIDQEHDVVWTEAYIDSTLPQAQKLTDDQGPVLMTTVAMPVFSKQNETRSKGILLGVVGTDVPVKELLKTIPKYKLGIHGYAFAITNNGYILTHPELRLLYEEGKKRRKPNYSSVDLSEVEWEDRDDVLRNAMVNRKTGKFSMEVKKTVDKGFRCGAFQRSWEIFLPRECNHRRRPA

SEQ ID NO: 75399 - protein, 131 aa, Homo sapiens
MSENAAPGLISELKLAVPWGHIAAKAWGSLQGPPVLCLHGWLDNASSFDRLIPLLPQDFYYVAMDFGGHGLSSHYSPGVPYYLQTFVSEIRRVVAALKWNRFSILGHSFALLSPRWRRGRNVFLYLPRDGG

SEQ ID NO: 75400 - protein, 158 aa, Homo sapiens
MESNFNTESSSTFTLQSSSETLFSIQLLDFKTSLLEALEELRMRREAEIHYEEQIGKIIVETQELKWQKETLQNQKETLAEQHKEAMAVFKKQLQMKMCALEEEKGKYQLATEIKEKEIEGLKETLKALQVSKYSLQKKVSEMVRKLQNIFSPIWIST

SEQ ID NO: 75401 - protein, 158 aa, Homo sapiens
  MOD_RES (1)..(1): Any amino acid
XLENFFQELEKARKGSGMLAQILPTEENFLLCFRQHVGSSAEFMEAWRKYDTDRSGYIEANELKGFLSDLLKKANRPYDEPKLQEYTQTILRMFDLNGDGKLGLSEILLPVQENFLLKFQGMKLTSEEFNAIFTFYDKDRSGYIDEHELDALLKDLYE

SEQ ID NO: 75402 - protein, 208 aa, Homo sapiens
MKDSPFQVTKLYWLNEKWDFIASASDMAAEQGQILVIATAAVGGFTLLVILTLFFLITGRCQWYIKAKMKSEEKRRNHLQNGHLRFPGIKTYIDPDTYEDPSLAVHEFAKEIDPSRIRIERVIGAGEFGEVCSGRLKTPGKREIPVAIKTLKGGHMDRQRRDFLREASIMGQFDHPNIIRLEGVVTKKPLEMMTYILRAKGEAGFLKK

SEQ ID NO: 75403 - protein, 125 aa, Homo sapiens
MEDPLEMERSPQLRKHACRVMGALNTVVENLHDPDKVSSVLALVGKAHALKHKVEPVYFKILSGVILEVVAEEFASDFPPETQRAWAKLRGLIYSHVTAAYKEVGWVQQVPNATTPPATLPSSGP

SEQ ID NO: 75404 - protein, 79 aa, Homo sapiens
  MOD_RES (1)..(1): Any amino acid
XATLQLDGLARAPGQPKIDHLRRLHLGACPTEECKACTRCGCVTMLKSPNRTTAVKQWEQRWIKNCLCGLLKAVGRTPA

SEQ ID NO: 75405 - protein, 429 aa, Homo sapiens
MVVTVILCRMKNTTKKPDFSSQPAVHKLTKRIPLRRQVSAESSSSMNSNTPLVRITTRLSSTADTPMLAGVSEYELPEDPKWEFPRDKLTLGKPLGEGCFGQVVMAEAVGIDKDKPKEAVTVAVKMLKDDATEKDLSDLVSEMEMMKMIGKHKNIINLLGACTQDGPLYVIVEYASKGNLREYLRARRPPGMEYSYDINRVPEEQMTFKDLVSCTYQLARGMEYLASQKCIHRDLAARNVLVTENNVMKIADFGLARDINNIDYYKKTTNGRLPVKWMAPEALFDRVYTHQSDVWSFGVLMWEIFTLGGSPYPGIPVEELFKLLKEGHRMDKPANCTNELYMMMRDCWHAVPSQRPTFKQLVEDLDRILTLTTNEEYLDLSQPLEQYSPSYPDTRSSCSSGDDSVFSPDPMPYEPCLPQYPHINGSVKT

SEQ ID NO: 75406 - protein, 394 aa, Homo sapiens
MALVTVSRSPPGSGASTPVGPWDQAVQRRSRLQRRQSFAVLRGAVLGLQDGGDNDDAAEASSEPTEKAPSEEELHGDQTDFGQGSQSPQKQEEQRQHLHLMVQLLRPQDDIRLAAQLEAPRPPRLRYLLVVSTREGEGLSQDETVLLGVDFPDSSSPSCTLGLVLPLWSDTQVYLDGDGGFSVTSGGQSRIFKPISIQTMWATLQVLHQACEAALGSGLVPGGSALTWASHYQERLNSEQSCLNEWTAMADLESLRPPSAEPGGSSEQEQMEQAIRAELWKVLDLESTSETSDMPEVFSSHESSHEEPLQPFPQLARTKGGQQVDRGPQPALKSRQSVVTLQGSAVVANRTQAFQEQEQGQGQGQGEPCISSTPRFRKVVRQASVHDSGEEGEA

SEQ ID NO: 75407 - protein, 442 aa, Homo sapiens
MLPAAARPLWGPCLGLRAAAFRLARRQVPCVCAVRHMRSSGHQRCEALAGAPLDNAPKEYPPKIQQLVQDIASLTLLEISDLNELLKKTLKIQDVGLVPMGGVMSGAVPAAAAQEAVEEDIPIAKERTHFTVRLTEAKPVDKVKLIKEIKNYIQGINLVQAKKLVESLPQEIKANVAKAEAEKIKAALEATQQEVKLRMTGMALRVVRTDGILALYSGLSASLCRQMTYSLTRFAIYETVRDRVAKGSQGPLPFHEKVLLGSVSGLAGGFVGTPADLVNVRMQNDVKLPQGQRRNYAHALDGLYRVAREEGLRRLFSGATMASSRGALVTVGQLSCYDQAKQLVLSTGYLSDNIFTHFVASFIAGGCATFLCQPLDVLKTRLMNSKGEYQGVFHCAVETAKLGPLAFYKGLVPAGIRLIPHTVLTFVFLEQLRKNFGIKVPS

SEQ ID NO: 75408 - protein, 420 aa, Homo sapiens
MLNNWDKWMAKKHKKIRLRCQKGIPPSLRGRAWQYLSGGKVKLQQNPGKFDELDMSPGDPKWLDVIERDLHRQFPFHEMFVSRGGHGQQDLFRVLKAYTLYRPEEGYCQAQAPIAAVLLMHMPAEQAFWCLVQICEKYLPGYYSEKLEAIQLDGEILFSLLQKVSPVAHKHLSRQKIDPLLYMTEWFMCAFSRTLPWSSVLRVWDMFFCEGVKIIFRVGLVLLKHALGSPEKVKACQGQYETIERLRSLSPKIMQEAFLVQEVVELPVTERQIEREHLIQLRRWQETRGELQCRSPPRLHGAKAILDAEPGPRPALQPSPSIRLPLDAPLPGSKAKPKPPKQAQKEQRKQMKGRGQLEKPPAPNQAMVVAAAGDACPPQHVPPKDSAPKDSAPQDLAPQVSAHHRSQESLTSQESEDTYL

SEQ ID NO: 75409 - protein, 129 aa, Homo sapiens
MGGTWASKEPLRPRCRPINATLAVEKEGCPVCITVNTTICAGYCPTMTRVLQGVLPALPQVVCNYRDVRFESIRLPGCPRGVNPVVSYAVALSCQCALCRRSTTDCGGPKDHPLTCDDPRFQDSSSSKA

SEQ ID NO: 75410 - protein, 192 aa, Homo sapiens
MSRERGSRSEEPGAGNRESGSREPGLAAAAMSTVDLARVGACILKHAVTGEAVELRSLWREHACVVAGLRRFGCVVCRWIAQDLSSLAGLLDQHGVRLVGVGPEALGLQEFLDGDYFAGELYLDESKQLYKELGFKRYNSLSILPAALGKPVRDVAAKKSPGDYVPKEHILQVLGISAEVCASDPPQCDREV

SEQ ID NO: 75411 - protein, 230 aa, Homo sapiens
MEADIITNLRCRLKEAEEERLKAAQYGLQLVESQNELQNQLDKCRNEMMTMTESYEQEKYTLQREVELKSRMLESLSCECEAIKQQQKMHLEKLEEQLSRSHGQEVNELKTKIEKLKVELDEARLSEKQLKHQVDHQKELLSCKSEELRVMSERVQESMSSEMLALQIELTEMESMKTTLKEEVNELQYRQEQLELLITNLMRQVDRLKEEKEEREKEAVSYYNALEKAR

SEQ ID NO: 75412 - protein, 161 aa, Homo sapiens
  MOD_RES (1)..(1): Any amino acid
XPEPESPPAPGRGPAGSPAHLHTGTFWLTRIVLLKALAFVYFVAFLVAFHQNKQLIGDRGLLPCRVFLKNFQQYFQDRTSWEVFSYMPTILWLMDWSDMNSNLDLLALLGLGISSFVLITGCANMLLMAALWGLYMSLVNVGHVWYSFASAISLPSMHGGQ

SEQ ID NO: 75413 - protein, 829 aa, Homo sapiens
MKLNVDGLLVYFPYDYIYPEQFSYMRELKRTLDAKGHGVLEMPSGTGKTVSLLALIMAYQRAYPLEVTKLIYCSRTVPEIEKVIEELRKLLNFYEKQEGEKLPFLGLALSSRKNLCIHPEVTPLRFGKDVDGKCHSLTASYVRAQYQHDTSLPHCRFYEEFDAHGREVPLPAGIYNLDDLKALGRRQGWCPYFLARYSILHANVVVYSYHYLLDPKIADLVSKELARKAVVVFDEAHNIDNVCIDSMSVNLTRRTLDRCQGNLETLQKTVLRIKETDEQRLRDEYRRLVEGLREASAARETDAHLANPVLPDEVLQEAVPGSIRTAEHFLGFLRRLLEYVKWRLRVQHVVQESPPAFLSGLAQRVCIQRKPLRFCAERLRSLLHTLEITDLADFSPLTLLANFATLVSTYAKGFTIIIEPFDDRTPTIANPILHFSCMDASLAIKPVFERFQSVIITSGTLSPLDIYPKILDFHPVTMATFTMTLARVCLCPMIIGRGNDQVAISSKFETREDIAVIRNYGNLLLEMSAVVPDGIVAFFTSYQYMESTVASWYEQGILENIQRNKLLFIETQDGAETSVALEKYQEACENGRGAILLSVARGKVSEGIDFVHHYGRAVIMFGVPYVYTQSRILKARLEYLRDQFQIRENDFLTFDAMRHAAQCVGRAIRGKTDYGLMVFADKRFARGDKRGKLPRWIQEHLTDANLNLTVDEGVQVAKYFLRQMAQPFHRVRPASPSRHPPRLSFSSRKSPWILPTPHPQPACPPALSKEKFIVHLRARLWGEGGDSRGHRCQQVAQARQGERSWGEEALGVFRRDGAGLEKAGPSPTP

SEQ ID NO: 75414 - protein, 611 aa, Homo sapiens
MARRPRHSIYSSDEDDEDFEMCDHDYDGLLPKSGKRHLGKTRWTREEDEKLKKLVEQNGTDDWKVIANYLPNRTDVQCQHRWQKVLNPELIKGPWTKEEDQRVIELVQKYGPKRWSVIAKHLKGRIGKQCRERWHNHLNPEVKKTSWTEEEDRIIYQAHKRLGNRWAEIAKLLPGRTDNAIKNHWNSTMRRKVEQEGYLQESSKASQPAVATSFQKNSHLMGFAQAPPTAQLPATGQPTVNNDYSYYHISEAQNVSSHVPYPVALHVNIVNVPQPAAAAIQRHYNDEDPEKEKRIKELELLLMSTENELKGQQVLPTQNHTCSYPGWHSTTIADHTRPHGDSAPVSCLGEHHSTPSLPADPGSLPEESASPARCMIVHQGTILDNVKNLLEFAETLQFIDSFLNTSSNHENSDLEMPSLTSTPLIGHKLTVTTPFHRDQTVKTQKENTVFRTPAIKRSILESSPRTPTPFKHALAAQEIKYGPLKMLPQTPSHLVEDLQDVIKQESDESGIVAEFQENGPPLLKKIKQEVESPTDKSGNFFCSHHWEGDSLNTQLFTQTSPVADAPNILTSSVLMAPASEDEDNVLKAFTVPKNRSLASPLQVITIPTLVF

SEQ ID NO: 75415 - protein, 172 aa, Homo sapiens
PMAETVSTQVGTEGGLRASHQQNGDAGGDAKVELSPGPPKPAGREVEPAPVGGEHPSAAAPGPGKHKKRRGATRERVVPPPKKRRTGVSFGDEHFAETSYYFEGGLRKVRPYYFDFRTYCKGRWVGHSLLHVFSTEFRAQPLAYYEAAVRAGRLQLNEKPVQDLNIVLKVES

SEQ ID NO: 75416 - protein, 230 aa, Homo sapiens
MSPDVPLLNDYKQDFFLKRFPQTVLGGPRFKLGYCAPPYIYVNQIILFLMPWVWGGVGTLLYQLGILKDYYTAALSGGLMLFTAFVIQFTSLYAKNKSTTVERILTTDILAEEDEHEFTSCTGAETVKFLIPGKKYVANTVFHSILAGLACGLGTWYLLPNRITLLYGSTGGTALLFFFGWMTLCIAEYSLIVNTATETATFQTQDTYEIIPLMRPLYIFFFVSVDLAHR

SEQ ID NO: 75417 - protein, 528 aa, Homo sapiens
MEGKWLLCMLLVLGTAIVEAHDGHDDDVIDIEDDLDDVIEEVEEMKESKLPGDKGLVLMSRAKHHAISAKLNKPFLFDTKPLIVQYEVNFQNGIECGGAYVKLLSKTPELNLDQFHDKTPYTIMFGPDKCGEDYKLHFIFRHKNPKTGIYEEKHAKRPDADLKTYFTDKKTHLYTLILNPDNSFEILVDQSVVNSGNLLNDMTPPVNPSREIEDPEDRKPEDWDERPKIPDPEAVKPDDWDEDAPAKIPDEEATKPEGWLDDEPEYVPDPDAEKPEDWDEDMDGEWEAPQIANPRCESAPGCGVWQRPVIDNPNYKGKWKPPMIDNPSYQGIWKPRKIPNPDFFEDLEPFRMTPFSAIGLELWSMTSDIFFDNFIICADRRIVDDWANDGWGLKKAADGAAEPGVVGQMIEAAEERPWLWVVYILTVALPVFLVILFCCSGKKQTSGMEYKKTDAPQPDVKEEEEEKEEEKDKGDEEEEGEEKLEEKQKSDAEEDGGTVSQEEEDRKPKAEEDEILNRSPRNRKPRRE

SEQ ID NO: 75418 - protein, 211 aa, Homo sapiens
MLQPHLLPYQAVSKVAAGERVVRRPSYLDLFRTPRLRHISLCCVVVWFGVNFSYYGLSLDVSGLGLNVYQTQLLFGAVELPSKLLVYLSVRYAGRRLTQAGTLLGTALAFGTRLLVSSDMKSWSTVLAVMGKAFSEAAFTTAYLFTSELYPTVLRQTGMGLTALVGRLGGSLAPLAALLDGVWLSLPKLTYGGIALLAAGTALLLPETRQA

SEQ ID NO: 75419 - protein, 209 aa, Homo sapiens
MSAEASGPAAAAAPSLEAPKPSGLEPGPAAYGLKPLTPNSKYVKLNVGGSLHYTTLRTLTGQDTMLKAMFSGRVEVLTDAGGWVLIDRSGRHFGTILNYLRDGSVPLPESTRELGELLGEARYYLVQGLIEDCQLALQVRAFGVPMPMFLGELPKQVLEQKKGDMGYGLESLALAGHNPREFEVPSSASLPPQAAPPPQPHARTFAMVK

SEQ ID NO: 75420 - protein, 938 aa, Homo sapiens
MVEMMLLPDCCYSDDGPTTEGIDLNDPAIKQDALLLERWILEPVPRQNGDRFIEEKTLLLAVRSFVFFSQLSAWLSVSHGAIPRNILYRISAADVDLQWNFSQTPIEHVFPVPNVSHNVALKVSVQSLPRQSNYPVLTCSIHTNIGLYEKRIQQHKLKTHQHHNPNEAEQCGTNSSQRLCSKQTWTMAPESVLHAKSGPSPEYTAAVKNIKLYPGTGSKSDHGTSQANILGFSGIGDIKSQETSVRTLKSFSMVDSSISNRQSFWQSAGETNPLIGSLIQERQEIIARIAQHLIHCDPSTSHVSGRPFNTQESSSLHSKLFRVSQENENVGKGKEAFSMTFGSPEFSSPEDTNEGKIRLKPETPRSETCISNDFYSHMPVGETNPLIGSLLQERQDVIARIAQHLEHIDPTASHIPRQSFNMHDSSSVASKVFRSSYEDKNLLKKNKDESSVSISHTKCSLLGDISDGKNLVPNKCFTSFKNNSKEKCSLKHQTRNQCQNNPSEIIQSTYQETQNKSSSLSTSSILSQHKENNLDLTSRFKEQEMSNGIDKQYSNCTTIDKQICTNKYKEKIINENYNPKFFGNLQSDDSKKNDSKIKVTVLEMSEYLNKYESMSSNKDSKRPKTCEQNTQLNSIENYLNKDNEGFKCKKSDQLKNEQDKQEDPTNEKSQNYSQRRSIKDCLSTCEQPKNTEVLRTTLKHSNVWRKHNFHSLDGTSTRAFHPQTGLPLLSSPVPQRKTQSGCFDLDSSLLHLKSFSSRSPRPCLNIEDDPDIHEKPFLSSSAPPITSLSLLGNFEESVLNYRFDPLGIVDGFTAEVGASGAFCPTHLTLPVEVSFYSVSDDNAPSPYMGVITLESLGKRGYRVPPSGTIQVTLFNPNKTVVKMFVVIYDLRDMPANHQTFLRQRTFSVPVKQEVKRSVNKENIRHTEERLLRYLIHLR

SEQ ID NO: 75421 - protein, 142 aa, Homo sapiens
  MOD_RES (1)..(1): Any amino acid
XDYVGKNEKTKIIAKIQQPLQQQIIRLHQELGRQKSLWADVHGKLRSHIDALREQNMELREKLRALQLQRWKARKKSAASPHAGQESHTLALEPAFGKISPLSADEETIPKYAGHKNQSATLLGQRSSSNNSAPPKTEAPQS

SEQ ID NO: 75422 - protein, 368 aa, Homo sapiens
  MOD_RES (1)..(1): Any amino acid
XLAAAVSCAVAQHAPPVSELEPRRREGRAVDRGLQKINLSSFRTNLKVIVNSLKNMINTFVPSGKIMQVVDEKLPGLLGNFPGPFEEEMKGIAAVTDIPLGEIISFNIFYELFTICTSIVAEDKKGHLIHGRNMDFGVFLGWNINNDTWVITEQLKPLTVNLDFQRNNKTVFKASSFAGYVGMLTGFKPGLFSLTLNERFSINGGYLGILEWILGKKDVMWIGFLTRTVLENSTSYEEAKNLLTKTKILAPAYFILGGNQSGEGCVITRDRKESLDVYELDAKQGRWYVVQTNYDRWKHPFFLDDRRTPAKMCLNRTSQENISFETMYDVLSTKPVLNKLTVYTTLIDVTKGQFETYLRDCPDPCIGW

SEQ ID NO: 75423 - protein, 131 aa, Homo sapiens
MPSSISAFEGTCVSIPCRFDFPDELRPAVVHGVWYFNSPYPKNYPPVVFKSRTQVVHESFQGRSRLLGDLGLRNCTLLLSNVSPELGGKYYFRGDLGGYNQYTFSEHSVLDIVNTPNIVVPPEVVAGTEVE

SEQ ID NO: 75424 - protein, 202 aa, Homo sapiens
MPGSGSAFIPTINAITTSQDLQWMVQPTVITSMSNPYPRSHPYSPLPGLASVPGHMALPRPGVIKTIGTTVGRRRRDEQLSPEEEEKRRIRRERNKLAAAKCRNRRRELTEKLQAETEELEEEKSGLQKEIAELQKEKEKLEFMLVAHGPVCKISPEERRSPPAPGLQPMRSGGGSVGAVVVKQEPLEEDSPSSSSAGLDKA

SEQ ID NO: 75425 - protein, 592 aa, Homo sapiens
MLWFSGVGALAERYCRRSPGITCCVLLLLNCSGVPMSLASSFLTGSVAKCENEGEVLQIPFITDNPCIMCVCLNKEVTCKREKCPVLSRDCALAIKQRGACCEQCKGCTYEGNTYNSSFKWQSPAEPCVLRQCQEGVVTESGVRCVVHCKNPLEHLGMCCPTCPGCVFEGVQYQEGEEFQPEGSKCTKCSCTGGRTQCVREVCPILSCPQHLSHIPPGQCCPKCLGQRKVFDLPFGSCLFRSDVYDNGSSFLYDNCTACTCRDSTVVCKRKCSHPGGCDQGQEGCCEECLLRVPPEDIKVCKFGNKIFQVLVKNDARRTRSFSWTKSVELVLGESRVSLQQHLTVRWNGSRIALPCRAPHFHIDLDGYLLKVTTKAGLEISWDGDSFVEVMAAPHLKGKLCGLCGNYNGHKRDDLIGGDGNFKFDVDDFAESWRVESNEFCNRPQRKPVPELCQGTVKVKLRAHRECQKLKSWEFQTCHSTVDYATFYRSCVTDMCECPVHKNCYCESFLAYTRACQREGIKVHWEPQQNCAATQCKHGAVYDTCGPGCIKTCDNWNEIGPCNKPCVAGCHCPANLVLHKGRCIKPVLCPQR

SEQ ID NO: 75426 - protein, 84 aa, Homo sapiens
MDDTDPLVTVMKVEKAPQETYADIGGLDNQIQEIKESVELPLTHPEYYEEMGIKPPKGVILYGPPGTGKTLLAKAVANQTSATF

SEQ ID NO: 75427 - protein, 80 aa, Homo sapiens
MTRGFAPILPVEFHKMGSFRRPRPRFMSSPVLSDLPRFQAARQALQLSSSSAWNSVQTAVINVFKGGGLQSNELYALNEN

SEQ ID NO: 75428 - protein, 239 aa, Homo sapiens
  MOD_RES (1)..(1): Any amino acid
XSRQEGAKPTGDLPFHWICQPYIRPGPREGSKEKAGARSKRALEEEEGGTEVLSKNKQKKQLRNPHKTFDPSLKPKYAKCDQCGNPKVSGFRLQATKASALGVGRVVSALLGVAGLVPAQLGLQRGSRWHGCLRTAPCFQPSPCPGLEGKRVWVGGGEGEASGLGAVPRAASRPWASGRGFPSGAAPLLASLAPGVVLATGSRDFLCPGQQMCVQPVPRLLQEASLQRDCRLPRSRIAF

SEQ ID NO: 75429 - protein, 260 aa, Homo sapiens
MLALLGLSQALNILLGLKGLAPAEISAVCEKGNFNVAHGLAWSYYIGYLRLILPELQARIRTYNQHYNNLLRGAVSQRLYILLPLDCGVPDNLSMADPNIRFLDKLPQQTGDHAGIKDRVYSNSIYELLENGQRAGTCVLEYATPLQTLFAMSQYSQAGFSREDRLEQAKLFCRTLEDILADAPESQNNCRLIAYQEPADDSSFSLSQEVLRHLRQEEKEEVTVGSLKTSAVPSTSTMSQEPELLISGMEKPLPLRTDFS

SEQ ID NO: 75430 - protein, 28 aa, Homo sapiens
MKSEDYPHETMAPDIHEERQYRCEDCDQ

SEQ ID NO: 75431 - protein, 163 aa, Homo sapiens
MLIFWTITLFLLGAAKGKEVCYEDLGCFSDTEPWGGTAIRPLKILPWSPEKIGTRFLLYTNENPNNFQILLLSDPSTIEASNFQMDRKTRFIIHGFIDKGDESWVTDMCKTPGLSRITGLDPVEASFESTPEEVRLDPSDADFVDVIHTDAAPLIPFLGFGTN

SEQ ID NO: 75432 - protein, 39 aa, Homo sapiens
MLGKGVVGGGGGTKAPKPSFVSYVRPEVLLCCPDWNAVV

SEQ ID NO: 75433 - protein, 171 aa, Homo sapiens
MAAASVTPPGSLELLQPGFSKTLLGTKLEAKYLCSACRNVLRRPFQAQCGHRYCSFCLASILSSGPQNCAACVHEGIYEEGISILESSSAFPDNAARREVESLPAVCPSDGCTWKGTLKEYESCHEGRCPLMLTECPACKGLVRLGEKERHLEHECPERSLSCRHCRAPCC

SEQ ID NO: 75434 - protein, 151 aa, Homo sapiens
LGLDSEVLPVRGDHPAAQNRFLYVGGALHALPTGLRGLLRPSPPFSKPLFWAGLRELTKPRGKEPDETVHSFAQRRLGPEPWTVSAVECLQATAVSSASGPAFPVSSKLSKPIVPYYWACCWGQGGPHSQTQHSFARPWLSAGASGHFVEV

SEQ ID NO: 75435 - protein, 180 aa, Homo sapiens
MRLAVLFSGALLGLLAATLLPSFTVTPTVTESTGTTSHRTTKSHKTTTHRTTTTGTTSHGPTTATHNPTTTSHGNVTVHPTSNSTATSQGPSTATHSPATTSHGNATVHPTSNSTATSPGFTSSAHPEPPPPSPSPSPTSKETIGDYTWTNGSQPCVHLQAQIQIRVMYTTQGGGEAWGI

SEQ ID NO: 75436 - protein, 243 aa, Homo sapiens
MTVSGKKQTMGFEVPGVSSEENGHSFHTPQKGPPIEDAIASSDVLETASKSANPPHTIQASEEQSSTPAPVKKSGKLRQQIDVKAELEKRQGGKQLLNLVVIGHVDAGKSTLMGHMLYLLGNINKRTMHKYEQESKKAGKASFAYAWVLDETGEERERGVTMDVGMTKFETTTKVITLMDAPGHKDFIPNMITGAAQADVAVLVVDASRGEFEAGFETGGQTREHGLLVRSLGVTQLAVAVNK

SEQ ID NO: 75437 - protein, 34 aa, Homo sapiens
PGEWSGLEKNKKDGFKAARWADWGLCLPARLHRN

SEQ ID NO: 75438 - protein, 159 aa, Homo sapiens
MAQETNHSQVPMLCSTGCGFYGNPRTNGMCSVCYKEHLQRQNSSNGRISPPATSVSSLSESLPVQCTDGSVPEAQSALDSTSSSMQPSPVSNQSLLSESVASSQLDSTSVDKAVPETEDVQASVSDTAQQPSEEQSKSLEKPKQKKNRCFMCRKKVGLT

SEQ ID NO: 75439 - protein, 169 aa, Homo sapiens
MDPARPLGLSILLLFLTEAALGDAAQEPTGNNAEICLLPLDYGPCRALLLRYYYDRYTQSCRQFLYGGCEGNANNFYTWEACDDACWRIEIPKVCRLQVSVDDQCEGSTEKYFFNLSSMTCEKFFSGGCHRNRIENRFPDEATCMGFCAPKKIPSFCYSPKDEGLCSAN

SEQ ID NO: 75440 - protein, 102 aa, Homo sapiens
MMKEVLSTGQGNREVIHTGTLQRHQSYHIGDFCFQEIEKEIHNIEFQCQEDERNGHEAPTTKIKKLTGSTDQHDHRHAGNKPIKDQLGSSFYSHLPELHIFQ

SEQ ID NO: 75441 - protein, 154 aa, Homo sapiens
  MOD_RES (1)..(1): Any amino acid
XQLNRIEEGLDQINKDMRETEKTLTELNKCCGLCVCPCNRTKNFESGKAYKTTWGDGGENSPCNVVSKQPGPVTNGQLQQPTTGAASGGYIKRITNDAREDEMEENLTQVGSILGNLKDMALNIGNEIDAQNPQIKRITDKAKNFKAWTARYLH

SEQ ID NO: 75442 - protein, 617 aa, Homo sapiens
MLENFALVATLGFWCEAEHEAPSEQSVSVEGVSQVRTAESGLFQKAHPCEMCDPLLKDILHLAEHQGSHLTQKLCTRGLCRRRFSFSANFYQHQKQHNGENCFRGDDGGASFVKSCTVHMLGRSFTCREEGMDLPDSSGLFQHQTTYNRVSPCRRTECMESFPHSSSLRQHQGDYDGQMLFSCGDEGKAFLDTFTLLDSQMTHAEVRPFRCLPCGNVFKEKSALINHRKIHSGEISHVCKECGKAFIHLHHLKMHQKFHTGKRHYTCSECGKAFSRKDTLVQHQRVHTGERSYDCSECGKAYSRSSHLVQHQRIHTGERPYKCNKCGKAFSRKDTLVQHQRFHTGERPYECSECGKFFSQSSHLIEHWRIHTGARPYECIECGKFFSHNSSLIKHRRVHTGARSYVCSKCGKAFGCKDTLVQHQIIHTGARPYECSECGKAFSRKDTLVQHQKIHTGERPYECGECGKFFSHSSNLIVHQRIHTGAKPYECNECGKCFSHNSSLILHQRVHTGARPYVCSECGKAYISSSHLVQHKKVHTGARPYECSECGKFFSRNSGLILHQRVHTGEKPYVCSECGKAYSRSSHLVRHQKAHTGERAHECNSFGGPLAASLKLV

SEQ ID NO: 75443 - protein, 49 aa, Homo sapiens
MSKRYLQKATKGKLLIIIFIVTLWGKVVSSANHHKGNPLTQEKSSDPQG

SEQ ID NO: 75444 - protein, 93 aa, Homo sapiens
MNLFKTNHVFFLLLLAHIIALESIAWFTVFYFGNGWIPTLITAFVLATSQAQAGWLQHDYGHLSVYRKPKWNHLVHKFVIGHLKGASANWWNH

SEQ ID NO: 75445 - protein, 138 aa, Homo sapiens
  MOD_RES (1)..(1): Any amino acid
XRGVIQSELNYSVILQWVVTMDPEPVLSWTFSGVPCGMGEKLFIRRLSCEQLGTYMCIATNSKKQLVSEPVTISLPKPIMQPTEAEPMEPDPTLSLSGGSAIGLLAAGILGAGALIAGMCFIIIQSLRTDRQRIGICS

SEQ ID NO: 75446 - protein, 1873 aa, Homo sapiens
MAAEEGVASAASAGGSWGTAAMGRVLPMLLVPVPAEAMGQLGSRAQLRTQPEALGSLTAAGSLQVLSLTPGSRGGGRCCLEGPFWHFLWEDSRNSSTPTEKPKLLALGENYELLIYEFNLKDGRCDATILYSCSREALQKLIDDQDISISLLSLRILSFHNNTSLLFINKCVILHIIFPERDAAIRVLNCFTLPLPAQAVDMIIDTQLCRGILFVLSSLGWIYIFDVVDGTYVAHVDLALHKEDMCNEQQQEPAKISSFTSLKVSQDLDVAVIVSSSNSAVALNLNLYFRQHPGHLLCERILEDLPIQGPKGVDEDDPVNSAYNMKLAKFSFQIDRSWKAQLSSLNETIKNSKLEVSCCAPWFQDILHLESPESGNHSTSVQSWAFIPQDIMHGQYNVLQKDHAKTSDPGRSWKIMHISEQEEPIELKCVSVTGFTALFTWEVERMGYTITLWDLETQGMQCFSLGTKCIPVDSSGDQQLCFVLTENGLSLILFGLTQEEFLNRLMIHGSASTVDTLCHLNGWGRCSIPIHALEAGIENRQLDTVNFFLKSKENLFNPSSKSSVSDQFDHLSSHLYLRNVEELIPALDLLCSAIRESYSEPQSKHFSEQLLNLTLSFLNNQIKELFIHTEELDEHLQKGVNILTSYINELRTFMIKFPWKLTDAIDEYDVHENVPKVKESNIWKKLSFEEVIASAILNNKIPEAQTFFRIDSHSAQKLEELIGIGLNLVFDNLKKNNIKEASELLKNMGFDVKGQLLKICFYTTNKNIRDFLVEILKEKNYFSEKEKRTIDFVHQVEKLYLGHFQENMQIQSFPRYWIKEQDFFKHKSVLDSFLKYDCKDEFNKQDHRIVLNWALWWDQLTQESILLPRISPEEYKSYSPEALWRYLTARHDWLNIILWIGEFQTQHSYASLQQNKWPLLTVDVINQNTSCNNYMRNEILDKLARNGVFLASELEDFECFLLRLSRIGGVIQDTLPVQNYKTKEGWDFHSQFILYCLEHSLQHLLYVYLDCYKLSPENCPFLEKKELHEAHPWFEFLVQCRQVASNLTDPKLIFQASLANAQILIPTNQASVSSMLLEGHTLLALATTMYSPGGVSQVVQNEENENCLKKVDPQLLKMALTPYPKLKTALFPQCTPPSVLPSDITIYHLIQSLSPFDPSRLFGWQSANTLAIGDAWSHLPHFSSPDLVNKYAIVERLNFAYYLHNGRPSFAFGTFLVQELIKSKTPKQLIQQVGNEAYVIGLSSFHIPSIGAACVCFLELLGLDSLKLRVDMKVANIILSYKCRNEDAQYSFIRESVAEKLSKLADGEKTTTEELLVLLEEGTWNSIQQQEIKRLSSESSSQWALVVQFCRLHNMKLSISYLRECAKANDWLQFIIHSQLHNYHPAEVKSLIQYFSPVIQDHLRLAFENLPSVPTSKMDSDQVCNKCPQELQGSKQEMTDLFEILLQCSEEPDSWHWLLVEAVKQQAPILSVLASCLQGASAISCLCVWIITSVEDNVATEAMGHIQDSTEDHTWNLEDLSVIWRTLLTRQKSKTLIRGFQLFFKDSPLLLVMEMYELCMFFRNYKEAEAKLLEFQKSLETLNTAATKVHPVIPAMWLEDQVCFLLKLMLQQCKTQYELGKLLQLFVEREHLFSDGPDVKKLCILCQILKDTSIAINHTIITSYSIENLQHECRSILERLQTDGQFALARRVAELAELPVDNLVIKEITQEMQTLKHIEQWSLKQARIDFWKKCHENFKKNSISSKAASSFFSTQAHVACEHPTGWSSMEERHLLLTLAGHWLAQEDVVPLDKLEELEKQIWLCRITQHTLGRNQEETEPRFSRQISTSGELSFDSLAKHWPQGKLVWRICTQRSMLSYKVLSCLRKKHPTFP

SEQ ID NO: 75447 - protein, 76 aa, Homo sapiens
  MOD_RES (1)..(1): Any amino acid
XKNNPGSQKRFPSNCGRDGKLFLWGQALYIIAKLLADELISPKDIDPVQRYVPLKDQRNVSMRFSNQVDNVSLREV

SEQ ID NO: 75448 - protein, 441 aa, Homo sapiens
MAGSADSYTSRPSDSDVSLEEDREAIRQEREQQAAIQLERAKSKPVAFAVKTNVSYCGALDEDVPVPSTAISFDAKDFLHIKEKYNNDWWIGRLVKEGCEIGFIPSPLRLENIRIQQEQKRGRFHGGKSSGNSSSSLGEMVSGTFRATPTSTAKQKQKVTEHIPPYDVVPSMRPVVLVGPSLKGYEVTDMMQKALFDFLKHRFDGRISITRVTADISLAKRSVLNNPSKRAIIERSNTRSSLAEVQSEIERIFELARSLQLVVLDADTINHPAQLIKTSLAPIIVHVKVSSPKEMFDVILDENQLEDACEHLGEYLEAYWRATHTTSSTPMTPLLGRNLGSTALSPYPTAISGLQSQRMRHSNHSTENSPIERRSLMTSDENYHNERARKSRNRLSSSSQHSRDHYPLVEEDYPDSYQDTYKPHRNRGSPGGYSHDSRHRL

SEQ ID NO: 75449 - protein, 143 aa, Homo sapiens
MLERRKVLHIPEFYVGSILRVTTADPYASGKISQFLGICIQRSGRGLGATFILRNVIEGQGVEICFELYNPRVQEIQVVKLEKRLDDSLLYLRDALPEYSTFDVNMKPVVQEPNQKVPVNELKVKMKPKPWSKRWERPNFNIK

SEQ ID NO: 75450 - protein, 29 aa, Homo sapiens
  MOD_RES (1)..(1): Any amino acid
XLQESRPFSVDFFRKMIQFEKEQIFGWII

SEQ ID NO: 75451 - protein, 138 aa, Homo sapiens
MSETSRTAFGGRRAVPPNNSNAAEDDLPTVELQGVVPRGVNLQEFLNVTSVHLFKERWDTNKVDHHTDKYENNKLIVRRGQSFYVQIDFSRPYDPRRDLFRVEYVIGRYPQENKGTYIPVPIVSELQSGKWGAKIVMR

SEQ ID NO: 75452 - protein, 99 aa, Homo sapiens
  MOD_RES (1)..(1): Any amino acid
XTLSCGLSTLCQSGIYINVLDIAPRYSSFLMGASRGFSSIAPVIVPTVSGFLLSQDPEFGWRNVFFLLFAVNLLGLLFYLIFGEADVQEWAKERKLTRL

SEQ ID NO: 75453 - protein, 112 aa, Homo sapiens
MNSLLIGELSPEQPSFEPTKNKELTDEFRELRATVERMGLMKANHVFFLLYLLHILLLDGAAWLTLWVFGTSFLPFLLCAVLLSAVQAQAGWLQHDFGHLSVFSTSKWNHLL

SEQ ID NO: 75454 - protein, 111 aa, Homo sapiens
MDFLRNLFSQTLSLGSQKERLLDELTLEGVARYMQSERCRRVICLVGAGISTSAGIPDFRSPSTGLYDNLEKYHLPYPEAIFEISYFKKHPEPFFALAKELYPGQFKFPHL

SEQ ID NO: 75455 - protein, 205 aa, Homo sapiens
MGDAGSERSKAPSLPPRCPCGFWGSSKTMNLCSKCFADFQKKQPDDDSAPSTSNSQSDLFSEETTSDNNNTSITTPTLSPSQQPLPTELNVTSPSKEEYSQSENEASPVKRPRLLENTERSEETSRSKQKSRRRCFQCQTKLELVQQELGSCRCGYVFCMLHRLPEQHDCTFDHMGRGREEAIMKMVKLDRKVGRSCQRIGEGCS

SEQ ID NO: 75456 - protein, 87 aa, Homo sapiens
MGCLGNSKTEDQRNEEKAQREANKKIEKQLQKDKQVYRATHRLLLLGAGESGKSTIVKQMRILHVNGFNGEGGEEDPQAARSNSDGI

SEQ ID NO: 75457 - protein, 53 aa, Homo sapiens
MVARRRKCAARDPEDRIPSPLGYAASRLLREAVKAQAVGSELAGGAEVMLRLS

SEQ ID NO: 75458 - protein, 577 aa, Homo sapiens
MVVSAGPWSSEKAEMNILEINETLRPQLAEKKQQFRNLKEKCFLTQLAGFLANQQKKYKYEECKDLIKFMLRNERQFKEEKLAEQLKQAEELRQYKVLVHSQERELTQLREKLREGRDASRSLYEHLQALLTPYEPDKSQGQDLQEQLAEGCRLAQHLVQKLSPENDEDEDEDVQVEEAEKVLESSAPREMQKAEEKEVPEDSLEECAITYSNSHGSYDSNQPHRKTKITFEEDKVDSTLIGSSSHVEWEDAVHIIPENESDDEEEEEKGPVSPRNLQESEEEEVPQESWDEGYSTLSIPPEMLASYQSYSSTFHSLEEQQVCMAVDIGRHRWDQVKKEDQEATGPRLSRELLDEKEPEVLQDSLDRCYSTPSGYLELPDLGQPYSSAVYSLEEQYLGLALDVDRIKKDQEEEEDQGPPCPRLSRELLEVVEPEVLQDSLDRCYSTPSSCLEQPDSCQPYGSSFYALEEKHVGFSLDVGEIEKYQEVEEDQDPSCPRLNGVLMEVEEREVLQDSLDRCYSTPSMYFELPDSFQHYRSVFYSFEEQHISFALYVDNRFFTLTVTSLHLVFQMGVIFPQ

SEQ ID NO: 75459 - protein, 705 aa, Homo sapiens
MQSTSNHLWLLSDILGQGATANVFRGRHKKTGDLFAIKVFNNISFLRPVDVQMREFEVLKKLNHKNIVKLFAIEEETTTRHKVLIMEFCPCGSLYTVLEEPSNAYGLPESEFLIVLRDVVGGMNHLRENGIVHRDIKPGNIMRVIGEDGQSVYKLTDFGAARELEDDEQFVSLYGTEEYLHPDMYERAVLRKDHQKKYGATVDLWSIGVTFYHAATGSLPFRPFEGPRRNKEVMYKIITGKPSGAISGVQKAENGPIDWSGDMPVSCSLSRGLQVLLTPVLANILEADQEKCWGFDQFFAETSDILHRMVIHVFSLQQMTAHKIYIHSYNTATIFHELVYKQTKIISSNQELIYEGRRLVLEPGRLAQHFPKTTEENPIFVVSREPLNTIGLIYEKISLPKVHPRYDLDGDASMAKAITGVVCYACRIASTLLLYQELMRKGIRWLIELIKDDYNETVHKKTEVVITLDFCIRNIEKTVKVYEKLMKINLEAAELGEISDIHTKLLRLSSSQGTIETSLQDIDSRLSPGGSLADAWAHQEGTHPKDRNVEKLQVLLNCMTEIYYQFKKDKAERRLAYNEEQIHKFDKQKLYYHATKAMTHFTDECVKKYEAFLNKSEEWIRKMLHLRKQLLSLTNQCFDIEEEVSKYQEYTNELQETLPQKMFTASSGIKHTMTPIYPSSNTLVEMTLGFGSLTMDGGLRNVDCL

SEQ ID NO: 75460 - protein, 150 aa, Homo sapiens
MSQDGASQFQEVIRQELELSVKKELEKILTTASSHEFEHTKKDLDGFRKLFHRFLQEKGPSVDWGKIQRPPEDSIQPYEKIKARGLPDNISSVLNKLVVVKLNGGLGTSMGCKGPKSLIGVRNENTFLDLTVQQIEHLNKTYNTDVPLVL

SEQ ID NO: 75461 - protein, 384 aa, Homo sapiens
  MOD_RES (1)..(1): Any amino acid
XNTENCSYESMGESNNDHFQHFPPPPPILETSSLELASKKPSEIQQVNNPELGLSRAALQMQFNAAERETNGVHPSRGVNGLINGKANSNKSLPTPAVLLSPTKEPPPLLAKPKLDPLKLQQLQNQIRLEQEAGARQPPPAPRSAPPSPPFPPPPAFPELAACTPPASPEPMSALASRSAPAMQSSGSFNYARPKQFIAAQNLGPASGHGTPASSPSSSSLPSPMSPTPRQFGRAPVPPFAQPFGAEPEAPWGSSSPSPPPPPPPVFSPTAAFPVPDVFPLPPPPPPLPSPGQASHCSSPATRFGHSQTPAAFLSALLPSQPPPAAVNALGLPKGVTPAGFPKKASRTARIASDEEIQGTKDAVIQDLERKLRFKEDLLNNGQP

SEQ ID NO: 75462 - protein, 388 aa, Homo sapiens
MQAHELFRYFRMPELVDFRQYVRTLPTNTLMGFGAFAALTTFWYATRPKPLKPPCDLSMQSVEVAGSGGARRSALLDSDEPLVYFYDDVTTLYEGFQRGIQVSNNGPCLGSRKPDQPYEWLSYKQVAELSECIGSALIQKGFKTAPDQFIGIFAQNRPEWVIIEQGCFAYSMVIVPLYDTLGNEAITYIVNKAELSLVFVDKPEKAKLLLEGVENKLIPGLKIIVVMDAYGSELVERGQRCGVEVTSMKAMEDLGRANRRKPKPPAPEDLAVICFTSGTTGNPKGAMVTHRNIVSDCSAFVKATENTVNPCPDDTLISFLPLAHMFERVVECVMLCHGAKIGFFQGDIRLLMDDLKVLQPTVFPVVPRLLNRMFDRVSSKQRSPRTEH

SEQ ID NO: 75463 - protein, 179 aa, Homo sapiens
MGPLSKSQAVGSKMKNDRIKVSLSMKVVNQGTGKDLDPNNVIIEQEERRRRSFQDYTGQKITLEAVLNTTCKKCGCKGHFAKDCFMQPGGTKYSLIPDEEEEKEEAKSAEFEKPDPTRNPSRKRKKEKKKKKHRDRKSSDSDSSDSESDTGKRARHTSKDSKAAKKKKKKKKHKKKHKE

SEQ ID NO: 75464 - protein, 102 aa, Homo sapiens
  MOD_RES (1)..(1): Any amino acid
XTKDAEGLDEIDHAEMELRRGQILWFRGLNRIQTQIDVINTFQTGASFKGVLRRQNMGQHLDVKLVPSSSYVAVAPVKSSPTTSVPAVSSPPMGNQSGQSVP

SEQ ID NO: 75465 - protein, 236 aa, Homo sapiens
MAVLSAPGLRGFRILGLRSSVGPAVQARGVHQSVATDGPSRPLAAAVGARIRLWEAPAWLTPPVPVCLCASTQPALPKARAVAPKPSSRGEYVVAKLDDLVNWARRSSLWPMTFGLACCAVEMMHMAAPRYDMDRFGVVFRASPRQSDVMIVAGTLTNKMAPALRKVYDQMPEPRYVVSMGSCANGGGYYHYSYSVVRGCDRIVPVDIYIPGRAGTAPPTRELETGPAPHGARRPL

SEQ ID NO: 75466 - protein, 66 aa, Homo sapiens
  MOD_RES (1)..(1): Any amino acid
XTNYRANVIANINNCLSFRMSMEQNWQVPQDTLSLLLGPLGELKSHGFDTLLQNLHEDLKPFLSRA

SEQ ID NO: 75467 - protein, 94 aa, Homo sapiens
  MOD_RES (1)..(1): Any amino acid
XPAAITLILSLLVAVFTECTSNVATTTLFLPIFASMSRSIGLNPLYIMLPCTLSASFAFMLPVATPPNAIVFTYGHLKVADMVTQLFLFTPVGL

SEQ ID NO: 75468 - protein, 382 aa, Homo sapiens
RTVMVEEFKQGLAVTDEILQGKSDWSKLLEPPNFFQKYRHYIVLTASASTEENHLEWVGLVESKIRVLVGNLERNEFITLAHVNPQSFPGNKEHHKDNNYVSMWFLGIIFRRVENAESVNIDLTYDIQSFTDTVYRQANNINMLKEGMKIEATHVKKKQLHHYLPAEILQKKKKQSLSDVNRSSGGLQSKRLSLDSSCLDSSRDTDNGTPFNSPASKSDSPSVGETERNSAEPAAVIVEKPLSVPPAQGLSIPVIGAKVDSTVKTVSPPTVCTIPTVVGRNVIPRITTPHNPAQGQPHLNGMSNITKTVTPKRSHSPSIDGTPKRLKDVEKDAIGGESMPIPTIDTSRKKRLPSKELPDSSSPVPANNIRVIKNSIRLTLNR

SEQ ID NO: 75469 - protein, 550 aa, Homo sapiens
MEGKWLLCMLLVLGTAIVEAHDGHDDDVIDIEDDLDDVIEEVEDSKPDTTAPPSSPKVTYKAPVPTGEVYFADSFDRGTLSGWILSKAKKDDTDDEIAKYDGKWEVEEMKESKLPGDKGLVLMSRAKHHAISAKLNKPFLFDTKPLIVQYEVNFQNGIECGGAYVKLLSKTPELNLDQFHDKTPYTIMFGPDKCGEDYKLHFIFRHKNPKTGIYEEKHAKRPDADLKTYFTDKKTHLYTLILNPDNSFEILVDQSVVNSGNLLNDMTPPVNPSREIEDPEDRKPEDWDERPKIPDPEAVKPDDWDEDAPAKIPDEEATKPEGWLDDEPEYVPDPDAEKPEDWDEDMDGEWEAPQIANPRCESAPGCGVWQRPVIDNPNYKGKWKPPMIDNPSYQGIWKPRKIPNPDFFEDLEPFRMTPFSAIGLELWSMTSDIFFDNFIICADRRIVDDWANDGWGLKKAADGAAEPGVVGQMIEAAEERPWLWVVYILTVALPVFLVILFCCSGKKQTSGMEYKKTDAPQPDVKEEEEEKEEEKDKGDEEEEGEEKLVV

SEQ ID NO: 75470 - protein, 86 aa, Homo sapiens
MRQGLLVLALVLVLVLVLAAGSQVQEWYPRESHALNWNKFSGFWYILATATDAQGFLPARDKRKLGASVVKVNKVGQLRVLLAFRR

SEQ ID NO: 75471 - protein, 107 aa, Homo sapiens
  MOD_RES (1)..(1): Any amino acid
XESKFIKDADEEKASLQKSISITSALLTEKDAELEKLRNEVTVLRGENASAKSLHSVVQTLESDKVKLELKVKNLELQLKENKRQLSSSSGNTDTQADEDERAQESQ

SEQ ID NO: 75472 - protein, 72 aa, Homo sapiens
NQPVAFVRRIPWTAASSQLKEHFAQFGHVRRCILPFESLFRDTQWTAKGERPPQANGRKAAQSQPARFTPPK

SEQ ID NO: 75473 - protein, 175 aa, Homo sapiens
MDMDPFLHCVIPNFIQSQDFLEGLQKELMNLDFHEKYNDLYKFQQSDDLKKRREPHISTLRKILFEDFRSWLSDISKIDLESTIDMSCAKYEFTDALLCHDDELEGRRIAFILYLVPPWDRSMGGTLDLYSIDEHFQPKQIVKSLIPSWNKLVFFEVSPVSFHQVSEVLSEEKSR

SEQ ID NO: 75474 - protein, 102 aa, Homo sapiens
  MOD_RES (1)..(1): Any amino acid
XALKRMLNFNVPHIKNSTGEPVWKVLIYDRFGQDIISPLLSVKELRDMGITLHLLLHSDRDPIPDVPAVYFVMPTEENIDRMCQPLTGQISQTRKWKLLWTL

SEQ ID NO: 75475 - protein, 205 aa, Homo sapiens
MTSPSPRIQIISTDSAVASPQRIQGSEPASGPLSVFTSLNKEKIVTDQQTGQKIQIVTAVDASGSPKQQFILTSPDGAGTGKVILASPETSSAKQLIFTTSDNLVPGRIQIVTDSASVERLLGKTDVQRPQVVEYCVVCGDKASGRHYGAVSCEGCKGFFKRSVRKNLTYSCRSNQDCIINKHHRNRCQFCRLKKCLEMGMKMEC

SEQ ID NO: 75476 - protein, 162 aa, Homo sapiens
MSKPHSEAGTAFIQTQQLHAAMADTFLEHMCRLDIDSPPITARNTGIICTIGPASRSVETLKEMIKSGMNVARLNFSHGTHEYHAETIKNVRTATESFASDPILYRPVAVALDTKGPEIRTGLIKGSGTAEVELKKGATLKITLDNAYMEKCDENILWLDYK

SEQ ID NO: 75477 - protein, 1744 aa, Homo sapiens
MRLLWGLIWASSFFTLSLQKPRLLLFSPSVVHLGVPLSVGVQLQDVPRGQVVKGSVFLRNPSRNNVPCSPKVDFTLSSERDFALLSLQVPLKDAKSCGLHQLLRGPEVQLVAHSPWLKDSLSRTTNIQGINLLFSSRRGHLFLQTDQPIYNPGQRVRYRVFALDQKMRPSTDTITVMVENSHGLRVRKKEVYMPSSIFQDDFVIPDISEPGTWKISARFSDGLESNSSTQFEVKKYVLPNFEVKITPGKPYILTVPGHLDEMQLDIQARYIYGKPVQGVAYVRFGLLDEDGKKTFFRGLESQTKLVNGQSHISLSKAEFQDALEKLNMGITDLQGLRLYVAAAIIEYPGGEMEEAELTSWYFVSSPFSLDLSKTKRHLVPGAPFLLQALVREMSGSPASGIPVKVSATVSSPGSVPEVQDIQQNTDGSGQVSIPIIIPQTISELQLSVSAGSPHPAIARLTVAAPPSGGPGFLSIEWPDSRPPRVGDTLNLNLRAVGSGATFSHYYYMILSRGQIVFMNREPKRTLTSVSVFVDHHLAPSFYFVAFYYHGDHPVANSLRVDVQAGACEGKLELSVDGAKQYRNGESVKLHLETDSLALVALGALDTALYAAGSKSHKPLNMGKVFEAMNSYDLGCGPGGGDSALQVFQAAGLAFSDGDQWTLSRKRLSCPKEKTTRKKRNVNFQKAINEKLGQYASPTAKRCCQDGVTRLPMMRSCEQRAARVQQPDCREPFLSCCQFAESLRKKSRDKGQAGLQRALEILQEEDLIDEDDIPVRSFFPENWLWRVETVDRFQILTLWLPDSLTTWEIHGLSLSKTKGLCVATPVQLRVFREFHLHLRLPMSVRRFEQLELRPVLYNYLDKNLTVSVHVSPVEGLCLAGGGGLAQQVLVPAGSARPVAFSVVPTAAAAVSLKVVARGSFEFPVGDAVSKVLQIEKEGAIHREELVYELNPLDHRGRTLEIPGNSDPNMIPDGDFNSYVRVTASDPLDTLGSEGALSPGGVASLLRLPRGCGEQTMIYLAPTLAASRYLDKTEQWSTLPPETKDHAVDLIQKGYMRIQQFRKADGSYAAWLSRDSSTWLTAFVLKVLSLAQEQVGGSPEKLQETSNWLLSQQQADGSFQDPCPVLDRSMQGGLVGNDETVALTAFVTIALHHGLAVFQDEGAEPLKQRVEASISKANSFLGEKASAGLLGAHAAAITAYALTLTKAPVDLLGVAHNNLMAMAQETGDNLYWGSVTGSQSNAVSPTPAPRNPSDPMPQAPALWIETTAYALLHLLLHEGKAEMADQAAAWLTRQGSFQGGFRSTQDTVIALDALSAYWIASHTTEERGLNVTLSSTGRNGFKSHALQLNNRQIRGLEEELQFSLGSKINVKVGGNSKGTLKVLRTYNVLDMKNTTCQDLQIEVTVKGHVEYTMEANEDYEDYEYDELPAKDDPDAPLQPVTPLQLFEGRRNRRRREAPKVVEEQESRVHYTVCIWRNGKVGLSGMAIADVTLLSGFHALRADLEKLTSLSDRYVSHFETEGPHVLLYFDSVPTSRECVGFEAVQEVPVGLVQPASATLYDYYNPERRCSVFYGAPSKSRLLATLCSAEVCQCAEGKCPRQRRALERGLQDEDGYRMKFACYYPRVEYGFQVKVLREDSRAAFRLFETKITQVLHFTKDVKAAANQMRNFLVRASCRLRLEPGKEYLIMGLDGATYDLEGHPQYLLDSNSWIEEMPSERLCRSTRQRAACAQLNDFLQEYGTQGCQV

SEQ ID NO: 75478 - protein, 174 aa, Homo sapiens
MPEETQTQDQPMEEEEVETFAFQAEIAQLMSLIINTFYSNKEIFLRELISNSSDALDKIRYESLTDPSKLDSGKELHINLIPNKQDRTLTIVDTGIGMTKADLINNLGEPMGRGTKVILHLKEDQTEYLEERRIKEIVKKHSQFIGYPITLFVEKERDKEVSDDEAEEKEDKEE

SEQ ID NO: 75479 - protein, 256 aa, Homo sapiens
MIAFLVLAGGFSKFQAEFSLHCETNLDGSCSSSSPPLPVLGLGGLRISSDSSSDIESDLDRDPNSATDSDGSPLSNSQPSFPVEILPFLYLGCAKDSTNLDVLEEFGIKYILNVTPNLPNLFENAGEFKYKQIPISDHWSQNLSQFFPEAISFIDEARGKNCGVLVHCLAGISRSVTVTVAYLMQKLNLSMNDAYDIVKMKKSNISPNFNFMGQLLDFERTLGLSSPCDNRVPAQQLYFTTPSNQNVYQVDSLQST

SEQ ID NO: 75480 - protein, 171 aa, Homo sapiens
  MOD_RES (1)..(1): Any amino acid
XGFPVPNQPVYNQPVYNQPVGAAGVPWMPAPQPPLNCPPGLEYLSQIDQILIHQQIELLEEIQAPPGVPIGYVIQTWHPCLPKFTIQNEKREDVLKISGPCVVCSCCGDVDFEIKSLDEQCVVGKISKHWTGILREAFTDADNFGIQFPLDLDVKMKAVMIGACFLIDFMF

SEQ ID NO: 75481 - protein, 160 aa, Homo sapiens
MESLTLEDVAVDFTWEEWQFLSPAQKDLYRDVMLENYSNLVAVGYQASKPDALSKLERGEETCTTEDEIYSRICSDSGGASGGAYAEIRKIDDPLQHHLQNQSIQKSVKQCHEQNMFGNIVNQNKGHFLLKQDCDTFDLHEKPLKSNLSFENQKRSSGLK

SEQ ID NO: 75482 - protein, 424 aa, Homo sapiens
GKSNIRPPRPELNMCLLPTMVETSKFIHLLCRVAINCEKFTETLVKLSVLVAYEGLPLHLALFPKLWTELCQTQSAMSKNCIKLLCEDPVFAEYIKCILMDERTFLNNNIVYTFMTHFLLKVQSQVFSEANCANLISTLITNLISQYQNLQSDFSNRVEISKASASLNGDLRALALLLSVHTPKQLNPALIPTLQELLSKCRTCLQQRNSLQEQEAKERKTKDDEGATPIKRRRVSSDEEHTVDSCISDMKTETREVLTPTSTSDNETRDSSIIDPGTEQDLPSPENSSVKEYRMEVPSSFSEDMSNIRSQHAEEQSNNGRYDDCKEFKDLHCSKDSTLAEEESEFPSTSISAVLSDLADLRSCDGQALPSQDPEVALSLSCGHSRGLFSHMQQHDILDTLCRTIESTIHVVTRISGKGNQAAS

SEQ ID NO: 75483 - protein, 47 aa, Homo sapiens
MLRFYLFISLLCLSRSDASLDMNEESPLFEEGFLQSEIWEIKLIPPK

SEQ ID NO: 75484 - protein, 160 aa, Homo sapiens
MAGKRSGWSRAALLQLLLGVNLVVMPPTRARSLRFVTLLYRHGDRSPVKTYPKDPYQEEEWPQGFGQLTKEGMLQHWELGQALRQRYHGFLNTSYHRQEVYVRSTDFDRTLMSAEANLAGLFPPNGMQRFNPNISWQPIPVHTVPITEDRSRTETLIHFS

SEQ ID NO: 75485 - protein, 405 aa, Homo sapiens
PHPRSPSREPRAERKRPRMAPADSGPHRDPPTRTAPLPMPEGPEPAVPGEQPGRGHAHAAQGGPLLGQGCQGQPQGEAVGSHSKGHKSSRGASAQKSPPVQESQSERLQAAGADSAGPKTVPSHVFSELWDPSEAWMQANYDLLSAFEAMTSQANPEALSAPTLQEEAAFPGRRVNAKMPVYSGSRPACQLQVPTLRQQCLRVPRNNPDALGDVEGVPYSVLEPVLEGWTPDQPYRTEKDNAALARETDELWRIHCLQDFKEEKPQEHESWRELYLRLRDAREQRLRVVTTKIRSARENKPSGRQTKMICFNSVAKTPYDASRRQEKSAGAADPGNGEMEPAPKPAGSSQAPSGLGDGDGGSVSGGGSSNRHAAPADKTRKQAAKKVAPLMAKAIRDYKGRFSRR

SEQ ID NO: 75486 - protein, 1159 aa, Homo sapiens
MRGQAAAPGPVWILAPLLLLLLLLGRRARAAAGADAGPGPEPCATLVQGKFFGYFSAAAVFPANASRCSWTLRNPDPRRYTLYMKVAKAPVPCSGPGRVRTYQFDSFLESTRTYLGVESFDEVLRLCDPSAPLAFLQASKQFLQMRRQQPPQHDGLRPRAGPPGPTDDFSVEYLVVGNRNPSRAACQMLCRWLDACLAGSRSSHPCGIMQTPCACLGGEAGGPAAGPLAPRGDVCLRDAVAGGPENCLTSLTQDRGGHGATGGWKLWSLWGECTRDCGGGLQTRTRTCLPAPGVEGGGCEGVLEEGRQCNREACGPAGRTSSRSQSLRSTDARRREELGDELQQFGFPAPQTGDPAAEEWSPWSVCSSTCGEGWQTRTRFCVSSSYSTQCSGPLREQRLCNNSAVCPVHGAWDEWSPWSLCSSTCGRGFRDRTRTCRPPQFGGNPCEGPEKQTKFCNIALCPGRAVDGNWNEWSSWSACSASCSQGRQQRTRECNGPSYGGAECQGHWVETRDCFLQQCPVDGKWQAWASWGSCSVTCGAGSQRRERVCSGPFFGGAACQGPQDEYRQCGTQRCPEPHEICDEDNFGAVIWKETPAGEVAAVRCPRNATGLILRRCELDEEGIAYWEPPTYIRCVSIDYRNIQMMTREHLAKAQRGLPGEGVSEVIQTLVEISQDGTSYSGDLLSTIDVLRNMTEIFRRAYYSPTPGDVQNFVQILSNLLAEENRDKWEEAQLAGPNAKELFRLVEDFVDVIGFRMKDLRDAYQVTDNLVLSIHKLPASGATDISFPMKGWRATGDWAKVPEDRVTVSKSVFSTGLTEADEASVFVVGTVLYRNLGSFLALQRNTTVLNSKVISVTVKPPPRSLRTPLEIEFAHMYNGTTNQTCILWDETDVPSSSAPPQLGPWSWRGCRTVPLDALRTRCLCDRLSTFAILAQLSADANMEKATLPSVTLIVGCGVSSLTLLMLVIIYVSVWRYIRSERSVILINFCLSIISSNALILIGQTQTRNKVVCTLVAAFLHFFFLSSFCWVLTEAWQSYMAVTGHLRNRLIRKRFLCLGWGLPALVVAISVGFTKAKGYSTMNYCWLSLEGGLLYAFVGPAAAVVLGLPVELLRGAAAAGADLDVGCARRHRPPLRPLPDPLRCLRLAGGLRHRHGALYPP

SEQ ID NO: 75487 - protein, 77 aa, Homo sapiens
MASFGASLWPDLGACSQHLSLYHSVTVELAASTARHPASSLQEDSVAFEDVAVTFTQEEWALLDPSQKNLCRDVMQE

SEQ ID NO: 75488 - protein, 173 aa, Homo sapiens
  MOD_RES (1)..(1): Any amino acid
XDIMIRLASQANIAQAPASSLPWAFYLEQEAESHSPRESVYIHCPGVFQQIAPSGAPAPSFLFGPQVLAELKEYATEVDVDFVRKAVRAIGRCAIKVEQSAERCVSTLLDLIQTKVNYVVQEAIVVIKDIFRKYPNKYESVIATLCENLDSLDEPEARAAMIWIVGEYAERID

SEQ ID NO: 75489 - protein, 142 aa, Homo sapiens
MTSTGQDSTTTRQRRSRQNPQSPPQDSSVTSKRNIKKGAVPRSIPNLAEVKKKGKMKKLGQAMEEDLIVGLQGMDLNLEAEALAGTGLVLDEQLNEFHCLWDDSFPEGPERLHAIKEQLIQEGLLDRCVSFQARFAEKEELM

SEQ ID NO: 75490 - protein, 472 aa, Homo sapiens
MAEYDLTTRIAHFLDRHLVFPLLEFLSVKEIYNEKELLQGKLDLLSDTNMVDFAMDVYKNLYSDDIPHALREKRTTVVAQLKQLQAETEPIVKMFEDPETTRQMQSTRDGRMLFDYLADKHGFRQEYLDTLYRYAKFQYECGNYSGAAEYLYFFRVLVPATDRNALSSLWGKLASEILMQNWDAAMEDLTRLKETIDNNSVSSPLQSLQQRTWLIHWSLFVFFNHPKGRDNIIDLFLYQPQQGLALSPRLEVQWCSNGLLQPRPPKLRYLNAIQTMCPHILRYLTTAVITNKDVRKRRQVLKDLVKVIQQESYTYKDPITEFVECLYVNFDFDGAQKKLRECESVLVNDFFLVACLEDFIENARLFIFETFCRIHQCISINMLADKLNMTPEEAERWIVNLIRNARLDAKIDSKLGHVVMGNNAVSPYQQVIEKTKSLSFRSQMLAMNIEKKLNQNSRSEAPNWATQDSGFY

SEQ ID NO: 75491 - protein, 31 aa, Homo sapiens
  MOD_RES (1)..(1): Any amino acid
XASPTRTHQLLDRSLRRRAGPGGKGADGCAD

SEQ ID NO: 75492 - protein, 118 aa, Homo sapiens
MAPLRPLLILALLAWVALADQESCKGRCTEGFNVDKKCQCDELCSYYQSCCTDYTAECKPQVTRGDVFTMPEDEYTVYDDGEEKNNATVHEQVGGPSLTSDLQAQSKGNPEQTPVLKP

SEQ ID NO: 75493 - protein, 129 aa, Homo sapiens
MVRYSLDPENPTKSCKSRGSNLRVHFKNTRETAQAIKGMHIRKATKYLKDVTLQKQCVPFRRYNGGVGRCAQAKQWGWTQGRWPKKSAEFLLHMLKNAESNAELKGLDVDSLVIEHIQVNKAPKMRRRT

SEQ ID NO: 75494 - protein, 240 aa, Homo sapiens
MWATLPLLCAGAWLLGVPVCGAAELCVNSLEKFHFKSWMSKHRKTYSTEEYHHRLQTFASNWRKINAHNNGNHTFKMALNQFSDMSFAEIKHKYLWSEPQNCSATKSNYLRGTGPYPPSVDWRKKGNFVSPVKNQGACGSCWTFSTTGALESAIAIATGKMLSLAEQQLVDCAQDFNNHGCQGGLPSQAFEYILYNKGIMGEDTYPYQGKDGYCKFQPGKAIGFVKDVANITITRTGPRR

SEQ ID NO: 75495 - protein, 86 aa, Homo sapiens
  MOD_RES (1)..(1): Any amino acid
XSVSADEAARTAPFHLDLWFYFTLQNWVLDFGRPIAMLVFPLEWFPLNKPSVGDYFHMAYNVITPFLLLKGVTYCDRGGVMLPTPL

SEQ ID NO: 75496 - protein, 106 aa, Homo sapiens
MWLQDRIATFFFPKGMMLTTAALMLFFLHLGIFIRDVHNFCITYHYDHMSFHYTVVLMFSQVISICWAAMGSLYAEMTENKYVCFSALTILMLNGAMFFNRLSLEF

SEQ ID NO: 75497 - protein, 101 aa, Homo sapiens
MAASRYRRFLKLCEEWPVDETKRGRDLGAYLRQRVAQAFREGENTQYPRPRDTSFSGLSLEEYKLILSTDTLEELKEIDKGMWKKLQEKFAPKGPEEDHKA

SEQ ID NO: 75498 - protein, 83 aa, Homo sapiens
LMARTSAHFARLRDFIKLEFPPGFPVKIEIPLFHVLNARITFGNVNGCSTAEESVSQNVEGTQADSGTFRTSFEWRDQPDKHL

SEQ ID NO: 75499 - protein, 169 aa, Homo sapiens
MDFLRNLFSQTLSLGSQKERLLDELTLEGVARYMQSERCRRVICLVGAGISTSAGIPDFRSPSTGLYDNLEKYHLPYPEAIFEISYFKKHPEPFFALAKELYPGQFKPTICHYFMRLLKDKGLLLRCYTQNIDTLERIAGLEQEDLVEAHGTFYTSHCVSASCRHEYPL

SEQ ID NO: 75500 - protein, 139 aa, Homo sapiens
MGNHLSLLLFAMVACYPGNGTGYVRHVDNPNGDGRCVTCIYYLNKDWDAKVSGGILRIFPEGKAQFADIEPKFDRLLFFWSDRRNPHEVQPAYATRYAITVWYFDADERARAKVKYLTGEKGVRVELNKPSDSVGKDVF

SEQ ID NO: 75501 - protein, 796 aa, Homo sapiens
MGRVGYWTLLVLPALLVWRGPAPSAAAEKGPPALNIAVMLGHSHDVTERELRTLWGPEQAAGLPLDVNVVALLMNRTDPKSLITHVCDLMSGARIHGLVFGDDTDQEAVAQMLDFISSHTFVPILGIHGGASMIMADKDPTSTFFQFGASIQQQATVMLKIMQDYDWHVFSLVTTIFPGYREFISFVKTTVDNSFVGWDMQNVITLDTSFEDAKTQVQLKKIHSSVILLYCSKDEAVLILSEARSLGLTGYDFFWIVPSLVSGNTELIPKEFPSGLISVSYDDWDYSLEARVRDGIGILTTAASSMLEKFSYIPEAKASCYGQMERPEVPMHTLHPFMVNVTWDGKDLSFTEEGYQVHPRLVVIVLNKDREWEKVGKWENHTLSLRHAVWPRYKSFSDCEPDDNHLSIVTLEEAPFVIVEDIDPLTETCVRNTVPCRKFVKINNSTNEGMNVKKCCKGFCIDILKKLSRTVKFTYDLYLVTNGKHGKKVNNVWNGMIGEVVYQRAVMAVGSLTINEERSEVVDFSVPFVETGISVMVSRSNGTVSPSAFLEPFSASVWVMMFVMLLIVSAIAVFVFEYFSPVGYNRNLAKGKAPHGPSFTIGKAIWLLWGLVFNNSVPVQNPKGTTSKIMVSVWAFFAVIFLASYTANLAAFMIQEEFVDQVTGLSDKKFQRPHDYSPPFRFGTVPNGSTERNIRNNYPYMHQYMTKFNQKGVEDALVSLKTGKLDAFIYDAAVLNYKAGRDEGCKLVTIGSGYIFATTGYGIALQKGSPWKRQIDLALLQFVGDGHLQLHSWSAH

SEQ ID NO: 75502 - protein, 287 aa, Homo sapiens
MEMDIATFMAKMFSPPVSSGKNGPTSLASGHFTGSNVEDRSSSGSWGNGGHPSPSRNYGDGTPYDHMTSRDLGSHDNLSPPFVNSRIQSKTERGSYSSYGRESNLQGCHQQSLLGGDMDMGNPGTLSPTKPGSQYYQYSSNNPRRRPLHSSAMEVQTKKVRKVPPGLPSSVYAPSASTADYNRDSPGYPSSKPATSTFPSSFFMQDGHHSSDPWSSSSGMNQPGYAGMLGNSSHIPQSSSYCSLHPHERLSYPSHSSADINSSLPPMSTFHRSGTNHYSTSSCTPPA

SEQ ID NO: 75503 - protein, 204 aa, Homo sapiens
MALVSGISLDPEAAIGVTKRPPPKWVDGVDEIQYDVGRIKQKMKELASLHDKHLNRPTLDDSSEEEHAIEITTQEITQLFHRCQRAVQALPSRARACSEQEGRLLGNVVASLAQALQELSTSFRHAQSGYLKRMKNREERSQHFFDTSVPLMDDGDDNTLYHRGFTEDQLVLVEQNTLMVEEREREIRQIVQSISDLNEIFRDL

SEQ ID NO: 75504 - protein, 32 aa, Homo sapiens
MPVMPIPRRVRSFHGPHTTCLHAACGPVRASH

SEQ ID NO: 75505 - protein, 389 aa, Homo sapiens
LTDRQTDTAPSPSYHLLPGRRRTVDAAASRGQGPEPAPGGGVEGVGARGVALKLFVQLLGCSRFGGAVVRAGEAEPSGAARSASSGREEPQPEEGEEEEEKEEERGPQWRLGARKPGSWTGEAAVCADSAPAARAPQALARASGRGGRVARRGAEESGPPHSPSRRGSASRAGPGRASETMNFLLSWVHWSLALLLYLHHAKWSQAAPMAEGGGQNHHEVVKFMDVYQRSYCHPIETLVDIFQEYPDEIEYIFKPSCVPLMRCGGCCNDEGLECVPTEESNITMQIMRIKPHQGQHIGEMSFLQHNKCECRPKKDRARQEKKSVRGKGKGQKRKRKKSRPCGPCSERRKHLFVQDPQTCKCSCKNTDSRCKARQLELNERTCRCDKPRR

SEQ ID NO: 75506 - protein, 16 aa, Homo sapiens
MTGSLVSDRSHDDIVT

SEQ ID NO: 75507 - protein, 182 aa, Homo sapiens
MHVIDHTKGQPSEGESRNVLTESARIARGKITDLANLSAANHDAAIFPGGFGAAKNLSTFAVDGKDCKVNKEVERVLKEFHQAGKPIGLCCIAPVLAAKVLRGVEVTVGHEQEEGGKWPYAGTAEAIKALGAKHCVKEVVEAHVDQKNKVVTTPAFMCETALHYIHDGIGAMVRKVLELTGK

SEQ ID NO: 75508 - protein, 101 aa, Homo sapiens
MPKAPKGKSAGREKKVIHPYSRKAAQITREAHKQEKKEKLKNEKALRLNLVGEKLQWFQNHLDPQKKRYSKKDACELIERIRENVIRSLYTFLDYRLLFIF

SEQ ID NO: 75509 - protein, 150 aa, Homo sapiens
MRGAGPSPRQSPRTLRPDPGPAMSFFRRKVKGKEQEKTSDVKSIKASISVHSPQKSTKNHALLEAAGPSHVAINAISANMDSFSSSRTATLKKQPSHMEAAHFGDLDLVWTTRLKRPNQAFLRPLNKSCTTLLSSLTSFNSWNFGEWSIW

SEQ ID NO: 75510 - protein, 128 aa, Homo sapiens
  MOD_RES (1)..(1): Any amino acid
XRACDGNVDHAATHITNRREELAQIRKEEKEKKRRRLENIRFLKGMGYSTHAAQQVLHAASGNLDEALKVAAPSGPLALSLSSGSCPELPPWLSSILPGSLLWAAPSSGSEGQVSPGLQPRHRLREAT

SEQ ID NO: 75511 - protein, 174 aa, Homo sapiens
ELRGTREGTGVLLGNAEGGCFYVPGGKLVARGEFWDIVAITAADEKQELAYNQQLSEKLKRKELPLGVQYHVFVDPAGAKIGNGGSTLCALQCLEKLYGDKWNSFTILLIHSGGYSQRLPNASALGKIFTALPLGNPIYQMLELKLAMYIDFPLNMNPGILVTCADDIELYSIG

SEQ ID NO: 75512 - protein, 139 aa, Homo sapiens
  MOD_RES (1)..(1): Any amino acid
XRPAPKDKWSNFDPTGLERAAKAARELEHSRYAKDALNLAQMQEQTLQLEQQSKLKEYEAAVEQLKSEQIRAQAEERRKTLSEETRQHQARAQYQDKLARQRYEDQLKQQQLLNEENLRKQEESVQKQEAMRRVLGLQA

SEQ ID NO: 75513 - protein, 62 aa, Homo sapiens
  MOD_RES (1)..(1): Any amino acid
XMILYVSKLNKIIHFPDFDKKIPVKCLEKCQHLALDYLSDRPKKHMLTASVIRGAQCGGSRL

SEQ ID NO: 75514 - protein, 196 aa, Homo sapiens
  MOD_RES (1)..(1): Any amino acid
XLLALAAWLRHEWARFIWLSAFAIIVFRVELCLFLGLLLLLALGNRKVSVVRALRHAVPAGILCLGLTVAVDSYFWRQLTWPEGKVLWYNTVLNKSSNWGTSPLLWYFYSALPRGLGCSLLFIPLGLVDRRTHAPTVLALGFMALYSLLPHKELRFIIYAFPMLNITAARGCSYLWRRNAEAAPAGAPPDRRPSAH

SEQ ID NO: 75515 - protein, 127 aa, Homo sapiens
NGGIYLLANQKGCDGDRLYYDGCAMIAMNGSVFAQGSQFSLDDVLGGQGAVTLGSSQRTTGCVNRSPCLHGHLRPGSPDGHAGSGGRPELQGGDFISKPGGQQGEPLPQSEGGLCPLVPRGLAGTHL

SEQ ID NO: 75516 - protein, 79 aa, Homo sapiens
MRQAFGQWTQGYGRDDRQVQPCQHRSGLGMDPKRVRRWNKLPAHMVSGRMRRLQGTERTVSLSTRRHPVLGCRSWRLQP

SEQ ID NO: 75517 - protein, 61 aa, Homo sapiens
MSSRSVLSPVVGTDAPDQHLELKKPQELKEMERLPLGLTVTLAGVQRRNLSSLQLPPPWLK

SEQ ID NO: 75518 - protein, 204 aa, Homo sapiens
MALSGSTPAPCWEEDECLDYYGMLSLHRMFEVVGGQLTECELELLAFLLDEAPGAAGGLARARSGLELLLELERRGQCDESNLRLLGQLLRVLARHDLLPHLARKRRRPVSPERYSYGTSSSSKRTEGSCRRRRQSSSSANSQQGQWETGSPPTKRQRRSRGRPSGGARRRRRGAPAAPQQQSEPARPSSEGKVTCDGETGSER

SEQ ID NO: 75519 - protein, 221 aa, Homo sapiens
MLSATPLYGNVHSWMNSERVRMCGASEDRKILVNDGDASKARLELREENPLNHNVVDASTAHRIDGLAALSMDRTGLIREGLRVPGNIVYSSLCGLGSEKGREAATSTLGGLGFSSERNPEMQFKPNTPETVEASAVSGKPPNGFSAIYKTPPGIQKSAVATAEALGLDRPASDKQSPLNINGASYLRLPWVNPYMEGATPAIYPFLDSPNKYSLNMYKAL

SEQ ID NO: 75520 - protein, 152 aa, Homo sapiens
MALLLVSLLAFLSLGSGCHHRICHCSNRVFLCQESKVTEIPSDLPRNAIELRFVLTKLRVIQKGAFSGFGDLEKIEISQNDVLEVIEADVFSNLPKLHEIRIEKANNLLYINPEAFQNLPNLQYLSFSSFVLENAKVENGDHRAFSDRTNAL

SEQ ID NO: 75521 - protein, 124 aa, Homo sapiens
MAVAVRTLQEQLEKAKESLKNVDENIRKLTGRDPNDVRPIQARLLALSGPGGGRGRGSLLLRRGFSDSGGGPPAKQRDLEGAVSRLGGERRTRRESRQESDPEDDDVKKEPANIWLVDGYPSKI

SEQ ID NO: 75522 - protein, 146 aa, Homo sapiens
MGDERPHYYGKHGTPQKYDPTFKGPIYNRNKPYLFYFNIVKCASPLVLLEFQCPTPQICVEKCPDRYLTYLNARSSRDFEYYKQFCVPGFKNNKGVAEVLQDGDCPAVLIPSKPLARRCFPAIHAYKGVLMVGNETTYEDGHGSRK

SEQ ID NO: 75523 - protein, 89 aa, Homo sapiens
MLERLYQTKDGSQRGGIFSQFANQNLSKKIPGVKLCESIVYGEVSMGQSSLNRHIKDHSGHEPKEYQEYGEKPDTRNQCWKPFSSHHSF

SEQ ID NO: 75524 - protein, 118 aa, Homo sapiens
MLPLLIICLLPAIEGKNCLRCWPELSALIDYDLQILWVTPGPPTELSQNRDHLEEETAKFFTQVHQAIKTLRDDKTVLLEEIYTHKNLFTERLNKISDGLKEKAPQFLYLLTLPGSLQ

SEQ ID NO: 75525 - protein, 150 aa, Homo sapiens
VHDLCDEEKSYPVPKGSLDIIILIFVLSAVVPDKMQKAINRLSRLLKPGGMVLLRDYGRYDMAQLRFKKGQCLSGNFYVRGDGTRVYFFTQEELDTLFTTAGLEKVQNLVDRRLQFRQARWLTPVIPALWEAEAGRSPEVRSSRPAWPTW

SEQ ID NO: 75526 - protein, 624 aa, Homo sapiens
MGNFLSRENKVQVISESDRLYFATLRNRPKSTVNTHYFSIDEELVYENFYADFGPLNLAMVYRYCCKLNKKLKSYSLSRKKIVHYTCFDQRKRANAAFLIGAYAVIYLKKTPEEAYRALLSGSNPPYLPFRDASFGNCTYNLTILDCLQGIRKGLQHGFFDFETFDVDEYEHYERVENGDFNWIVPGKFLAFSGPHPKSKIENGYPLHAPEAYFPYFKKHNVTAVVRLNKKIYEAKRFTDAGFEHYDLFFIDGSTPSDNIVRRFLNICENTEGAIAVHCKAGLGRTGTLIACYVMKHYRFTHAEIIAWIRICRPGSIIGPQQHFLEEKQASLWVQGDIFRSKLKNRPSSEGSINKILSGLDDMSIGGNLSKTQNMERFGEDNLEDDDVEMKNGITQGDKLRALKSQRQPRTSPSCAFRSDDTKGHPRAVSQPFRLSSSLQGSAVTLKTSKMALSPSATAKRINRTSLSSGATVRSFSINSRLASSLGNLNAATDDPENKKTSSSSKAGFTASPFTNLLNGSSQPTTRNYPELNNNQYNRSSNSNGGNLNSPPGPHSAKTEEHTTILRPSYTGLSSSSARFLSRSIPVSAQTPPPGPQNPECNFCALPSQPRLPPKKFNSAKEAF

SEQ ID NO: 75527 - protein, 115 aa, Homo sapiens
MQTLQNVSMVQSEISEILNKSIIEVENPQFSSEKNLVFGTRIEKDLPTENQEENLSMEKSHHFEDSKTLHSVEEKLSGDSVNSLPQSVNVPSQIHSEDTLTLRTSTDNLSSNIII

SEQ ID NO: 75528 - protein, 121 aa, Homo sapiens
  MOD_RES (1)..(1): Any amino acid
XSTDASTRDSADRTIIAWDFRTSAKISNQIFHERFTCPSLALHPREPVFLAQTNGNYLALFSTVWPYRMSRRRRYEGHKVLLSLSPRRMLSPSPKPPGSPGHGPWGAWSLCLGGSCFLFPG

SEQ ID NO: 75529 - protein, 12 aa, Homo sapiens
MTHGEELGSDVH

SEQ ID NO: 75530 - protein, 85 aa, Homo sapiens
MLENYSNLVSVGYQASKPDALFKLEQGEPWTVENEIHSQICPEIKKVDNHLQMHSQKQRCLKRVEQCHKHNAFGNIIHQRKSDFP

SEQ ID NO: 75531 - protein, 45 aa, Homo sapiens
MKVLGHRLELLTGSQNRGFPNHGFMILRPPAPRRDHGRAAGAAIP

SEQ ID NO: 75532 - protein, 1112 aa, Homo sapiens
MVCGCSALLPLPNPRPTMPATPNFLANPSSSSRWIPLQPMPVAWAFVQKTSALLWLLLLGTSLSPAWGQAKIPLETVKLWADTFGGDLYNTVTKYSGSLLLQKKYKDVESSLKIEEVDGLELVRKFSEDMENMLRRKVEAVQNLVEAAEEADLNHEFNESLVFDYYNSVLINERDEKGNFVELGAEFLLESNAHFSNLPVNTSISSVQLPTNVYNKDPDILNGVYMSEALNAVFVENFQRDPTLTWQYFGSATGFFRIYPGIKWTPDENGVITFDCRNRGWYIQAATSPKDIVILVDVSGSMKGLRMTIAKHTITTILDTLGENDFINIIAYNDYVHYIEPCFKGILVQADRDNREHFKLLVEELMVKGVGVVDQALREAFQILKQFQEAKQGSLCNQAIMLISDGAVEDYEPVFEKYNWPDCKVRVFTYLIGREVSFADRMKWIACNNKGYYTQISTLADTQENVMEYLHVLSRPMVINHDHDIIWTEAYMDSKLLSSQAQSLTLLTTVAMPVFSKKNETRSHGILLGVVGSDVALRELMKLAPRYKYREGKKLKPKPNYNSVDLSEVEWEDQAESLRTAMINRETGTLSMDVKVPMDKGKRVLFLTNDYFFTDISDTPFSLGVVLSRGHGEYILLGNTSVEEGLHDLLHPDLALAGDWIYCITDIDPDHRKLSQLEAMIRFLTRKDPDLECDEELVREVLFDAVVTAPMEAYWTALALNMSEESEHVVDMAFLGTRAGLLRSSLFVGSEKVSDRKFLTPEDEASVFTLDRFPLWYRQASEHPAGSFVFNLRWAEGPESAGEPMVVTASTAVAVTVDKRTAIAAAAGVQMKLEFLQRKFWAATRQCSTVDGPCTQSCEDSDLDCFVIDNNGFILISKRSRETGRFLGEVDGAVLTQLLSMGVFSQVTMYDYQAMCKPSSHHHSAAQPLVSPISAFLTATRWLLQELVLFLLEWSVWGSWYDRGAEAKSVFHHSHKHKKQDPLQPCDTEYPVFVYQPAIREANGIVECGPCQKVFVVQQIPNSNLLLLVTDPTCDCSIFPPVLQEATEVKYNASVKCDRMRSQKLRRRPDSCHAFHPEENAQDCGGASDTSASPPLLLLPVCAWGLLPQLLR

SEQ ID NO: 75533 - protein, 84 aa, Homo sapiens
MSNPSAPPPYEDRNPLYPGPPPPGGYGQPSVLPGGYPAYPGYPQPGYGHPAGYPQPMPPTHPMPMNYGPGHGYDGEERAVSDSF

SEQ ID NO: 75534 - protein, 63 aa, Homo sapiens
MAVSRHLTRGRKMAHVIAACLYLVCRTEGTPHMLLDLSDLLQVNVYVLGKTFLLLARELCINA

SEQ ID NO: 75535 - protein, 152 aa, Homo sapiens
  MOD_RES (1)..(1): Any amino acid
XPPPSQQVNYIASQPDGKQLQGIPSSSHVSNNMSTPVLPAPTAAPGNTGMVQGPSSGNTSSSSHSKASNAAVKLAESKVSVAVEASADSSKTDKKLQIQEKAAQEVKLAIKPFYQNKDITKEEYKEIVRKAVDKVSYGFSGVCARCFEPPLF

SEQ ID NO: 75536 - protein, 51 aa, Homo sapiens
MWFMYLLSWLSLFIQVAFITLAVAAGLYYLAELIEEYTVATSRIIKYMIWD

SEQ ID NO: 75537 - protein, 210 aa, Homo sapiens
MEKTHRGPGLAPGQIYTYPARCWRKKRRLNILEDPRLRPCEYKIDCEAPLKKEGGLPEGPVLEALLCAETGEKKIELKEEETIMDCQKQQLLEFPHDLEVEDLEDDIPRRKNRAKGKAYGIGGLRKRQDTASLEDRDKPYVCDICGKRYKNRPGLSYHYTHTHLAEEEGEENAERHALPFHRKNNHKQFYKELAWVPEAQRKHTAKKAPD

SEQ ID NO: 75538 - protein, 149 aa, Homo sapiens
  MOD_RES (1)..(1): Any amino acid
XGDSQTSVCITIEPGLLLKGDILLKCYHKKFRSPARDVIFRVQFHTCAIHDLGVVFGKEDLDDAFKDDRFPEYGKVEFVFSYGPEKIQGMEHLENGPSVSVDYNTSDPLIRWDSYDNFSGHRDDGMEGAQHPQIGQDTPPGPSDPPGCL

SEQ ID NO: 75539 - protein, 100 aa, Homo sapiens
MSLPSRQTAIIVNPPPPEYINTKKNGRLTNQLQYLQKVVLKDLWKHSFSWPFQRPVDAVKLQLPDYYTIIKNPMDLNTIKKRLENKYYAKASECIEDFNT

SEQ ID NO: 75540 - protein, 326 aa, Homo sapiens
MVQLEQKVSKRMLAGGVRSMPSPLLACWQPILLLVLGSVLSGSATGCPPRCECSAQDRAVLCHRKRFVAVPEGIPTETRLLDLGKNRIKTLNQDEFASFPHLEELELNENIVSAVEPGAFNNLFNLRTLGLRSNRLKLIPLGVFTGLSNLTKLDISENKIVILLDYMFQDLYNLKSLEVGDNDLVYISHRAFSGLNSLEQLTLEKCNLTSIPTEALSHLHGLIVLRLRHLNINAIRDYSFKRLYRLKVLEISHWPYLDTMTPNCLYGLNLTSLSITHCNLTAVPYLAVRHLVYLRFLNLSYNPISTIEGSMLHELLRLQEIQLVGG

SEQ ID NO: 75541 - protein, 1106 aa, Homo sapiens
LKEKVPEEKVKPGPPKVPEKSVRLVVNYLRTQKAVVRVSPEVPLQNILPVICAKCEVSPEHVVLLRDNIAGEELELSKSLNELGIKELYAWDNRRETFRKSSLGNDETDKEKKKFLGFFKVNKRSNSKAEQLVLSGADSDEDTSRAAPGRGLNGCLTTPNSPSMHSRSLTLGPSLSLGSISGVSVKSEMKKRRAPPPPGSGPPVQDKASEKVSLGSQIDLQKKKRRAPAPPPPQPPPPSPLIPNRTEDKEENRKSTMVSLPLGSGSHCSPDGAPQVLSEAEETVSVGSCFASEDTTEDSGVMSSPSDIVSLDSQQDSMKYKDKWATDQEDCSDQDLAGTPDLGPQKSPLWEKNGSENSHLRTEKAVTASNDEEDLLIAGEFRKTLAELDEDLEEMEDSYETDTSSLTSSIHGASNHCPQDAMIPHGDTDAIPVTFIGEVSDDPVDSGLFSNRNNNAGSFDSEGVASRRDSLAPLQAEHSQPHEKAREEVPALHPASHDVGKGIRVALSNISKDGNLMETAPRVTSFASNLHTDNLNAKVKDKVYGCADGERTQATERVNSQPVNEKDSNDKNAALAPTSWHQRGQNPGKSYRLKHGLTTYKIIPPKSEMRCYDRDVSLSTGAIKIDELGNLVSPHATGIRIISLSSSVPEAESQPIGKVREFWRCNSVEKHLGRPSESSARGPPSTPVPTQTQNPESRLQADPKPISPQQKSAHHEGRNPLGEGRNQPPTMGMGHVRVPAAHTTEVTFLKPQRRTSSQYVASAIAKRIGAPKVHADVVRPHGYAEKGYAGKAPVLAAPPVTVKDDRTSSPHSETQGWKDGAQWPCVTPPNNHGEDLAVGAPPRGEVIGPHRKLSTQDRPAAIHRSSCFSLVQSSQRDRVSVGQSCGFSGKQSTSSQEASSASEPRRAPDGTDPPPPHTSDTQACSRELVNGSVRAPGHGEPSHPPGGSGTESHILLEREEKPSVFSTDGNETDSIWPPSIFGPKKKFKPVVQRPVPKDTSLHSALMEAIHSAGGKDRLRKTAEHTGEGRPAKLSYTEAEGERSALLAAIRGHSGTCSLRKALSAPRTASRFSTGTLSNTADARQALMDAIRSGTGAARLRKVPLLV

SEQ ID NO: 75542 - protein, 35 aa, Homo sapiens
MTASREDWGDQRCLTALPYICKRSNVTKETQPPDL

SEQ ID NO: 75543 - protein, 1854 aa, Homo sapiens
MEPSSPQDEGLRKKQPKKPVPEILPRPPRALFCLTLENPLRKACISIVEWKPFETIILLTIFANCVALAVYLPMPEDDNNSLNLGLEKLEYFFLIVFSIEAAMKIIAYGFLFHQDAYLRSGWNVLDFTIVFLGVFTVILEQVNVIQSHTAPMSSKGAGLDVKALRAFRVLRPLRLVSGVPSLQVVLNSIFKAMLPLFHIALLVLFMVIIYAIIGLELFKGKMHKTCYFIGTDIVATVENEEPSPCARTGSGRRCTINGSECRGGWPGPNHGITHFDNFGFSMLTVYQCITMEGWTDVLYWVNDAIGNEWPWIYFVTLILLGSFFILNLVLGVLSGEFTKEREKAKSRGTFQKLREKQQLDEDLRGYMSWITQGEVMDVEDFREGKLSLDEGGSDTESLYEIAGLNKIIQFIRHWRQWNRIFRWKCHDIVKSKVFYWLVILIVALNTLSIASEHHNQPLWLTRLQDIANRVLLSLFTTEMLMKMYGLGLRQYFMSIFNRFDCFVVCSGILEILLVESGAMTPLGISVLRCIRLLRIFKITKYWTSLSNLVASLLNSIRSIASLLLLLFLFIVIFALLGMQLFGGRYDFEDTEVRRSNFDNFPQALISVFQVLTGEDWTSMMYNGIMAYGGPSYPGMLVCIYFIILFVCGNYILLNVFLAIAVDNLAEAESLTSAQKAKAEEKKRRKMSKGLPDKSEEEKSTMAKKLEQKPKGEGIPTTAKLKIDEFESNVNEVKDPYPSADFPGDDEEDEPEIPLSPRPRPLAELQLKEKAVPIPEASSFFIFSPTNKIRVLCHRIVNATWFTNFILLFILLSSAALAAEDPIRADSMRNQILKHFDIGFTSVFTVEIVLKMTTYGAFLHKGSFCRNYFNMLDLLVVAVSLISMGLESSAISVVKILRVLRVLRPLRAINRAKGLKHVVQCMFVAISTIGNIVLVTTLLQFMFACIGVQLFKGKFFRCTDLSKMTEEECRGYYYVYKDGDPMQIELRHREWVHSDFHFDNVLSAMMSLFTVSTFEGWPQLLYKAIDSNAEDVGPIYNNRVEMAIFFIIYIILIAFFMMNIFVGFVIVTFQEQGETEYKNCELDKNQRQCVQYALKARPLRCYIPKNPYQYQVWYIVTSSYFEYLMFALIMLNTICLGMQHYNQSEQMNHISDILNVAFTIIFTLEMILKLMAFKARGYFGDPWNVFDFLIVIGSIIDVILSEIDDPDESARISSAFFRLFRVMRLIKLLSRAEGVRTLLWTFIKSFQALPYVALLIVMLFFIYAVIGMQMFGKIALVDGTQINRNNNFQTFPQAVLLLFRCATGEAWQEILLACSYGKLCDPESDYAPGEEYTCGTNFAYYYFISFYMLCAFLVINLFVAVIMDNFDYLTRDWSILGPHHLDEFKAIWAEYDPEAKGRIKHLDVVTLLRRIQPPLGFGKFCPHRVACKRLVGMNMPLNSDGTVTFNATLFALVRTALKIKTEGNFEQANEELRAIIKKIWKRTSMKLLDQVIPPIGDDEVTVGKFYATFLIQEHFRKFMKRQEEYYGYRPKKDIVQIQAGLRTIEEEAAPEICRTVSGDLAAEEELERAMVEAAMEEGIFRRTGGLFGQVDNFLERTNSLPPVMANQRPLQFAEIEMEEMESPVFLEDFPQDPRTNPLARANTNNANANVAYGNSNHSNSHVFSSVHYEREFPEETETPATRGRALGQPCRVLGPHSKPCVEMLKGLLTQRAMPRGQAPPAPCQCPRVESSMPEDRKSSTPGSLHEETPHSRSTRENTSRCSAPATALLIQKALVRGGLGTLAADANFIMATGQALADACQMEPEEVEIMATELLKGREAPEGMASSLGCLNLGSSLGSLDQHQGSQETLIPPRL

SEQ ID NO: 75544 - protein, 41 aa, Homo sapiens
MVESIKHCIVLLQIAKSTILVRNLLVLPLVLVCMGCHNKIP

SEQ ID NO: 75545 - protein, 219 aa, Homo sapiens
  MOD_RES (1)..(1): Any amino acid
XLDVVGDSAVDEFEKQRPSRKQKSLGLLCQKFLARYPSYPLSTEKTTISLDEVAVSLGVERRRIYDIVNVLESLHLVSRVAKNQYGWHGRHSLPKTLRNLQRLGEEQKYEEQMAYLQQKELDLIDYKFGERKKDGDPDSQEQQLLDFSEPDCPSSSANSRKDKSLRIMSQKFVMLFLVSKTKIVTLDVAAKILIEESQDAPDHSKFKSKNLHLHQLTST

SEQ ID NO: 75546 - protein, 1401 aa, Homo sapiens
MMNCWFSCTPKNRHAADWNKYDDRLMKAAERGDVEKVTSILAKKGVNPGKLDVEGRSVFHVVTSKGNLECLNAILIHGVDITTSDTAGRNALHLAAKYGHALCLQKLLQYNCPTEHADLQGRTALHDAAMADCPSSIQLLCDHGASVNAKDVDGRTPLVLATQMSRPTICQLLIDRGADVNSRDKQNRTALMLGCEYGCRDAVEVLIKNGADISLLDALGHDSSYYARIGDNLDILTLLKTASENTNKGRELWKKGPSLQQRNLTHMQDEVNVKSHQREHQNIQDLEIENEDLKERLRKIQQEQRILLDKVNGLQLQLNEEVMVADDLESEREKLKSLLAAKEKQHEESLRTIEALKNRFKYFESDHLGSGSHFRKEDMLLKQGQMYMADSQCTSPGIPAHMQSRSMLRPLELSLPSQTSYSENEILKKELEAMRTFCESAKQDRLKLQNELAHKVAECKALALECERVKEDSDEQIKQLEDALKDVQKRMYESEGKVKQMQTHFLALKEHLTSEAASGNHRLTEELKDQLKDLKVKYEGASAEVGKLRNQIKQNEMIVEEFKRDEGKLIEENKRLQKELSMCEMEREKKGRKVTEMEGQAKELSAKLALSIPAEKFENMKSSLSNEVNEKAKKLVEMEREHEKSLSEIRQLKRELENVKAKLAQHVKPEEHEQVKSRLEQKSGELGKKITELTLKNQTLQKEIEKVYLDNKLLKEQAHNLTIEMKNHYVPLKVSEDMKKSHDAIIDDLNRKLLDVTQKYTEKKLEMEKLLLENDSLSKDVSRLETVFVPPEKHEKEIIALKSNIVELKKQLSELKKKCGEDQEKIHALTSENTNLKKMMSNQYVPVKTHEEVKMTLNDTLAKTNRELLDVKKKFEDINQEFVKIKDKNEILKRNLENTQNQIKAEYISLAEHEAKMSSLSQSMRKVQDSNAEILANYRKGQEEIVTLHAEIKAQKKELDTIQECIKVKYAPIVSFEECERKFKATEKELKDQLSEQTQKYSVSEEEVKKNKQENDKLKKEIFTLQKDLRDKTVLIEKSHEMERALSRKTDELNKQLKDLSQKYTEVKNVKEKLVEENAKQTSEILAVQNLLQKQHVPLEQVEALKKSLNGTIENLKEELKSMQRCYEKEQQTVTKLHQLLENQKNSSVPLAEHLQIKEAFEKEVGIIKASLREKEEESQNKMEEVSKLQSEVQNTKQALKKLETREVVDLSKYKATKSDLETQISSLNEKLANLNRKYEEVCEEVLHAKKKEISAKDEKELLHFSIEQEIKDQKERCDKSLTTITELQRRIQESAKQIEAKDNKITELLNDVERLKQALNGLSQLTYTSGNPTKRQSQLIDTLQHQVKSLEQQLADADRQHQEVIAIYRTHLLSAAQGHMDEDVQEALLQIIQMRQGLVC

SEQ ID NO: 75547 - protein, 137 aa, Homo sapiens
MSGADRSPNAGAAPDSAPGQAAVASAYQRFEPRAYLRNNYAPPRGDLCNPNGVGPWKLRCLAQTFATGEVSGRTLIDIGSGPTVYQLLSACSHFEDITMTDFLEVNRQELGRWLQEEPGAFNWSMYSQHACLIEGKG

SEQ ID NO: 75548 - protein, 110 aa, Homo sapiens
  MOD_RES (1)..(1): Any amino acid
XEGETCGNAEKLAEYICSRESSALPLLFPCGNLKREILPKALKDKGIAMESITVYQTVAHPGIQGNLNSYYSQQGVPASITFFSPSGLTYSLKHIQELSGDNIDQIKKHP

SEQ ID NO: 75549 - protein, 36 aa, Homo sapiens
  MOD_RES (1)..(1): Any amino acid
XAWVQKIKAASEQYIDTEKKKREKAYQGFPHFVIYS

SEQ ID NO: 75550 - protein, 76 aa, Homo sapiens
MAKRKEENFSSPKNAKRPRQEELEDFDKDGDEDECKGTTLTAAEVGIIESIHLKNFMCHSMLGPFKFGSNVNFVVG

SEQ ID NO: 75551 - protein, 21 aa, Homo sapiens
MAEKRPLRTLGPVMYGKLPRL

SEQ ID NO: 75552 - protein, 72 aa, Homo sapiens
GKVAQTACMSACQHLSTSLMQMLLDSELKQISMGAVQQFNLDVIQCELFASSEPVPGFQGDTLQLAFIDLRQ

SEQ ID NO: 75553 - protein, 84 aa, Homo sapiens
MAANCTSSWSLGESCNRPGLELPRSMASSETQLGNHDVDPEISHVNFRMFSCPKESDPIQALRKLTELCHLWLRPDLHTKEQIL

SEQ ID NO: 75554 - protein, 282 aa, Homo sapiens
MEAKGNGDMKEESAAQLGCCHRPMALGGTGGSLSPSLDFQLFRGDQVFSACRPLPDMVDAHGPSCASWLCPLPLAPGRSALLACLQDLDLNLCTPQPAPLGTDLQGLQEDALSMKHEPPGLQASSTDDKKFTVKYPQNKDKLGKQPERAGEGAPCPAFSSHNSSSPPPLQNRKSPSPLAFCPCPPVNSISKELPFLLHAFYPGYPLLLPPPHLFTYGALPSDQCPHLLMLPQDPSYPTMAMPSLLMMVNELGHPSARWETLLPYPGAFQASGQALPSQARNP

SEQ ID NO: 75555 - protein, 248 aa, Homo sapiens
MEPVEKERASTPYIEKQVDHLIKKATRPEELLELLGGSHDLDSNQAAMVLIRLSHLLSEKPEDKGLLIQDAHFHQLLCLLNSQIASVWHGTLSKLLGSLYALGIPKASKELQSVEQEVRWRMRKLKYKHLAFLAESCATLSQEQHSQELLAELLTHLERRWTEIEDSHTLVTVMMKVGHLSEPLMNRLEDKCLELVEHFGPNELRKVLVMLAAQSRRSVPLLRAISYHLVQKPFSLTKDVLLDVAYAY

SEQ ID NO: 75556 - protein, 85 aa, Homo sapiens
  MOD_RES (1)..(1): Any amino acid
XVQVVQAVQAVHLESDAFLVCLNHALSTEKEEVMGLCIGEVIGVTPNLHILELKCAQLLKRLMPSELFTFILSSSYDVLIRGRTE

SEQ ID NO: 75557 - protein, 68 aa, Homo sapiens
MSVNVNRSVSDQFYRYKMPRLIAKVEGKGNGIKTVIVNMVDVAKALNRPPTYPTKYFGCELGAQTQFD

SEQ ID NO: 75558 - protein, 116 aa, Homo sapiens
MLRLQMTDGHISCTAVEFSYMSKISLNTPPGTKVKLSGIVDIKNGFLLLNDSNTTVLGGEVEHLIEKWELQRSLSKHNRSNIGTEGGPPPFVPFGQFGRRNSQDKRKCEVLWCDPC

SEQ ID NO: 75559 - protein, 31 aa, Homo sapiens
MDYVEDKLSSEFVFNNPNIKGTCGCGESFNI

SEQ ID NO: 75560 - protein, 481 aa, Homo sapiens
MTPALTALLCLGLSLGPRTRVQAGPFPKPTLWAEPGSVISWGSPVTIWCQGSLEAQEYQLDKEGSPEPLDRNNPLEPKNKARFSIPSMTQHHAGRYRCHYYSSAGWSEPSDPLELVMTGFYNKPTLSALPSPVVASGGNMTLRCGSQKGYHHFVLMKEGEHQLPRTLDSQQLHSGGFQALFPVGPVTPSHRWRFTCYYYYTNTPQVWSHPSDPLEILPSGVSRKPSLLTLQGPVLAPGQSLTLQCGSDVGYDRFVLYKEGERDFLQRPGQQPQAGLSQANFTLGPVSPSHGGQYRCYGAHNLSSEWSAPSDPLNILMAGQIYDTVSLSAQPGPTVASGENVTLLCQSRGYFDTFLLTKEGAAHPPLRLRSMYGAHKYQAEFPMSPVTSAHAGTYRCYGSRSSNPHLLSHPSEPLELMVSGHSGGSSLPPTGPPSTPASHAKDYTVENLIRMGMAGLVLVFLGILLFEAQHSQRNPQDAAGR

SEQ ID NO: 75561 - protein, 291 aa, Homo sapiens
MRKPRAAVGSGHRKQAASQEGRQKHAKNNSQAKPSACDGMIAECPGAPAGLARQPEEVVLQASVSSYHLFRDVAEVTAFRGSLLSWYDQEKRDLPWRRRAEDEMDLDRRAYAVWVSEVMLQQTQVATVINYYTGWMQKWPTLQDLASASLEEVNQLWAGLGYYSRGRRLQEGARKVVEELGGHMPRTAETLQQLLPGVGRYTAGAIASIAFGQATGVVDGNVARVLCRVRAIGADPSSTLVSQQLWGLAQQLVDPARPGDFNQAAMELGATVCTPQRPLCSQCPVESLCRA

SEQ ID NO: 75562 - protein, 468 aa, Homo sapiens
MSEDSSALPWSINRDDYELQEVIGSGATAVVQAAYCAPKKEKVAIKRINLEKCQTSMDELLKEIQAMSQCHHPNIVSYYTSFVVKDELWLVMKLLSGGSVLDIIKHIVAKGEHKSGVLDESTIATILREVLEGLEYLHKNGQIHRDVKAGNILLGEDGSVQIADFGVSAFLATGGDITRNKVRKTFVGTPCWMAPEVMEQVRGYDFKADIWSFGITAIELATGAAPYHKYPPMKVLMLTLQNDPPSLETGVQDKEMLKKYGKSFRKMISLCLQKDPEKRPTAAELLRHKFFQKAKNKEFLQEKTLQRAPTISERAKKVRRVPGSSGRLHKTEDGGWEWSDDEFDEESEEGKAAISQLRSPRVKESISNSELFPTTDPVGTLLQVPEQISAHLPQPAGQIATQPTQVSLPPTAEPAKTAQALSSGSGSQETKIPISLVLRLRNSKKELNDIRFEFTPGRGEASNGLKTK

SEQ ID NO: 75563 - protein, 96 aa, Homo sapiens
MALCALTRALRSLNLAPPTVAAPAPSLFPAAQMMNNGLLQQPSALMLLPCRPVLTSVALNANFVSWKSRTKYTITPVKMRKSGGRDHTGGNKDRGI

SEQ ID NO: 75564 - protein, 96 aa, Homo sapiens
MSNYVNDMWPGSPQEKDSPSTSRSGGSSRLSSRSRSRSFSRSSRSHSRVSSRFSSRSRRSKSRSRSRRRHQRKYRRYSRSYSRSRSRSRSRRYRER

SEQ ID NO: 75565 - protein, 523 aa, Homo sapiens
MFGIQESIQRSGSSMKEEPLGSGMNAVRTWMQGAGVLDANTAAQSGVGLARAHFEKQPPSNLRKSNFFHFVLALYDRQGQPVEIERTAFVGFVEKEKEANSEKTNNGIHYRLQLLYSNGIRTEQDFYVRLIDSMTKQAIVYEGQDKNPEMCRVLLTHEIMCSRCCDKKSCGNRNETPSDPVIIDRFFLKFFLKCNQNCLKNAGNPRDMRRFQVVVSTTVNVDGHVLAVSDNMFVHNNSKHGRRARRLDPSEATPCIKAISPSEGWTTGGATVIIIGDNFFDGLQVIFGTMLVWSELITPHAIRVQTPPRHIPGVVEVTLSYKSKQFCKGTPGRFIYTALNEPTIDYGFQRLQKVIPRHPGDPERLPKEVILKRAADLVEALYGMPHNNQEIILKRAADIAEALYSVPRNHNQLPALANTSVHAGMMGVNSFSGQLAVNVSEASQATNQVVPSSPTMASSTSLPSNCSSSSGIFSFSPANMVSAVKQKSAFAPVVRPQTSPPPTCTSTNGNSLQAISGMIVPPM

SEQ ID NO: 75566 - protein, 178 aa, Homo sapiens
MQAVVPLNKMTAISPEPQTLASTEQNEVPRVVTSGEQEAILRGNAADAESFRQRFRWFCYSEVAGPRKALSQLWELCNQWLRPDIHTKEQILELLVFEQFLTILPGEIRIWVKSQHPESSEEVVTLIEDLTQMLEEKGEIYRWREEAGDIASKSESKFLKRRQFTAKEESEVRSWDWV

SEQ ID NO: 75567 - protein, 85 aa, Homo sapiens
  MOD_RES (1)..(1): Any amino acid
XEMKTTSLSQGNELEVTIMMVVEALCELHCPEAIQGIAVWSSSIVGKNLLWINSVAQQAEGSIEACYKSLHQEASSVCSLVSSNT

SEQ ID NO: 75568 - protein, 131 aa, Homo sapiens
MEKIPVSAFLLLVALSYTLARDTTVKPGAKKDTKDSRPKLPQTLSRGWGDQLIWTQTYEEALYKSKTSNKPLMIIHHLDECPHSQALKKVFAENKEIQKLAEQFVLLNLVYETTDKHLSPDGQYVPRIMFV

SEQ ID NO: 75569 - protein, 123 aa, Homo sapiens
MAWTPLLLLFLSHCTGSLSQAVLTQPSSLSASPGASASLTCTLRSGINVGTYRIYWYQQKPGSPPQYLLRYKSDSDKQQGSGVPSRFSGSKDASANAGILLISGLQSEDEADYYCMIWHSSAS

SEQ ID NO: 75570 - protein, 94 aa, Homo sapiens
MMQPQGHLDDDGLPHGFCTVTYSSTDRFEGNFVHGEKNGRGKFFFFDGSTLEGYYVDDALQGQGVYTYEDGGVLQGTYVDGELNGPAQEYDTDG

SEQ ID NO: 75571 - protein, 70 aa, Homo sapiens
MEISRLAQSKRNIISLNMDLERDTQRIDEANQKLLLKIQEREDKIQRLESEIIQTRGLVEDEEWEKENRT

SEQ ID NO: 75572 - protein, 115 aa, Homo sapiens
MKEEAFLRRRFSLCPPSSTPQKVDPRKLTRNLLLSGDNELYPLSPGKDMEPNGPSLPRDEGPPTPSSATKVPPAEYRLCNGSDKECVSPTARVTKKETLKAQKENYRQEKNRAPS

SEQ ID NO: 75573 - protein, 89 aa, Homo sapiens
MAAAPALKHWRTTLERVEKFVSPLYFTDCNLRGRLFGASCPVAVLSSFLTPERLPYQEAVQRDFRPAQVGDSFGPTSLADGGPAGSGWS

SEQ ID NO: 75574 - protein, 130 aa, Homo sapiens
VYSDLHAFYYSWYGSPRREGHYIHWDHVMVPHWDPKISASYPRGRHSPPDDLGSSFYPELGPYSSRDPEVLREHMTQLKEAAIGVLVLSWYPPGMADDNGEPSDDLVPAILDTAHQYSIQVWLPWCILPL

SEQ ID NO: 75575 - protein, 482 aa, Homo sapiens
MSRVHGMHPKETTRQLSLAVKDGLIVETLTVGCKGSKAGIEQEGYWLPGDEISIKKKNTNKQEMGTYLRFIVSRMKERAIDLNKKGKDNKHPMYRRLVHSAVDVPTIQEKVNEGKYRSYEEFKADAQLLLHNTVIFYGADSEQADIARMLYKDTCHEIPNHELVWAKMKGFGFWPAKVMQKEDNQVDVRFFGHHHQRAWIPSENIQDITVNIHRLHVKRSMGWKKACDELELHQRFLREGRFWKSKNEDRGEEEAESSISSTSNEQLKVTQEPRAKKGRRNQSVEPKKEEPEPETEAVSSSQEIPTMPQPIEKVSVSTQTKKLSASSPRMLHRSTQTTNDGVCQSMCHDKYTKIFNDFKDRMKSDHKRETERVVREALEKLRSEMEEEKRQAVNKAVANMQGEMDRKCKQVKEKCKEEFVEEIKKLATQHKQLISQTKKKQWCYNCEEEAMYHCCWNTSYCSIKCQQEHWHAEHKRTCRRKR

SEQ ID NO: 75576 - protein, 112 aa, Homo sapiens
MLDPGLDPAASATAAAAASHDKGPEAEEGVELQEGECLPGRPRPGRAGGARRGPDRAPTLLGPRRGRPRSGGADSGGHHQRPAGGVRRPQHPVPVPHRDKWRTGDIPRSPGD

SEQ ID NO: 75577 - protein, 57 aa, Homo sapiens
MTELPAPLSYFQNAQMSEDNHLSNTRRVLAILARLISNSWAQVILPLWPPKIQRLWV

SEQ ID NO: 75578 - protein, 82 aa, Homo sapiens
MKSEELQRLTASEPLTLEQEYAMQCSWQEDADKCTFIVLDAEKWQAQPGATEESCMVGDVNLFLTDLEDLTLGEIEVMIAEP

SEQ ID NO: 75579 - protein, 181 aa, Homo sapiens
MSLGSELFRDVAIVFSQEEWQWLAPAQRDLYRDVMLETYSNLVSLGLAVSKPDVISFLEQGKEPWMVERVVSGGLCPVLESRYDTKELFPKQHVYEVESPQWEIMESLTSYGLECSSFQDDWECRNQFDRQQGNPDRHFHQMIIRHEEMPTFDQHASLTFYQKIHTREKPFGYNKCRKDFW

SEQ ID NO: 75580 - protein, 150 aa, Homo sapiens
  MOD_RES (1)..(1): Any amino acid
XSLTISFSRCWEFLLWMDPSNYGGIKGKVSSRIHCGLQDSQKAGGAEDEQENEDDEEERDGEEEEEAEESNVEDLLENNWNILQFLPQAASCQNYFLMIVSAYIVAVYHCMKDGLRRSAPGSTPVRRRGASQLSQEAEGAVGALPGLCRK

SEQ ID NO: 75581 - protein, 80 aa, Homo sapiens
MAQSQGWVKRYIKAFCKGFFVAVPVAVTFLDRVACVARVEGASMQPSLNPGGSQSSDVVLLNHWKVRNFEVHRGDIVSLV

SEQ ID NO: 75582 - protein, 163 aa, Homo sapiens
MALVRGGWLWRQSSILRRWKRNWFALWLDGTLGYYHDETAQDEEDRVLIHFNVRDIKIGPECHDVQPPEGRSRDGLLTVNLREGGRLHLCAETKDDALAWKTALLEANSTPVRVYSPYQDYYEVVPPNAHEATYVRSYYGPPYAGPGVTHVIVREDPCYSAGA

SEQ ID NO: 75583 - protein, 1543 aa, Homo sapiens
MWPSQLLIFMMLLAPIIHGGKHSERHPALAAPLRHAERSPGGALPPRHLLQQPAAERTAAHRGQGPRGATRGVRGPGAQGAQIAAQAFSRAPIPMAVVRRELSCESYPIELRCPGTDVIMIESANYGRTDDKICDSDPAQMENIRCYLPDAYKIMSQRCNNRTQCAVVAGPDVFPDPCPGTYKYLEVQYECVPYKVEQKVFLCPGLLKGVYQSEHLFESDHQSGAWCKDPLQASDKIYYMPWTPYRTDTLTEYSSKDDFIAGRPTTTYKLPHRVDGTGFVVYDGALFFNKERTRNIVKFDLRTRIKSGEAIIANANYHDTSPYRWGGKSDIDLAVDENGLWVIYATEQNNGKIVISQLNPYTLRIEGTWDTAYDKRSASNAFMICGILYVVKSVYEDDDNEATGNKIDYIYNTDQSKDSLVDVPFPNSYQYIAAVDYNPRDNLLYVWNNYHVVKYSLDFGPLDSRSGQAHHGQVSYISPPIHLDSELERPSVKDISTTGPLGMGSTTTSTTLRTTTLSPGRSTTPSVSGRRNRSTSTPSPAVEVLDDMTTHLPSASSQIPALEESCEAVEAREIMWFKTRQGQIAKQPCPAGTIGVSTYLCLAPDGIWDPQGPDLSNCSSPWVNHITQKLKSGETAANIARELAEQTRNHLNAGDITYSVRAMDQLVGLLDVQLRNLTPGGKDSAARSLNKLQKRERSCRAYVQAMVETVNNLLQPQALNAWRDLTTSDQLRAATMLLHTVEESAFVLADNLLKTDIVRENTDNIKLEVARLSTEGNLEDLKFPENMGHGSTIQLSANTLKQNGRNGEIRVAFVLYNNLGPYLSTENASMKLGTEALSTNHSVIVNSPVITAAINKEFSNKVYLADPVVFTVKHIKQSEENFNPNCSFWSYSKRTMTGYWSTQGCRLLTTNKTHTTCSCNHLTNFAVLMAHVEVKHSDAVHDLLLDVITWVGILLSLVCLLICIFTFCFFRGLQSDRNTIHKNLCISLFVAELLFLIGINRTDQPIACAVFAALLHFFFLAAFTWMFLEGVQLYIMLVEVFESEHSRRKYFYLVGYGMPALIVAVSAAVDYRSYGTDKVCWLRLDTYFIWSFIGPATLIIMLNVIFLGIALYKMFHHTAILKPESGCLDNINYEDNRPFIKSWVIGAIALLCLLGLTWAFGLMYINESTVIMAYLFTIFNSLQGMFIFIFHCVLQKKVRKEYGKCLRTHCCSGKSTESSIGSGKTSGSRTPGRYSTGSQSRIRRMWNDTVRKQSESSFITGDINSSASLNREPYRETKGLLNNARDTSVMDTLPLNGNHGNSYSIASGEYLSNCVQIIDRGYNHNETALEKKILKELTSNYIPSYLNNHERSSEQNRNLMNKLVNNLGSGREDDAIVLDDATSFNHEESLGLELIHEESDAPLLPPRVYSTENHQPHHYTRRRIPQDHSESFFPLLTNEHTEDLQSPHRDSLYTSMPTLAGVAATESVTTSTQTEPPPAKCGDAEDVYYKSMPNLGSRNHVHQLHTYYQLGRGSSDGFIVPPNKDGTPPEGSSKGPAHLVTSL

SEQ ID NO: 75584 - protein, 267 aa, Homo sapiens
MAATSLMSALAARLLQPAHSCSLRLRPFHLAAVRNEAVVISGRKLAQQIKQEVRQEVEEWVASGNKRPHLSVILVGENPASHSYVLNKTRAAAVVEHIDERRICNAVSPDKDVDGFHVINVGRMCLDQYSMLPATPWGVWEIIKRTGIPTLGKNVVVAGRSKNVGMPIAMLLHTDGAHERPGGDATVTISHRYTPKEQLKKHTILADIVISAAGVRQKAGYITPVPGGVGPMTVAMLMKNTIIAAKKVLRLEEREVLKSKELGVATN

SEQ ID NO: 75585 - protein, 97 aa, Homo sapiens
MWLCPLALTLILMAASGAACEVKDVCVGSPGIPGTPGSHGLPGRDGRDGVKGDPGPPGPMGPPGETPCPPGNNGLPGAPGVPGERGEKGEAGERGPP

SEQ ID NO: 75586 - protein, 10 aa, Homo sapiens
MGRKKIQIQR

SEQ ID NO: 75587 - protein, 125 aa, Homo sapiens
MKSHRCYDLIPTSSKLVVFDTSLQVKKAFFALVTNGVRAAPLWDSKKQSFVGMLTITDFINILHRYYKSALVQIYELEEHKIETWREVYLQDSFKPLVCISPNASLFDAVSSLIRNKIHRLPVID

SEQ ID NO: 75588 - protein, 75 aa, Homo sapiens
MWSLHIVLMRCSFRLTKSLATGPWSLILILFSVQYVYGVSTFTSSGCVVKIHFIECIIFVILSKKSPSGTQFSYL

SEQ ID NO: 75589 - protein, 166 aa, Homo sapiens
MSDKDDIETPLLTEAAPILEDGNCEPAKNSESVDQGAKPESKSEPVVSTRKRPETKPSSDLETSKVLPIQDNVSKDVPQTRWGYWGSWGKSILSSASATVATVGQGISNVIEKAETSLGIPGPSEISTEVKYVAGETNAKENENSSPVAGAFGVFSTISTAVQSTG

SEQ ID NO: 75590 - protein, 67 aa, Homo sapiens
MLFGLVRQGLKCDGCGLNYHKRCAFSIPNNCSGARKRRLSSTSLASGHSVRLGTSESLPCTAEELVR

SEQ ID NO: 75591 - protein, 188 aa, Homo sapiens
MSTRKRRGGAINSRQAQKRTREATSTPEISLEAEPIELVETAGDEIVDLTCESLEPVVVDLTHNDSVVIVDERRRPRRNARRLPQDHADSCVVSSDDEELSRDRDVYVTTHTPRNARDEGATGLRPSGTVSCPICMDGYSEIVQNGRLIVSTECGHVFCSQCLRDSLKNANTCPTCRKKINHKRYHPI

SEQ ID NO: 75592 - protein, 99 aa, Homo sapiens
MEEASEGGGNDRVRNLQSEVEGVKNIMTQNVERILARGENLEHLRNKTEDLEATPGAEASCFREEVTPKLSKVWSLKFCVQRGGWLWLSESCVNSWLLV

SEQ ID NO: 75593 - protein, 92 aa, Homo sapiens
MMIPSQISYPASQGAYYIPGQGRSTYVVPTQQYPVQPGAPGFYPGASPTEFGTYAGAYYPAQGVQQFPTGVAPTPVLMNQPPQIAPKRERKT

SEQ ID NO: 75594 - protein, 140 aa, Homo sapiens
MSELSDEASEPELLNRSLSMWHGLGTQVSGEELDVPLDLHTAASIGQYEVVKECVQRRELDLNKKNGGGWTPLMYASYIGHDTIVHLLLEAGVSVNVPTPEGQTPLMLASSCGNESIAYFLLQGADMWIYSLDGSSCCWP

SEQ ID NO: 75595 - protein, 103 aa, Homo sapiens
MCGDCVEKEYPNRGNTCLENGSFLLNFTGCAVCSKRDFMLITNKSLKEEDGEEIVTYDRKSRRKDPRGLQFLQVQPPCTKACFAEGEALPLSEKRPSTTDRCL

SEQ ID NO: 75596 - protein, 163 aa, Homo sapiens
MNQGILALVSSIGCTSAGSLQSLADAMHIPHLFIQRSTAGTPRSGCGLTRSNRNDDYTLSVRPPVYLHDVILRVVTEYAWQKFIIFYDSEYDIRGIQEFLDKVSQQGMDVALQKVENNINKMITTLFDTMRIEELNRYRDTLRRAILVMNPATAKSFITEMSF

SEQ ID NO: 75597 - protein, 384 aa, Homo sapiens
MRSPAVPTPARGQLGVAFVLLPPHSEGARVFGALGPIGPSSPGLTLGGLAVSEHRLSNKLLAWSGVLEWQEKRRPYSDSTAKLKRTLPCQAYVNQGENLETDQWPQKLIMQLIPQQLLTTLGPLFRNSQLAQFHFTNRDCDSLKGLCRIMGNGFAGCMLFPHISPCEVRVLMLLYSSKKKIFMGLIPYDQSGFVSAIRQVITTRKQAVGPGGVNSGPVQIVNNKFLAWSGVMEWQEPRPEPNSRSKRWLPSHVYVNQGEILRTEQWPRKLYMQLIPQQLLTTLVPLFRNSRLVQFHFTKDLETLKSLCRIMDNGFAGCVHFSYKASCEIRVLMLLYSSEKKIFIGLIPHDQGNFVNGIRRVIANQQQVLQRNLEQEQQQRGMGG

SEQ ID NO: 75598 - protein, 103 aa, Homo sapiens
MGCVQCKDKEATKLTEERDGSLNQSSGYRYGTDPTPQHYPSFGVTSIPNYNNFHAAGGQGLTVFGGVNSSSHTGTLRTRGGTGVTLFVALYDYEARTEDDLSF

SEQ ID NO: 75599 - protein, 159 aa, Homo sapiens
MKTKLNIYNMQFLLFVFLVWDPARLVLANIQEDEAKNNITIFTRILDRLLDGYDNRLRPGLGDSITEVFTNIYVTSFGPVSDTDMEYTIDVFFRQKWKDERLKFKGPMNILRLNNLMASKIWTPDTFFHNGKKSVAHNMTMPNKLLRIQDDGTLLYTMR

SEQ ID NO: 75600 - protein, 183 aa, Homo sapiens
MCGRTSCHLPRDVLTRACAYQDRRGQQRLPEWRDPDKYCPSYNKSPQSNSPVLLSRLHFEKSGSIGAADSPENWEKVWDNWRLLTMAGIFDCWEPPEGGDVLYSYTIITVDSCKGLSDIHHRMPAILDGEEAVSKWLDFGEVSTQEALKLIHPTENITFHAVSSVVNNSRNNTPECLAPVDLV

SEQ ID NO: 75601 - protein, 85 aa, Homo sapiens
MEPEREGTERHPRKVRESRQAPNKLVGAAEAMKAGWDLEESQPEAKKARLSTILFTDNCEVTHDQLCELLKYAVLGKSNVPKPRE

SEQ ID NO: 75602 - protein, 92 aa, Homo sapiens
MFHFFRKPPESKKPSVPETEADGFVLLGQSCQLSSSLGGNRCSKNGTTFPLSSKVPVFLLQLPCAGALTWLHLEFRRQLQKVEPLAVGRYNR

SEQ ID NO: 75603 - protein, 139 aa, Homo sapiens
MESNLSGLVPAAGLVPALPPAVTLGLTAAYTTLYALLFFSVYAQLWLVLLYGHKRLSYQTVFLALCLLWAALRTTLFSFYFRDTPRANRLGPLPFWLLYCCPVCLQFFTLTLMNLYFAQVVFKAKVKRRPEMSRGLRTW

SEQ ID NO: 75604 - protein, 419 aa, Homo sapiens
  MOD_RES (1)..(1): Any amino acid
XSQDILSPEFHEHFNKLMARPAVALHFQSIADGFKEAVRYVLPRLMLVPVYHCWHYFELLKQLKACSEEQEDRECLNQAITALMNLQGSMDRIYKQYSPRRRPGDPVCPFYSHQLRSKHLAIKKMNEIQKNIDGWEGKDIGQCCNEFIMEGPLTRIGAKHERHIFLFDGLMISCKPNHGQTRLPGYSSAEYRLKEKFVMRKIQICDKEDTCEHKHAFELVSKDENSIIFAAKSAEEKNNWMAALISLHYRSTLDRMLDSVLLKEENEQPLRLPSPEVYRFVVKDSEENIVFEDNLQSRSGIPIIKGGTVVKLIERLTYHMYADPNFVRTFLTTYRSFCKPQELLSLLIERFEIPEPEPTDADKLAIEKGEQPISADLKRFRKEYVQPVQLRFGLNIFYIYIYTHIYTHTHTFYVSVFNI

SEQ ID NO: 75605 - protein, 498 aa, Homo sapiens
MWNFRELSENSQQAANVLSGACGLQRGDRVAVVLPRVPEWWLVILGCIRAGLIFMPGTIQMKSTDILYRLQMSKAKAIVAGDEVIQEVDTVASECPSLRIKLLVSEKSCDGWLNFKKLLNEASTTHHCVETGSQEASAIYFTSGTSGLPKMAEHSYSSLGLKAKMDAGWTGLQASDIMWTISDTGWILNILCSLMEPWALGACTFVHLLPKFDPLVILKTLSSYPIKSMMGAPIVYRMLLQQDLSSYKFPHLQNCVTVGESLLPETLENWRAQTGLDIRESYGQTETGLTCMVSKTMKIKPGYMGTAASCYDVQIIDDKGNVLPPGTEGDIGIRVKPIRPIGIFSGYVDNPDKTAANIRGDFWLLGDRGIKDEDGYFQFMGRANDIINSSGYRIGPSEVENALMEHPAVVETAVISSPDPVRGEVVKAFVVLASQFLSHDPEQLTKELQQHVKSVTAPYKYPRKIEFVLNLPKTVTGKIQRAKLRDKEWKMSGKARAQ

SEQ ID NO: 75606 - protein, 69 aa, Homo sapiens
MLPLSLLKTAQNHPMLVELKNGETYNGHLVSCDNWMNINLREVICTSRVKNPNQREPHPRLEGAPVSHS

SEQ ID NO: 75607 - protein, 96 aa, Homo sapiens
PPVTKSLVTNCKPVTDKIHKAYKDKNKYRFEIMGEEEIAFKMIRTNVSHVVGQLDDIRKNPRISLCCPSWNAVMQTWLTVASTSWAQAILPPQPPD

SEQ ID NO: 75608 - protein, 220 aa, Homo sapiens
MAIVQTLPVPLEPAPEAATAPQAPVMGSVSSLISGRPCPGGPAPPRHHGPPGPTFFRQQDGLLRGGYEAQEPLCPAVPPRKAVPVTSFTYINEDFRTESPPSPSSDVEDAREQRAHNAHLRGPPPKLIPVSGKLEKNMEKILIRPTAFKPVLPKPRGAPSLPSFMGPRATGLSGSQGSLTQLFGGPASSSSSSSSSSAADKPLAFSGWASGCPSGTLSDS

SEQ ID NO: 75609 - protein, 202 aa, Homo sapiens
MLGSLLAQLSFPGFPSIQLPYLIDGAHKITQSNAILCYIARKHNLCGETEEEKIRVDILENQAMDVSNQLARVCYSPDFEKLKPEYLEELPTMMQHFSQFLGKRPWFVGDKITFVDFLAYDVLDLHRIFEPNCLDAFPNLKDFISRFEVMPPSSFLFDAPCSVTSFQMLSQSWSYIKNNLHLLSAGFMPGTLPSTLYLSCGI

SEQ ID NO: 75610 - protein, 716 aa, Homo sapiens
MMQESATETISNSSMNQNGMSTLSSQLDAGSRDGRSSGDTSSEVSTVELLHLQQQQALQAARQLLLQQQTSGLKSPKSSDKQRPLQVPVSVAMMTPQVITPQQMQQILQQQVLSPQQLQALLQQQQAVMLQQQQLQEFYKKQQEQLHLQLLQQQQQQQQQQQQQQQQQQQQQQQQQQQQQQQQQQQQQQQQHPGKQAKEQQQQQQQQQQQLAAQQLVFQQQLLQMQQLQQQQHLLSLQRQGLISIPPGQAALPVQSLPQAGLSPAEIQQLWKEVTGVHSMEDNGIKHGGLDLTTNNSSSTTSSNTSKASPPITHHSIVNGQSSVLSARRDSSSHEETGASHTLYGHGVCKWPGCESICEDFGQFLKHLNNEHALDDRSTAQCRVQMQVVQQLEIQLSKERERLQAMMTHLHMRPSEPKPSPKPLNLVSSVTMSKNMLETSPQSLPQTPTTPTAPVTPITQGPSVITPASVPNVGAIRRRHSDKYNIPMSSEIAPNYEFYKNADVRPPFTYATLIRQAIMESSDRQLTLNEIYSWFTRTFAYFRRNAATWKNAVRHNLSLHKCFVRVENVKGAVWTVDEVEYQKRRSQKITGSPTLVKNIPTSLGYGAALNASLQAALAESSLPLLSNPGLINNASSGLLQAVHEDLNGSLDHIDSNGNSSPGCSPQPHIHSIHVKEEPVIAEDEDCPMSLVTTANHSPELEDDREIEEEPLSEDLE

SEQ ID NO: 75611 - protein, 50 aa, Homo sapiens
MEHVTEGSWESLPVPLHPQVLGALRELGFPYMTPVQPDSLDRRQESWRRC

SEQ ID NO: 75612 - protein, 143 aa, Homo sapiens
MAIKSIASRLRGSRRFLSGFVAGAVVGAAGAGLAALQFFRSQGAEGALTGKQPDGSAEKAVLEQFGFPLTGTEARCYTNHALSYDQAKRVPRWVLEHISKSKIMGRFFKFTLLASLFLLSLNLHLWLVLNFWVQVTLLPQPPE

SEQ ID NO: 75613 - protein, 215 aa, Homo sapiens
  MOD_RES (1)..(1): Any amino acid
XVDAKLQEVIAGKAPEYLEPLATLQENMQIRTKVAGIYRELCLESVKNKYECEIQASRQHCESEKLLLYDTVQSELEEKIRRLEEDRHSIDITSELWNDELQSRKKRKDPFSPDKKKPVVVSGPYIVYMLQDLDILEDWTTIRKAMATLGPHRVKTEPPVKLEKHLHSARSEEGRLYYDGEWYIRGQTICIDKKDECPTRSYNAAYVYPIGVIMK

SEQ ID NO: 75614 - protein, 130 aa, Homo sapiens
MFADLDYDIEEDKLGIPTVPGKVTLQKDAQNLIGISIGGGAQYCPCLYIVQVFDNTPAALDGTVAAGDEITGVNGRSIKGKTKVEVAKMIQEVKGEVTIHYNKLQADPKQGMSLDIGQRLGFHGPGPHSS

SEQ ID NO: 75615 - protein, 64 aa, Homo sapiens
QLEQELHKWQVLVDSITGMSSPDFDNQTLAVLRGRMVRYLMRSREVPALTCPISPDHPGQSNQG

SEQ ID NO: 75616 - protein, 111 aa, Homo sapiens
MATRQRESSITSCCSTSSCDADDEGVRGTCEDASLCKRFAVSIGYWHDPYIQHFVRLSKERKAPEINRGKIFCSSPWCQSAYKGISTEDRMSLSNCQPWGRHGYHLLEIKG

SEQ ID NO: 75617 - protein, 684 aa, Homo sapiens
METRSPGLNNMKPQSLQLVLEEQVLALQQQMAENQAASWRKLKNSQEAQQRQATLVRKLQAKVLQYRSWCQELEKRLEATGGPIPQRWENVEEPNLDELLVRLEEEQQRCESLAEVNTQLRLHMEKADVVNKALREDVEKLTVDWSRARDELMRKESQWQMEQEFFKGYLKGEHGRLLSLWREVVTFRRHFLEMKSATDRDLMELKAEHVRLSGSLLTCCLRLTVGAQSREPNGSGRMDGREPAQLLLLLAKTQELEKEAHERSQELIQLKSQGDLEKAELQDRVTELSALLTQSQKQNEDYEKMIKALRETVEILTNHTELMEHEASLSRNAQEEKLSLQQVIKDITQVMVEEGDNIAQGSGHENSLELDSSIFSQFDYQDADKALTLVRSVLTRRRQAVQDLRQQLAGCQEAVNLLQQQHDQWEEEGKALRQRLQKLTGERDTLAGQTVDLQGEVDSLSKERELLQKAREELRQQLEVLEQEAWRLRRVNVELQLQGDSAQGQKEEQQEELHLAVRERERLQEMLMGLEAKQSESLSELITLREALESSHLEGELLRQEQTEVTAALARAEQSIAELSSSENTLKTEVADLRAAAVKLSALNEALALDKVGLNQQLLQLEEENQSVCSRMEAAEQARNALQVDLAEAEKRREALWEKNTHLEAQLQKAEEAGAELQADLRDI

SEQ ID NO: 75618 - protein, 129 aa, Homo sapiens
  MOD_RES (1)..(1): Any amino acid
XRDDDDGPVSSQGYMPYLNKYILDKDAFRLWCLFNFLSEDKYPLIMVPDEVEYLLKKVLSSMSLEVSLGELEELLAQEAQVAQTTGGLSVWQFLELFNSGRCLRGVGRDTLSMAIHEVYQELIQDVLKQ

SEQ ID NO: 75619 - protein, 218 aa, Homo sapiens
MPMTLGYWDIRGLAHAIRLLLEYTDSSYVEKKYTLGDAPDYDRSQWLNEKFKLGLDFPNLPYLIDGAHKITQSNAILRYIARKHNLCGETEEEKIRVDILENQTTDNWMQLVMICYHPEFEKLKPKYLEELPEKLKLYSEFLGKRPWFAGDKITFVDFLAYDVLDMKRIFEPKCLDAFLNLKDFISRFEGLKKISAYMKSSQFLRGLLFGKSATWNSK

SEQ ID NO: 75620 - protein, 193 aa, Homo sapiens
GFFIYEEEGSGVPGSSRKGNDAIVVEQWTVIEGCEIKTDYGPLLHTLAEFGWLLTSVLPTPVLRHDSEGNLATKQIVFLQRPVMWNSAAQTPDMWVRQCEKNKKKASRHIKGEDKNKATSRSIGLDTTSSQPAESRHLPEECRLSPSRECWTKEGRLAQHNSFSGFSSSDNVLRELDDGQFDQEDGVTQVTCM

SEQ ID NO: 75621 - protein, 267 aa, Homo sapiens
MSPTISHKDSSRQRRPGNFSHSLDMKSGPLPPGGWDDSHLDSAGREGDREALLGDTGTGDFLKAPQSFRAELSSILLLLFLYVLQGIPLGLAGSIPLILQSKNVSYTDQAFFSFVFWPFSLKLLWAPLVDAVYVKNFGRRKSWLVPTQYILGLFMIYLSTQVDRLLGNTDDRTPDVIALTVAFFLFEFLAATQDIAVDGWALTMLSRENVGYASTCNSVGQTAGYFLGNVLFLALESADFCNKYLRFQPQPRGIVTLSGSVFKLLWC

SEQ ID NO: 75622 - protein, 175 aa, Homo sapiens
MAGPAWISKVSRLLGAFHNPKQVTRGFTGGAPIQWEERNVTAIQGPGGKWMIPSEAKESMDKNKMGLKGPLKTPIAAGHPSMNLLLRKTFDLYANVRPCVSIEGYKTPYTDVNIVTIRENTEGEYSGIEHVIVDGVVQSIKLITEGASKRIAEFAFEYARNNHRSNVTAVHKANI

SEQ ID NO: 75623 - protein, 148 aa, Homo sapiens
MAEKVNNFPPLPKFIPLKPCFYQDFEADIPPQHVSMTKRLYYLWMLNSVTLAVNLVGCLAWLIGGGGATNFGLAFLWLILFTPCSYVCWFRPIYKAFKTDSSFSFMAFFFTFMAQLVISIIQAVGIPGWGVCGWIATISFFGTNIGSA

SEQ ID NO: 75624 - protein, 52 aa, Homo sapiens
MVRMNVLADALKSINNAEKRGKRQVLIRPCSKVIVRFLTVMMKHVWGDQPQI

SEQ ID NO: 75625 - protein, 111 aa, Homo sapiens
MSSSHFASRHRKDISTEMIRTKIAHRKSLSQKENRHKEYERNRHFGLKDVNIPTLEGRILVELDETSQGLVPEKTNVKPRAMKTILGDQRKQMLQKYKEEKQLQKLKEQRE

SEQ ID NO: 75626 - protein, 76 aa, Homo sapiens
MAMDQVNALCEQLVKAVTVMMDPNSTQRYRLEALKFCEEFKEKCPICVPCGLRLAEKTQVAIVRHFGLQILEHVVK

SEQ ID NO: 75627 - protein, 98 aa, Homo sapiens
MPVDFTGYWKMLVNENFEEYLRALDVNVALRKIANLLKPDKEIVQDGDHMIIRTLSTFRNYIMDFQVGKEFEEDLTGIDDRKCMVRIRVHLVSPAQGA

SEQ ID NO: 75628 - protein, 164 aa, Homo sapiens
MAVLLLLLRALRRGPGPGPRPLWGPGPAWSPGFPARPGRGRPYMASRPPGDLAEAGGRALQSLQLRLLTPTFEGINGLLLKQHLVQNPVRLWQLLGGTFYFNTSRLKQKNKEKDKSKGKAPEEDEVFDQTPSNWIHGHCELALCSRRADCICDGSDGLGRSFLF

SEQ ID NO: 75629 - protein, 103 aa, Homo sapiens
MPANEDAPQPGEHGSACEVSVSFEDVTVDFSREEWQQLDSTQRRLYQDVMLENYSHLLSVGFEVPKPEVIFKLEQGEGPWTLEGEAPHQSCSGISTYFVTSTV

SEQ ID NO: 75630 - protein, 1580 aa, Homo sapiens
MWPSQLLIFMMLLAPIIHGGKHSERHPALAAPLRHAERSPGGALPPRHLLQQPAAERTAAHRGQGPRGATRGVRGPGAQGAQIAAQAFSRAPIPMAVVRRELSCESYPIELRCPGTDVIMIESANYGRTDDKICDSDPAQMENIRCYLPDAYKIMSQRCNNRTQCAVVAGPDVFPDPCPGTYKYLEVQYECVPYKVEQKVFLCPGLLKGVYQSEHLFESDHQSGAWCKDPLQASDKIYYMPWTPYRTDTLTEYSSKDDFIAGRPTTTYKLPHRVDGTGFVVYDGALFFNKERTRNIVKFDLRTRIKSGEAIIANANYHDTSPYRWGGKSDIDLAVDENGLWVIYATEQNNGKIVISQLNPYTLRIEGTWDTAYDKRSASNAFMICGILYVVKSVYEDDDNEATGNKIDYIYNTDQSKDSLVDVPFPNSYQYIAAVDYNPRDNLLYVWNNYHVVKYSLDFGPLDSRSGQAHHGQVSYISPPIHLDSELERPSVKDISTTGPLGMGSTTTSTTLRTTTLSPGRSTTPSVSGRRNRSTSTPSPAVEVLDDMTTHLPSASSQIPALEESCEAVEAREIMWFKTRQGQIAKQPCPAGTIGVSTYLCLAPDGIWDPQGPDLSNCSSPWVNHITQKLKSGETAANIARELAEQTRNHLNAGDITYSVRAMDQLVGLLDVQLRNLTPGGKDSAARSLNKLQKRERSCRAYVQAMVETVNNLLQPQALNAWRDLTTSDQLRAATMLLHTVEESAFVLADNLLKTDIVRENTDNIKLEVARLSTEGNLEDLKFPENMGHGSTIQLSANTLKQNGRNGEIRVAFVLYNNLGPYLSTENASMKLGTEALSTNHSVIVNSPVITAAINKEFSNKVYLADPVVFTVKHIKQSEENFNPNCSFWSYSKRTMTGYWSTQGCRLLTTNKTHTTCSCNHLTNFAVLMAHVEVKHSDAVHDLLLDVITWVGILLSLVCLLICIFTFCFFRGLQSDRNTIHKNLCISLFVAELLFLIGINRTDQPIACAVFAALLHFFFLAAFTWMFLEGVQLYIMLVEVFESEHSRRKYFYLVGYGMPALIVAVSAAVDYRSYGTDKVCWLRLDTYFIWSFIGPATLIIMLNVIFLGIALYKMFHHTAILKPESGCLDNINYEDNRPFIKSWVIGAIALLCLLGLTWAFGLMYINESTVIMAYLFTIFNSLQGMFIFIFHCVLQKKVRKEYGKCLRTHCCSGKSTESSIGSGKTSGSRTPGRYSTGSQSRIRRMWNDTVRKQSESSFITGDINSSASLNRGAMANHLISNALLRPHGTNNPYNTLLGEPAVCNNPSVSMYNAQEGLLNNARDTSVMDTLPLNGNHGNSYSIASGEYLSNCVQIIDRGYNHNETALEKKILKELTSNYIPSYLNNHERSSEQNRNLMNKLVNNLGSGREDDAIVLDDATSFNHEESLGLELIHEESDAPLLPPRVYSTENHQPHHYTRRRIPQDHSESFFPLLTNEHTEDLQSPHRDSLYTSMPTLAGVAATESVTTSTQTEPPPAKCGDAEDVYYKSMPNLGSRNHVHQLHTYYQLGRGSSDGFIVPPNKDGTPPEGSSKGPAHLVTSL

SEQ ID NO: 75631 - protein, 150 aa, Homo sapiens
MSIAYLDPGNIESDLQSGAVAGFKLLWILLLATLVGLLLQRLAARLGVVTGLHLAEVCHRQYPKVPRVILWLMVELAIIGSDMQEVIGSAIAINLLSVGRIPLWGGVLITIADTFVFLFLDKYGLRKLEAFFGFLITIMALTFGYEYVTV

SEQ ID NO: 75632 - protein, 438 aa, Homo sapiens
MFYFRGCGRWVAVSFTKQQFPLARLSSDSAAPRTPHFDVIVIGGGHAGTEAATAAARCGSRTLLLTHRVDTIGQMSCNPSFGGIGKGHLMREVDALDGLCSRICDQSGVHYKVLNRRKGPAVWGLRAQIDRKLYKQNMQKEILNTPLLTVQEGAVEDLILTEPEPEHTGKCRVSGVVLVDGSTVYAESVILTTGTFLRGMIVIGLETHPAGRLGDQPSIGLAQTLEKLGFVVGRLKTGTPPRIAKESINFSILNKHIPDNPSIPFSFTNETVWIKPEDQLPCYLTHTNPRVDEIVLKNLHLNSHVKETTRGPRYCPSIESKVLRFPNRLHQVWLEPEGMDSDLIYPQGLSMTLPAELQEKMITCIRGLEKAKVIQPGYGVQYDYLDPRQITPSLETHLVQRLFFAGQINGTTGYEEAAAQGIKTLAVCPNNDMKELVG

SEQ ID NO: 75633 - protein, 138 aa, Homo sapiens
MKKEANLQRGGMGFRKFSPFLALSILVLYQAGSLQAAPFRSALESSPDPATLSKEDARLLLAALVQDYVQMKASELKQEQETQGSSSAAQKRACNTATCVTHRLAGLLSRSGGMVKSNFVPTNVGSKAFGRRRRDLQA

SEQ ID NO: 75634 - protein, 454 aa, Homo sapiens
MPALSTGSGSDTGLYELLAALPAQLQPHVDSQEDLTFLWDMFGEKSLHSLVKIHEKLHYYEKQSPVPILHGAAALADDLAEELQNKPLNSEIRELLKLLSKPNVKALLSVHDTVAQKNYDPVLPPMPEDIDDEEDSVKIIRLVKNREPLGATIKKDEQTGAIIVARIMRGGAADRSGLIHVGDELREVNGIPVEDKRPEEIIQILAQSQGAITFKIIPGSKEETPSKEGKMFIKALFDYNPNEDKAIPCKEAGLSFKKGDILQIMSQDDATWWQAKHEADANPRAGLIPSKHFQERRLALRRPEILVQPLKVSNRKSSGFRKSFRLSRKDKKTNKSMYECKKSDQYDTADVPTYEEVTPYRRQTNEKYRLVVLVGPVGVGLNELKRKLLISDTQHYGVTVPHTTRARRSQESDGVEYIFISKHLFETDVQNNKYVDIFENFHVTVFYKHMPVPF

SEQ ID NO: 75635 - protein, 118 aa, Homo sapiens
MSQQDAVAALSERLLVAAYKGQTENVVQLINKGARVAVTKHGRTPLHLAANKGHLPVVQILLKAGCDLDVQDDGDQTALHRATVVGNTEIIAALIHEGCALDRQDKDGNTALHEASWH

SEQ ID NO: 75636 - protein, 117 aa, Homo sapiens
  MOD_RES (1)..(1): Any amino acid
XLATPPRRAPDQAAEIGSRGSTKAQGPQQQPGSEGPSYAKKVALWLAGLLGAGGTVSVVYIFGNNPVDENGAKIPDEFDNDDHRAHQPLPSPRPSAGTVLPATLHARFGAHRRPLAS

SEQ ID NO: 75637 - protein, 48 aa, Homo sapiens
MLGDGIQEEKDYEPQTICEHLQYLFALLQNSNRRYIDPSGFVKALGLD

SEQ ID NO: 75638 - protein, 151 aa, Homo sapiens
MSDLLLLGLIGGLTLLLLLTLLAFAGYSGLLAGVEVSAGSPPIRNVTVAYKFHMGLYGETGRLFTESCSISPKLRSIAVYYDNPHMVPPDKCRCAVGSILSEGEESPSPELIDLYQKFGFKVFSFPAPSHVVTATFPYTTILSIWLATRRV

SEQ ID NO: 75639 - protein, 320 aa, Homo sapiens
  MOD_RES (1)..(1): Any amino acid
XVALALEVASIDHISEANMEYTMTVFLHQSWRDSRLSYNHTNETLGLDSRFVDKLWLPDTFIVNAKSAWFHDVTVENKLIRLQPDGVILYSIRITSTVACDMDLAKYPMDEQECMLDLESYGYSSEDIVYYWSESQEHIHGLDKLQLAQFTITSYRFTTELMNFKSAGQFPRLSLHFHLRRNRGVYIIQSYMPSVLLVAMSWVSFWISQAAVPARVSLGTGPRRCSEGAGRAALGNRTPHPSAGGSALASGPCQLSWGSGQPGQARHHHGADDDHAHGQCPLLPATGISHQGTGRLLLDLLCLRVCRPGGVRLCSFQRRL

SEQ ID NO: 75640 - protein, 44 aa, Homo sapiens
EDATHLEDNECDIKLAGDSFIAFILRTWCLELKVLAYSTHLYHS

SEQ ID NO: 75641 - protein, 155 aa, Homo sapiens
MSLPSRQTAIIVNPPPPEYINTKKNGRLTNQLQYLQKVVLKDLWKHSFSWPFQRPVDAVKLQLPDYYTIIKNPMDLNTIKKRLENKYYAKASECIEDFNTMFSNCYLYNKPGDDIVLMAQALEKLFMQKLSQMPQEEQVVGVKERIKKGTQQNIA

SEQ ID NO: 75642 - protein, 25 aa, Homo sapiens
MDFLLGNPFSSPVGQRIVPKMPSEQ

SEQ ID NO: 75643 - protein, 230 aa, Homo sapiens
MSIVIPLGVDTAETSYLEMAAGSEPESVEASPVVVEKSNSYPHQLYTSSSHHSHSYIGLPYADHNYGARPPPTPPASPPPSVLISKNEVGIFTTPNFDETSSATTISTSEDGSYGTDVTRCICGFTHDDGYMICCDKCSVWQHIDCMGIDRQHIPDTYLCERCQPRNLDKERAVLLQRRKRENMSDGDTSATESGDEVPVELYTAFQHTPTSITLTASRVSKVNDKRRKK

SEQ ID NO: 75644 - protein, 74 aa, Homo sapiens
MSTAMGRSPSPKTSLSAPPNSSSTENPKTVAKCQVTPRRNVLQKRPVIVKVLSTTKPFEYETPEMEKKIMFHAT

SEQ ID NO: 75645 - protein, 254 aa, Homo sapiens
MDPVVRITRSPATSPVMESENQGLSPLPKPPDLTPEERMELENIRRRKQELLVEIQRLREELSEAMSEVEGLEANEGSKTLQRNRKMAMGRKKFNMDPKKGIQFLVENELLQNTPEEIARFLYKGEGLNKTAIGDYLGEREELNLAVLHAFVDLHEFTDLNLVQALRQFLWSFRLPGEAQKIDRMMEAFAQRYCLCNPGVFQSTDTCYVLSFAVIMLNTSLHNPNVRDKPGLERFVAMNRGINEGGDLPEELLR

SEQ ID NO: 75646 - protein, 284 aa, Homo sapiens
MIHDAQMDYYGTRLATCSSDRSVKIFDVRNGGQILIADLRGHEGPVWQVAWAHPMYGNILASCSYDRKVIIWREENGTWEKSHEHAGHDSSVNSVCWAPHDYGLILACGSSDGAISLLTYTGEGQWEVKKINNAHTIGCNAVSWAPAVVPGSLIDHPSGQKPNYIKRFASGGCDNLIKLWKEEEDGQWKEEQKLEAHSDWVRDVAWAPSIGLPTSTIASCSQDGRVFIWTCDDASSNTWSPKLLHKFNDVVWHVSWSITANILAVSGGDNKEELQMQPQIDHLP

SEQ ID NO: 75647 - protein, 211 aa, Homo sapiens
MQAATMRLNQNTLLLGKKVVLVPYTSEHVPRYHEWMKSEELQRLTASEPLTLEQEYAMQCSWQEDADKCTFIVLDAEKWQAQPGATEESCMVGDVNLFLTDLEDLTLGEIEVMIAEPSCRGKGLGTEAVLAMLSYGVTTLGLTKFEAKIGQGNEPSIRMFQKLHFEQVATSSVFQEVTLRLTVSESEHQWLLEQTSHVEEKPYRDGSAEPC

SEQ ID NO: 75648 - protein, 338 aa, Homo sapiens
MENPQDIFSSNGGCLSDIVIEKYLVESKESVSHVQLACSMQDCAFPLDGTELCIWNTKDPSHQLLILRGHHQPITAMAFGNKVNPLLICSASLDYVIMWNLDECREKVLQGLVPRGTVMGSLLGKVLCLQLSLDDHVVAVCAGNKIFMLDIEQRFSVTYIERPDVNNRHKVPPPTFLHTFSQTQAVRAELQGHLGPVTAVEFCPWRAGTLISASEDRGFKVWDHCTGSLIYSSSVLSAYPLLSLFIDAESRQLVTGCADGQLWIFSLMDGHHYRRVARVDLRKKTETFSTRRVKSGLCSQPVGDQGGQVMLIRKVHCMTQMPPAPTQHPPRPHLACES

SEQ ID NO: 75649 - protein, 580 aa, Homo sapiens
LALLVLLLLGPGGWCLAEPPRDSLREELVITPLPSGDVAATFQFRTRWDSELQREGVSHYRLFPKALGQLISKYSLRELHLSFTQGFWRTRYWGPPFLQAPSGAELWVWFQDTVTEREGSPTPSWDCPDCGARGGVGSRRVIPISGMWIPRGQSPRPTPDRPLSPSDTDHYFLRYAVLPREVVCTENLTPWKKLLPCSSKAGLSVLLKADRLFHTSYHSQAVHIRPVCRNARCTSISWELRQTLSVVFDAFITGQGKKDWSLFRMFSRTLTEPCPLASESRVYVDITTYNQDNETLEVHPPPTTTYQDVILGTRKTYAIYDLLDTAMINNSRNLNIQLKWKRPPENEAPPVPFLHAQRYVSGYGLQKGELSTLLYNTHPYRAFPVLLLDTVPWYLRLYVHTLTITSKGKENKPSYIHYQPAQDRLQPHLLEMLIQLPANSVTKVSIQFERALLKWTEYTPDPNHGFYVSPSVLSALVPSMVAAKPVDWEESPLFNSLFPVSDGSNYFVRLYTEPLLVNLPTPDFSMPYNVICLTCTVVAVCYGSFYNLLTRTFHIEEPRTGGLAKRLANLIRRARGVPPL

SEQ ID NO: 75650 - protein, 238 aa, Homo sapiens
MRSLGALLLLLSACLAVSAGPVPTPPDNIQVQENFNISRIYGKWYNLAIGSTCPWLKKIMDRMTVSTLVLGEGATEAEISMTSTRWRKGVCEETSGAYEKTDTDGKFLYHKSKWNITMESYVVHTNYDEYAIFLTKKFSRHHGPTITAKLYGRAPQLRETLLQDFRVVAQGVGIPEDSIFTMADRVNGLEQATQAGPFMKWTKARQVPSTMLTKDTNPGLGWPLGLVLLFTPLSCSVT

SEQ ID NO: 75651 - protein, 123 aa, Homo sapiens
MGDTSEDASIHRLEGTDLDCQVGGLICKSKSAASEQHVFKAPAPRPSLLGLDLLASLKRREREEKDDGEDKKKSKVSSYKDWEESKDDQKDAEEEGGDQAGQNIRKDRHYRSARVETPSHPGG

SEQ ID NO: 75652 - protein, 213 aa, Homo sapiens
LTNKPRYAGTSESHKKCTALELLEQEHTQGFIITFCSALDDILGGGVPLMKTTEICGAPGVGKTQLCMQLAVDVQIPECFGGVAGEAVFIDTEGSFMVDRVVDLATACIQHLQLIAEKHKGEEHRKALEDFTLDNILSHIYYFRCRDYTELLAQVYLLPDFLSEHSKAHCSSRITLLLCGVALPLPLSARAPPSETKDDIALPPGLMVRLVIV

SEQ ID NO: 75653 - protein, 25 aa, Homo sapiens
MSQSGAVSCCPGATNGSLGRSDGVA

SEQ ID NO: 75654 - protein, 170 aa, Homo sapiens
MAASTASHRPIKGILKNKTSTTSSMVASAEQPRGNVDEELSKKSQKWDEMNILATYHPADKDYGLMKIDEPSTPYHRLAAAEGLEPKYRIQEQESSGEEDSDLSPEEREKKRQFEMKRKLHYNEGLNIKLARQLISKDLHDDDEDEEMLETADGESMNTEESNQGSTPSD

SEQ ID NO: 75655 - protein, 295 aa, Homo sapiens
MSRKQNQKDSSGFIFDLQSNTVLAQGGAFENMKEKINAVRAIVPNKSNNEIILVLQHFDNCVDKTVQAFMEGSASEVLKEWTVTGKKKNKKKKNKPKPAAEPSNGIPDSSKSVSIQEEQSAPSSEKGGMNGYHVNGAINDTESVDSLSEGLETLSIDARELEDPESAMLDTLDRTGSMLQNGVSDFETKSLTMHSIHNSQQPRNAAKSLSRPTTETQFSNMGMEDVPLATSKKLSSNIEKSVKDLQRCTVSLARYRVVVKEEMDASIKKMKQAFAELESWYSNAARVLGAKYCQV

SEQ ID NO: 75656 - protein, 65 aa, Homo sapiens
MSIAIPLGVTTSDTSYSDMAAGSEVSCLGSEWKRAWSLGQCRRHFDHLTHCKCHVRFHGSIKRSN

SEQ ID NO: 75657 - protein, 201 aa, Homo sapiens
MPLEQRSQHCKPEEGLEARGEALGLVGAQAPATEEQEAASSSSTLVEVTLGEVPAAESPDPPQSPQGASSLPTTMNYPLWSQSYEDSSNQEEEGPSTFPDLESEFQAALSRKVAKLVHFLLLKYRAREPVTKAEMLGSVVGNWQYFFPVIFSKASDSLQLVFGIELMEVDPIGHVYIFATCLGLSYDGLLGDNQIMPKTGF

SEQ ID NO: 75658 - protein, 167 aa, Homo sapiens
MTEGRHCQVHLLDDRRLELLVQPKLLARELLDLVASHFNLKEKEYFGITFIDDTGQQNWLQLDHRVLDHDLPKKPGPTILHFAVRFYIESISFLKDKTTVELFFLNAKACVHKGQIEVESETIFKLAAFILQEAKGDYTSDENARKDLKTLPAFPTKTLQEHPSLAY

SEQ ID NO: 75659 - protein, 61 aa, Homo sapiens
MSRRSSRLQAKQQPQPSQTESPQEAQIIQAKKRKTTQFTNGLFYFPGCQKKKRGGHQETSV

SEQ ID NO: 75660 - protein, 277 aa, Homo sapiens
MASADELTFHEFEEATNLLADTPDAATTSRSDQLTPQGHVAVAVGSGGSYGAEDEVEEESDKAALLQEQQQQQQPGFWTFSYYQSFFDVDTSQVLDRIKGSLLPRPGHNFVRHHLRNRPDLYVTVAGISIYCYAWLVPLALWGFLRWRKGVQERMGPYTFLETVCIYGYSLFVFIPMVVLWLIPVPWLQWLFGALALGLSAAGLVFTLWPVVREDTRLVATVLLSVVVLLHALLAMGCKLYFFQSLPPENVAPPPQITSLPSNIALSPTLPQSLAPS

SEQ ID NO: 75661 - protein, 217 aa, Homo sapiens
MWSPQDRKYNSPPTQLSLKPNSQSLRSGNWSERKSHRLPRLPKRHSHDDMLLLAQLSLPSSPSSLNEDSLSTTSELLSSRRARRIPKLVQRINSIYNAKRGKKRLKKLSMSSIETASLRAHTQRLVHIQSMLKRAPSYRTLELELLEWQERELFEYFVVVSLKKKPSRNTYLPEVSYQFPKLDRPTKQMREAEERLKAIPQFCFPDAKDWLPVSEYS

SEQ ID NO: 75662 - protein, 241 aa, Homo sapiens
MATGELGDLGGYYFRFLPQKTFQSLSSKEITSRLRQWSMLGRIKAQAFGFDQTFQSYRKDDFVMAFFKDPNVIPNLKLLSDSSGQWIILGTEVKKIEAINVPCTQLSMSFFHRLYDEDIVRDSGHIVKCLDSFCDPFLISDELRRVLLVEDSEKYEIFSQPDREEFLFCLFKHLCLGGALCQYEDVISPYLETTKLIYKDLVSVRKNPQTKKIQITSSVFKVSAYVSVRELLQPKNLITFY

SEQ ID NO: 75663 - protein, 55 aa, Homo sapiens
  MOD_RES (1)..(1): Any amino acid
XSTPRPSNGDSPSHPYHRTFSPHFHHFVEQCLQRNPDARPSASTLLNHSFFKQVS

SEQ ID NO: 75664 - protein, 40 aa, Homo sapiens
MSGREPSLEILPRTSLHSIPVTVEVKPVLPRAMPSSMGGG

SEQ ID NO: 75665 - protein, 113 aa, Homo sapiens
MVQVSIASNEVSYPSELLQPAMRKSPGLSDCLWAWILLLSTLTGRSYGQPSLQDELKDNTTVFTRILDRLLDGYDNRLRPGLGERVTEVKTDIFVTSFGPVSDHDMEYTIDVF

SEQ ID NO: 75666 - protein, 147 aa, Homo sapiens
  MOD_RES (1)..(1): Any amino acid
XSYKAVKSKDIKEYVKWMMYWIIFALFTTAETFTDIFLCWFPFYYELKIAFVAWLLSPYTKGSSLLYRKFVHPTLSSKEKEIDDCLVQAKDRSYDALVHFGKRGLNVAATAAVMAASKVLCWKYHNYMSLSPSSVPCSSPVRPHRTG

SEQ ID NO: 75667 - protein, 92 aa, Homo sapiens
MEARLNAALREKTSLSANNATLEKQLIELTRTNELLKSKFSENGNQKNLRILSLELMKLRNKRETKMRGMMAKQEGMEMKLQVTQRSLEESQ

SEQ ID NO: 75668 - protein, 212 aa, Homo sapiens
MSSKGSSTDGRTDLANGSLSSSPEEMSGAEEGRETSSGIEVEASDLSLSLTGDDGGPNRTSTESRGTDTESSGEDKDSDSMEDTGHYSINDENRVHDRSEEEEEEEEEEEEEQPRRRVQRKRANRDQDSSDDERALEDWVSSETSALPRPRWQALPALRERELGSSARFVYEACGARVFVQRFRLQHGLEGHTGCVNTLHFNQRGTWLASGS

SEQ ID NO: 75669 - protein, 2217 aa, Homo sapiens
MDGDGGRRDVPGTLMEPGRGAGPAGMAEPRAKAARPGPQRFLRRSVVESDQEEPPGLEAAEAPGPQPPQPLQRRVLLLCKTRRLIAERARGRPAAPAPAALVAQPGAPGAPADAGPEPVGTQEPGPDPIAAAVETAPAPDGGPREEAAATVRKEDEGAAEAKPEPGRTRRDEPEEEEDDEDDLKAVATSLDGRFLKFDIELGRGSFKTVYKGLDTETWVEVAWCELQDRKLTKLERQRFKEEAEMLKGLQHPNIVRFYDFWESSAKGKRCIVLVTELMTSGTLKTYLKRFKVMKPKVLRSWCRQILKGLLFLHTRTPPIIHRDLKCDNIFITGPTGSVKIGDLGLATLKRASFAKSVIGTPEFMAPEMYEEHYDESVDVYAFGMCMLEMATSEYPYSECQNAAQIYRKVTCGIKPASFEKVHDPEIKEIIGECICKNKEERYEIKDLLSHAFFAEDTGVRVELAEEDHGRKSTIALRLWVEDPKKLKGKPKDNGAIEFTFDLEKETPDEVAQEMIESGFFHESDVKIVAKSIRDRVALIQWRRERIWPALQPKEQQDVGSPDKARGPPVPLQVQVTYHAQAGQPGPPEPEEPEADQHLLPPTLPTSATSLASDSTFDSGQGSTVYSDSQSSQQSVMLGSLADAAPSPAQCVCSPPVSEGPVLPQSLPSLGAYQQPTAAPGLPVGSVPAPACPPSLQQHFPDPAMSFAPVLPPPSTPMPTGPGQPAPPGQQPPPLAQPTPLPQVLAPQPVVPLQPVPPHLPPYLAPASQVGAPAQLKPLQMPQAPLQPLAQVPPQMPPIPVVPPITPLAGIDGLPPALPDLPTATVPPVPPPQYFSPAVILPSLAAPLPPASPALPLQAVKLPHPPGAPLAMPCRTIVPNAPATIPLLAVAPPGVAALSIHSAVAQLPGQPVYPAAFPQMAPTDVPPSPHHTVQNMRATPPQPALPPQPTLPPQPVLPPQPTLPPQPVLPPQPTRPPQPVLPPQPMLPPQPVLPPQPALPVRPEPLQPHLPEQAAPAATPGSQILLGHPAPYAVDVAAQVPTVPVPPAAVLSPPLPEVLLPAAPELLPQFPSSLATVSASVQSVPTQTATLLPPANPPLPGGPGIASPCPTVQLTVEPVQEEQASQDKPPGLPQSCESYGGSDVTSGKELSDSCEGAFGGGRLEGRAARKHHRRSTRARSRQERASRPRLTILNVCNTGDKMVECQLETHNHKMVTFKFDLDGDAPDEIATYMVEHDFILQAERETFIEQMKDVMDKAEDMLSEDTDADRGSDPGTSPPHLSTCGLGTGEESRQSQANAPVYQQNVLHTGKRWFIICPVAEHPAPEAPESSPPLPLSSLPPEASQDSAPYKDQLSSKEQPSFLASQQLLSQAGPSNPPGAPPAPLAPSSPPVTALPQDGAAPATSTMPEPASGTASQAGGPGTPQGLTSELETSQPLAETHEAPLAVQPLVVGLAPCTPAPEAASTRDASAPREPLPPPAPEPSPHSGTPQPALGQPAPLLPAAVGAVSLATSQLPSPPLGPTVPPQPPSALESDGEGPPPRVGFVDSTIKSLDEKLRTLLYQEHVPTSSASAGTPVEVGDRDFTLEPLRGDQPRSEVCGGDLALPPVPKEAVSGRVQLPQPLVEKSELAPTRGAVMEQGTSSSMTAESSPRSMLGYDRDGRQVASDSHVVPSVPQDVPAFVRPARVEPTDRDGGEAGESSAEPPPSDMGTVGGQASHPQTLGARALGSPRKRPEQQDVSSPAKTVGRFSVVSTQDEWTLASPHSLRYSAPPDVYLDEAPSSPDVKLAVRRAQTASSIEVGVGEPVSSDSGDEGPRARPPVQKQASLPVSGSVAGDFVKKATAFLQRPSRAGSLGPETPSRVGMKVPTISVTSFHSQSSYISSDNDSELEDADIKKELQSLREKHLKEISELQSQQKQEIEALYRRLGKPLPPNVGFFHTAPPTGRRRKTSKSKLKAGKLLNPLVRQLKVVASSTGHLADSSRGPPAKDPAQASVGLTADSTGLSGKAVQTQQPCSVRASLSSDICSGLASDGGGARGQGWTVYHPTSERVTYKSSSKPRARFLSGPVSVSIWSALKRLCLGKEHSSRSSTSSLAPGPEPGPQPALHVQAQVNNSNNKKGTFTDDLHKLVDEWTSKTVGAAQLKPTLNQLKQTQKLQDMEAQAGWAAPGEARAMTAPRAGVGMPRLPPAPGPLSTTVIPGAAPTLSVPTPDPESEKPD

SEQ ID NO: 75670 - protein, 80 aa, Homo sapiens
MDSVVFEDVAVNFTQEEWALLGPSQKKLYRDVMQETFVNLASIGENWEEKNIEDHKNQGRKLRDGVLPCCPDWSQTPELK

SEQ ID NO: 75671 - protein, 721 aa, Homo sapiens
  MOD_RES (1)..(1): Any amino acid
XDSQRKQYEEWLQETQQLLQMQQKYLEEQIGAHRKSKKALSAKQRTAKKAGREFPEEDAEQLKHVTEQQSMVQKQLEQIRKQQKEHAELIEDYRIKQQQQCAMAPPTMMPSVQPQPPLIPGATPPTMSQPTFPMVPQQLQHQQHTTVISGHTSPVRMPSLPGWQPNSAPAHLPLNPPRIQPPIAQLPIKTCTPAPGTVSNANPQSGPPPRVEFDDNNPFSESFQERERKERLREQQERQRIQLMQEVDRQRALQQRMEMEQHGMVGSEISSSRTSVSQIPFYSSDLPCDFMQPLGPLQQSPQHQQQMGQVLQQQNIQQGSINSPSTQTFMQTNERRQVGPPSFVPDSPSIPVGSPNFSSVKQGHGNLSGTSFQQSPVRPSFTPALPAAPPVANSSLPCGQDSTITHGHSYPGSTQSLIQLYSDIIPEEKGKKKRTRKKKRDDDAESTKAPSTPHSDITAPPTPGISETTSTPAVSTPSELPQQADQESVEPVGPSTPNMAAGQLCTELENKLPNSDFSQATPNQQTYANSEVDKLSMETPAKTEEIKLEKAETESCPGQEEPKLEEQNGSKVEGNAVACPVSSAQSPPHSAGAPAAKGDSGNELLKHLLKNKKSSSLLNQKPEGSICSEDDCTKDNKLVEKQNPAEGLQTLGAQMQGGFGCGNQLPKTDGGSETKKQRSKRTQRTGEKAAPRSKKRKKDEEEKQAMYSSTDTFTHLKQWPI

SEQ ID NO: 75672 - protein, 40 aa, Homo sapiens
MEASALTSSAVTSVAKVVRVASGSAVVLPLARIATVVIGG

SEQ ID NO: 75673 - protein, 15 aa, Homo sapiens
MSYFGEHFWGEKNHG

SEQ ID NO: 75674 - protein, 115 aa, Homo sapiens
MAEEVVVVAKFDYVAQQEQELDIKKNERLWLLDDSKSWWRVRNSMNKTGFVPSNYVERKNSARKASIVKNLKDTLGIGKVKRKPSVPDSASPADDSFVDPGERLYDLNMPAYVKF

SEQ ID NO: 75675 - protein, 176 aa, Homo sapiens
MCSKPEDPVEYLESCLQKVKELGGCDKVKWDTFVSQEKKTLPPLNGGQSRRSFLRNVMPENSNFPYRRYDRLPPIHQFSIESDTDLSETAELIEEYEVFDPTRPRPKIILVIGGPGSGKGTQSLKIAERYGFQYISVGELLRKKIHSTSSNRKWSLIAKIITTGELAPQETTITEI

SEQ ID NO: 75676 - protein, 70 aa, Homo sapiens
MEVAVPVKQEAEGLALDSPWHRFRRFHLGDAPGPREALGLLRALCRDWLRPEVHTKEQMLELLVLEQFLS

SEQ ID NO: 75677 - protein, 262 aa, Homo sapiens
MIHVRRHETRRNSKSHVPEQKSRVDWRRTKRSSISQLLDSDEELDSEEFDSDEELDSDESFENDEELDSNKGPDCNKTPGSERELNLSKIQSEGNDSKCLINSGNGSTYEEETNKIKHRNIDLQDQEKHLSQEDNDLNKQTGQIIEDDQEKHLSQEDNDLNKQTGQIIEDDLEEEDIKRGKRKRLSSVMCDSDESDDSDILVRKVGVKRPRRVVEDEGSSVEMEQKTPEKTLAAQKREKLQKLKELSKQRSRQRRSSGRDFE

SEQ ID NO: 75678 - protein, 85 aa, Homo sapiens
MDGTETRQRRLDSCGKPGELGLPHPLSTGGLPVASEDGALRAPESQSVTPKPLETEPSRETTWSIGLQVTVPFMFAGLGLSWAGM

SEQ ID NO: 75679 - protein, 210 aa, Homo sapiens
MALSVPGYSPGFRKPPEVVRLRRKRARSRGAAASPPRELTEPAARRAALVAGLPLRPFPAAGGRGGGSGGGPAAARRNPFARLDNRPRVAAEPPDGPAREQPEAPVPFLDSNQENDLLWEEKFPERTTVTELPQTSHVSFSEPDIPSSKSTELPVDWSIKTRLLFTSSQPFTWADHLKAQEEAQGLVQHCRATEVTLPKSIQVCELYFSI

SEQ ID NO: 75680 - protein, 101 aa, Homo sapiens
MPEIRVTPLGACPVLSWNLVLPPGRGSRAPSSTDTRTGFHVLPHGAAPRLWPRHPDVWCWLWTLRVAGRGRGRPGRGPKLHPGLHCGQECHAGLWNAHGLQ

SEQ ID NO: 75681 - protein, 217 aa, Homo sapiens
MPFSNSHNALKLRFPAEDEFPDLSAHNNHMAKVLTPELYAELRAKSTPSGFTLDDVIQTGVDNPGHPYIMTVGCVAGDEESYEVFKDLFDPIIEDRHGGYKPSDEHKTDLNPDNLQGGDDLDPNYVLSSRVRTGRSIRGFCLPPHCSRGERRAIEKLAVEALSSLDGDLAGRYYALKSMTEAEQQQLIDDHFLFDKPVSPLLLASGMARDWPDARGI

SEQ ID NO: 75682 - protein, 115 aa, Homo sapiens
  MOD_RES (1)..(1): Any amino acid
XLGLERDVSRAVELLERLQRSGELPPQKLQALQRVLQSRFCSAIREVYEQLYDTLDITGSAEIRAHATAKVGPAPHCSWCLFNCLVELNISFMPVISVSSLMIFAKSMCHLTISK

SEQ ID NO: 75683 - protein, 167 aa, Homo sapiens
MATPSAAFEALMNGVTSWDVPEDAVPCELLLIGEASFPVMVNDMGQVLIAASSYGRGRLVVVSHEDYLVEAQLTPFLLNAVGWLCSSPGAPIGVHPSLAPLAKILEGSGVDAKVEPEVKDSLGVYCIDAYNETMTEKLVKFMKCGGGLLIGGQAWDWANQGEDERVL

SEQ ID NO: 75684 - protein, 233 aa, Homo sapiens
YSVRDTLLGPGRPYRAIDFSHQGPAFVTWHRYHLLCLERDLQRLIGNESFALPYWNFATGRNECDVCTDQLFGAARPDDPTLISRNSRFSSWETVCDSLDDYNHLVTLCNGTYEGLLRRNQMGRNSMKLPTLKDIRDCLSLQKFDNPPFFQNSTFSFRNALEGFDKADGTLDSQVMSLHNLVHSFLNGTNALPHSAANDPIFVKRESDQGTPFPACAGNHEPGRLYSDFLLLA

SEQ ID NO: 75685 - protein, 336 aa, Homo sapiens
MELRVGNKYRLGRKIGSGSFGDIYLGANIASGEEVAIKLECVKTKHPQLHIESKFYKMMQGGVGIPSIKWCGAEGDYNVMVMELLGPSLEDLFNFCSRKFSLKTVLLLADQMISRIEYIHSKNFIHRDVKPDNFLMGLGKKGNLVYIIDFGLAKKYRDARTHQHIPYRENKNLTGTARYASINTHLGIEQSRRDDLESLGYVLMYFNLGSLPWQGLKAATKRQKYERISEKKMSTPIEVLCKGYPSEFSTYLNFCRSLRFDDKPDYSYLRQLFRNLFHRQGFSYDYVFDWNMLKFARSTSPPTAAGLTAFLEVPLEAGPGVRSWAEAPTALSFANL

SEQ ID NO: 75686 - protein, 53 aa, Homo sapiens
MPYPELYNWDSCAQFVSDFLTMVPLPDPLKPPSHLYSSTTVLKYQKGNCFDFS

SEQ ID NO: 75687 - protein, 171 aa, Homo sapiens
MTSTGQDSTTTRQRRSRQNPQSPPQDSSVTSKRNIKKGAVPRSIPNLAEVKKKGKMKKLGQAMEEDLIVGLQGMDLNLEAEALAGTGLVLDEQLNEFHCLWDDSFPEGPERLHAIKEQLIQEGLLDRCVSFQARFAEKEELMLVHSLEYIDLMETTQYMNEGELRVLADTY

SEQ ID NO: 75688 - protein, 156 aa, Homo sapiens
MSPGCMLLFVFGFVGGAVVINSAILVSLSVLLLVHFSISTGVPALTQNLPRILRKERPISLGIFPLPAGDGLLTPDAQKGGETPGSEQWKFQELSQPRSHTSLKVSNSPEPQKAVEQEDELSDVSQGGSKATTPASTANSDVATIPTDTPLKEENE

SEQ ID NO: 75689 - protein, 57 aa, Homo sapiens
MCGIFAYLNYHVPRTRREILETLIKGLQRLEYRGYDSADLSPKLYSRPPTSFFLDRP

SEQ ID NO: 75690 - protein, 1110 aa, Homo sapiens
MQYLNIKEDCNAMAFCAKMRSSKKTEVNLEAPEPGVEVIFYLSDREPLRLGSGEYTAEELCIRAAQACRISPLCHNLFALYDENTKLWYAPNRTITVDDKMSLRLHYRMRFYFTNWHGTNDNEQSVWRHSPKKQKNGYEKKKIPDATPLLDASSLEYLFAQGQYDLVKCLAPIRDPKTEQDGHDIENECLGMAVLAISHYAMMKKMQLPELPKDISVSTHDLKVKYLATLETLTKHYGAEIFETSMLLISSENEMNWFHSNDGGNVLYYEVMVTGNLGIQWRHKPNVVSVEKEKNKLKRKKLENKHKKDEEKNKIREEWNNFSYFPEITHIVIKESVVSINKQDNKKMELKLSSHEEALSFVSLVDGYFRLTADAHHYLCTDVAPPLIVHNIQNGCHGPICTEYAINKLRQEGSEEGMYVLRWSCTDFDNILMTVTCFEKSEQVQGAQKQFKNFQIEVQKGRYSLHGSDRSFPSLGDLMSHLKKQILRTDNISFMLKRCCQPKPREISNLLVATKKAQEWQPVYPMSQLSFDRILKKDLVQGEHLGRGTRTHIYSGTLMDYKDDEGTSEEKKIKVILKVLDPSHRDISLAFFEAASMMRQVSHKHIVYLYGVCVRDVENIMVEEFVEGGPLDLFMHRKSDVLTTPWKFKVAKQLASALSYLEDKDLVHGNVCTKNLLLAREGIDSECGPFIKLSDPGIPITVLSRQECIERIPWIAPECVEDSKNLSVAADKWSFGTTLWEICYNGEIPLKDKTLIEKERFYESRCRPVTPSCKELADLMTRCMNYDPNQRPFFRAIMRDINKLEEQNPDIVSEKKPATEVDPTHFEKRFLKRIRDLGEGHFGKVELCRYDPEGDNTGEQVAVKSLKPESGGNHIADLKKEIEILRNLYHENIVKYKGICTEDGGNGIKLIMEFLPSGSLKEYLPKNKNKINLKQQLKYAVQICKGMDYLGSRQYVHRDLAARNVLVESEHQVKIGDFGLTKAIETDKEYYTVKDDRDSPVFWYAPECLMQSKFYIASDVWSFGVTLHELLTYCDSDSSPMALFLKMIGPTHGQMTVTRLVNTLKEGKRLPCPPNCPDEVYQLMRKCWEFQPSNRTSFQNLIEGFEALLK

SEQ ID NO: 75691 - protein, 49 aa, Homo sapiens
  MOD_RES (1)..(1): Any amino acid
XEPWKVVRKGRRQYPDAAITKRTSKMKMSALWQMYDYWYGEESNSHHAL

SEQ ID NO: 75692 - protein, 108 aa, Homo sapiens
MLAKQYGHMKIVALMDTYSPSLPKSLYRSPEKYEDLSSSDESCPAPQRQRPCRKKGVSIHEGPRALARITGIGLGGRAPRPRYEQAPPRGYVTFNSSGENPLEEEGLC

SEQ ID NO: 75693 - protein, 83 aa, Homo sapiens
MAVANSSPVNPVVFFDVSIGGQEVGRMKIELFADVVPKTAENFRQFCTGEFRSVSDVFDFFACSRGVFWGCSEGIGEPPAGLE

SEQ ID NO: 75694 - protein, 205 aa, Homo sapiens
MSSEMLPAFIETSNVDKKQGINEDQEESQKPRLGEGCEPISKRQMKKLIKQKQWEEQRELRKQKRKEKRKRKKLERQCQMEPNSDGHDRKRVRRDVVHSTLRLIIDCSFDHLMVLKDIKKLHKQIQRCYAENRRALHPVQFYLTSHGGQLKKNMDENDKGWVNWKDIHIKPEHYSELIKKEDLIYLTSDSPNILKELDESKAYVI

SEQ ID NO: 75695 - protein, 104 aa, Homo sapiens
MVEKYRPQTLNDLISHQDILSTIQKFINEDRLPHLLLYGPPGTGKTSTILACAKQLYKDKEFGSMVLELNASDDRGIDIIRGPILSFASTRTIFKKGFKLVILD

SEQ ID NO: 75696 - protein, 84 aa, Homo sapiens
MAGPGWGPPRLDGFILTERLGSGTYATVYKAYAKKDTREVVAIKCVAKKSLNKASVENLLTEIEILKGIRHPHIVQLKDFQDSA

SEQ ID NO: 75697 - protein, 54 aa, Homo sapiens
MDDTLFQLKFTAKQLEKLAKKAEKDSKAEQAKVKKAGVHRCDLVSLQPPPPGFK

SEQ ID NO: 75698 - protein, 202 aa, Homo sapiens
MGQKVTGGIKTVDMRDPTYRPLKQELQGLDYCKPTRLDLLLDMPPVSYDVQLLHSWNNNDRSLNVFVKEDDKLIFHRHPVAQSTDAIRGKVGYTRGLHVWQITWAMRQRGTHAVVGVATADAPLHSVGYTTLVGNNHESWGWDLGRNRLYHDGKNQPSKTYPAFLEPDETFIVPDSFLVALDMDDGTLSFIVDGQYMGVAFR

SEQ ID NO: 75699 - protein, 506 aa, Homo sapiens
MADHNPDSDSTPRTLLRRVLDTADPRTPRRPRSARAGARRALLETASPRKLSGQTRTIARGRSHGARSVGRSAHIQASGHLEEQTPRTLLKNILLTAPESSILMPESVVKPVPAPQAVQPSRQESSCGSLELQLPELEPPTTLAPGLLAPGRRKQRLRLSVFQQGVDQGLSLSQEPQGNADASSLTRSLNLTFATPLQPQSVQRPGLARRPPARRAVDVGAFLRDLRDTSLAPPNIVLEDTQPFSQPMVGSPNVYHSLPCTPHTGAEDAEQAAGRKTQSSGPGLQKNSPGKPAQFLAGEAEEVNAFALGFLSTSSGVSGEDEVEPLHDGVEEAEKKMEEEASPESASSTPESLQARRHHQFLEPAPAPGAAVLSSEPAEPLLVRHPPRPRTTGPRPRQDPHKAGLSHYVKLFSFYAKMPMERKALEMVEKCLDKYFQHLCDDLEVFAAHAGRKTVKPEDLELLMRRQGLVTDQVSLHVLVERHLPLEYRQLLIPCAYSGNSVFPAQ

SEQ ID NO: 75700 - protein, 170 aa, Homo sapiens
MVMEKPSPLLVGREFVRQYYTLLNQAPDMLHRFYGKNSSYVHGGLDSNGKPADAVYGQKEIHRKVMSQNFTNCHTKIRHVDAHATLNDGVVVQPFPQRNVLHITDIWYVSFIGIFLIFYVFEKPVRNTGFDNILKAGKTQIVSSLRVMTTFWCGEIAIGKFDNFDSHWYV

SEQ ID NO: 75701 - protein, 174 aa, Homo sapiens
MWKPMEHSQRRRQDFEIYGPRWASWNIGVFICIRCAGIHRNLGVHISRVKSVNLDQWTQEQIQCMQEMGNGKANRLYEAYLPETFRRPQIDPAVEGFIRDKYEKKKYMDRSLDINAFRKEKDDKWKRGSEPVPEKKLEPVVFEKVKMPQKKEDPQLPRKSSPKSTAPVMDLLGL

SEQ ID NO: 75702 - protein, 31 aa, Homo sapiens
MVVPEKEQSWIPKIFKKKTCTTFIVDSTDPG

SEQ ID NO: 75703 - protein, 64 aa, Homo sapiens
MERPLENGDESPDSQGHATDWRFAVCSFRDAWEEEEPASQMHVKDPGTRDVQGRAVLLLCAHSP

SEQ ID NO: 75704 - protein, 177 aa, Homo sapiens
MVRGLDEDETNFLDEVSRQQELIEKQRREEELKELKEYRNNLKKVGISQENKKEVEKKLTVKPIETKNKFSQAKLLAGAVKHKSSESGNSVKRLKPDPEPDDKNQEPSSCKSLGNTSLSGPSIHCPSAAVCIGILPGLGAYSGSSDSESSSDSEGTINATGKIVSSIFRTNTFLEAP

SEQ ID NO: 75705 - protein, 110 aa, Homo sapiens
MPFHHCHRDPLPPPGLTPERLHARRQLYAACAVCFVFMAGEVVGGYLAHSLAIMTDAAHLLADVGSMMGSLFSLWLSTRPATRTMTFGWHRSETLGALASVVSLWMVTGI

SEQ ID NO: 75706 - protein, 933 aa, Homo sapiens
MESMLNKLKSTVTKVTADVTSAVMGNPVTREFDVGRHIASGGNGLAWKIFNGTKKSTKQEVAVFVFDKKLIDKYQKFEKDQIIDSLKRGVQQLTRLRHPRLLTVQHPLEESRDCLAFCTEPVFASLANVLGNWENLPSPISPDIKDYKLYDVETKYGLLQVSEGLSFLHSSVKMVHGNITPENIILNKSGAWKIMGFDFCVSSTNPSEQEPKFPCKEWDPNLPSLCLPNPEYLAPEYILSVSCETASDMYSLGTVMYAVFNKGKPIFEVNKQDIYKSFSRQLDQLSRLGSSSLTNIPEEVREHVKLLLNVTPTVRPDADQMTKIPFFDDVGAVTLQYFDTLFQRDNLQKSQFFKGLPKVLPKLPKRVIVQRILPCLTSEFVNPDMVPFVLPNVLLIAEECTKEEYVKLILPELGPVFKQQEPIQASNMILLIFLQKMDLLLTKTPPDEIKNSVLPMVYRALEAPSIQIQELCLNIIPTFANLIDYPSMKNALIPRIKNACLQTSSLAVRVNSLVCLGKILEYLDKWFVLDDILPFLQQIPSKEPAVLMGILGIYKCTFTHKKLGITKEQLAGKVLPHLIPLSIENNLNLNQFNSFISVIKEMLNRLESEHKTKLEQLHIMQEQQKSLDIGNQMNVSEEMKVTNIGNQQIDKVFNNIGADLLTGSESENKEDGLQNKHKRASLTLEEKQKLAKEQEQAQKLKSQQPLKPQVHTPVATVKQTKDLTDTLMDNMSSLTSLSVSTPKSSASSTFTSVPSMGIGMMFSTPTDNTKRNLTNGLNANMGFQTSGFNMPVNTNQNFYSSPSTVGVTKMTLGTPPTLPNFNALSVPPAGAKQTQQRPTDMSALNNLFGPQKPKVSMNQLSQQKPNQWLNQFVPPQGSPTMGSSVMGTQMNVIGQSAFGMQGNPFFNPQNFAQPPTTMTNSSSASNDLKDLFG

SEQ ID NO: 75707 - protein, 266 aa, Homo sapiens
MWPFPSRSLFPPPTQAWLQTVSSDPEAQGWGAWNETKEILGPEGGEGKEEKEEEEDAEEDQDGDAGFLLSLLEQENLAECPLPDQELEAIKMKVCAMEQAEGTPRPPGVQQQAEEEEGTAAGQLLSPETVGCPLSGTPEEKVEADHRSVYVGNLCLHRVCHQGLRAGRRGAGPEPLPGPGHQGAAEKNQLPWDQLHRPRGPSRTPRLQGGTLPPQRPPGQAPAQTTRAEPGPWKILTMVFTVLKGRPDFERGAGAWIRSKPLVLHP

SEQ ID NO: 75708 - protein, 72 aa, Homo sapiens
  MOD_RES (1)..(1): Any amino acid
XQGPLAMAEMDPTQRQDLTLSPKLEYSGMIIAHCHLEPLGSSDPPASASQVAGTTGRKNEGRDQLSMPLEAI

SEQ ID NO: 75709 - protein, 556 aa, Homo sapiens
MEEPPLLPGENIKDMAKDVTYICPFTGAVRGTLTVTNYRLYFKSMERDPPFVLDASLGVINRVEKIGGASSRGENSYGLETVCKDIRNLRFAHKPEGRTRRSIFENLMKYAFPVSNNLPLFAFEYKEVFPENGWKLYDPLLEYRRQGIPNESWRITKINERYELCDTYPALLVVPANIPDEELKRVASFRSRGRIPVLSWIHPESQATITRCSQPMVGVSGKRSKEDEKYLQAIMDSNAQSHKIFIFDARPSVNAVANKAKGGGYESEDAYQNAELVFLDIHNIHVMRESLRKLKEIVYPNIEETHWLSNLESTHWLEHIKLILAGALRIADKVESGKTSVVVHCSDGWDRTAQLTSLAMLMLDGYYRTIRGFEVLVEKEWLSFGHRFQLRVGHGDKNHADADRSPVFLQFIDCVWQMTRQFPTAFEFNEYFLITILDHLYSCLFGTFLCNSEQQRGKENLPKRTVSLWSYINSQLEDFTNPLYGSYSNHVLYPVASMRHLELWVGYYIRWNPRMKPQEPIHNRYKELLAKRAELQKKVEELQREISNRSTSSSER

SEQ ID NO: 75710 - protein, 364 aa, Homo sapiens
  MOD_RES (1)..(1): Any amino acid
XDTPTHEDLTKNKERTSESRGLSRLFSSFLKRPKSQVSEEEGKEVESDKEKGEGGQKEIEFGTSLDEEIILKAPIAAPEPELKTDPSLDLHSLSSAETQPAQEELREDPDFEIKEGEGLEECSKIEVKEESPQSKAETELKASQKPIRKHRNMHCKVSLLDDTVYECVVEKHAKGQDLLKRVCEHLNLLEEDYFGLAIWDNATSKTWLDSAKEIKKQVRGVPWNFTFNVKFYPPDPAQLTEDITRYYLCLQLRQDIVAGRLPCSFATLALLGSYTIQSELGDYDPELHGVDYVSDFKLAPNQTKELEEKVMELHKSYRSMTPAQADLEFLENAKKLSMYGVDLHKAKLLKLLGRSSARRGGSHL

SEQ ID NO: 75711 - protein, 161 aa, Homo sapiens
MLTKFETKSARVKGLSFHPKRPWILTSLHNGVIQLWDYRMCTLIDKFDEHDGPVRGIDFHKQQPLFVSGGDDYKIKVWNYKLRRCLFTLLGHLDYIRTTFFHHCVNRAQPLCDVCSVPPHRRLGSISQPGPDCARLGYFWSEEKKPVPWCGGIGCERNNWG

SEQ ID NO: 75712 - protein, 117 aa, Homo sapiens
  MOD_RES (1)..(1): Any amino acid
XKHGELWVRDSPASLALISSQSSENLEADSVCKIHEEKDFIAFCSSTPHNVSWRDRTRGSIFITELITCFQKYSCCCHLMEIFRKVQKSFEVPQAKAQMPTIERATLTRDFYLFPGN

SEQ ID NO: 75713 - protein, 67 aa, Homo sapiens
MQSPAATAEGLSGPLFGAYTFPTFKFQPRHDSMDWRRISTLDVDRVARELDVATLQENIAGITFCNL

SEQ ID NO: 75714 - protein, 41 aa, Homo sapiens
MPSRLRKTRKLRGHVSHGHGRIVESGVSPCWPGWSRTPDLR

SEQ ID NO: 75715 - protein, 298 aa, Homo sapiens
MAETLFWTPLLVVLLAGLGDTEAQQTTLHPLVGRVFVHTLDHETFLSLPEHVAVPPAVHITYHAHLQGHPDLPRWLRYTQRSPHHPGFLYGSATPEDRGLQVIEVTAYNRDSFDTTRQRLVLEIGDPEGPLLPYQAEFLVRSHDAEEVLPSTPASRFLSALGGLWEPGELQLLNVTSALDRGGRVPLPIEGRKEGVYIKVGSASPFSTCLKMVASPDSHARCAQGQPPLLSCYDTLAPHFRVDWCNVTLAEERPGYLRHPDGPPLHHPREHRGAAADGGQPRGAPATLHPAHVQCAHR

SEQ ID NO: 75716 - protein, 85 aa, Homo sapiens
MASPSPPPESKEEWDYLDPAQRSLYKDVMMENYGNLVSLGLTLLPRLVCSDANTACCSLNLLGLSDQSSHLSYLSSWDYRCFEQR

SEQ ID NO: 75717 - protein, 2904 aa, Homo sapiens
MDPRNTAMLGLGSDSEGFSRKSPSAISTGTLVSKREVELEKNTKEEEDLRKRNRERNIEAGKDDGLTDAQQQFSVKETNFSEGNLKLKIGLQAKRTKKPPKNLENYVCRPAIKTTIKHPRKALKSGKMTDEKNEHCPSKRDPSKLYKKADDVAAIECQSEEVIRLHSQGENNPLSKKLSPVHSEMADYINATPSTLLGSRDPDLKDRALLNGGTSVTEKLAQLIATCPPSKSSKTKPKKLGTGTTAGLVSKDLIRKAGVGSVAGIIHKDLIKKPTISTAVGLVTKDPGKKPVFNAAVGLVNKDSVKKLGTGTTAVFINKNLGKKPGTITTVGLLSKDSGKKLGIGIVPGLVHKESGKKLGLGTVVGLVNKDLGKKLGSTVGLVAKDCAKKIVASSAMGLVNKDIGKKLMSCPLAGLISKDAINLKAEALLPTQEPLKASCSTNINNQESQELSESLKDSATSKTFEKNVVRQNKESILEKFSVRKEIINLEKEMFNEGTCIQQDSFSSSEKGSYETSKHEKQPPVYCTSPDFKMGGASDVSTAKSPFSAVGESNLPSPSPTVSVNPLTRSPPETSSQLAPNPLLLSSTTELIEEISESVGKNQFTSESTHLNVGHRSVGHSISIECKGIDKEVNDSKTTHIDIPRISSSLGKKPSLTSESSIHTITPSVVNFTSLFSNKPFLKLGAVSASDKHCQVAESLSTSLQSKPLKKRKGRKPRWTKVVARSTCRSPKGLELERSELFKNVSCSSLSNSNSEPAKFMKNIGPPSFVDHDFLKRRLPKLSKSTAPSLALLADSEKPSHKSFATHKLSSSMCVSSDLLSDIYKPKRGRPKSKEMPQLEGPPKRTLKIPASKVFSLQSKEEQEPPILQPEIEIPSFKQGLSVSPFPKKRGRPKRQMRSPVKMKPPVLSVAPFVATESPSKLESESDNHRSSSDFFESEDQLQDPDDLDDSHRPSVCSMSDLEMEPDKKITKRNNGQLMKTIIRKINKMKTLKRKKLLNQILSSSVESSNKGKVQSKLHNTVSSLAATFGSKLGQQINVSKKGTIYIGKRRGRKPKTVLNGILSGSPTSLAVLEQTAQQAAGSALGQILPPLLPSSASSSEILPSPICSQSSGTSGGQSPVSSDAGFVEPSSVPYLHLHSRQGSMIQTLAMKKASKGRRRLSPPTLLPNSPSHLSELTSLKEATPSPISESHSDETIPSDSGIGTDNNSTSDRAEKFCGQKKRRHSFEHVSLIPPETSTVLSSLKEKHKHKCKRRNHDYLSYDKMKRQKRKRKKKYPQLRNRQDPDFIAELEELISRLSEIRITHRSHHFIPRDLLPTIFRINFNSFYTHPSFPLDPLHYIRKPDLKKKRGRPPKMREAMAEMPFMHSLSFPLSSTGFYPSYGMPYSPSPLTAAPIGLGYYGRYPPTLYPPPPSPSFTTPLPPPSYMHAGHLLLNPAKYHKKKHKLLRQEAFLTTSRTPLLSMSTYPSVPPEMAYGWMVEHKHRHRHKHREHRSSEQPQVSMDTGSSRSVLESLKRYRFGKDAVGERYKHKEKHRCHMSCPHLSPSKSLINREEQWVHREPSESSPLALGLQTPLQIDCSESSPSLSLGGFTPNSEPASSDEHTNLFTSAIGSCRVSNPNSSGRKKLTDSPGLFSAQDTSLNRLHRKESLPSNERAVQTLAGSQPTSDKPSQRPSESTNCSPTRKRSSSESTSSTVNGVPSRSPRLVASGDDSVDSLLQRMVQNEDQEPMEKSIDAVIATASAPPSSSPGRSHSKDRTLGKPDSLLVPAVTSDSCNNSISLLSEKLTSSCSPHHIKRSVVEAMQRQARKMCNYDKILATKKNLDHVNKILKAKKLQRQARTGNNFVKRRPGRPRKCPLQAVVSMQAFQAAQFVNPELNRDEEGAALHLSPDTVTDVIEAVVQSVNLNPEHKKGLKRKGWLLEEQTRKKQKPLPEEEEQENNKSPKSRLIQLKKEKLEYTPGEHEYGLFPAPIHVGKYLRQKRIDFQLPYDILWQWKHNQLYKKPDVPLYKKIRSNVYVDVKPLSGYEATTCNCKKPDDDTRKGCVDDCLNRMIFAECSPNTCPCGEQCCNQRIQRHEWVQCLERFRAEEKGWGIRTKEPLKAGQFIIEYLGEVVSEQEFRNRMIEQYHNHSDHYCLNLDSGMVIDSYRMGNEARFINHSCDPNCEMQKWSVNGVYRIGLYALKDMPAGTELTYDYNFHSFNVEKQQLCKCGFEKCRGIIGGKSQRVNGLTSSKNSQPMATHKKSGRSKEKRKSKHKLKKRRGHLSEEPSENINTPTRLTPQLQMKPMSNRERNFVLKHHVFLVRNWEKIRQKQEEVKHTSDNIHSASLYTRWNGICRDDGNIKSDVFMTQFSALQTARSVRTRRLAAAEENIEVARAARLAQIFKEICDGIISYKDSSRQALAAPLLNLPPKKKNADYYEKISDPLDLITIEKQILTGYYKTVEAFDADMLKVFRNAEKYYGRKSPVGRDVCRLRKAYYNARHEASAQIDEIVGETASEADSSETSVSEKENGHEKDDDVIRCICGLYKDEGLMIQCDKCMVWQHCDCMGVNSDVEHYLCEQCDPRPVDREVPMIPRPHYAQPGCVYFICLLRDDLLLRQGDCVYLMRDSRRTPDGHPVRQSYRLLSHINRDKLDIFRIEKLWKNEKEERFAFGHHYFRPHETHHSPSRRFYHNELFRVPLYEIIPLEAVVGTCCVLDLYTYCKGRPKGVKEQDVYICDYRLDKSAHLFYKIHRNRYPVCTKPYAFDHFPKKLTPKKDFSPHYVPDNYKRNGGRSSWKSERSKPPLKDLGQEDDALPLIEEVLASQEQAANEIPSLEEPEREGATANVSEGEKKTEESSQEPQSTCTPEERRHNQRERLNQILLNLLEKIPGKNAIDVTYLLEEGSGRKLRRRTLFIPENSFRK

SEQ ID NO: 75718 - protein, 79 aa, Homo sapiens
MHSSLNTSPNQQPDTNLAHVGAHSFATENIIGGSEQCFEQLQPEYSSQEESQHADLPSIFSIEARDSSQGMKNQNYPSE

SEQ ID NO: 75719 - protein, 168 aa, Homo sapiens
MPNIKIFSGSSHQDLSQKIADRLGLELGKVVTKKFSNQETCVEIGESVRGEDVYIVQSGCGEINDNLMELLIMINACKIASASRVTAVIPCFPYARQDKKDKSRAPISAKLVANMLSVAGADHIITMDLHASQIQVSVEAKYWCLKGGRKGLMMLKTAEKPKIMPKYI

SEQ ID NO: 75720 - protein, 450 aa, Homo sapiens
MIRAAPPPLFLLLLLLLLLVSWASRGEAAPDQDEIQRLPGLAKQPSFRQYSGYLKGSGSKHLHYWFVESQKDPENSPVVLWLNGGPGCSSLDGLLTEHGPFLVQPDGVTLEYNPYSWNLIANVLYLESPAGVGFSYSDDKFYATNDTEVAQSNFEALQDFFRLFPEYKNNKLFLTGESYAGIYIPTLAVLVMQDPSMNLQGLAVGNGLSSYEQNDNSLVYFAYYHGLLGNRLWSSLQTHCCSQNKCNFYDNKDLECVTNLQEVARIVGNSGLNIYNLYAPCAGGVPSHFRYEKDTVVVQDLGNIFTRLPLKRMWHQALLRSGDKVRMDPPCTNTTAASTYLNNPYVRKALNIPEQLPQWDMCNFLVNLQYRRLYRSMNSQYLKLLSSQMEVQRRPWLVKYGDSGEQIAGFVKEFSHIAFLTIKGAGHMVPTDKPLAAFTMFSRFLNKQPY

SEQ ID NO: 75721 - protein, 9 aa, Homo sapiens
MSMELLQEA

SEQ ID NO: 75722 - protein, 129 aa, Homo sapiens
MSGPGNKRAAGDGGSGPPEKKLSREEKTTTTLIEPIRLGGISSTEEMDLKVLQFKNKKLAERLEQRQACEDELRERIEKLEKRQATDDATLLIVNRYWAQLDETVEALLRCHESQGELSSAPEAPGTQE

SEQ ID NO: 75723 - protein, 203 aa, Homo sapiens
  MOD_RES (1)..(1): Any amino acid
XLLHTLCKLKGPKILDHLTMIDNKNESELEAHLCRMMKHSMDQTGSKSDKETEKGASRIDEKSSKAKVNDFLAEIFKKIGSKENTKEGLAELYEYKKKYSDADIEPFLKNSSQFFQSYVERGLRVIEMEREGKGRISTSTGISPQMEVTCVPTPTSTVSSIGNTNGEEVGPSVYLERLKILRQRCGLDNTKVLLLFFCAVQGG

SEQ ID NO: 75724 - protein, 245 aa, Homo sapiens
MNDRSSRRRTKPPEAASSALALMNSVKTQLHMALERNSWLQKRIEDLEEERDFLRCQLDKFISSARMEAEDHCRMKPGPRRMEGDSRGGAGGEASDPESAASSLSGASEEGSASERRRQKQKGGASRRRFGKPKARERQRVKDADGVLCRYKKILGTFQKLKSMSRAFEHHRVDRNTVALTTPIAELLIVAPEKLAEVGEFDPSKERLLEYSRRCFLALDDETLKKVQALKKSKLLLPITYRFKR

SEQ ID NO: 75725 - protein, 58 aa, Homo sapiens
MAAAALRPPAQGTVTFEDVAVNFSQEEWSLLSEAQRCLYHDVMLENLTLISSLAFYFF

SEQ ID NO: 75726 - protein, 254 aa, Homo sapiens
MATELEYESVLCVKPDVSVYRIPPRASNRGYRASDWKLDQPDWTGRLRITSKGKTAYIKLEDKVSGELFAQAPVEQYPGIAVETVTDSSRYFVIRIQDGTGRSAFIGIGFTDRGDAFDFNVSLQDHFKWVKQESEISKESQEMDARPKLDLGFKEGQTIKLCIGNITNKKGGASKPRTARGGGLSLLPPPPGGKVTIPPPSSSVAISNHVTPPPIPKSNHGGSDAALFQTRHHSHPTGSSSEWHWQDIKDRLEE

SEQ ID NO: 75727 - protein, 154 aa, Homo sapiens
HIAQYLEWDPTELRPGSKGDGRHAWTMKHFKKPTYCNFCHIMLMGVRKQGLCCTYCKYTVHERCVSRNIPGCVKTYSKAKRSGEVMQHAWVEGNSSVKCDRCHKSIKCYQSVTARHCVWCRMTFHRKCELSTLCDGGELRDHILLPTSICPITR

SEQ ID NO: 75728 - protein, 84 aa, Homo sapiens
MTDVPATFTQAECNGDKPPENGQQTITKISEELTDVDSPLPHYRVEPSLEGALTKGSQEERRKLQGNMLLNSSMEDKMLKGWSI

SEQ ID NO: 75729 - protein, 168 aa, Homo sapiens
MAFLTTWKEAASGKSDRRTFPAWENPVVHRPVGTREPSGSPVTPESSLHEALDQCMTALDLFLTNQFSEALSYLKPRTKESMYHSLTYATILEMQAMMTFDPQDILLAGNMMKEAQMLCQRHRRKSSVTDSFSSLVNRPTLGQFTEEEIHAEVCYAECLLQRAALTFL

SEQ ID NO: 75730 - protein, 277 aa, Homo sapiens
RSPVTKIMLSEKHLISVCADNNHVRTWSVTRFRGMISTQPGSTPLASFKILALESADGHGGCSAGNDIGPYGERDDQQVFIQKVVPSASQLFVRLSSTGQRVCSVRSVDGSPTTAFTVLECEGSRRLGSRPRRYLLTGQANGSLAMWDLTTAMDGLGQAPGGLTEQELMEQLEHCELAPPAPSAPSWGCLPSPSPRISLTSLHSASSNTSLSGHRGSPSPPQAEARRRGGGSFVERCQELVRSGPDLRRPPTPAPWPSSGLGTPLTPPKMKLNETSF

SEQ ID NO: 75731 - protein, 136 aa, Homo sapiens
DILQKVTRDACGPTSSDKGGVKEAPCHAAESAPRSKMPLVEPPEGPPVLSLQQLEAWDLDDILQSLAGQEDNQGNRAPGTVWWAADHRQVQGLTLNTGAHVNPHKQHLPGPLRHRGLQAGHRQSCSPHKSSLLAPP

SEQ ID NO: 75732 - protein, 129 aa, Homo sapiens
MFYLEDDKEDEVVCKGSLSKTQDVYHDKSPPGILSQTMNYVGQLAGQVIVTVKELYKGINQATLSGCIDVIVVQQQDGSYQCSPFHVRFGKLGVLRSKEKVIDIEINGSAVDLHMKLGDNGEAFFVEET

SEQ ID NO: 75733 - protein, 61 aa, Homo sapiens
MSEPPVYCNLVDLRRCPRSPPPGPACPLLQRLDAWEQHLDPNSGRCFYINSLTGCKSWKPP

SEQ ID NO: 75734 - protein, 26 aa, Homo sapiens
MWETMRNLASIGKKWKDQNIKDHYKH

SEQ ID NO: 75735 - protein, 62 aa, Homo sapiens
MAALGRPFSGLPLSGGSDFLQPPQPAFPGRAFPPGADGAELAPRPGPRAVPSSPAGSAARGR

SEQ ID NO: 75736 - protein, 687 aa, Homo sapiens
MLTFFLVSGGSLWLFVEFVLSLLEKMQTQEILRILRLPELGDLGQFFRSLSATTLDSGGARRSVIGSGPQLLTHYYDDARTMYQVFRRGLSISGNGPCLGFRKPKQPYQWLSYQEVADRAEFLGSGLLQHNCKACTDQFIGVFAQNRPEWIIVELACYTYSMVVVPLYDTLGPGAIRYIINTADISTVIVDKPQKAVLLLEHVERKETPGLKLIILMDPFEEALKERGQKCGVVIKSMQAVEDCGQENHQAPVPPQPDDLSIVCFTSGTTGNPKGAMLTHGNVVADFSGFLKVTEKVIFPRQDDVLISFLPLAHMFERVIQSVVYCHGGRVGFFQGDIRLLSDDMKALCPTIFPVVPRLLNRMYDKIFSQANTPLKRWLLEFAAKRKQAEVRSGIIRNDSIWDELFFNKIQASLGGCVRMIVTGAAPASPTVLGFLRAALGCQVYEGYGQTECTAGCTFTTPGDWTSGHVGAPLPCNHIKLVDVEELNYWACKGEGEICVRGPNVFKGYLKDPDRTKEALDSDGWLHTGDIGKWLPAGTLKIIDRKKHIFKLAQGEYVAPEKIENIYIRSQPVAQIYVHGDSLKAFLVGIVVPDPEVMPSWAQKRGIEGTYADLCTNKDLKKAILEDMVRLGKESGLHSFEQVKAIHIHSDMFSVQNGLLTPTLKAKRPELREYFKKQIEELYSISM

SEQ ID NO: 75737 - protein, 439 aa, Homo sapiens
MDSFGQPRPEDNQSVVRRMQKKYWKTKQVFIKATGKKEDEHLVASDAELDAKLEVFHSVQETCTELLKIIEKYQLRLNVISEEENELGLFLKFQAERDATQAGKMMDATGKALCSSAKQRLALCTPLSRLKQEVATFSQRAVSDTLMTINRMEQARTEYRGALLWMKDVSQELDPDTLKQMEKFRKVQMQVRNSKASFDKLKMDVCQKVDLLGASRCNMLSHSLTTYQRTLLGFWKKTARMMSQIHEACIGFHPYDFVALKQLQDTPSKISEDNKDEQIGGFLTEQLNKLVLSDEEASFESEQANKDHNEKHSQMREFGAPQFSNSENVAKDLPVDSLEGEDFEKEFSFLNNLLSSGSSSTSEFTQECQTAFGSPSASLTSQEPSMGSEPLAHSSRFLPSQLFDLGFHVAGAFNNNAAKKKKSCMYFFLQLNYFLKKNC

SEQ ID NO: 75738 - protein, 273 aa, Homo sapiens
MAVEEGESFPEQSDANASYLRAARAGHLEKALDYIKNGVDINICNQNGLNALHLASKEGHVEVVSELLQREANVDAATKKGNTALHIASLAGQAEVVKVLVTNGANVNAQSQNGFTPLYMAAQENHLEVVKFLLDNGASQSLATEDGFTPLAVALQQGHDQVVSLLLENDTKGKVRLPALHIAARKDDTKAAALLLQNDNNADVESKSGFTPLHIAAHYGNINVATLLLNRAAAVDFTARNDITPLHVASKRGNANMVKLLLDRGAKIDAKTR

SEQ ID NO: 75739 - protein, 40 aa, Homo sapiens
MTVWTGDVVGGGTDSNIFMTLYGINGSTEEMQLDKKKARF

SEQ ID NO: 75740 - protein, 944 aa, Homo sapiens
MPKGGCPKAPQQEELPLSSDMVEKQTGKKDKDKVSLTKTPKLERGDGGKEVRERASKRKLPFTAGANGEQKDSDTGWTALHEACNRGYYDVAKQLLAAGAEVNTKGLDDDTPLHDAANNGHYKVVKLLLRYGGNPQQSNRKGETPLKVANSPTMVNLLLGKGTYTSSEESSTESSEEEDAPSFAPSSSVDGNNTDSEFEKGLKHKAKNPEPQKATAPVKDEYEFDEDDEQDRVPPVDDKHLLKKDYRKETKSNSFISIPKMEVKSYTKNNTIAPKKASHRILSDTSDEEDASVTVGTGEKLRLSAHTILPGSKTREPSNAKQQKEKNKVKKKRKKETKGREVRFGKRSDKFCSSESESESSESGEDDRDSLGSSGCLKGSPLVLKDPSLFSSLSASSTSSHGSSAAQKQNPSHTDQHTKHWRTDNWKTISSPAWSEVSSLSDSTRTRLTSESDYSSEGSSVESLKPVRKRQEHRKRASLSEKKSPFLSSAEGAVPKLDKEGKVVKKHKTKHKHKNKEKGQCSISQELKLKSFTYEYEDSKQKSDKAILLENDLSTENKLKVLKHDRDHFKKEEKLSKMKLEEKEWLFKDEKSLKRIKDTNKDISRSFREEKDRSNKAEKERSLKEKSPKEEKLRLYKEERKKKSKDRPSKLEKKNDLKEDKISKEKEKIFKEDKEKLKKEKVYREDSAFDEYCNKNQFLENEDTKFSLSDDQRDRWFSDLSDSSFDFKGEDSWDSPVTDYRDMKSDSVAKLILETVKEDSKERRRDSRAREKRDYREPFFRKKDRDYLDKNSEKRKEQTEKHKSVPGYLSEKDKKRRESAEAGRDRKDALESCKERRDGRAKPEEAHREELKECGCESGFKDKSDGDFGKGLEPWERHHPAREKEKKDGPDKERKEKTKPERYKEKSSDKDKSEKSILEKCQKDKEFDKCFKEKKDTKEKHKDT

SEQ ID NO: 75741 - protein, 128 aa, Homo sapiens
MAAGVDCGDGVGARQHVFLVSEDYIRYAHGLISDYIPKELSDDLSKYLKLPEPSASLPNPPSKKIKLSDEPVEAKEDYTKFNTKDLKTEKKNSKMTAAQKALAKVDKSGMKSIDTFFGVKNKKKIGKV

SEQ ID NO: 75742 - protein, 34 aa, Homo sapiens
MNHDFQALALESRGMGELLPTKKFWEPDDSTKDG

SEQ ID NO: 75743 - protein, 163 aa, Homo sapiens
SSAETLESHPDIGKSTPQKTAEADPRRGVGSPPGRKKTTVSMPRSRKGDAASQFLVFCQKHRDEVVAEHPDASGEEIEELLRSQWSLLSEKQRARYNTKFALVAPVQAEEDSGNVNGKKRNHTKRIQDPTEDAEAEDTPRKRLRTDKHSLRKQRKICLMHVNH

SEQ ID NO: 75744 - protein, 240 aa, Homo sapiens
  MOD_RES (1)..(1): Any amino acid
XRFLRVLANFLIICCLCGSGYLIYFVVKRSQQFSKMQNVSWYERNEVEIVMSLLGMFCPPLFETIAALENYHPRTGLKWQLGRIFALFLGNLYTFLLALMDDVHLKLANEETIKNITHWTLFNYYNSSGWNESVPRPPLHPADVPRGSCWETAVGIEFMRLTVSDMLVTYITILLGDFLRACFVRFMNYCWCWDLEAGFVGHHFMDIPHKGISTIFFDTYSQMHSWAFHFFGSLMTVSAL

SEQ ID NO: 75745 - protein, 85 aa, Homo sapiens
MVHLTPEEKTAVNALWGKVNVDAVGGEALGSSWAMCWCVCWPATLARNSPHKCRLPIRRWWLVWLMPWLTSTIEILDCFLITIRR

SEQ ID NO: 75746 - protein, 149 aa, Homo sapiens
PSRAGPRPGASGTLLHPEGLCLPGFPGVIQTWGEKNHHPSHTQTQRDSKPGGAGWTQRPSPCQPKGHGPRSPPPAPRAQLCAGHQKPQIMTAAQTVATGPWCSVKPLAPAWAHSRGHERVLLWLHHHTHRAAGAQLCHGSQPGSSRPVG

SEQ ID NO: 75747 - protein, 66 aa, Homo sapiens
MAAEEEEVDSADTGERDRFLLCHPGWSAVAQSWLTAASTSWAQAILPPQQLAPQPLYSTPPRLLGL

SEQ ID NO: 75748 - protein, 120 aa, Homo sapiens
MISVKRNTWRALSLVIGDCRKKGNFEYCQDRTEKHSTMPDSPVDVKTQSRLTPPTMPPPPTTQGAPRTSSFTPTTLTNGTSHSPTALNGAPSPPNGFSNGPSSSSSSSLANQQLPPACGA

SEQ ID NO: 75749 - protein, 207 aa, Homo sapiens
HFQNASLLNSQYYFAAEFPADSLQAAQPFTIGDNKTYNGYWNTPLLPYKSYRIYFQAASRANGETKIDCVQVATKGAATPKPVPEPEKQTDHTVKIAGVIAGILLFVIIFLGVVLVMKKRKLAKKRKETMSSTRQEMTVMVNSMDKSYAEQGTNCDEAFSFMDTHNLNGRSVSSPSSFTMKTNTLSTSVPNSYYPDPFVPTAILELL

SEQ ID NO: 75750 - protein, 798 aa, Homo sapiens
MDLSALRVEEVQNVINAMQKILECPICLELIKEPVSTKCDHIFCKFCMLKLLNQKKGPSQCPLCKNDITKRSLQESTRFSQLVEELLKIICAFQLDTGLEYANSYNFAKKENNSPEHLKDEVSIIQSMGYRNRAKRLLQSEPENPSLQETSLSVQLSNLGTVRTLRTKQRIQPQKTSVYIELAACEFSETDVTNTEHHQPSNNDLNTTEKRAAERHPEKYQGSSVSNLHVEPCGTNTHASSLQHENSSLLLTKDRMNVEKAEFCNKSKQPGLARSQHNRWAGSKETCNDRRTPSTEKKVDLNADPLCERKEWNKQKLPCSENPRDTEDVPWITLNSSIQKVNEWFSRSDELLGSDDSHDGESESNAKVADVLDVLNEVDEYSGSSEKIDLLASDPHEALICKSERVHSKSVESNIEDKIFGKTYRKKASLPNLSHVTENLIIGAFVTEPQIIQERPLTNKLKRKRRPTSGLHPEDFIKKADLAVQKTPEMINQGTNQTEQNGQVMNITNSGHENKTKGDSIQNEKNPNPIESLEKESAFKTKAEPISSSISNMELELNIHNSKAPKKNRLRRKSSTRHIHALELVVSRNLSPPNCTELQIDSCSSSEEIKKKKYNQMPVRHSRNLQLMEGKEPATGAKKSNKPNEQTSKRHDSDTFPELKLTNAPGSFTKCSNTSELKEFVNPSLPREEKEEKLETVKVSNNAEDPKDLMLSGERVLQTERSVESSSISLVPGTDYGTQESISLLEVSTLGKAKTEPNKCVSQCAAFENPKGLIHGCSKDNRNDTEGFKYPLGHEVNH

SEQ ID NO: 75751 - protein, 134 aa, Homo sapiens
MALSVLRLALLLLAVTFAGSARSGPGERGPPEKSGFGSQTGGGPCPAPGGLGDGTRAPVTGGSPEDLPGKVVIILKSFEMDPADGAVYRKEDGETTFTGRLDKLHFPFFSFPVFLYMRFVNTHFLRAGMEDSHV

SEQ ID NO: 75752 - protein, 2703 aa, Homo sapiens
MQGHTGRLLKSLCFISLSFLLLHIIFHITLVSLEAQHRIAPGYNCSTWEKTFRQIGFESLKGADAGNGIRVFVPDIGMFIASLTIWLLCRNIVQKPVTDEAAQSNPEFENEELAEGEKIDSEEALIYEEDFNGGDGVEGELEESTKLKMFRRLASVASKLKEFIGNMITTAGKVVVTILLGSSGMMLPSLTSSVYFFVFLGLCTWWSWCRTFDPLLFSCLCVLLAIFTAGHLIGLYLYQFQFFQEAVPPNDYYARLFGIKSVIQTDCSSTWKIIVNPDLSWYHHANPILLLVMYYTLATLIRIWLQEPLVQDEGTKEEDKALACSPIQITAGRRRSLWYATHYPTDERKLLSMTQDDYKPSDGLLVTVNGNPVDYHTIHPSLPMENGPGKADLYSTPQYRWEPSDESSEKREEEEEEKEEFEEERSREEKRSIKVHAMVSVFQFIMKQSYICALIAMMAWSITYHSWLTFVLLIWSCTLWMIRNRRKYAMISSPFMVVYGNLLLILQYIWSFELPEIKKVPGFLEKKEPGELASKILFTITFWLLLRQHLTEQKALQEKEALLSEVKIGSQENEEKDEELQDIQVEGEPKEEEEEEAKEEKQERKKVEQEEAEEEDEQDIMKVLGNLVVAMFIKYWIYVCGGMFFFVSFEGKIVMYKIIYMVLFLFCVALYQVHYEWWRKILKYFWMSVVIYTMLVLIFIYTYQFENFPGLWQNMTGLKKEKLEDLGLKQFTVAELFTRIFIPTSFLLVCILHLHYFHDRFLELTDLKSIPSKEDNTIYRLAHPEGSLPDLTMMHLTASLEKPEVRKLAEPGEEKLEGYSEKAQKGDLGKDSEESEEDGEEEEESEEEEETSDLRNKWHLVIDRLTVLFLKFLEYFHKLQVFMWWILELHIIKIVSSYIIWVSVKEARVSLFNYVFLISWAFALPYAKLRRLASSVCTVWTCVIIVCKMLYQLQTIKPENFSVNCSLPNENQTNIPFNELNKSLLYSAPIDPTEWVGLRKSSPLLVYLRNNLLMLAILAFEVTIYRHQEYYRGRNNLTAPVSRTIFHDITRLHLDDGLINCAKYFINYFFYKFGLETCFLMSVNVIGQRMDFYAMIHACWLIAVLYRRRRKAIAEIWPKYCCFLACIITFQYFICIGIPPAPCRDYPWRFKGASFNDNIIKWLYFPDFIVRPNPVFLVYDFMLLLCASLQRQIFEDENKAAVRIMAGDNVEICMNLDAASFSQHNPVPDFIHCRSYLDMSKVIIFSYLFWFVLTIIFITGTTRISIFCMGYLVACFYFLLFGGDLLLKPIKSILRYWDWLIAYNVFVITMKNILSIGACGYIGTLVHNSCWLIQAFSLACTVKGYQMPAANSPCTLPSGEAGIIWDSICFAFLLLQRRVFMSYYFLHVVADIKASQILASRGAELFQATIVKAVKARIEEEKKSMDQLKRQMDRIKARQQKYKKGKERMLSLTQEPGEGQDMQKLSEEDDEREADKQKAKGKKKQWWRPWVDHASMVRSGDYYLFETDSEEEEEEELKKEDEEPPRRSAFQFVYQAWITDPKTALRQRHKEKKRSAREERKRRRKGSKEGPVEWEDREDEPIKKKSDGPDNIIKRIFNILKFTWVLFLATVDSFTTWLNSISREHIDISTVLRIERCMLTREIKKGNVPTRESIHMYYQNHIMNLSRESGLDTIDEHPGAASGAQTAHRMDSLDSHDSISSEPTQCTMLYSRQGTTETIEEVEAEQEEEAGSTAPEPREAKEYEATGYDVGAMGAEEASLTPEEELTQFSTLDGDVEAPPSYSKAVSFEHLSFGSQDDSAGKNRMAVSPDDSRTDKLGSSILPPLTHELTASELLLKKMFHDDELEESEKFYVGQPRFLLLFYAMYNTLVARSEMVCYFVIILNHMVSASMITLLLPILIFLWAMLSVPRPSRRFWMMAIVYTEVAIVVKYFFQFGFFPWNKNVEVNKDKPYHPPNIIGVEKKEGYVLYDLIQLLALFFHRSILKCHGLWDEDDMTESGMAREESDDELSLGHGRRDSSDSLKSINLAASVESVHVTFPEQQTAVRRKRSGSSSEPSQRSSFSSNRSQRGSTSTRNSSQKGSSVLSIKQKGKRELYMEKLQEHLIKAKAFTIKKTLEIYVPIKQFFYNLIHPEYSAVTDVYVLMFLADTVDFIIIVFGFWAFGKHSAAADITSSLSEDQVPGPFLVMVLIQFGTMVVDRALYLRKTVLGKVIFQVILVFGIHFWMFFILPGVTERKFSQNLVAQLWYFVKCVYFGLSAYQIRCGYPTRVLGNFLTKSYNYVNLFLFQGFRLVPFLTELRAVMDWVWTDTTLSLSSWICVEDIYAHIFILKCWRESEKRYPQPRGQKKKKVVKYGMGGMIIVLLICIVWFPLLFMSLIKSVAGVINQPLDVSVTITLGGYQPIFTMSAQQSQLKVMDQQSFNKFIQAFSRDTGAMQFLENYEKEDITVAELEGNSNSLWTISPPSKQKMIHELLDPNSSFSVVFSWSIQRNLSLGAKSEIATDKLSFPLKNITRKNIAKMIAGNSTESSKTPVTIEKIYPYYVKAPSDSNSKPIKQLLSENNFMDITIILSRDNTTKYNSEWWVLNLTGNRIYNPNSQALELVVFNDKVSPPSLGFLAGYGIMGLYASVVLVIGKFVREFFSGISHSIMFEELPNVDRILKLCTDIFLVRETGELELEEDLYAKLIFLYRSPETMIKWTREKTN

SEQ ID NO: 75753 - protein, 163 aa, Homo sapiens
MLRVLVGAVLPAMLLAAPPPINKLALFPDKSAWCEAKNITQIVGHSGCEAKSIQNRACLGQCFSYSVPNTFPQSTESLVHCDSCMPAQSMWEIVTLECPGHEEVPRVDKLVEKILHCSCQACGKEPSHEGLSVYVQGEDGPGSQPGTHPHPHPHPHPGGQTPE

SEQ ID NO: 75754 - protein, 1285 aa, Homo sapiens
MAALLRSARWLLRAGAAPRLPLSLRLLPGGPGRLHAASYLPAARAGPVAGGLLSPARLYAIAAKEKDIQEESTFSSRKISNQFDWALMRLDLSVRRTGRIPKKLLQKVFNDTCRSGGLGGSHALLLLRSCGSLLPELKLEERTEFAHRIWDTLQKLGAVYDVSHYNALLKVYLQNEYKFSPTDFLAKMEEANIQPNRVTYQRLIASYCNVGDIEGASKILGFMKTKDLPVTEAVFSALVTGHARAGDMENAENILTVMRDAGIEPGPDTYLALLNAYAEKGDIDHVKQTLEKVEKSELHLMDRDLLQIIFSFSKAGYPQYVSEILEKVTCERRYIPDAMNLILLLVTEKLEDVALQILLACPVSKEDGPSVFGSFFLQHCVTMNTPVEKLTDYCKKLKEVQMHSFPLQFTLHCALLANKTDLAKALMKAVKEEGFPIRPHYFWPLLVGRRKEKNVQGIIEILKGMQELGVHPDQETYTDYVIPCFDSVNSARAILQENGCLSDSDMFSQAGLRSEAANGNLDFVLSFLKSNTLPISLQSIRSSLLLGFRRSMNINLWSEITELLYKDGRYCQEPRGPTEAVGYFLYNLIDSMSDSEVQAKEEHLRQYFHQLEKMNVKIPENIYRGIRNLLESYHVPELIKDAHLLVESKNLDFQKTVQLTSSELESTLETLKAENQPIRDVLKQLILVLCSEENMQKALELKAKYESDMVTGGYAALINLCCRHDKVEDALNLKEEFDRLDSSAVLDTGKYVGLVRVLAKHGKLQDAINILKEMKEKDVLIKDTTALSFFHMLNGAALRGEIETVKQLHEAIVTLGLAEPSTNISFPLVTVHLEKGDLSTALEVAIDCYEKYKVLPRIHDVLCKLVEKGETDLIQKAMDFVSQEQGEMVMLYDLFFAFLQTGNYKEAKKIIETPGIRARSARLQWFCDRCVANNQVETLEKLVELTQKLFECDRDQMYYNLLKLYRAYDIFLNAKEQNIVFNAETYSNLIKLLMSEDYFTQAMEVKAFAETHIKGFTLNDAANSRLIITQVRRDYLKEAVTTLKTVLDQQQTPSRLAVTRVIQALAMKGDVENIEVVQKMLNGLEDSIGLSKMVFINNIALAQIKNNNIDAAIENIENMLTSENKVIEPQYFGLAYLFRKVIEEQLEPAVEKISIMAERLANQFAIYKPVTDFFLQLVDAGKVDDARALLQASTVKSVLELIPELNEKEEAYNSLMKSYVSEKDVTSAKALYEHLTAKNTKLDDLFLKRYASLLKYAGEPVPFIEPPESFEFYAQQLRKLRENSS

SEQ ID NO: 75755 - protein, 302 aa, Homo sapiens
MANETQKVGAIHFPFPFTPYSIQEDFMAELYRVLEAGKIGIFESPTGTGKSLSLICGALSWLRDFEQKKREEEARLLETGTGPLHDEKDESLCLSSSCEGAAGTPRPAGEPAWVTQFVQKKEERDLVDRLKRQEEEERENLLRLSREMLETGPEAERLEQLESGEEELVLAEYESDEEKKVASRVDEDEDDLEEEHITKIYYCSRTHSQLAQFVHEVKKSPFGKDVRLVSLGSRQNLCVNEDVKSLGSVQLINDRCVDMQRSRHEKKKGAEEEKPKRRRQEKQAACPFYNHEQMGLLRDEAL

SEQ ID NO: 75756 - protein, 78 aa, Homo sapiens
MDFLRNLFSQTLSLGSQKERLLDELTLEGVARYMQSERCRRVICLVGAGISTSAGIPDFRSPSTGLYDNLEKYHLPYP

SEQ ID NO: 75757 - protein, 90 aa, Homo sapiens
MGVRVHVVAASALLYFILLSGTRCEENCGNPEHCLTTDWVHLWYIWLLVVIGALLLLCGLTSLCFRCCCLSRQQNGEDGGPPPCEVTVIA

SEQ ID NO: 75758 - protein, 917 aa, Homo sapiens
  MOD_RES (1)..(1): Any amino acid
XIESPKRSIRDSGYIDCWDSERSDSLSPPRHGRDDSFDSLDSFGSRSRQTPSPDVVLRGSSDGRGSDSESDLPHRKLPDVKKDDMSARRTSHGEPKSAVPFNQYLPNKSNQTAYVPAPLRKKKAEREEYRKSWSTATSPLGGERPFRYGPRTPVSDDAESTSMFDMRCEEEAAVQPHSRARQEQLQLINNQLREEDDKWQDDLARWKSRRRSVSQDLIKKEEERKKMEKLLAGEDGTSERRKSIKTYREIVQEKERRERELHEAYKNARSQEEAEGILQQYIERFTISEAVLERLEMPKILERSHSTEPNLSSFLNDPNPMKYLRQQSLPPPKFTATVETTIARASVLDTSMSAGSGSPSKTVTPKAVPMLTPKPYSQPKNSQDVLKTFKVDGKVSVNGETVHREEEKERECPTVAPAHSLTKSQMFEGVARVHGSPLELKQDNGSIEINIKKPNSVPQELAATTEKTEPNSQEDKNDGGKSRKGNIELASSEPQHFTTTVTRCSPTVAFVEFPSSPQLKNDVSEEKDQKKPENEMSGKVELVLSQKVVKPKSPEPEATLTFPFLDKMPEANQLHLPNLNSQVDSPSSEKSPVMTPFKFWAWDPEEERRRQEKWQQEQERLLQERYQKEQDKLKEEWEKAQKEVEEEERRYYEEERKIIEDTVVPFTVSSSSADQLSTSSSMTEGSGTMNKIDLGNCQDEKQDRRWKKSFQGDDSDLLLKTRESDRLEEKGSLTEGALAHSGNPVSKGVHEDHQLDTEAGAPHCGTNPQLAQDPSQNQQTSNPTHSSEDVKPKTLPLDKSINHQIESPSERRKKSPREHFQAGPFSPCSPTPPGQSPNRSISGKKLCSSCGLPLGKGAAMIIETLNLYFHIQCFRCGICKGQLGDAVSGTDVRIRNGLLNCNDCYMRSRSAGQPTTL

SEQ ID NO: 75759 - protein, 443 aa, Homo sapiens
MSQRQYPECYLAPNGCLVSNCGVNKMSNEELVGQNHGMEGEACTGGDVTFSDVAIDFSHEEWACLDSAQRDLYKDVMVQNYENLVSVGLSVTKPYVIMLLEDGKEPWMMEKKLSKDWESRWENKELSTKKDIYDEDSPQPVTMEKVVKQSYEFSNSNKNLEYTECDTFRSTFHSKSTLSEPQNNSAEGNSHKYDILKKNLSKKSVIKSERINGGKKLLNSNKSGAAFNQSKSLTLPQTCNREKIYTCSECGKAFGKQSILSRHWRIHTGEKPYECRECGKTFSHGSSLTRHQISHSGEKPYKCIECGKAFSHGSSLTNHQSTHTGEKPYECMNCGKSFSRVSLLIQHLRIHTQEKRYECRICGKAFIHSSSLIHHQKSHTGEKPYECRECGKAFCCSSHLTQHQRIHSMKKKYECNKCLKVFSSFSFLVQHQSIHTEEKPFEV

SEQ ID NO: 75760 - protein, 149 aa, Homo sapiens
  MOD_RES (1)..(1): Any amino acid
XIMRDYQHENVVKLSDFGFCAQVSKEVPRRKSLVGTPYWMAPELISRLPYGPEVDIWSLGIMVIEMVDGEPPYFNEPPLKAMKMIRDNLPPRLKNLHKVSPSLKGFLDRLLVRDPAQRATAAELLKHPFLAKAGPPASIVPLMRQNRTR

SEQ ID NO: 75761 - protein, 128 aa, Homo sapiens
  MOD_RES (1)..(1): Any amino acid
XQHARTLWYDRPSCKNADGVELYNEIEFYAKVNSKDSQDKRSSRSITCFVRKWKEKVAWPRLTKEDIKPVWLSVDFDNWRDWEGDEEMELAHVEHYAELLKKVSTKRPPPAMDDLDDDSDSADDATSN

SEQ ID NO: 75762 - protein, 181 aa, Homo sapiens
MALEKGPLLLLALGLGLAGAQKALEEVPVQPGFNAQKVEGRWLTLQLAANHADLVSPADPLRLALHSIRTRDGGDVDFVLFWKGEGVCKETNITVHPTQLQGQYQGSFEGGSMHVCFVSTDYSNLILYVRFEDDEITNLWVLLARRMLEDPKWLGRYLEYVEKFHLQKAPVFNIDGPCPPP

SEQ ID NO: 75763 - protein, 103 aa, Homo sapiens
  MOD_RES (1)..(1): Any amino acid
XSYGLSAEVKNRMGTNKCASQSGMTAYGTRRHLYDPKNHILPPMDHSTISLQMGTNKCASQVGLARVPPTPLPAPLHPVVSAPPWGHLQLLSPLSVSAPSLDH

SEQ ID NO: 75764 - protein, 70 aa, Homo sapiens
  MOD_RES (1)..(1): Any amino acid
XFYQLELVNRETNFNKVFNSSPTVGVINPLAKQKKKNDKSPTNSPAQSEASPVASPDPQRQEWFARYFTF

SEQ ID NO: 75765 - protein, 38 aa, Homo sapiens
MDELGAGIAQSRRTVALIKSAAVAERERVSRLFADAAA

SEQ ID NO: 75766 - protein, 56 aa, Homo sapiens
METDLNSQDRKDLDKFIKFFALKTVQVIVQARLGEKICTRSSSSPTGSDWFNLAIK

SEQ ID NO: 75767 - protein, 169 aa, Homo sapiens
LQPEQLDCGAAHLQHPLSILQPLKATPVFRAPGLTSVAVASVNNYTAVFLGTVNGRLLKINLNESMQVVSRRVVTVAYGEPVHHVMQFDPADSGYLYLMTSHQMARVKVAACNVHSTCGDCVGAADAYCGWCALETRQQHFWTSASEGPSRCPAMTVLPSEIDVRQEYP

SEQ ID NO: 75768 - protein, 190 aa, Homo sapiens
  MOD_RES (1)..(1): Any amino acid
XLLSGQLGLQLLPGGGAPPPLSEASSPLACLLQSLQQIPPEQPEAPCLPPESPASALEPEPARPPLSALAPPHGSPDPPVPELLTGRGSGKRGRRGGGGLRGINGEARPARGRKPGSRREPGRLALKWGTRGGFNGQMERSPRRTHHWQHNGELAEGGAEPKDPPPPGPHSEDLKVPPGVVRKSRRGRRR

SEQ ID NO: 75769 - protein, 64 aa, Homo sapiens
  MOD_RES (1)..(1): Any amino acid
XGWKCARCDLRENLWLNLTDGSVLCGKWFFDSSGGNGHALEHYRDMGYPLAVKLGTITPDGAGM

SEQ ID NO: 75770 - protein, 95 aa, Homo sapiens
MADDIDIEAMLEAPYKKDENKLSSANGHEERSKKILCIKNLDLLTWKRSNPVIAKHLYCRGHITKKSKGPAQWTIYFSDVQYKISLPLKTLESPF

SEQ ID NO: 75771 - protein, 183 aa, Homo sapiens
  MOD_RES (1)..(1): Any amino acid
XQFFRFDGWLINIENSLSLAAVGNMPPFLRYLTTQLHRQVPGGLVLWYDSVVQSGQLKWQDELNQHNRVFFDSCDGFFTNYNWREEHLERMLGQAGERRADVYVGVDVFARGNVVGGRFDTDKVGGGFRPRASGPVPPLGPHFLMDLPFPSAPQRNDSSCSSQSGDPVALRNRCPAPAKLCPH

SEQ ID NO: 75772 - protein, 160 aa, Homo sapiens
  MOD_RES (1)..(1): Any amino acid
XNWELLLWLLVLCALLLLLVQLLRFLRADGDLTLLWAEWQGRRPEWELTDMVVWVTGASSGIGEELAYQLSKLGVSLVLSARRVHELERVKRRCLENGNLKEKDILVLPLDLTDTGSHEAATKAVLQEFGRGFFNGLRTELATYPGIIVSNICPGPVQSN

SEQ ID NO: 75773 - protein, 75 aa, Homo sapiens
SSTSNAECDCTPGFHCLGAGCSMCEQDCKQGQELTKKGCKDCCFGTFNDQKRGICRPWTNIRVADEWNHDSQEKY

SEQ ID NO: 75774 - protein, 429 aa, Homo sapiens
MAFANLRKVLISDSLDPCCRKILQDGGLQVVEKQNLSKEELIAELQDCEGLIVRSATKVTADVINAAEKLQVVGRAGTGVDNVDLEAATRKGILVMNTPNGNSLSAAELTCGMIMCLARQIPQATASMKDGKWERKKFMGTELNGKTLGILGLGRIGREVATRMQSFGMKTIGYDPIISPEVSASFGVQQLPLEEIWPLCDFITVHTPLLPSTTGLLNDNTFAQCKKGVRVVNCARGGIVDEGALLRALQSGQCAGAALDVFTEEPPRDRALVDHENVISCPHLGASTKEAQSRCGEEIAVQFVDMVKGKSLTGVVNAQALTSAFSPHTKPWIGLAEALGTLMRAWAGSPKGTIQVITQGHHLPQPCCTRGARLRGMPPGRGPGRRPLPGCGLGPRHYACTAGAQWSCLQARSASPQGPAPAPIPDSDL

SEQ ID NO: 75775 - protein, 782 aa, Homo sapiens
MATAAVLRGPAAHWVESFQKAREEGSGSGTWRGRWRRRSVISFGSKNRTIGVAAKNQQITHANNTVSNFKRFHGRAFNDPFIQKEKENLSYDLVPLKNGGVGIKVMYMGEEHLFSVEQITAMLLTKLKETAENSLKKPVTDCVISVLGTAFDPFLGGKNFDEKLVEHFCAEFKTKYKLDAKSKIRALLRLYQECEKLKKLMSSNSTDLPLNIECFMNDKDVSGKMNRSQFEELCAELLQKIEVPLYSLLEQTHLKVEDVSAVEIVGGATRIPAVKERIAKFFGKDISTTLNADEAVARGCALQCAILSPAFKVREFSVTDAVPFPISLIWNHDSEDTEGVHEVFSRNHAAPFSKVLTFLRRGPFELEAFYSDPQGVPYPEAKIGRFVVQNVSAQKDGEKSRVKVKVRVNTHGIFTISTASMVEKVPTEENEMSSEADMECLNQRPPENPDTDKNVQQDNSEAGTQPQVQTDAQQTSQSPPSPELTSEENKIPDADKANEKKVDQPPEAKKPKIKVVNVELPIEANLVWQLGKDLLNMYIETEGKMIMQDKLEKERNDAKNAVEEYVYEFRDKLCGPYEKFICEQDHQNFLRLLTETEDWLYEEGEDQAKQAYVDKLEELMKIGTPVKVRFQEAEERPKMFEELGQRLQHYAKIAADFRNKDEKYNHIDESEMKKVEKSVNEVMEWMNNVMNAQAKKSLDQDPVVRAQEIKTKIKELNNTCEPVVTQPKPKIESPKLERTPNGPNIDKKEEDLEDKNNFGAEPPHQNGECYPNEKNSVNMDLD

SEQ ID NO: 75776 - protein, 1610 aa, Homo sapiens
  MOD_RES (1)..(1): Any amino acid
XTIEVEEQQEGNDAEAQRREIELLRREGELPLEELLRSLPPQLLEGPSSPSQTPSSHDSDTRDGPEEGAEEEPPQVLEIKPPPSAVTQRNKQPWHPDEDDEEFTANEEEAEDEEDTIAAEEQLEGEVDHAMELSELAREGELSMEELLQQYAGAYAPGSGSSEDEDEDEVDANSSDCEPEGPVEAEEPPQEDSSSQSDSVEDRSEDEEDEHSEEEETSGSSASEESESEESEDAQSQSQADEEEEDDDFGVEYLLARDEEQSEADAGSGPPTPGPTTLGPKKEITDIAAAAESLQPKGYTLATTQVKTPIPLLLRGQLREYQHIGLDWLVTMYEKKLNGILADEMGLGKTIQTISLLAHLACEKGNWGPHLIIVPTSVMLNWEMELKRWCPSFKILTYYGAQKERKLKRQGWTKPNAFHVCITSYKLVLQDHQAFRRKNWRYLILDEAQNIKNFKSQRWQSLLNFNSQRRLLLTGTPLQNSLMELWSLMHFLMPHVFQSHREFKEWFSNPLTGMIEGSQEYNEGLVKRLHKVLRPFLLRRVKVDVEKQMPKKYEHVIRCRLSKRQRCLYDDFMAQTTTKETLATGHFMSVINILMQLRKVCNHPNLFDPRPVTSPFITPGICFSTASLVLRATDVHPLQRIDMGRFDLIGLEGRVSRYEADTFLPRHRLSRRVLLEVATAPDPPPRPKPVKMKVNRMLQPVPKQEGRTVVVVNNPRAPLGPVPVRPPPGPELSAQPTPGPVPQVLPASLMVSASPAGPPLIPASRPPGPVLLPPLQPNSGSLPQVLPSPLGVLSGTSRPPTPTLSLKPTPPAPVRLSPAPPPGSSSLLKPLTVPPGYTFPPAAATTTSTTTATATTTAVPAPTPAPQRLILSPDMQARLPSGEVVSIGQLASLAQRPVANAGGSKPLTFQIQGNKLTLTGAQVRQLAVGQPRPLQRNVVHLVSAGGQHHLISQPAHVALIQAVAPTPGPTPVSVLPSSTPSTTPAPTGLSLPLAANQVPPTMVNNTGVVKIVVRQAPRDGLTPVPPLAPAPRPPSSGLPAVLNPRPTLTPGRLPTPTLGTARAPMPTPTLVRPLLKLVHSPSPEVSASAPGAAPLTISSPLHVPSSLPGPASSPMPIPNSSPLASPVSSTVSVPLSSSLPISVPTTLPAPASAPLTIPISAPLTVSASGPALLTSVTPPLAPVVPAAPGPPSLAPSGASPSASALTLGLATAPSLSSSQTPGHPLLLAPTSSHVPGLNSTVAPACSPVLVPASALASPFPSAPNPAPAQASLLAPASSASQALATPLAPMAAPQTAILAPSPAPPLAPLPVLAPSPGAAPVLASSQTPVPVMAPSSTPGTSLASASPVPAPTPVLAPSSTQTMLPAPVPSPLPSPASTQTLALAPALAPTLGGSSPSQTLSLGTGNPQGPFPTQTLSLTPASSLVPTPAQTLSLAPGPPLGPTQTLSLAPAPPLAPASPVGPAPAHTLTLAPASSSASLLAPASVQTLTLSPAPVPTLGPAAAQTLALAPASTQSPASQASSLVVSASGAAPLPVTMVSRLPVSKDEPDTLTLRSGPPSPPSTATSFGGPRPRRQPPPPPRSPFYLVSFTSSRGNRKLSFFGVLVGWMEQ

SEQ ID NO: 75777 - protein, 94 aa, Homo sapiens
MQSTPFCGFCSLGKMITAKPGKTPIQVLHEYGMKTKNIPVYECERSDVQIHVPTFTFRVTVGDITCTGEGTSKKLAKHRAAEAAINILKANASI

SEQ ID NO: 75778 - protein, 68 aa, Homo sapiens
MDNKKRLAYAIIQFLHDQLRHGGLSSDAQESLEVAIQCLETAFGVTVEDSDLALPQTLPEIFEAAATG

SEQ ID NO: 75779 - protein, 210 aa, Homo sapiens
CIPLPVLYGVFLYMGVASLNGIQFWERCKLFLMPAKHQPDHAFLRHVPLRRIHLFTLVQILCLAVLWILKSTVAAIIFPVMILGLIIVRRLLDFIFSQHDLAWIDNILPEKEKKETDKKRKRKKGAHEDCDEEEKDLPVGVTHSDSSFSDTELDRSITLHFKISCPASPAFSYSRNPVFMVPQVKIEMESDYDFTDMDKYRRETDSETTL

SEQ ID NO: 75780 - protein, 1402 aa, Homo sapiens
MEVCLVEELPPTTELEEGLRNGVYLAKLAKFFAPKMVSEKKIYDVEQTRYKKSGLHFRHTDNTVQWLRAMESIGLPKIFYPETTDVYDRKNIPRMIYCIHALSLYLFKLGIAPQIQDLLGKVDFTEEEISNMRKELEKYGIQMPSFSKIGGILANELSVDEAALHAAVIAINEAVEKGIAEQTVVTLRNPNAVLTLVDDNLAPEYQKELWDAKKKKEENARLKNSCISEEERDAYEELLTQAEIQGNINKVNRQAAVDHINAVIPEGDPENTLLALKKPEAQLPAVYPFAAAMYQNELFNLQKQNTMNYLAHEELLIAVEMLSAVALLNQALESNDLVSVQNQLRSPAIGLNNLDKAYVERYANTLLSVKLEVLSQGQDNLSWNEIQNCIDMVNAQIQEENDRVVAVGYINEAIDEGNPLRTLETLLLPTANISDVDPAHAQHYQDVLYHAKSQKLGDSESVSKVLWLDEIQQAVDDANVDKDRAKQWVTLVVDVNQCLEGKKSSDILSVLKSSTSNANDIIPECADKYYDALVKAKELKSERVSSDGSWLKLNLHKKYDYYYNTDSKESSWVTPESCLYKESWLTGKEIEDIIEEVTVGYIRENIWSASEELLLRFQATSSGPILREEFEARKSFLHEQEENVVKIQAFWKGYKQRKEYMHRRQTFIDNTDSIVKIQSWFRMATARKSYLSRLQYFRDHNNEIVKIQSLLRANKARDDYKTLVGSENPPLTVIRKFVYLLDQSDLDFQEELEVARLREEVVTKIRANQQLEKDLNLMDIKIGLLVKNRITLEDVISHSKKLNKKKGGEMEILNNTDNQGIKSLSKERRKTLETYQQLFYLLQTNPLYLAKLIFQMPQNKSTKFMDTVIFTLYNYASNQREEYLLLKLFKTALEEEIKSKVDQVQDIVTGNPTVIKMVVSFNRGARGQNTLRQLLAPVVKEIIDDKSLIINTNPVEVYKAWVNQLETQTGEASKLPYDVTTEQALTYPEVKNKLEASIENLRRVTDKVLNSIISSLDLLPYGLRYIAKVLKNSIHEKFPDATEDELLKIVGNLLYYRYMNPAIVAPDGFDIIDMTAGGQINSDQRRNLGSVAKVLQHAASNKLFEGENEHLSSMNNYLSETYQEFRKYFKEACNVPEPEEKFNMDKYTDLVTVSKPVIYISIEEIISTHSLLLEHQDAIAPEKNDLLSELLGSLGEVPTVESFLGEGAVDPNDPNKANTLSQLSKTEISLVLTSKYDIEDGEAIDSRSLMIKTKKLIIDVIRNQPGNTLTEILETPATAQQEVDHATDMVSRAMIDSRTPEEMKHSQSMIEDAQLPLEQKKRKIQRNLRTLEQTGHVSSENKYQDILNEIAKDIRNQRIYRKLRKAELAKLQQTLNALNKKAAFYEEQINYYDTYIKTCLDN

SEQ ID NO: 75781 - protein, 240 aa, Homo sapiens
MAIVQTLPVPLEPAPEAATAPQAPVMGSVSSLISGRPCPGGPAPPRHHGPPGPTFFRQQDGLLRGGYEAQEPLCPAVPPRKAVPVTSFTYINEDFRTESPPSPSSDVEDAREQRAHNAHLRGPPPKLIPVSGKLEKNMEKILIRPTAFKPVLPKPRGAPSLPSFMGPRATGLSGSQGSLTQLFGGPASSSSSSSSSSAADKPLAFSGWASGCPSGTLSDSGRNSLSSLPTYSTGGAEPTT

SEQ ID NO: 75782 - protein, 84 aa, Homo sapiens
MLDTMEAPGHSRQLLLQLNNQRTKGFLCDVIIVVQNALFRAHKNVLAASSAYLKSLVVHDNLLNLDHDMVSPAVFRLVLDFIYT

SEQ ID NO: 75783 - protein, 195 aa, Homo sapiens
MSLPDPGHRPQKRCHLDVPHFAHALWCLHINSLTEDEDVRAMLRGSRLRKIRSRTWHKERLYRLQEDGLSVWFQRRIPRAPSQHIFFVQHIEAVREGHQSEGLRRFGGAFAPARCLTIAFKGRRKNLDLAAPTAEEAQRWVRGLTKLRARLDAMSQRERLDHWIHSYLHRADSNQDSKMSFKEIKSLLRMVNVDM

SEQ ID NO: 75784 - protein, 27 aa, Homo sapiens
MVGVKPVGSDPDFQPELSGAGSRLAVV

SEQ ID NO: 75785 - protein, 346 aa, Homo sapiens
MQNDRTTISRALSQNRELKEQLAELQSGFVKLTNENMEITSALQSEQHVKRELGKKLGELQEKLSELKETVELKSQEAQSLQQQRDQYLGHLQQYVAAYQQLTSEKEVLHNQLLLQTQLVDQLQQQEAQGKAVAEMARQELQETQERLEAATQQNQQLRAQLSLMAHPGEGDGLDREEEEDEEEEEEEAVAVPQPMPSIPEDLESREAMVAFFNSAVASAEEEQARLRGQLKEQRVRCRRLAHLLASAQKEPEAAAPAPGTGGDSVCGETHRALQGAMEKLQSRFMELMQEKADLKERPGRVLPVTTPLHSRSCSCFVRCRTPGSAQAWAATPAFLFFTGLTRMMR

SEQ ID NO: 75786 - protein, 45 aa, Homo sapiens
TTTRHKVLIMEFCPCGSLYTVLEEPSNAYGLPESEFLIVLRDWVE

SEQ ID NO: 75787 - protein, 168 aa, Homo sapiens
  MOD_RES (1)..(1): Any amino acid
XHSNLFSLAELTGIKWRRYNFGGHGDCGPIISAPAQDDPILLSFIRCLQANLLCVWRRDVKPDCKELWIFWWGDEPNLVGVIHHELQVVEEGLWENGLSYECRTLLFKAIHNLLERFGQRKPLCDGSLLCPFDMIPSLEHPLTFWHSNMFQALNSVLRGEVDEKEWVH

SEQ ID NO: 75788 - protein, 572 aa, Homo sapiens
MAKPTSKDSGLKEKFKILLGLGTPRPNPRSAEGKQTEFIITAEILRELSMECGLNNRIRMIGQICEVAKTKKFEEHAVEALWKAVADLLQPERPLEARHAVLALLKAIVQGQGERLGVLRALFFKVIKDYPSNEDLHERLEVFKALTDNGRHITYLEEELADFVLQWMDVGLSSEFLLVLVNLVKFNSCYLDEYIARMVQMICLLCVRTASSVDIEVSLQVLDAVVCYNCLPAESLPLFIVTLCRTINVKELCEPCWKLMRNLLGTHLGHSAIYNMCHLMEDRAYMEDAPLLRGAVFFVGMALWGAHRLYSLRNSPTSVLPSFYQAMACPNEVVSYEIVLSITRLIKKYRKELQVVAWDILLNIIERLLQQLQTLDSPELRTIVHDLLTTVEELCDQNEFHGSQERYFELVERCADQRPESSLLNLISYRAQSIHPAKDGWIQNLQALMERFFRSESRGAVRIKVLDVLSFVLLINRQFYEEELINSVVISQLSHIPEDKDHQVRKLATQLLVDLAEGCHTHHFNSLLDIIEKVMARSLSPPPELEERDVAAYSASLEDVKTAVLGLLVILQ

SEQ ID NO: 75789 - protein, 120 aa, Homo sapiens
MPLEQRSQHCKPEEGLEARGEALGLVGAQAPATEEQQTASSSSTLVEVTLGEVPAADSPSPPHSPQGASSFSTTINYTLWRQSDEGSSNQEEEGPRMFPDLESEFQAAISRKMVELVHFL

SEQ ID NO: 75790 - protein, 105 aa, Homo sapiens
MYGKIIFVLLLSEIVSISALSTTEVAMHTSTSSSVTKSYISSQTNEITLIIFGVMAGVIGTILLISYGIRRLIKKSPSDVKPLPSPDTDVPLSSVEIENPETSDQ

SEQ ID NO: 75791 - protein, 203 aa, Homo sapiens
KKFDLGQDVIDFTGHALALYRTDDYLDQPCYETINRIKLYSESLARYGKSPYLYPLYGLGELPQGFARLSAIYGGTYMLNKPIEEIIVQNGKVIGVKSEGEIARCKQLICDPSYVKDRVEKVGQVIRVICILSHPIKNTNDANSCQIIIPQNQVNRKSDLLASVTSWYQKTWEQKARSLFPAHMMPPLILRQRVMTLKTSIRG

SEQ ID NO: 75792 - protein, 77 aa, Homo sapiens
  MOD_RES (1)..(1): Any amino acid
XSLMLDEGSSCPTPAKFNTCPLPGALLQDPYFIQSEEKMEASLPPNQTQALQHGLSLLPQTFSLRPGPASPRDKFGP

SEQ ID NO: 75793 - protein, 196 aa, Homo sapiens
MIACFLWKICFLKNQMKLKSQEKRPKMLTSNLKITNEDTNYISLTQKFQFAFPSDKYEQDDLNLEGVGNNDLSHIAGKLTYASQKYKNHIGTEIAPEKSVPDDTKLVNFAEDKGESTSVFRKRLFKISDNIHGSAYSNDNELDSHIGSVKIVQTEMNKGKSRNYSNSKQKFQYSANVFTANNAFSASEIGEGMFKA

SEQ ID NO: 75794 - protein, 1349 aa, Homo sapiens
MEGAAAREARGTETPRASAPPPAPSEPPAAPRARPRLVFRTQLAHGSPTGKIEGFTNVRELYAKIAEAFGIAPTEILFCTLNSHKVDMQKLLGGQIGLEDFIFAHVRGETKEVEVTKTEDALGLTITDNGAGYAFIKRIKEGSIINRIEAVCVGDSIEAINDHSIVGCRHYEVAKMLRELPKSQPFTLRLVQPKRAFDMIGQRSRSSKCPVEAKVTSGRETLRLRSGGAATVEEAPSEFEEEASRKVDDLLESYMGIRDPELGKGPGVHHGGDVQEDSERPGVCTLFRLRLGRVRLPRRVCGGSVGRHRRGQRGLWLVCPGGAQHSPSPEPSPLPRPCSRTQPRSEDKFLSRTQSNLEPQPNSRTQPFSRIQPRSEAKLCARAQASSETKPSIENKLCSKTQASPETKPSSRTQMSFETMPSTETKPCSRTQACSEAKPSSRTQMSSETMPSSRTQMGSETMPSSRTQMGSETEPSSRTQMGSETEPSSKTQMGSETMPSSRTQMGSETEPSSRTQMGSETEPSSRTQMGSETMPSSRTQMGSETKPSSRTQMSSETMPSSRTQMSSETEPSIETKPCSRVQASSETKPSSRTQISSETKPSIETKPCSRIQATSEAKPSSRTQVSPETKPSSRTQISSETNPSIETKPCSRTQATSEAKPSSRTQIRSETKPCSEAQASSETKHISRIQLSPDNKPNSGTQTHFKTQTSLETNPSSRIQASSETKPCWKTQADSGTLDSSTMQPHLDTRSSSGTPVNFGTHVRFMKQPSSGTPVSSGFRDSSQIKSYSRTQTSSETQVHTAAQSRSQPQLHPSAHPHPAAQSSSSDDSSSETEPSSRTSPSATTRPNSRIQTSSGTPSILEARPSSSTQLGAKPHSPCTMQLSSRMQFTSRTQTNFKAWPSSRAQSSPSTAPSSGTQLSSGAQAGSEIPASSKTQTAAETQPSSRIQLSSGVQSSPGTQAIAAIELSSTALSSSDSRSSSRTQRCPGARPASGTQFASKTLPGSRYQLQTTAPDSSGIQLDFGKQSSSESQLSFGTQPSSGTQISSRIQASSGSQLSSGTQLISGAQPSSRTQTSSGNQLSSGTQTTARIQLSPGAHLSSRTQSSPETRLSSEAQSSSGTQFSSGIQFGSETQTGSRIQPDSGAQLSSRTQSSSETGLSSETQTGSRIQPSPGAHLSSGTQPVSGTQSSSRTHTSSRIWLSPGNGICPQTPGLDPRIQLEAPAPAQPQPPGPSPRDPTPAPSKDPQPLPQPHDQVCGIQASLGPIPGLPQASYLAPQSQVSSTPQKPAVSPKPRVGPQKSTPPTISVTPSPAPRAALLSSQLSESPALAPALCPTLGEPGARPYRGGP

SEQ ID NO: 75795 - protein, 107 aa, Homo sapiens
MSNPSAPPPYEDRNPLYPGPPPPGGYGQPSVLPGGYPAYPGYPQPGYGHPAGYPQPMPPTHPMPMNYGPGHGYDGEERAVSDSFGPGEWDDRKVRHTFIRKVYSIIS

SEQ ID NO: 75796 - protein, 86 aa, Homo sapiens
  MOD_RES (1)..(1): Any amino acid
XNVIWKSISAIHILFCTVWAVGLASYLLHRTQQNILHEEEGRELSGLVIITAWIILCHSSSKGRVLLCCPDWKAVARSQLTAASNS

SEQ ID NO: 75797 - protein, 29 aa, Homo sapiens
EYNPEVFDKTYQFLNDIRAKEKELTFAEC

SEQ ID NO: 75798 - protein, 498 aa, Homo sapiens
  MOD_RES (1)..(1): Any amino acid
XAVDAILSLNIISAKYLKSSHNSSRLFLDKDIPRTFYRFEAVWDSSLHNSLLLNRVTPYGEKIYMTLSAYLELDHCIQPAVITKDVCMVFYSRDAKISPPRSLRSLFGSGYSKSPDSNRVTGIYELSLCKMSDTGSPGMQRRRRKILDTSVAYVRGEENLAGWRPRGDSLILEHQWELEKLELLHEVEKTRHFLLLRERLGDSIPKSLSDSLSPSLSSGTLSTSTSISSQISTTTFESAITPSESSGYDSGDIESLVDREKELATKCLQLLTHTFNREFSQVHGSVSDCKLSDISPIGRDPSESSFSSATLTPSSTCPSLVDSRSNSLDQKTPEANSRASSPCPEFEQFQIVPAVETPYLARAGKNEFLNLVPDIEEIRPSSVVSKKGYLHFKEPLYSNWAKHFVVVRRPYVFIYNSDKDPVERGIINLSTAQVEYSEDQQAMVKTPNTFAVCTKHRGVLLQALNDKDMNDWLYAFNPLLAGTIRSKLSRRCPSQSKY

SEQ ID NO: 75799 - protein, 134 aa, Homo sapiens
MATNWGSLLQDKQQLEELARQAVDRALAEGVLLRTSQEPTSSEVVSYAPFTLFPSLVPSALLEQAYAVQMDFNLLVDAVSQNAAFLEQTLSSTIKQDDFTARLFDIHKQVLKEGIAQTVFLGLNRSDYMFQRSA

SEQ ID NO: 75800 - protein, 186 aa, Homo sapiens
  MOD_RES (1)..(1): Any amino acid
XRAKKSGAGTGKQQHPSKPQQDAEAASAEQRNHTLIMEQHPVGLPRTTGPMQSSVPPGSGGMVSGASPAGPGFLGSQPQAAIMKQMLIDQRAQLIEQQKQQFLREQRQQQQQQQQQILAEQQLQQSHLPRQHLQPQRNPYPVQQVNQFQGSPQDIAAVRSQAALQSMRTSRLMAQNAGMMGIGPSQ

SEQ ID NO: 75801 - protein, 163 aa, Homo sapiens
MMLHSALGLCLLLVTVSSNLAIAIKKEKRPPQTLSRGWGDDITWVQTYEEGLFYAQKSKKPLMVIHHLEDCQYSQALKKVFAQNEEIQEMAQNKFIMLNLMHETTDKNLSPDGQYVPRIMFVDPSLTVRADIAGRYSNRLYTYEPRDLPLCKYSQMISNSGHS

SEQ ID NO: 75802 - protein, 191 aa, Homo sapiens
MRRQPQNGDLKKQLHERQPRIAALSDKQALGTITAVPVTGPQVSSLQRLAGQGAAVLPQVRPKTLIPDSLPVAPGRDRPPKQPPTFQKATVVSVKNPSPALPTANNTVSHVPAPGSQPQALAEPAALASPLSSAGVAYAIISTSPSNAAAMAPSTAVSVVSDSIKVQPLLISADNKVIIIQPQVQTQPEST

SEQ ID NO: 75803 - protein, 103 aa, Homo sapiens
MIRSASWVWLLPPAGVRPCRAGAPRSRWRVRAEARSCGSRRRRRSSVLPSVLAPGRHHAGAHLPPAGLVPFALLEGRDGADARGAAVLGQDHLRQCHRVRSIQ

SEQ ID NO: 75804 - protein, 901 aa, Homo sapiens
MEFSWGSGQESRRLLLLLLLLAAWEAGNGQLHYSVSEEAKHGTFVGRIAQDLGLELAELVPRLFRVASKGRGGLLEVNLQNGILFVNSRIDREELCRRSAECSIHLEVIVDRPLQVFHVDVEVRDINDNPPVFPATQKNLSIAESRPLDSRFPLEGASDADIGENALLTYRLSPNEYFSLEKPPDDELVKGLGLILRKSLDREEAPEIFLVLTATDGGKPELTGTVQLLITVLDANDNAPAFDRTIYKVRLLENVPNGTLVIKLNASDLDEGLNGDIVYSFSNDISPNVKSKFHIDPITGQIIVKGYIDFEESKSYEIIVEGIDKGQLPLSGHCRVIVEVEDNNDNVPDLEFKSLSLPIREDAPLGTVIALISVSDKDMGVNGLVTCSLTSHVPFKLVSTFKNYYSLVLDSALDRESVSAYELVVTARDGGSPSLWATASVSVEVADVNDNAPAFAQPEYTVFVKENNPPGCHIFTVSAWDADAQENALVSYSLVERRVGERALSSYVSVHAESGKVYALQPLDHEELELLQFQVTARDAGVPPLGSNVTLQVFVLDENDNAPALLAPRAGGTGGAVSELVPWSVGVGHVVAKVRAVDADSGYNAWLSYELQPGTGGARIPFRVGLYTGEISTTRALDETDAPRHRLLVLVKDHGEPALTATATVLVSLVESGQAPKASSRALVGAVGPDAALVDVNVYLIIAICAVSSLLVLTLLLYTALRCSALPTEGACAPGKPTLVCSSAVGSWSYSQQRRPRVCSGEGPPKTDLMAFSPSLPDSRDREDQLQTTEESFAKPRQPNPDWRYSASLRAGMHSSVHLEEAGILRAGPGGPDQQWPTVSSATPEPEAGEVSPPVGAGVNSNSWTFKYGPGNPKQSGPEPKKQTQVSFLLRRKGEASQPRQ

SEQ ID NO: 75805 - protein, 37 aa, Homo sapiens
MGASRLYTLVLVLQPQRVLLGMKKRGFGAGRWNGFGG

SEQ ID NO: 75806 - protein, 126 aa, Homo sapiens
MGDLFSTPDCKAQDERFSLIFTLGSFMNNFMTFPTGYIFDRFKTTVARLIAIFFYTTATLIIAFTSAGSAVLLFLAMPMLTIGGILFLITNLQIGNLFGQHRSTIITLYNGAFDSSSAVFLIIKLL

SEQ ID NO: 75807 - protein, 486 aa, Homo sapiens
MLRRALLCLAVAALVRADAPEEEDHVLVLRKSNFAEALAAHKYLLVEFYAPWCGHCKALAPEYAKAAGKLKAEGSEIRLAKVDATEESDLAQQYGVRGYPTIKFFRNGDTASPKEYTAGREADDIVNWLKKRTGPAATTLPDGAAAESLVESSEVAVIGFFKDVESDSAKQFLQAAEAIDDIPFGITSNSDVFSKYQLDKDGVVLFKKFDEGRNNFEGEVTKENLLDFIKHNQLPLVIEFTEQTAPKIFGGEIKTHILLFLPKSVSDYDGKLSNFKTAAESFKGKILFIFIDSDHTDNQRILEFFGLKKEECPAVRLITLEEEMTKYKPESEELTAERITEFCHRFLEGKIKPHLMSQELPEDWDKQPVKVLVGKNFEDVAFDEKKNVFVEFYAPWCGHCKQLAPIWDKLGETYKDHENIVIAKMDSTANEVIDYNGERTLDGFKKFLESGGQDGAGDDDDLEDLEEAEEPDMEEDDDQKAVKDEL

SEQ ID NO: 75808 - protein, 43 aa, Homo sapiens
MDPLETPIKDGILYQQHVKFGKKCWRKVWALLYAGGPSGVARL

SEQ ID NO: 75809 - protein, 113 aa, Homo sapiens
  MOD_RES (1)..(1): Any amino acid
XALKGLTVQQWDALYTDLPNRQLKVQVADRRVISTTDAERQAVTPPGLQEAINDLVKKYKLSRAFVRPSGTEDVVRVYAEADSQESADHLAHEVSLAVFQLAGGIGERPQPGF

SEQ ID NO: 75810 - protein, 41 aa, Homo sapiens
MLSRLSGLANVVLHELSGDDDTDQNMRAPLDPELHQESDME

SEQ ID NO: 75811 - protein, 172 aa, Homo sapiens
  MOD_RES (1)..(1): Any amino acid
XEQPDNGVLNYPKRACQFNRTQLGNCSGIGDSTHYGYSTGQPCVFIKMNRVINFYAGANQSMNVTCAGKRPHHHRNKGKLIPEDGRDEDAENLGNFVMFPANGNIDLMYFPYYGKKFHVNYTQPLVAVKFLNVTPNVEVNVECRINAANIATDDERDKFAGRVAFKLRINKT

SEQ ID NO: 75812 - protein, 87 aa, Homo sapiens
MAAPTPARPVLTHLLVALFGMGSWAAVNGIWVELPVVVKELPEGWSLPSYVSVLVALGNLGLLVVTLWRRLAPGKDEQVPIRVVQGS

SEQ ID NO: 75813 - protein, 166 aa, Homo sapiens
MSAVVAQTLHVFGLRSHVANNIFYFDEQIIIFPSGNHCVKYNVDQKWQKFIPGSEKSQGMLALSISPNRRYLAISETVQEKPAITIYELSSIPCRKRKVLNNFDFQVQKFISMAFSPDSKYLLAQTSPPESNLVYWLWEKQKVMAIVRIDTQNNPVYQVSFSPQDN

SEQ ID NO: 75814 - protein, 54 aa, Homo sapiens
  MOD_RES (1)..(1): Any amino acid
XIGALKLREMEHYFSQGLSVQLFNDGSKGKLNHLCGADFVKSHQKPPQGTCLLH

SEQ ID NO: 75815 - protein, 153 aa, Homo sapiens
MYRYLGEALLLSRAGPAALGSASADSAALLGWARGQPAAAPQPGLALAARRHYSEAVADREDDPNFFKMVEGFFDRGASIVEDKLVEDLRTRESEEQKRNRVRGILRIIKPCNHVLSLSFPIRRDDGSWEVIEGYRAQHSQHRTPCKGVTTCT

SEQ ID NO: 75816 - protein, 250 aa, Homo sapiens
SIERVINIFQSNLFQALIDIQEFYEVTLLDNPKCIDRSKPSEPIQPVNTWEISSLPSSTVTSETLPSSLSPSVEKYRYQDEDTPPQEHISPQITNEVIGPELVHVSEKNLSEIENVHGFVSHSHISPIKVNGTDADYEYEEITLERGNSGLGFSIAGGTDNPHIGDDSSIFITKIITGGAAAQDGRLRVNDCILRVNEVDVRDVTHSKAVEALKEAGSIVRLYVKRRKPVSEKIMEIKLIKGPKGMWSWV

SEQ ID NO: 75817 - protein, 41 aa, Homo sapiens
MSDKLKKDLCYHNSDSPEYQDSSFSLIVAFTDAKYCSWVCL

SEQ ID NO: 75818 - protein, 102 aa, Homo sapiens
MNTTSSAAPPSLGVEFISLLAIILLSVALAVGLPGNSFVVWSILKRMQKRSVTALMVLNLALADLAVLLTAPFFLHFLAQGTWSFGLAGCRLCHYVCGVSMY

SEQ ID NO: 75819 - protein, 106 aa, Homo sapiens
MALYELFSHPVERSYRAGLCSKAALFLLLAAALTYIPPLLVAFRSHGFWLKRSSYEEQPTVRFQHQVLLVALLGPESDGFLAWSTFPAFNRLQGDRLRVPLVSWRR

SEQ ID NO: 75820 - protein, 392 aa, Homo sapiens
MTPQPAGPPDGGWGWVVAAAAFAINGLSYGLLRSLGLAFPDLAEHFDRSAQDTAWISALALAVQQAASPVGSALSTRWGARPVVMVGGVLASLGFVFSAFASDLLHLYLGLGLLAGFGWALVFAPALGTLSRYFSRRRVLAVGLALTGNGASSLLLAPALQLLLDTFGWRGALLLLGAITLHLTPCGALLLPLVLPGDPPAPPRSPLAALGLSLFTRRAFSIFALGTALVGGGYFVPYVHLAPHALDRGLGGYGAALVVAVAAMGDAGARLVCGWLADQGWVPLPRLLAVFGALTGLGLWVVGLVPVVGGEESWGGPLLAAAVAYGLSAGSYAPLVFGVLPGLVGVGGVVQATGLVMMLMSLGGLLGPPLSGKDLSSQICLQLSSAPGVRGF

SEQ ID NO: 75821 - protein, 282 aa, Homo sapiens
MDFSFSFMQGIMGNTIQQPPQLIDSANIRQEDAFDNNSDIAEDGGQTPYEATLQQGFQYPATTEDLPPLTNGYPSSISVYETQTKYQSYNQYPNGSANGFGAVRNFSPTDYYHSEIPNTRPHEILEKPSPPQPPPPPSVPQTVIPKKTGSPEIKLKITKTIQNGRELFESSLCGDLLNEVQASEHTKSKHESRKEKRKKSNKHDSSRSEERKSHKIPKLEPEEQNRPNERVDTVSEKPREEPVLKEEAPVQPILSSVPTTEVSTGVKFQVGDLVWSKVGTYP

SEQ ID NO: 75822 - protein, 84 aa, Homo sapiens
MMAQSNMFTVADVLSQDELRKKLYQTFKDRGILDTLKKVVWQKKRYLLCRIYYNSLKSTLLPVSTNHWFQDLIKKIKKVFLCIF

SEQ ID NO: 75823 - protein, 285 aa, Homo sapiens
MAMEMRLPVARKPLSERLGRDTKKHLVVPGDTITTDTGFMRGHGTYMGEEKLIASVAGSVERVNKLICVKALKTRYIGEVGDIVVGRITEVQQKRWKVETNSRLDSVLLLSSMNLPGGELRRRSAEDELAMRGFLQEGDLISAEVQAVFSDGAVSLHTRSLKYGKVSPSLVKRQKTHFHDLPCGASVILGNNGFIWIYPTPEHKEEEAGGFIANLEPVSLADREVISRLRNCIISLVTQRMMLYDTSILYCYEASLPHQIKDILKPEIMEEIVMETRQRLLEQEG

SEQ ID NO: 75824 - protein, 179 aa, Homo sapiens
MKNRRETRETPGNPQLAVAEESGRLWSEEQPAHPLQVGAVYLGEEELLHDPMGQDRAAEEANAVLGLDTQGDHMVMLSVIPGEAEDKVSSEPSGVTCGAGGAEDSRCNVRESLFSLDGAGAHFPDREEEYYTEPEVAESDAAPTEDSNNTESLKSPKVNCEERNITGLENFTLKILNMS

SEQ ID NO: 75825 - protein, 183 aa, Homo sapiens
MAAAPPLRDRLSFLHRVSEGGPPGPRSHGSSRAPHSPDSPRAGAIDLASPRRVAAPGPFARADAPELPARRAVPGPSKPGLPSRTRRAQGRWAQPDPGGTNRPRPAFSGLRREGRSGGPGGRGAAVSVLLAPRWAGSPPSSLTVAFQRTPVLERHPWVAENTDVSKGQRRTHHSPDSPEGDVR

SEQ ID NO: 75826 - protein, 72 aa, Homo sapiens
  MOD_RES (1)..(1): Any amino acid
XNVSWRDSTMGSIFITQLITCFQKYSWCCHLEEVFRKEATSSPALLNQLQGAPSLVQLAYLTFCISIKVKTN

SEQ ID NO: 75827 - protein, 608 aa, Homo sapiens
GFLSTGDQAAKGNYGLLDLIQALRWTSENIGFFGGDPLRITVFGSGAGGSCVNLLTLSHYSEGNRWSNSTKGLFQRAIAQSGTALSSWAVSFQPAKYARMLATKVGCNVSDTVELVECLQKKPYKELVDQDIQPARYHIAFGPVIDGDVIPDDPQILMEQGEFLNYDIMLGVNQGEGLKFVENIVDSDDGISASDFDFAVSNFVDNLYGYPEGKDVLRETIKFMYTDWADRHNPETRRKTLLALFTDHQWVAPAVATADLHSNFGSPTYFYAFYHHCQTDQVPAWADAAHGDEVPYVLGIPMIGPTELFPCNFSKNDVMLSAVVMTYWTNFAKTGDPNQPVPQDTKFIHTKPNRFEEVAWTRYSQKDQLYLHIGLKPRVKEHYRANKVNLWLELVPHLHNLNDISQYTSTTTKVPSTDITFRPTRKNSVPVTSAFPTAKQDDPKQQPSPFSVDQRDYSTELSVTIAVGASLLFLNILAFAALYYKKDKRRHDVHRRCSPQRTTTNDLTHAQEEEIMSLQMKHTDLDHECESIHPHEVVLRTACPPDYTLAMRRSPDDVPLMTPNTITMIPNTIPGIQPLHTFNTFTGGQNNTLPHPHPHPHSHSTTRV

SEQ ID NO: 75828 - protein, 89 aa, Homo sapiens
MSENAVRQNGQLVRNDSLYGISNIDTTIEGTSDDLTVVDAASLRRQIIKLNRRLQLLEEENKERAKREMVMYSITVAFWLLNSWLWFRR

SEQ ID NO: 75829 - protein, 149 aa, Homo sapiens
MASGPGSQEREGLLIVKLEEDCAWSQELPPPDPGPSPEASHLRFRRFRFQEAAGPREALSRLQELCHGWLRPEMRTKEQILELLVLEQFLTILPQEIQSRVQELHPESGEEAVTLVEDMQRELGRLRQQHYLLPGFLFFLLKGTWKTRR

SEQ ID NO: 75830 - protein, 101 aa, Homo sapiens
MADPWQECMDYAVTLARQAGEVVCEAIKNEMNVMLKSSPVDLVTATDQKVEKMLISSIKEKYPSHSFIGEESVAAGEKSILTDNPTWIIDPIDGTTNFVHR

SEQ ID NO: 75831 - protein, 153 aa, Homo sapiens
  MOD_RES (1)..(1): Any amino acid
XLLFSRQGKLRLQKWYVPLSDKEKKKITRELVQTVLARKPKMCSFLEWRDLKIVYKRYASLYFCCAIEDQDNELITLEIIHRYVELLDKYFGSVCELDIIFNFEKAYFILDEFLLGGEVQETSKKNVLKAIEQADLLQESQNEEWGGLSEDIL

SEQ ID NO: 75832 - protein, 962 aa, Homo sapiens
  MOD_RES (1)..(1): Any amino acid
XATAATSPALKRLDLRDPAALFETHGAEEIRGLERQVRAEIEHKKEELRQMVGERYRDLIEAADTIGQMRRCAVGLVDAVKATDQYCARLRQAGSAAPRPPRAQQPQQPSQEKFYSMAAQIKLLLEIPEKIWSSMEASQCLHATQLYLLCCHLHSLLQLDSSSSRYSPVLSRFPILIRQVAAASHFRSTILHESKMLLKCQGVSDQAVAEALCSIMLLEESSPRQALTDFLLARKATIQKLLNQPHHGAGIKAQICSLVELLATTLKQAHALFYTLPEGLLPDPALPCGLLFSTLETITGQHPAGKGTGVLQEEMKLCSWFKHLPASIVEFQPTLRTLAHPISQEYLKDTLQKWIHMCNEDIKNGITNLLMYVKSMKGLAGIRDAMWELLTNESTNHSWDVLCRRLLEKPLLFWEDMMQQLFLDRLQTLTKEGFDSISSSSKELLVSALQELESSTSNSPSNKHIHFEYNMSLFLWSESPNDLPSDAAWVSVANRGQFASSGLSMKAQAISPCVQNFCSALDSKLKVKLDDLLAYLPSDDSSLPKDVSPTQAKSSAFDRYADAGTVQEMLRTQSVACIKHIVDCIRAELQSIEEGVQGQQDALNSAKLHSVLFMARLCQSLGELCPHLKQCILGKSESSEKPAREFRALRKQGKVKTQEIIPTQAKWQEVKEVLLQQSVMGYQVWSSAVVKVLIHGFTQSLLLDDAGSVLATATSWDELEIQEEAESGSSVTSKIRLPAQPSWYVQSFLFSLCQEINRVGGHALPKVTLQEMLKSCMVQVVAAYEKLSEEKQIKKEGAFPVTQNRALQLLYDLRYLNIVLTAKGDEVKSGRSKPDSRIEKVTDHLEALIDPFDLDVFTPHLNSNLHRLVQRTSVLFGLVTGTENQLAPRSSTFNSQEPHNILPLASSQIRFGLLPLSMTSTRKAKSTRNIETKAQVGAKSKRLIRGWVPTSHRATHDQLPFK

SEQ ID NO: 75833 - protein, 210 aa, Homo sapiens
MDNRFATAFVIACVLSLISTIYMAASIGTDFWYEYRSPVQENSSDLNKSIWDEFISDEADEKTYNDALFRYNGTVGLWRRCITIPKNMHWYSPPERTESFDVVTKCVSFTLTEQFMEKFVDPGNHNSGIDLLRTYLWRCQFLLPFVSLGLMCFGALIGLCACICRSLYPTIATGILHLLAVTKESMLPAGAESKHTATPAHACVQTGKPK

SEQ ID NO: 75834 - protein, 1140 aa, Homo sapiens
MVLSLTGLIAFSFLQATLALNPEDPNVCSHWESYAVTVQESYAHPFDQIYYTRCTDILNWFKCTRHRISYKTAYRRGLRTMYRRRSQCCPGYYESGDFCIPLCTEECVHGRCVSPDTCHCEPGWGGPDCSSGCDSDHWGPHCSNRCQCQNGALCNPITGACVCAAGFRGWRCEELCAPGTHGKGCQLPCQCRHGASCDPRAGECLCAPGYTGVYCEELCPPGSHGAHCELRCPCQNGGTCHHITGECACPPGWTGAVCAQPCPPGTFGQNCSQDCPCHHGGQCDHVTGQCHCTAGYMGDRCQEECPFGSFGFQCSQHCDCHNGGQCSPTTGACECEPGYKGPRCQERLCPEGLHGPGCTLPCPCDADNTISCHPVTGACTCQPGWSGHHCNESCPVGYYGDGCQLPCTCQNGADCHSITGGCTCAPGFMGEVCAVSCAAGTYGPNCSSICSCNNGGTCSPVDGSCTCKEGWQGLDCTLPCPSGTWGLNCNESCTCANGAACSPIDGSCSCTPGWLGDTCELPCPDGTFGLNCSEHCDCSHADGCDPVTGHCCCLAGWTGIRCDSTCPPGRWGPNCSVSCSCENGGSCSPEDGSCECAPGFRGPLCQRICPPGFYGHGCAQPCPLCVHSSRPCHHISGICECLPGFSGALCNQVCAGGYFGQDCAQLCSCANNGTCSPIDGSCQCFPGWIGKDCSQACPPGFWGPACFHACSCHNGASCSAEDGACHCTPGWTGLFCTQRCPAAFFGKDCGRVCQCQNGASCDHISGKCTCRTGFTGQHCEQRCAPGTFGYGCQQLCECMNNSTCDHVTGTCYCSPGFKGIRCDQAALMMEELNPYTKISPALGAERHSVGAVTGIMLLLFLIVVLLGLFAWHRRRQKEKGRDLAPRVSYTPAMRMTSTDYSLSDLSQSSSHAHCFSNSSYHALACGGPATSQASTLDRNSPTKLSNKSLDRDTAGWTPYSYVNVLDSHFQISALEARYPPEDFYIELRHLSRPAEPHSPGACGMDRRQNTYIMDKGFKDYMKESVCSSSTCSLNSSENPYATIKDPPILTCKLPESSYVEMKSPVHMGSPYTDVPSLSTSNKNIYEVEPTVSVVQEGCGHNSSYIQNAYDLPRNSHIPGHYDLLPVRQSPANGPSQDKQS

SEQ ID NO: 75835 - protein, 1337 aa, Homo sapiens
MMEIQMDEGGGVVVYQDDYCSGSVMSERVSGLAGSIYREFERLIHCYDEEVVKELMPLVVNVLENLDSVLSENQEHEVELELLREDNEQLLTQYEREKALRRQAEEKFIEFEDALEQEKKELQIQVEHYEFQTRQLELKAKNYADQISRLEERESEMKKEYNALHQRHTEMIQTYVEHIERSKMQQVGGNSQTESSLPGRSRKERPTSLNVFPLADGTVRAQIGGKLVPAGDHWHLSDLGQLQSSSSYQCPQDEMSESGQSSAAATPSTTGTKSNTPTSSVPSAAVTPLNESLQPLGDYGVGSKNSKRAREKRDSRNMEVQVTQEMRNVSIGMGSSDEWSDVQDIIDSTPELDMCPETRLDRTGSSPTQGIVNKAFGINTDSLYHELSTAGSEVIGDVDEGADLLGEFSVRDDFFGMGKEVGNLLLENSQLLETKNALNVVKNDLIAKVDQLSGEQEVLRGELEAAKQAKVKLENRIKELEEELKRVKSEAIIARREPKEEAEDVSSYLCTESDKIPMAQRRRFTRVEMARVLMERNQYKERLMELQEAVRWTEMIRASREHPSVQEKKKSTIWQFFSRLFSSSSSPPPAKRPYPSVNIHYKSPTTAGFSQRRNHAMCPISAGSRPLEFFPDDDCTSSARREQKREQYRQVREHVRNDDGRLQACGWSLPAKYKQLSPNGGQEDTRMKNVPVPVYCRPLVEKDPTMKLWCAAGVNLSGWRPNEDDAGNGVKPAPGRDPLTCDREGDGEPKSAHTSPEKKKAKELPEMDATSSRVWILTSTLTTSKVVIIDANQPGTVVDQFTVCNAHVLCISSIPAASDSDYPPGEMFLDSDVNPEDPGADGVLAGITLVGCATRCNVPRSNCSSRGDTPVLDKGQGEVATIANGKVNPSQSTEEATEATEVPDPGPSEPETATLRPGPLTEHVFTDPAPTPSSGPQPGSENGPEPDSSSTRPEPEPSGDPTGAGSSAAPTMWLGAQNGWLYVHSAVANWKKCLHSIKLKDSVLSLVHVKGRVLVALADGTLAIFHRGEDGQWDLSNYHLMDLGHPHHSIRCMAVVYDRVWCGYKNKVHVIQPKTMQIEKSFDAHPRRESQVRQLAWIGDGVWVSIRLDSTLRLYHAHTHQHLQDVDIEPYVSKMLGTGKLGFSFVRITALLVAGSRLWVGTGNGVVISIPLTETVVLHRGQLLGLRANKTSPTSGEGARPGGIIHVYGDDSSDRAASSFIPYCSMAQAQLCFHGHRDAVKFFVSVPGNVLATLNGSVLDSPAEGPGPAAPASEVEGQKLRNVLVLSGGEGYIDFRIGDGEDDETEEGAGDMSQVKPVLSKAERSHIIVWQVSYTPE

SEQ ID NO: 75836 - protein, 107 aa, Homo sapiens
MRLSKTLVDMDMADYSAALDPAYTTLEFENVQVLTMGNDFVAAASRQIEASPPTSLEHIWRGGQFSTGRHVPIRRHQPQRAQQPGCQRPVCHLRGPGHGQTLRCLEL

SEQ ID NO: 75837 - protein, 59 aa, Homo sapiens
SHCKRWERRGHGRRLAAGEAESVQEGQSKWKAHRLPGKAGLCGPHRPRGPCGWCGPGGS

SEQ ID NO: 75838 - protein, 212 aa, Homo sapiens
MLKFQEAAKCVSGSTAISTYPKTLIARRYVLQQKLGSGSFGTVYLVSDKKAKRGEELKVLKEISVGELNPNETVQANLEAQLLSKLDHPAIVKFHASFVEQDNFCIITEYCEGRDLDDKIQEYKQAGKIFPENQIIEWFIQLLLGVDYMHERRILHRDLKSKNVFLKNNLLKIATGSSNHHIGCTWGRKEGRNKSVQLVRRFWSFSTSNGIL

SEQ ID NO: 75839 - protein, 130 aa, Homo sapiens
MLDDNNHLIQCIMDSQNKGKTSECSQYQQMLHTNLVYLATIADSNQNMQSLLPAPPTQNMPMGPGGMNQSGPPPPPRSHNMPSDGMVGGGPPAPHMQNQMNGQMPGPNHMPMQGPGPNQLNMTNSSMNMP

SEQ ID NO: 75840 - protein, 478 aa, Homo sapiens
MIIKEYRIPLPMTVEEYRIAQLYMIQKKSRNETYGEGSGVEILENRPYTDGPGGSGQYTHKVYHVGMHIPSWFRSILPKAALRVVEESWNAYPYTRTRFTCPFVEKFSIDIETFYKTDAGENPDVFNLSPVEKNQLTIDFIDIVKDPVPHNEYKTEEDPKLFQSTKTQRGPLSENWIEEYKKQVFPIMCAYKLCKVEFRYWGMQSKIERFIHDTGLRRVMVRAHRQAWCWQDEWYGLSMENIRELEKEAQLMLSRKMAQFNEDGEEATELVKHEAVSDQTSGEPPEPSSSNGEPLVGRGLKKQWSTSSKSSRSSKRGASVMPVRPVGGPPCLLPAQGSLWALPLQLAVNLGFCLPASPSRHSISEWRMQSIARDSDESSDDEFFDAHEDLSDTEEMFPKDITKWSSNDLMDKIESPEPEDTQDGLYRQGAPEFRVASSVEQLNIIEIKNKIFTLCPACLLSLKIKRRKGRKRQSSRQK

SEQ ID NO: 75841 - protein, 79 aa, Homo sapiens
MLQEWLAAVGDDYAAVVWRPEGEPRFYPDEEGPKHWTKERHQFLMELKQEALTFARNWGADYILFADTDNILTNNQTLR

SEQ ID NO: 75842 - protein, 11 aa, Homo sapiens
MPPEPRQGSRA

SEQ ID NO: 75843 - protein, 133 aa, Homo sapiens
  MOD_RES (1)..(1): Any amino acid
XTINRFLMRKRLLFPALVTLLISTLTFPPGFGQFMAGQLSQKETLVTLFDNRTWVRQGLVEELEPPSTSQAWNPPRANVFLTLVIFILMKHLGVWWVKAWLPGSQMEFIRTAAPTGLCLGATLWSGQLRWQER

SEQ ID NO: 75844 - protein, 354 aa, Homo sapiens
MCRALLYGGMRESQPEAEIPLQDTTAEAFTMLLKYIYTGRATLTDEKEEVLLDFLSLAHKYGFPELEDSTSEYLCTILNIQNVCMTFDVASLYSLPKLTCMCCMFMDRNAQEVLSSEGFLSLSKTALLNIVLRDSFAAPEKDIFLALLNWCKHNSKENHAEIMQAVRLPLMSLTELLNVVRPSGLLSPDAILDAIKVRSESRDMDLNYRGMLIPEENIATMKYGAQVVKGELKSALLDGDTQNYDLDHGFSRHPIDDDCRSGIEIKLGQPSIINHIRILLWDRDSRSYSYFIEVSMDELDWVRVIDHSQYLCRSWQKLYFPARVCSRDGALPCCPGWSSTPGLKRSDCFSLTKC

SEQ ID NO: 75845 - protein, 149 aa, Homo sapiens
MAKMEVKTSLLDNMIGVGDMVLLEPLNEETFINNLKKRFDHSEIYTYIGSVVISVNPYRSLPIYSPEKVEEYRNRNFYELSPHIFALSDEAYRSLRDQDKDQCILITGESGAGKTEASKLVMSYVAAVCGKGAEVNQVKEQLLQSNPVL

SEQ ID NO: 75846 - protein, 160 aa, Homo sapiens
RVDEVSFHSSVNLDEFESHRILRLQPPQGELTVMRYQLSDDLPSPLPFRLFPSVQWDRGSGRLQVYLKLRCDLLSKSQALNVRLHLPLPRGVVSLSQELSSPEQKAELAEGALRWDLPRVQGGSQLSGLFQRPNIVSQLSQACDGAITSRPGRLLVHPAL

SEQ ID NO: 75847 - protein, 278 aa, Homo sapiens
MDCREMDLYEDYQSPFDFDAGVNKSYLYLSPSGNSSPPGSPTLQKFGLLRTDPVPEEGEDVAATISATETLSEEEQEELRRELAKVEEEIQTLSQVLAAKEKHLAEIKRKLGINSLQELKQNIAKGWQDVTATSAYKKTSETLSQAGQKASAAFSSVGSVITKKLEDVKNSPTFKSFEEKVENLKGSPKNVESFASMLRHSPLTQMGPAKDKLVIGRIFHIVENDLYIDFGGKFHCVCRRPEVDGESPISWYAVWRRFSQVMITCFSSNSDFGKHRKR

SEQ ID NO: 75848 - protein, 97 aa, Homo sapiens
MACQQSRYHSFSSASRLQPRPSGVTIDESFLTEDKSTQNRKLLQKRRTLELPAAPLSHCQAPVLGGTGKLPTQGAPPAGPGHRFHPGTKAAALQRDL

SEQ ID NO: 75849 - protein, 459 aa, Homo sapiens
MEGVLYKWTNYLSGWQPRWFLLCGGILSYYDSPEDAWKGCKGSIQMAVCEIQVHSVDNTRMDLIIPGEQYFYLKARSVAERQRWLVALGSAKACLTDSRTQKEKEFAENTENLKTKMSELRLYCDLLVQQVDKTKEVTTTGVSNSEEGIDVGTLLKSTCNTFLKTLEECMQIANAAFTSELLYRTPPGSPQLAMLKSSKMKHPIIPIHNSLERQMELSTCENGSLNMEINGEEEILMKNKNSLYLKSAEIDCSISSEENTDDNITVQGEIRKEDGMENLKNHDNNLTQSGSDSSCSPECLWEEGKEVIPTFFSTMNTSFSDIELLEDSGIPTEAFLASCYAVVPVLDKLGPTVFAPVKMDLVGNIKKVNQKYITNKEEFTTLQKIVLHEVEADVAQVRNSATEALLWLKRGLKFLKGFLTEVKNGEKDIQTALNNAYGKTLRQHHGWVVRGVFAGHTNV

SEQ ID NO: 75850 - protein, 186 aa, Homo sapiens
MRRCYCHCCCPRCWADWTGSTPAYGYWFKAVTETTKGAPVATNHQSREVEMSTRGRFQLTGDPAKGNCSLVIRDAQMQDESQYFFRVERGSYVRYNFMNDGFFLKVTALTQKPDVYIPETLEPGQPVTVICVFNWAFEECPPPSFSWTGAALSSQGTKPTTSHFSVLSFTPRPQDHNTDLTCHVDF

SEQ ID NO: 75851 - protein, 51 aa, Homo sapiens
  MOD_RES (1)..(1): Any amino acid
XMPDDMNFSDVKQIHQTDTGSTLDTTGAGCAVATESMTFTLISVVMLLPGI

SEQ ID NO: 75852 - protein, 74 aa, Homo sapiens
MVQYLKSVDIPENRVILITPTPLCETAWEEQCIIQGCKLNRLNSVVGEYANACLQVAQDCGTDVLDLWTLMQDS

SEQ ID NO: 75853 - protein, 701 aa, Homo sapiens
MQLVLKMDSSPDNDSWLEDQWERWLTHDISLEEFEDEDLSEITDECGISLQCKDTLSLRPPRAGLLSAGGGGAGSRLQAEMLQMDLIDATGDTPGAEDDEEDDDEERAARRPGAGPPKAESGQEPASRGQGQSQGQSQGPGSGDTYRPKRPTTLNLFPQVPRSQDTLNNNSLGKKHSWQDRVSRSSSPLKTGEQTPPHEHICLSDELPPQSGPAPTTDRGTSTDSPCRRSTATQMAPPGGPPAAPPGGRGHSHRDRIHYQADVRLEATEEIYLTPVQRPPDAAEPTSAFLPPTESRMSVSSDPDPAAYPSTAGRPHPSISEEEEGFDCLSSPERAEPPGGGWRGSLGEPPPPPRASLSSDTSALSYDSVKYTLVVDEHAQLELVSLRPCFGDYSDESDSATVYDNCASVSSPYESAIGEEYEEAPRPQPPACLSEDSTPDEPDVHFSKKFLNVFMSGRSRSSSAESFGLFSCIINGEEQEQTHRAIFRFVPRHEDELELEVDDPLLVELQAEDYWYEAYNMRTGARGVFPAYYAIEVTKEPEHMAALAKNSDWVDQFRVKFLGSVQVPYHKGNDVLCAAMQKIATTRRLTVHFNPPSSCVLEISVRGVKIGVKADDSQEAKGNKCSHFFQLKNISFCGYHPKNNKYFGFITKHPADHRFACHVFVSEDSTKALAESVGRAFQQFYKQFVEYTCPTEDIYLE

SEQ ID NO: 75854 - protein, 147 aa, Homo sapiens
MHFRNFNYSFSSLIACVANSDIFSESETRAKFESLFRTYDKDITFQYFKSFKRVRINFSNPFSAADARLQLHKTEFLGKEMKLYFAQTLHIGSSHLAPPNPDKQFLISPPASPPVGWKQVEDATPVINYDLLYAISKLGPGNNAFDT

SEQ ID NO: 75855 - protein, 1451 aa, Homo sapiens
MASLAALALSLLLRLQLPPLPGARAQSAAGGCSFDEHYSNCGYSVALGTNGFTWEQINTWEKPMLDQAVPTGSFMMVNSSGRASGQKAHLLLPTLKENDTHCIDFHYYFSSRDRSSPGALNVYVKVNGGPQGNPVWNVSGVVTEGWVKAELAISTFWPHFYQVIFESVSLKGHPGYIAVDEVRVLAHPCRKAPHFLRLQNVEVNVGQNATFQCIAGGKWSQHDKLWLQQWNGRDTALMVTRVVNHRRFSATVSVADTAQRSVSKYRCVIRSDGGSGVSNYAELIVKEPPTPIAPPELLAVGATYLWIKPNANSIIGDGPIILKEVEYRTTTGTWAETHIVDSPNYKLWHLDPDVEYEIRVLLTRPGEGGTGPPGPPLTTRTKCADPVHGPQNVEIVDIRARQLTLQWEPFGYAVTRCHSYNLTVQYQYVFNQQQYEAEEVIQTSSHYTLRGLRPFMTIRLRLLLSNPEGRMESEELVVQTEEDVPGAVPLESIQGGPFEEKIYIQWKPPNETNGVITLYEINYKAVGSLDPSADLSSQRGKVFKLRNETHHLFVGLYPGTTYSFTIKASTAKGFGPPVTTRIATKISAPSMPEYDTDTPLNETDTTITVMLKPAQSRGAPVSVYQLVVKEERLQKSRRAADIIECFSVPVSYRNASSLDSLHYFAAELKPANLPVTQPFTVGDNKTYNGYWNPPLSPLKSYSIYFQALSKANGETKINCVRLATKGASTQNSNTVEPEKQVDNTVKMAGVIAGLLMFIIILLGVMLTIKRRKLAKKQKETQSGAQREMGPVASADKPTTKLSASRNDEGFSSSSQDVNGFTDGSRGELSQPTLTIQTHPYRTCDPVEMSYPRDQFQPAIRVADLLQHITQMKRGQGYGFKEEYEALPEGQTASWDTAKEDENRNKNRYGNIISYDHSRVRLLVLDGDPHSDYINANYIDGYHRPRHYIATQGPMQETVKDFWRMIWQENSASIVMVTNLVEVGRHPAEHTVGNATLGRAASPGMVKCVRYWPDDTEVYGDIKVTLIETEPLAEYVIRTFTVQKKGYHEIRELRLFHFTSWPDHGVPCYATGLLGFVRQVKFLNPPEAGPIVVHCSAGAGRTGCFIAIDTMLDMAENEGVVDIFNCVRELRAQRVNLVQTEEQYVFVHDAILEACLCGNTAIPVCEFRSLYYNISRLDPQTNSSQIKDEFQTLNIVTPRVRPEDCSIGLLPRNHDKNRSMDVLPLDRCLPFLISVDGESSNYINAALMDSHKQPAAFVVTQHPLPNTVADFWRLVFDYNCSSVVMLNEMDTAQFCMQYWPEKTSGCYGPIQVEFVSADIDEDIIHRIFRICNMARPQDGYRIVQHLQYIGWPAYRDTPPSKRSLLKVVRRLEKWQEQYDGREGRTVVHCLNGGGRSGTFCAICSVCEMIQQQNIIDVFHIVKTLRNNKSNMVETLEQYKFVYEVALEYLSSF

SEQ ID NO: 75856 - protein, 124 aa, Homo sapiens
DDAQVVCQQLGCGPALKAFKEAEFGQGTGPIWLNEVKCKGNESSLWDCPARRWGHSECGHKEDAAVNCTDISVQKTPQKATTENSHESADFSAAELISVSKFLPISGMEKEAILSHTEKENGNL

SEQ ID NO: 75857 - protein, 82 aa, Homo sapiens
MHKEEHEVAVLGPPPSTILPRSTVINIHSETSVPDHVVWSLFNTLFLNWCCLGFIAFAYSCRSRRRLQEAGWLAQSLSLAIH

SEQ ID NO: 75858 - protein, 105 aa, Homo sapiens
MSEVEHFMPILMEKEEEGMLSPILAHGGVRFMWIKHNNLYLVATSKKNACVSLVFSFLYKVVQVFSEYFKELEEESIRDNFVIIYELLDELMDFGYPQTTDSKIL

SEQ ID NO: 75859 - protein, 220 aa, Homo sapiens
  MOD_RES (1)..(1): Any amino acid
XGLQRELDGERERREKAEGDVAALNRRIQLVEEELDRAQERLATALQKLEEAEKAADESERGMKVIENRAMKDEEKMEIQEMQLKEAKHIAEEADRKYEEVARKLVILEGELERAEERAEVSELKCGDLEEELKNVTNNLKSLEAASEKYSEKEDKYEEEIKLLSDKLKEAETRAEFAERTVAKLEKTIDDLEDELYAQKLKYKAISEELDHALNDMTSL

SEQ ID NO: 75860 - protein, 185 aa, Homo sapiens
MDLSTFDFRTGKMLMSKMNKSRQRVRYDSSNQVKGKPDLNTALPVRQTASIFKQPVTKITNHPSNKVKSDPQKAVDQPRQLFWEKKLSGLNAFDIAEELVKTMDLPKGLQGVGPGCTDETLLSAIASALHTSTMPITGQLSAAVEKNPGVWLNTTQPLCKAFMVTDEDISRKSWCSRCGSGWRRR

SEQ ID NO: 75861 - protein, 1542 aa, Homo sapiens
MPLAFCGSENHSAAYRVDQGVLNNGCFVDALNVVPHVFLLFITFPILFIGWGSQSSKVHIHHSTWLHFPGHNLRWILTFMLLFVLVCEIAEGILSDGVTESHHLHLYMPAGMAFMAAVTSVVYYHNIETSNFPKLLIALLVYWTLAFITKTIKFVKFLDHAIGFSQLRFCLTGLLVILYGMLLLVEVNVIRVRRYIFFKTPREVKPPEDLQDLGVRFLQPFVNLLSKGTYWWMNAFIKTAHKKPIDLRAIGKLPIAMRALTNYQRLCEAFDAQRKDIQGTQGARAIWQALSHAFGRRLVLSSTFRILADLLGFAGPLCIFGIVDHLGKENDVFQPKTQFLGVYFVSSQEFLANAYVLAVLLFLALLLQRTFLQASYYVAIETGINLRGAIQTKIYNKIMHLSTSNLSMGEMTAGQICNLVAIDTNQLMWFFFLCPNLWAMPVQIIVGVILLYYILGVSALIGAAVIILLAPVQYFVATKLSQAQRSTLEYSNERLKQTNEMLRGIKLLKLYAWENIFRTRVETTRRKEMTSLRAFAIYTSISIFMNTAIPIAAVLITFVGHVSFFKEADFSPSVAFASLSLFHILVTPLFLLSSVVRSTVKALVSVQKLSEFLSSAEIREEQCAPHEPTPQGPASKYQAVPLRVVNRKRPAREDCRGLTGPLQSLVPSADGDADNCCVQIMGGYFTWTPDGIPTLSNITIRIPRGQLTMIVGQVGCGKSSLLLAALGEMQKVSGAVFWSSLPDSEIGEDPSPERETATDLDIRKRGPVAYASQKPWLLNATVEENIIFESPFNKQRYKMVIEACSLQPDIDILPHGDQTQIGERGINLSGGQRQRISVARALYQHANVVFLDDPFSALDIHLSDHLMQAGILELLRDDKRTVVLVTHKLQYLPHADWIIAMKDGTIQREGTLKDFQRSECQLFEHWKTLMNRQDQELEKETVTERKATEPPQGLSRAMSSRDGLLQDEEEEEEEAAESEEDDNLSSMLHQRAEIPWRACAKYLSSAGILLLSLLVFSQLLKHMVLVAIDYWLAKWTDSALTLTPAARNCSLSQECTLDQTVYAMVFTVLCSLGIVLCLVTSVTVEWTGLKVAKRLHRSLLNRIILAPMRFFETTPLGSILNRFSSDCNTIDQHIPSTLECLSRSTLLCVSALAVISYVTPVFLVALLPLAIVCYFIQKYFRVASRDLQQLDDTTQLPLLSHFAETVEGLTTIRAFRYEARFQQKLLEYTDSNNIASLFLTAANRWLEVRMVSNYLNWMVRNLADMELQLGAVKRIHGLLKTEAESYEGLLAPSLIPKNWPDQGKIQIQNLSVRYDSSLKPVLKHVNALIAPGQKIGICGRTGSGKSSFSLAFFRMVDTFEGHIIIDGIDIAKLPLHTLRSRLSIILQDPVLFSGTIRFNLDPERKCSDSTLWEALEIAQLKLVVKALPGGLDAIITEGGENFSQGQRQLFCLARAFVRKTSIFIMDEATASIDMATENILQKVVMTAFADRTVVTIAHRVHTILSADLVIVLKRGAILEFDKPEKLLSRKDSVFASFVRADK

SEQ ID NO: 75862 - protein, 68 aa, Homo sapiens
MKWEFTSWVPLVSKICPSDTYKVWKSGQNLRVDTTLLGFDHMTWQRGNRSFVFRGQDTSAVVMEIDHD

SEQ ID NO: 75863 - protein, 19 aa, Homo sapiens
  MOD_RES (1)..(1): Any amino acid
XVEIHLDLLSSRDPPQSPK

SEQ ID NO: 75864 - protein, 136 aa, Homo sapiens
  MOD_RES (1)..(1): Any amino acid
XPFGADSRLQSQAPDSGEKPFKCEFEGCDRRFANSSDRKKHMHVHTSDKPYLCKMCDKSYTHPSSLRKHMKVHESSSQGSQPSPAASSGYESSTPPTIVSPSTDNPTTSSLSPSSSAVHHTAGHSALSSNFNEWYV

SEQ ID NO: 75865 - protein, 138 aa, Homo sapiens
  MOD_RES (1)..(1): Any amino acid
XNDLITRNTEKAKSLIEEGGDWDRRNRLKVYQGLYCVAIRDFKQAAELFLDTVSTFTSYELMDYKTFVTYTVYVSMIALERPDLREKVIKGAEILEVLHSLPAVRQYLFSLYECRYSVFFQSLGNCPGLLLPGDYTAK

SEQ ID NO: 75866 - protein, 129 aa, Homo sapiens
MVFSNNDEGLINKKLPKELLLRIFSFLDIVTLCRCAQISKAWNILALDGSNWQRIDLFNFQTDVEGRVVENISKRCGGFLRKLSLRGCIGVGDSSLKTFAQNCRNIEHLNLNGCTKITDSASALFQHVL

SEQ ID NO: 75867 - protein, 42 aa, Homo sapiens
MASNSTKSFLADAGYGEQELDANSALMELDKDGVTSPVFQNT

SEQ ID NO: 75868 - protein, 182 aa, Homo sapiens
  MOD_RES (1)..(1): Any amino acid
XYKIANNPTTDKENKKWSYGFYLIHTQGQNGLEFYCKTKDLKKKWLEQFEMALSNIRPDYADSNFHDFKMHTFTRVTSCKVCQMLLRGTFYQGYLCFKCGARAHKECLGRVDNCGRVNSGGLPKMQVIRNYSGTPPPALHEGPPLQLQAGDTVELLKGDAHSLFWQGRNLASGEVGFFPSDA

SEQ ID NO: 75869 - protein, 173 aa, Homo sapiens
MSSFLPEGGCYELLTVIGKGFEDLMTVNLARYKPTGEYVTVRRINLEACSNEMVTFLQGELHVSKLFNHPNIVPYRATFIADNELWVVTSFMAYGSAKDLICTHFMDGMNELAIAYILQGVLKALDYIHHMGYVHRISRVMMPSLTSTVWESQPVNWPTAMSPLRICLPPRCC

SEQ ID NO: 75870 - protein, 646 aa, Homo sapiens
MSVKEGAQRKWAALKEKLGPQDSDPTEANLESADPELCIRLLQMPSVVNYSGLRKRLEGSDGGWMVQFLEQSGLDLLLEALARLSGRGVARISDALLQLTCVSCVRAVMNSRQGIEYILSNQGYVRQLSQALDTSNVMVKKQVFELLAALCIYSPEGHVLTLDALDHYKTVCSQQYRFSIVMNELSGSDNVPYVVTLLSVINAVILGPEDLRARTQLRNEFIGLQLLDVLARLRDLEDADLLIQLEAFEEAKAEDEEELLRVSGGVDMSSHQEVFASLFHKVSCSPVSAQLLSVLQGLLHLEPTLRSSQLLWEALESLVNRAVLLASDAQECTLEEVVERLLSVKGRPRPSPLVKAHKSVQANLDQSQRGSSPQNTTTPKPSVEGQQPAAAAACEPVDHAQSESILKVSQPRALEQQASTPPPPPPPPLLPGSSAEPPPPPPPPPLPSVGAKALPTAPPPPPLPGLGAMAPPAPPLPPPLPGSCEFLPPPPPPLPGLGCPPPPPPLLPGMGWGPPPPPPPLLPCTCSPPVAGGMEEVIVAQVDHGLGSAWVPSHRRVNPPTLRMKKLNWQKLPSNVAREHNSMWASLSSPDAEAVEPDFSSIERLFSFPAAKPKEPTMVAPRARKEPKELQRGGRCYDPGWRYHQV

SEQ ID NO: 75871 - protein, 90 aa, Homo sapiens
EFVMIVVFGLEFIIRIWSAGCCCRYRGWQGRLRFARKPFCVIGVRNCCVIFSVSSLTPVPYGGGRVDLRKKVYHHPWALLRRILYSILLS

SEQ ID NO: 75872 - protein, 119 aa, Homo sapiens
MISVKRNTWRALSLVIGDCRKKGNFEYCQDRTEKHSTMPDSPVDVKTQSRLTPPTMPPPPTTQGAPRTSSFTPTTLTNGTSHSPTALNGAPSPPNGFSNGPSSSSSSSLANQQLPPACG

SEQ ID NO: 75873 - protein, 55 aa, Homo sapiens
  MOD_RES (1)..(1): Any amino acid
XRRIEELNKTANGNVEAKVVCFYRRRDISSTLIALADKHAMGGGVLAPFPRGLGE

SEQ ID NO: 75874 - protein, 182 aa, Homo sapiens
  MOD_RES (1)..(1): Any amino acid
XTDGPKFPGDKSSTTQNNNQQKKGIQVLPDGRVTNIPQGMVTDQFGMIGLLTFIRAAETDPGMVHLALGSDLTTLGLNLNSPENLYPKFASPWASSPCRPQDIDFHVPSEYLTNIHIRDKLAAIKLGRYGEDLLFYLYYMNGGDVLQLLAAVELYVQILTVIGDTTKKNEYGLPGHQAWSQQ

SEQ ID NO: 75875 - protein, 796 aa, Homo sapiens
MAACEGRRSGALGSSQSDFLTPPVGGAPWAVATTVVMYPPPPPPPHRDFISVTLSFGENYDNSKSWRRRSCWRKWKQLSRLQRNMILFLLAFLLFCGLLFYINLADHWKALAFRLEEEQKMRPEIAGLKPANPPVLPAPQKADTDPENLPEISSQKTQRHIQRGPPHLQIRPPSQDLKDGTQEEATKRQEAPVDPRPEGDPQRTVISWRGAVIEPEQGTELPSRRAEVPTKPPLPPARTQGTPVHLNYRQKGVIDVFLHAWKGYRKFAWGHDELKPVSRSFSEWFGLGLTLIDALDTMWILGLRKEFEEARKWVSKKLHFEKDVDVNLFESTIRILGGLLSAYHLSGDSLFLRKAEDFGNRLMPAFRTPSKIPYSDVNIGTGVAHPPRWTSDSTVAEVTSIQLEFRELSRLTGDKKFQEAVEKVTQHIHGLSGKKDGLVPMFINTHSGLFTHLGVFTLGARADSYYEYLLKQWIQGGKQETQLLEDYVEAIEGVRTHLLRHSEPSKLTFVGELAHGRFSAKMDHLVCFLPGTLALGVYHGLPASHMELAQELMETCYQMNRQMETGLSPEIVHFNLYPQPGRRDVEVKPADRHNLLRPETVESLFYLYRVTGDRKYQDWGWEILQSFSRFTRPGCLRVQHRSPPSAYLDPCLGWMAAGVGTSGGQRHLAGSVAFSKGPRSTGNRQVAQALNWLWAPPRLCFNQDTVRTSEAVSLGVMRGGLGRWSLRLLPPEDTNHDSRLLKPEQVSVGRPEGGFEVVPGTGVTEWTAQGAALPGLVKPQMSPIQGSGGAAVTPEA

SEQ ID NO: 75876 - protein, 116 aa, Homo sapiens
MGRLDGKVIILTAAAQGIGQAAALAFAREGAKVIATDINESKLQELEKYPGIQTRVLDVTKKKQIDQFANEVERLDVLFNVAGFVHHGTVLDCEEKDWDFSMNLNVRSMYLMIKAF

SEQ ID NO: 75877 - protein, 151 aa, Homo sapiens
MRMRPLSLAVLQQVLGGPPWLRRTLPKLGRPKEAPVARMSTQSTHPLKPEAPRLPPGIPESPSCQRRHTLPASEFRCLTPEDAVSAFEIEREAFISVLGVCPLYLDEIRHFLTLCPELSLGWFEEGCLVAFIIGSLWDKERLMQESLTLHR

SEQ ID NO: 75878 - protein, 98 aa, Homo sapiens
MKNLDSKVNIIPVIAKADTVSKTELQKFKIKLMSELVSNGVQIYQFPTDDDTIAKVNAAMNGQLPFAVVGSMDEVKVGNKMVKARQYPWGVVQVENEN

SEQ ID NO: 75879 - protein, 2354 aa, Homo sapiens
MRILKRFLACIQLLCVCRLDWANGYYRQQRKLVEEIGWSYTGALNQKNWGKKYPTCNSPKQSPINIDEDLTQVNVNLKKLKFQGWDKTSLENTFIHNTGKTVEINLTNDYRVSGGVSEMVFKASKITFHWGKCNMSSDGSEHSLEGQKFPLEMQIYCFDADRFSSFEEAVKGKGKLRALSILFEVGTEENLDFKAIIDGVESVSRFGKQAALDPFILLNLLPNSTDKYYIYNGSLTSPPCTDTVDWIVFKDTVSISESQLAVFCEVLTMQQSGYVMLMDYLQNNFREQQYKFSRQVFSSYTGKEEIHEAVCSSEPENVQADPENYTSLLVTWERPRVVYDTMIEKFAVLYQQLDGEDQTKHEFLTDGYQDLGAILNNLLPNMSYVLQIVAICTNGLYGKYSDQLIVDMPTDNPELDLFPELIGTEEIIKEEEEGKDIEEGAIVNPGRDSATNQIRKKEPQISTTTHYNRIGTKYNEAKTNRSPTRGSEFSGKGDVPNTSLNSTSQPVTKLATEKDISLTSQTVTELPPHTVEGTSASLNDGSKTVLRSPHMNLSGTAESLNTVSITEYEEESLLTSFKLDTGAEDSSGSSPATSAIPFISENISQGYIFSSENPETITYDVLIPESARNASEDSTSSGSEESLKDPSMEGNVWFPSSTDITAQPDVGSGRESFLQTNYTEIRVDESEKTTKSFSAGPVMSQGPSVTDLEMPHYSTFAYFPTEVTPHAFTPSSRQQDLVSTVNVVYSQTTQPVYNGETPLQPSYSSEVFPLVTPLLLDNQILNTTPAASSSDSALHATPVFPSVDVSFESILSSYDGAPLLPFSSASFSSELFRHLHTVSQILPQVTSATESDKVPLHASLPVAGGDLLLEPSLAQYSDVLSTTHAASETLEFGSESGVLYKTLMFSQVEPPSSDAMMHARSSGPEPSYALSDNEGSQHIFTVSYSSAIPVHDSVGVTYQGSLFSGPSHIPIPKSSLITPTASLLQPTHALSGDGEWSGASSDSEFLLPDTDGLTALNISSPVSVAEFTYTTSVFGDDNKALSKSEIIYGNETELQIPSFNEMVYPSESTVMPNMYDNVNKLNASLQETSVSISSTKGMFPGSLAHTTTKVFDHEISQVPENNFSVQPTHTVSQASGDTSLKPVLSANSEPASSDPASSEMLSPSTQLLFYETSASFSTEVLLQPSFQASDVDTLLKTVLPAVPSDPILVETPKVDKISSTMLHLIVSNSASSENMLHSTSVPVFDVSPTSHMHSASLQGLTISYASEKYEPVLLKSESSHQVVPSLYSNDELFQTANLEINQAHPPKGRHVFATPVLSIDEPLNTLINKLIHSDEILTSTKSSVTGKVFAGIPTVASDTFVSTDHSVPIGNGHVAITAVSPHRDGSVTSTKLLFPSKATSELSHSAKSDAGLVGGGEDGDTDDDGDDDDDDRGSDGLSIHKCMSCSSYRESQEKVMNDSDTHENSLMDQNNPISYSLSENSEEDNRVTSVSSDSQTGMDRSPGKSPSANGLSQKHNDGKEENDIQTGSALLPLSPESKAWAVLTSDEESGSGQGTSDSLNENETSTDFSFADTNEKDADGILAAGDSEITPGFPQSPTSSVTSENSEVFHVSEAEASNSSHESRIGLAEGLESEKKAVIPLVIVSALTFICLVVLVGILIYWRKCFQTAHFYLEDSTSPRVISTPPTPIFPISDDVGAIPIKHFPKHVADLHASSGFTEEFETLKEFYQEVQSCTVDLGITADSSNHPDNKHKNRYINIVAYDHSRVKLAQLAEKDGKLTDYINANYVDGYNRPKAYIAAQGPLKSTAEDFWRMIWEHNVEVIVMITNLVEKGRRKCDQYWPADGSEEYGNFLVTQKSVQVLAYYTVRNFTLRNTKIKKGSQKGRPSGRVVTQYHYTQWPDMGVPEYSLPVLTFVRKAAYAKRHAVGPVVVHCSAGVGRTGTYIVLDSMLQQIQHEGTVNIFGFLKHIRSQRNYLVQTEEQYVFIHDTLVEAILSKETEVLDSHIHAYVNALLIPGPAGKTKLEKQFQGLTLSPRLECRGTISAHCNLPLPGLTDPPTSASRVARTILLSQSNIQQSDYSAALKQCNREKNRTSSIIPVERSRVGISSLSGEGTDYINASYIMGYYQSNEFIITQHPLLHTIKDFWRMIWDHNAQLVVMIPDGQNMAEDEFVYWPNKDEPINCESFKVTLMAEEHKCLSNEEKLIIQDFILEATQDDYVLEVRHFQCPKWPNPDSPISKTFELISVIKEEAANRDGPMIVHDEHGGVTAGTFCALTTLMHQLEKENSVDVYQVAKMINLMRPGVFADIEQYQFLYKVILSLVSTRQEENPSTSLDSNGAALPDGNIAESLESLV

SEQ ID NO: 75880 - protein, 93 aa, Homo sapiens
MRLLSFVVLALFAVTQAEEGARLLASKSLLNRYAVEGRDLTLQYNIYNVGSSAALDVELSDDSFPPEDFGIVSGMLNVKWDRIAPWTGQPLGS

SEQ ID NO: 75881 - protein, 211 aa, Homo sapiens
MAHVGSRKRSRSRSRSRGRGSEKRKKKSRKDTSRNCSASTSQGRKASTAPGAEERSKQKARRRTRSSSSSSSSSSSSSSSSSSSSSSSSSDGRKKRGKYKDKRRKKKKKRKKLKKKGKEKAEAQQVEALPGPSLDQWHRSAGEEEDGPVLTDEQKSRIQAMKPMTKEEWDARQSIIRKVVDPETGRTRLIKGDGEVLEEIVTKERHREINK

SEQ ID NO: 75882 - protein, 58 aa, Homo sapiens
GFVLQDTVEQLRCEHCARFLADRFVEGVCPFCGYEEARGDQCDKCGETLGSKETVGCS

SEQ ID NO: 75883 - protein, 171 aa, Homo sapiens
GVIRSVKKDGEWKVLIMDHPSMRILSSCCKMSDILAEGITIVEDINKRREPIPSLEAIYLLSPTEKSVQALIKDFQGTPTFTYKAAHIFFTDTCPEPLFSELGRSRLAKVVKTLKEIHLAFLPYEAQGPRGHSPVGPRRPGQAERLQGRHSQSGRGPRENPLPAADNGPGS

SEQ ID NO: 75884 - protein, 213 aa, Homo sapiens
  MOD_RES (1)..(1): Any amino acid
XLDDYNPDIPEWRRDIGRVIKKSLVEATGVPGQHILVAVLPGLPTTAELFVLPYQDPAGENKRSTDDLEQISELLIHTLNQNSVHFELKPGVRVLVHAAHLTAAPLVDLTPTHSGSAMLMLLSVVFVGLAVFVIYKFKRKIPGINVYAQMQNEKEQEMISPVSHSESRPNVPQTELRRPGQLIDEKVESQLIGSISIVAENQSTKEIPTYVNV

SEQ ID NO: 75885 - protein, 197 aa, Homo sapiens
  MOD_RES (1)..(1): Any amino acid
XNNAAISSMQEELNKGMADIDIQDDKWRDLNVISSLLKSFFRKLPEPLFTNDKYADFIEANRKEDPLDRLKTLKRLIHDLPEHHYETLKFLSAHLKTVAENSEKNKMEPRNLAIVFGPTLVRTSEDNMTHMVTHMPDQYKIVETLIQHHDWFFTEEGAEEPLIQLLVTQQNLRVLGDLERISIAGNCLCPPSLQLLV

SEQ ID NO: 75886 - protein, 148 aa, Homo sapiens
MMAECLEKFTVSLNHKLDSHAELLDATQHTLQQQIQTLVKEGLRGFREARRDFWRGAESLEAALTHNAEVPRRRAQEAEEAGAALRTARAGYRGRALDYALQINVIEDKRKFDIMEFVLRLVEAQATHFQQGHEELSRLSQYRKELGA

SEQ ID NO: 75887 - protein, 44 aa, Homo sapiens
ADWETPSKTKWSLLMEDIFGKETPSGVTMVFLQLVPSMSHSPGH

SEQ ID NO: 75888 - protein, 109 aa, Homo sapiens
MPVVWPTLLDLSRDECKRILRKLGVKIITQQVQPSKILPKPVTATLPTSSNSPIMVVSSNGAIMTTKLVTTPTGTQATYTRPTVSPSIGRMAATPGAATYVKTTSGSII

SEQ ID NO: 75889 - protein, 35 aa, Homo sapiens
MKPRAECCSPKFWLVLAVLAVSGSRARSQKSPPSI

SEQ ID NO: 75890 - protein, 143 aa, Homo sapiens
  MOD_RES (1)..(1): Any amino acid
XLTSLPALAVPPPTPTKTAPPALVNGLELSEPRSWLYLEEMVNSLLNTAQQLKTLFEQAKHASTYREAATNQAKIHADAERKEQSCVNCGREAMSECTGCHKVNYCSTFCQRKRWSLTMLTSLVSISWLRAILPCQPPKVLGL

SEQ ID NO: 75891 - protein, 140 aa, Homo sapiens
MSNERGFENVELGVIGKKKKVPRRVIHFVSGETMEEYSTDEDEVDGLEKKDVLPTVDPTKLTWGPYLWFYMLRAATSTLSVCDFLGEKIASVLGISTPKYQYAIDEYYRMKKEEEEEEEENRMSEEAEKQYQQNKLQTDS

SEQ ID NO: 75892 - protein, 162 aa, Homo sapiens
MRTLFNLLWLALACSPVHTTLSKSDAKKAASKTLLEKSQFSDKPVQDRGLVVTDLKAESVVLEHRSYCSAKARDRHFAGDVLGYVTPWNSHGYDVTKVFGSKFTQISPVWLQLKRRGREMFEVTGLHDVDQGSHPSCLTVLAPQAEKSGGCELSGSMPRACT

SEQ ID NO: 75893 - protein, 123 aa, Homo sapiens
  MOD_RES (1)..(1): Any amino acid
XPLPLSYRLLDGEAALPAVVFLHGLFGSKTNFNSIAKILAQQTGRRVLTVDARNHGDSPHSPDMSYEIMSQDLQDLLPQLGLVPCVVVGHSMGGKTAMLLALQRISAQWKAQVSPTLQPMWQP

SEQ ID NO: 75894 - protein, 81 aa, Homo sapiens
  MOD_RES (1)..(1): Any amino acid
XILNYLRDGSVPLPESTRELGELLGEARYYLVQGLIEDCQLALQSRAYSGFSSCSRNVFLQLVHQTRVQSRSSRCIWLSAS

SEQ ID NO: 75895 - protein, 94 aa, Homo sapiens
MAVGLCKAMSQGLVTFRDVALDFSQEEWEWLKPSQKDLYRDVMLENYRNLVWLGDGCSCCSTLRTTVTAEASSSSSSIQASFHSLALPLMSILA

SEQ ID NO: 75896 - protein, 84 aa, Homo sapiens
GEYTHHKDPGIYKCVVCGTPLFKSETKFDSGSGWPSFHDVINSEAITFTDDFSYGMHRVETSCSQQEGPHQMLPLNLGFPGLQN

SEQ ID NO: 75897 - protein, 152 aa, Homo sapiens
MSETKLTGDAFELYCDVVGSPTPEIQWWYAEVNRAESFRQLWDGARKRRVTVNTAYGSNGVSVLRITRLTLEDSGTYECRASNDPKRNDLRQNPSITWIRAQATISVLQKPRIVTSEEVIIRDSPVLPVTLQCNLTSSSHTLTYSYWTKNGV

SEQ ID NO: 75898 - protein, 117 aa, Homo sapiens
TLGANAKGGHLEGLQMTDLENNSETGELQPVLPEGASAAPEEETCSPSFLPGMSSDSDIECDTENEEQEEHTSVGGFHDSFMVMTQPPDEDTHSSFPDGEQIGPEDLSFNTDENSGR

SEQ ID NO: 75899 - protein, 132 aa, Homo sapiens
MPDQDKKVKTTEKSTDKQQEITIRDYSDLKRLRCLLNVQSSKQQLPAINFDSAQNSMTKSEPAIRAGGHRARGQWHESTEAVELENFSINYKNERNFSKHPQRKLFQEIFTALVKNRLISREWVNRAPSIHF

SEQ ID NO: 75900 - protein, 458 aa, Homo sapiens
MILNSLSLCYHNKLILAPMVRVGTLPMRLLALDYGADIVYCEELIDLKMIQCKRVVNEVLSTVDFVAPDDRVVFRTCEREQNRVVFQMGGMGAALLSDPDKIEKILSTLVKGTRRPVTCKIRILPSLEDTLSLVKRIERTGIAAIAVHGRKREERPQHPVSCEVIKAIADTLSIPVIANGGSHDHIQQYSDIEDFRQATAASSVMVARAAMWNPSIFLKEGLRPLEEVMQKYIRYAVQYDNHYTNTKYCLCQMLREQLESPQGRLLHAAQSSREICEAFGLGAFYEETTQELDAQQARLSAKTSEQTGEPAEDTSGVIKMAVKFDRRAYPAQITPKMCLLEWCRREKLAQPVYETVQRPLDRLFSSIVTVAEQKYQSTLWDKSKKLAEQAAAIVCLRSQGLPEGRLGEESPSLHKRKREAPDQDPGGPRAQELAQPGDLCKKPFVALGSGEESPLEGW

SEQ ID NO: 75901 - protein, 66 aa, Homo sapiens
MAGGRPHLKRSFSIIPCFVFVEGFFCYDSTYAKPYPGPEAASRVPPALVYALVTAGPTLTILLGEL

SEQ ID NO: 75902 - protein, 685 aa, Homo sapiens
MIDSVKLRRDSAADFFSHYEYLCALQNSVPLPAVRACLREGVLDFNADRLRGVDWAPLLSTLKINKDLPLVSIKSFFQPWLGDTGSDMNKFCRSRVPAIRYKDVTFQLCKALKGCLSISSVLKNLELNGLILRERDLTILAKGLNKSASLVHLSLANCPIGDGGLEIICQGIKSSITLKTVNFTGCNLTWQGADHMAKILKYQTMRRHEETWAESLRYRRPDLDCMAGLRRITLNCNTLIGDLGACAFADSLSEDLWLRALDLQQCGLTNEGAKALLEALETNTTLVVLDIRKNPLIDHSMMKAVIKKVLQNGRSAKSEYQWITSPSVKEPSKTAKQKRRTIILGSGHKGKATIRIVIWRHRGLATKKPVSSGRKHSLGKEYYAPAPLPPGVSGFLPWRTAERAKRHRGFPLIKTRDICNQLQQPGFPVTVTVESPSSSEVEEVDDSSESVHEVPEKTSIEQEALQLEHENAQLRNINFSLSEALHAQSLTNMILDDEGVLGSIENSFQKFHAFLDLLKDAGLGQLATMAGIDQSDFQLLGHPQMTSTVSNPPKEEKKALEDEKPEPKQNALGQMQNIQFQKITGDARIPLPLDSFPVPVSTPEGLGTSSNNLGVPATEQRQESFEGFIARMCSPSPDATSGTGSQRKEEELSRNSRSSSEKKTKTGEYTKKHSDKQHPGKDLHS

SEQ ID NO: 75903 - protein, 443 aa, Homo sapiens
MEAPEEPAPVRGGPEATLEVRGSRCLRLSAFREELRALLVLAGPAFLVQLMVFLISFISSVFCGHLGKLELDAVTLAIATYGSQNLKHVGVILQRSALVLLLCCFPCWALFLNTQHILLLFRQDPDVSRLTQTYVTIFIPALPATFLYMLQVKYLLNQGIVLPQIVTGVAANLVNALANYLFLHQLHLGVIGSALANLISQYTLALLLFLYILGKKLHQATWGGWSLECLQDWASFLRLAIPSMLMLCMEWWAYEVGSFLSGILGMVELGAQSIVYELAIIVYMVPAGFSVAASVRVGNALGAGDMEQARKSSTVSLLITVLFAVAFSVLLLSCKDHVGYIFTTDRDIINLVAQVVPIYAVSHLFEALACTSGGVLRGSGNQKVGAIVNTIGYYVVGLPIGIALMFATTLGVMGSGTRQFESKQRASEWEFCSPSGSASPRVP

SEQ ID NO: 75904 - protein, 59 aa, Homo sapiens
MTSAAVQEHPRRNRMILVLVTFPLMRRKSSTVLMKMMSALSQVKESLTHWKINRMKIME

SEQ ID NO: 75905 - protein, 2122 aa, Homo sapiens
MDSYSTYLATVKVSGSWLEEQDEDIYEVESRVPLPHPFPLCEHLDENNSVIVNTSIFHFIHKRNGHILKLISKISLPTPPYSLEHAKVTQTELMRESFRQKQEATESLKCQEELRERLHEESRAREQLAVELSKAEGVIDGYADEKTLFERQIQEKTDIIDRLEQELLCASNRLQELEAEQQQIQEERELLSRQKEAMKAEAGPVEQQLLQETEKLMKEKLEVQCQAEKVRDDLQKQVKALEIDVEEQVSRFIELEQEKNTELMDLRQQNQALEKQLEKMRKFLDEQAIDREHERDVFQQEIQKLEQQLKVVPRFQPISEHQTREVEQLANHLKEKTDKCSELLLSKEQLQRDIQERNEEIEKLEFRVRELEQALLVSADTFQKVEDRKHFGAVEAKPELSLEVQLQAERDAIDRKEKEITNLEEQLEQFREELENKNEEVQQLHMQLEIQKKESTTRLQELEQENKLFKDDMEKLGLAIKESDAMSTQDQHVLFGKFAQIIQEKEVEIDQLNEQVTKLQQQLKITTDNKVIEEKNELIRDLETQIECLMSDQECVKRNREEEIEQLNEVIEKLQQELANIGQKTSMNAHSLSEEADSLKHQLDVVIAEKLALEQQVETANEEMTFMKNVLKETNFKMNQLTQELFSLKRERESVEKIQSIPENSVNVAIDHLSKDKPELEVVLTEDALKSLENQTYFKSFEENGKGSIINLETRLLQLESTVSAKDLELTQCYKQIKDMQEQGQFETEMLQKKIVNLQKIVEEKVAAALVSQIQLEAVQEYAKFCQDNQTISSEPERTNIQNLNQLREDELGSDISALTLRISELESQVVEMHTSLILEKEQVEIAEKNVLEKEKKLLELQKLLEGNEKKQREKEKKRSPQDVEVLKTTTELFHSNEESGFFNELEALRAESVATKAELASYKEKAEKLQEELLVKETNMTSLQKDLSQVRDHLAEAKEKLSILEKEDETEVQESKKACMFEPLPIKLSKSIASQTDGTLKISSSNQTPQILVKNAGIQINLQSECSSEEVTEIISQFTEKIEKMQELHAAEILDMESRHISETETLKREHYVAVQLLKEECGTLKAVIQCLRSKEGSSIPELAHSDAYQTREICSSDSGSDWGQGIYLTHSQGFDIASEGRGEESESATDSFPKKIKGLLRAVHNEGMQVLSLTESPYSDGEDHSIQQVSEPWLEERKAYINTISSLKDLITKMQLQREAEVYDSSQSHESFSDWRGELLLALQQVFLEERSVLLAAFRTELTALGTTDAVGLLNCLEQRIQEQGVEYQAAMECLQKADRRSLLSEIQALHAQMNGRKITLKREQESEKPSQELLEYNIQQKQSQMLEMQVELSSMKDRATELQEQLSSEKMVVAELKSELAQTKLELETTLKAQHKHLKELEAFRLEVKDKTDEVHLLNDTLASEQKKSRELQWALEKEKAKLGRSEERDKEELEDLKFSLESQKQRNLQLNLLLEQQKQLLNESQQKIESQRMLYDAQLSEEQGRNLELQVLLESEKVRIREMSSTLDRERELHAQLQSSDGTGQSRPPLPSEDLLKELQKQLEEKHSRIVELLNETEKYKLDSLQTRQQMEKDRQVHRKTLQTEQEANTEGQKKMHELQSKVEDLQRQLEEKRQQVYKLDLEGQRLQGIMQEFQKQELEREEKRESRRILYQNLNEPTTWSLTSDRTRNWVLQQKIEGETKESNYAKLIEMNGGGTGCNHELEMIRQKLQCVASKLQVLPQKASERLQFETADDEDFIWVQENIDEIILQLQKLTGQQGEEPSLVSPSTSCGSLTERLLRQNAELTGHISQLTEEKNDLRNMVMKLEEQIRWYRQTGAGRDNSSRFSLNGGANIEAIIASEKEVWNREKLTLQKSLKRAEAEVYKLKAELRNDSLLQTLSPDSEHVTLKRIYGKYLRAESFRKALIYQKKYLLLLLGGFQECEDATLALLARMGGQPAFTDLEVITNRPKGFTRFRSAVRVSIAISRMKFLVRRWHRVTGSVSININRDGFGLNQGAEKTDSFYHSSGGLELYGEPRHTTYRSRSDLDYIRSPLPFQNRYPGTPADFNPGSLACSQLQNYDPDRALTDYITRLEALQRRLGTIQSGSTTQFHAGMRR

SEQ ID NO: 75906 - protein, 69 aa, Homo sapiens
MVARLVRFYPRADRVMSVCLRVELYGCLWRDGLLSYTAPVGQTMYLSEAVYLNDSTYDGHTVGGLQYGG

SEQ ID NO: 75907 - protein, 116 aa, Homo sapiens
MDLLQFLAFLFVLLLSGMGATGTLRTSLDPSLEIYKKMFEVKRREQLLALKNLAQLNDIHQQYKILDVMLKGLFKFIPSTDPFQKALREEEKRRKKEEKRKEIRKGPRISRSQSEL

SEQ ID NO: 75908 - protein, 121 aa, Homo sapiens
MAAGTAARKAAPVLEAPPQQEQLSHTKLSAEDTWNLQQERMYKMHRGHDSMHVEMILIFLCVLVIAQIVLVQWRQRHGRSYNIGLQMVSFDLQTQLCIWCCGLLGDHVYNVWIQSVFQNQS

SEQ ID NO: 75909 - protein, 710 aa, Homo sapiens
  MOD_RES (1)..(1): Any amino acid
XTTFGAFLHKGAFCRNYFNLLDMLVVGVSLVSFGIQSSAISVVKILRVLRVLRPLRAINRAKGLKHVVQCVFVAIRTIGNIMIVTTLLQFMFACIGVQLFKGKFYRCTDEAKSNPEECRGLFILYKDGDVDSPVVRERIWQNSDFNFDNVLSAMMALFTVSTFEGWPALLYKAIDSNGENIGPIYNHRVEISIFFIIYIIIVAFFMMNIFVGFVIVTFQEQGEKEYKNCELDKNQRQCVEYALKARPLRRYIPKNPYQYKFWYVVNSSPFEYMMFVLIMLNTLCLAMQHYEQSKMFNDAMDILNMVFTGVFTVEMVLKVIAFKPKHYFTDAWNTFDALIVVGSVVDIAITEVNPTESENVPVPTATPGNSEESNRISITFFRLFRVMRLVKLLSRGEGIRTLLWTFIKSFQALPYVALLIAMLFFIYAVIGMQMFGKVAMRDNNQINRNNNFQTFPQAVLLLFRCATGEAWQEIMLACLPGKLCDPESDYNPGEEYTCGSNFAIVYFISFYMLCAFLIINLFVAVIMDNFDYLTRDWSILGPHHLDEFKRIWSEYDPEAKGRIKHLDVVTLLRRIQPPLGFGKLCPHRVACKRLVAMNMPLNSDGTVMFNATLFALVRTALKIKTEGNLEQANEELRAVIKKIWKKTSMKLLDQVVPPAGDDEVTVGKFYATFLIQDYFRKFKKRKEQGLVGKYPAKNTTIALQMLERML

SEQ ID NO: 75910 - protein, 455 aa, Homo sapiens
MSLTVVSMACVGFFLLQGAWPLMGGQDKPFLSARPSTVVPRGGHVALQCHYRRGFNNFMLYKEDRSHVPIFHGRIFQESFIMGPVTPAHAGTYRCRGSRPHSLTGWSTPSNPLVIMVTGNHRKPSLLAHPGPLLKSGETVILQCWSDVMFEHFFLHREGISEDPSRLVGQIHDGVSKANFSIGPLMPVLAGTYRCYGSVPHSPYQLSAPSDPLDIVITGLYEKPSLSAQPGPTVQAGENVTLSCSSWSSYDIYHLSREGEAHERRLRAVPKVNRTFQADFPLGPATHGGTYRCFGSFRDLPCVWSNSSDPLLVSVTGNPSSSWPSPTEPSSKSGICRHLHVLIGTSVVIFLFILLLFFLLYRWCSNKKNAAVMDQEPAGDRTVNRQDSDEQDPQEVMYAQLDHCVFIQRKISRPSQRPKTPLTDTSVYTELPNAEPRSKVVSCPRAPQSGLEGVF

SEQ ID NO: 75911 - protein, 158 aa, Homo sapiens
  MOD_RES (1)..(1): Any amino acid
XVRGSEGLYMVNGPPHFTESTVFPRESGKNCKVCIFSKDGTLFAWGNGEKVNIISVTNKGLLHSFDLLKAVCLEFSPKNTVLATWQPYTTSKDGTAGIPNLQLYDVKTGTCLKSFIQKKMQNWCPSWSEDETLCARNVNNEVHFFENNNFSGCLCSRK

SEQ ID NO: 75912 - protein, 203 aa, Homo sapiens
MKAEDYDVVKVIGRGAFGEVQLVRHKASQKVYAMKLLSKFEMIKRSDSAFFWEERDIMAFANSPWVVQTGMVHCDTAVGTPDYISPEVLKSQGGDGFYGRECDWWSVGVFLYEMLVGDTPFYADSLVGTYSKIMDHKNSLCFPEDAEISKHAKNLICAFLTDREVRLGRNGVEEIRQHPFFKNDQWHWDNIRETAAPVVPELS

SEQ ID NO: 75913 - protein, 180 aa, Homo sapiens
  MOD_RES (1)..(1): Any amino acid
XRQRLERPQQPRGLRDAGLPQRKEGQRGLLQARVRLKGGAHPGEGRVEVLKASTWGTVCDRKWDLHAASVVCRELGFGSAREALSGARMGQGMGAIHLSEVRCSGQELSLWKCPHKNITAEDCSHSQDAGVRCNLPYTGAETRIRLSGGRSQHEGRVEVQIGGPGPLRWGLICGDDWGTL

SEQ ID NO: 75914 - protein, 61 aa, Homo sapiens
MLGYDISWAAFNIIEVMSASKFTFKRIGYLAASQSFHEGTDVIMLTTNQIRKNINPENGSW

SEQ ID NO: 75915 - protein, 109 aa, Homo sapiens
MRTGGYLEGSILIPDAILGLEEVRLTPSMRNRSGAVWSRASVPFSAWEVEVQMRVTGLGRRGAQGMAVWYTRGRGHVGSVLGGLASWDGIGIFFDSPAEDTQDSPAIRV

SEQ ID NO: 75916 - protein, 1699 aa, Homo sapiens
MAGASVKVAVRVRPFNSREMSRDSKCIIQMSGSTTTIVNPKQPKETPKSFSFDYSYWSHTSPEDINYASQKQVYRDIGEEMLQHAFEGYNVCIFAYGQTGAGKSYTMMGKQEKDQQGIIPQLCEDLFSRINDTTNDNMSYSVEVSYMEIYCERVRDLLNPKNKGNLRVREHPLLGPYVEDLSKLAVTSYNDIQDLMDSGNKARTVAATNMNETSSRSHAVFNIIFTQKRHDAETNITTEKVSKISLVDLAGSERADSTGAKGTRLKEGANINKSLTTLGKVISALAEMDSGPNKNKKKKKTDFIPYRDSVLTWLLRENLGGNSRTAMVAALSPADINYDETLSTLRYADRAKQIRCNAVINEDPNNKLIRELKDEVTRLRDLLYAQGLGDITDMTNALVGMSPSSSLSALSSRAASVSSLHERILFAPGSEEAIERLKETEKIIAELNETWEEKLRRTEAIRMEREALLAEMGVAMREDGGTLGVFSPKKTPHLVNLNEDPLMSECLLYYIKDGITRVGREDGERRQDIVLSGHFIKEEHCVFRSDSRGGSEAVVTLEPCEGADTYVNGKKVTEPSILRSGNRIIMGKSHVFRFNHPEQARQERERTPCAETPAEPVDWAFAQRELLEKQGIDMKQEMEQRLQELEDQYRREREEATYLLEQQRLDYESKLEALQKQMDSRYYPEVNEEEEEPEDEVQWTERECELALWAFRKWKWYQFTSLRDLLWGNAIFLKEANAISVELKKKVQFQFVLLTDTLYSPLPPDLLPPEAAKDRETRPFPRTIVAVEVQDQKNGATHYWTLEKLRQRLDLMREMYDRAAEVPSSVIEDCDNVVTGGDPFYDRFPWFRLVGRAFVYLSNLLYPVPLVHRVAIVSEKGEVKGFLRVAVQAISADEEAPDYGSGVRQSGTAKISFDDQHFEKFQSESCPVVGMSRSGTSQEELRIVEGQGQGADVGPSADEVNNNTCSAVPPEGLLLDSSEKAALDGPLDAALDHLRLGNTFTFRVTVLQASSISAEYADIFCQFNFIHRHDEAFSTEPLKNTGRGPPLGFYHVQNIAVEVTKSFIEYIKSQPIVFEVFGHYQQHPFPPLCKDVLSPLRPSRRHFPRVMPLSKPVPATKLSTLTRPCPGPCHCKYDLLVYFEICELEANGDYIPAVVDHRGGMPCMGTFLLHQGIQRRITVTLLHETGSHIRWKEVRELVVGRIRNTPETDESLIDPNILSLNILSSGYIHPAQDDRQFLDSDIPRTFYQFEAAWDSSMHNSLLLNRVTPYREKIYMTLSAYIEMENCTQPAVVTKDFCMVFYSRDAKLPASRSIRNLFGSGSLRASESNRVTGVYELSLCHVADAGSPGMQRRRRRVLDTSVAYVRGEENLAGWRPRSDSLILDHQWELEKLSLLQEVEKTRHYLLLREKLETAQRPVPEALSPAFSEDSESHGSSSASSPLSAEGRPSPLEAPNERQRELAVKCLRLLTHTFNREYTHSHVCVSASESKLSEMSVTLLRDPSMSPLGVATLTPSSTCPSLVEGRYGATDLRTPQPCSRPASPEPELLPEADSKKLPSPARATETDKEPQRLLVPDIQEIRVSPIVSKKGYLHFLEPHTSGWARRFVVVRRPYAYMYNSDKDTVERFVLNLATAQVEYSEDQQAMLKTPNTFAVCTEHRGILLQAASDKDMHDWLYAFNPLLAGTIRSKLSRRRSAQMRV

SEQ ID NO: 75917 - protein, 190 aa, Homo sapiens
MQLRKGKDPKIEEFVPPDENCPLKEASSRRIPRLTVKAREHCLRLLEEALSSNRQSTRTADEADLRAKAVELEHETFRNAKVANLYKASVLKKVADIHRASKDGQPYDMGGSAKSCSAQAEPPEPNEYDIPPASHVYSLKPKRVGAGFPKGSCPFQTATELMETTRIREQAPQPERGGEHEPPSRPCGLL

SEQ ID NO: 75918 - protein, 632 aa, Homo sapiens
MVSNPVHGLPFLPGTSFKDSTKTAFHRSQTLSYRNGYAIVRRPTVGIGGDRLQFNQLSQAELDELASKAPVLTYGQPKQAPPADFIPAHVAFDKKVLKFDAYFQEDVPMSTEEQYRIRQVNIYYYLEDDSMSVIEPVVENSGILQGKLIKRQRLAKNDRGDHYHWKDLNRGINITIYGKTFRVVDCDQFTQVFLESQGIELNPPEKMALDPYTELRKQPLRKYVTPSDFDQLKQFLTFDKQVLRFYAIWDDTDSMYGECRTYIIHYYLMDDTVEIREVHERNDGRDPFPLLMNRQRVPKVLVENAKNFPQCVLEISDQEVLEWYTAKDFIVGKSLTILGRTFFIYDCDPFTRRYYKEKFGITDLPRIDVSKREPPPVKQELPPYNGFGLVEDSAQNCFALIPKAPKKDVIKMLVNDNKVLRYLAVLESPIPEDKDRRFVFSYFLATDMISIFEPPVRNSGIIGGKYLGRTKVVKPYSTVDNPVYYGPSDFFIGAVIEVFGHRFIILDTDEYVLKYMESNAAQYSPEALASIQNHVRKREAPAPEAESKQTEKDPGVQELEALIDTIQKQLKDHSCKDNIREAFQIYDKEASGYVDRDMFFKICESLNVPVDDSLVKEVSMNYSSEFIAEARH

SEQ ID NO: 75919 - protein, 44 aa, Homo sapiens
MKNATIVMSVRREQGSSSGEGSLSFEDVAVGFTREEWQFLDQSQ

SEQ ID NO: 75920 - protein, 204 aa, Homo sapiens
MATASPSVFLLMVNGQVESAQFPEYDDLYCKYCFVYGQDWAPTAGLEEGISQITSKSQDVRQALVWNFPIDVTFKSTNPYGCCAAGLLEVQSASGLVATPVKGPQIVLSVYGPDVFGNDVVRGYGAVHVPFSPGRHKRTIPMFVPESTSKLQKFTSWFMGRRPEYTDPKVVAQGEGREGKAPSPLLPPSPIQVTAWEWVGPGLG

SEQ ID NO: 75921 - protein, 58 aa, Homo sapiens
MKLQNQRGGRIFLQDIKKPDCDDWESGLNAMECALHLEKNVNQSLLELHKLATDKNDP

SEQ ID NO: 75922 - protein, 124 aa, Homo sapiens
GDVMSGLIVGILLVPQSIAYSLLAGQEPVYGLYTSFFASIIYFLLGTSRHISVGIFGVLCLMIGETVDRELQKAGYDNAHSAPSLGMVSNGSTLLNHTSDRICDKSCYAIMVGSTVTFIAGVYQ

SEQ ID NO: 75923 - protein, 48 aa, Homo sapiens
  MOD_RES (1)..(1): Any amino acid
XEVDGLGVARPHYGSVLDNERLTAEEMDERRRQNVAYEYLCHLEEAKR

SEQ ID NO: 75924 - protein, 83 aa, Homo sapiens
MLSKSVPVSGINCLLDRSDTDGNVSQSSAIDLRKRCSQLEGHSGTRVGSSLRQTFSFLSGMTGKAKTREKEKMKEAKDARYTN

SEQ ID NO: 75925 - protein, 11 aa, Homo sapiens
PAKAASLSYRR

SEQ ID NO: 75926 - protein, 74 aa, Homo sapiens
  MOD_RES (1)..(1): Any amino acid
XAKQARVSQELKKAAKRTVSISEGPDTLGDGMRERRETLALAPEPEPLEKEACEKWKRPFSLSLQVPGVQALGQ

SEQ ID NO: 75927 - protein, 93 aa, Homo sapiens
MEGSPSLRRMTVMREKGRRQAVRGPAFMFNDRGTSLTAEEERFLDAAEYGNIPVVRKMLEESKTLNVNCVDYMGQNALQLAVGNEHLEVTELL

SEQ ID NO: 75928 - protein, 245 aa, Homo sapiens
  MOD_RES (1)..(1): Any amino acid
XAKLSRAEQRMNRLDQCYCERTCTMKGTTYREFESWIDGCKNCTCLNGTIQCETLICPNPDCPLKSALAYVDGKCSICQFQGRTYFEGERNTVYSSSGVCVLYECKDQTMKLVESSGCPALDCPESHQITLSHSCCKVCKGYDFCSERHNCMENSICRNLNDRAVCSCRDGFRALREDNAYCEDIDECAEGRHYCRENTMCVNTPGSFMCICKTGYIRIDDYSCTEHDECITNQHNCDENALCFN

SEQ ID NO: 75929 - protein, 42 aa, Homo sapiens
MDATALERDAVQFARLAVQRDHEGRYSEAVFYYKFSQRVLIL

SEQ ID NO: 75930 - protein, 136 aa, Homo sapiens
MAPEMDQFYRSTMAIYKSIMEQFNPALENLVYLGNNYLRAFHALSEAAEVYFSAIQKIGERALQSPTSQILGEILVQMSDTQRHLNSDLEVVVQTFHGGLLQHMEKNTKLDMQFIKVSLASPLGPQLTAGRTPSPI

SEQ ID NO: 75931 - protein, 57 aa, Homo sapiens
  MOD_RES (1)..(1): Any amino acid
XFTGRASQQVQRFLEEEVYPLLKPYESVMKVVTRFKMKKVQNEYEVKVSLPPSSPNM

SEQ ID NO: 75932 - protein, 81 aa, Homo sapiens
MEFPGGNDNYLTITGPSHPFLSGAETFHTPSLGDEEFEIPPISLDSDPSLAVSDVVGHFDDLADPSSSQDGSFSAQTWTTL

SEQ ID NO: 75933 - protein, 70 aa, Homo sapiens
MTVGKSSKMLQHIDYRMRCILQDGRIFIGTFKAFDKHMNLILCDCDEFRKIKCVRGESLSFWPHCLFVKL

SEQ ID NO: 75934 - protein, 118 aa, Homo sapiens
MDFSRLHMYSPPQCVPENTGYTYALSSSYSSDALDFETEHKLDPVFDSPRMSRRSLRLATTACTLGDGEAVGADSGTSSAVSLKNRAARTTKQRRSTNKSAFSINHVSRQVTSSGVSH

SEQ ID NO: 75935 - protein, 128 aa, Homo sapiens
MAALAPVGSPASRGPRLAAGLRLLPMLGLLQLLAEPGLGRVHHLALKDDVRHKVHLNTFGFFKDGYMVVNVSSLSLNEPEDKDVTIGFSLDRTKNDGFSSYLDEDVNYCILKKQSVSVTLLILDISRR

SEQ ID NO: 75936 - protein, 138 aa, Homo sapiens
MPGCPCPGCGMAGPRLLFLTALALELLERAGGSQPALRSRGTATACRLDNKESESWGALLSGERLDTWICSLLGSLMVGLSGVFPLLVIPLEMGTMLRSEAGAWRLKQLLSFALGGLLGNVFLHLLPEAWAYTCSASP

SEQ ID NO: 75937 - protein, 130 aa, Homo sapiens
MFEIKKICCIGAGYVGGPTCSVIAHMCPEIRVTVVDVNESRINAWNSPTLPIYEPGLKEVVESCRGKNLFFSTNIDDAIKEADLVFISVNTPTKTYGMGKGRAADLKYIEACARRIVQNSNGYKIVTEKS

SEQ ID NO: 75938 - protein, 404 aa, Homo sapiens
  MOD_RES (1)..(1): Any amino acid
XLLSASWQRRAKAMTAAAGSAGRAAVPLLLCALLAPGGAYVLDDSDGLGREFDGIGAVSGGGATSRLLVNYPEPYRSQILDYLFKPNFGASLHILKVEIGGDGQTTDGTEPSHMHYALDENYFRGYEWWLMKEAKKRNPNITLIGLPWSFPGWLGKGFDWPYVNLQLTAYYVVTWIVGAKRYHDLDIDYIGIWNERSYNANYIKILRKMLNYQGLQRVKIIASDNLWESISASMLLDAELFKVVDVIGAHYPGTHSAKDAKLTGKKLWSSEDFSTLNSDMGAGCWGRILNQNYINGYMTSTIAWNLVASYYEQLPYGRCGLMTAQEPWSGHYVVESPVWVSAHTTQFTQPGWYYLKTVGHLEKGGSYVALTDGLGNLTIIIETMVNFCCCYWINSLLYYWKNKI

SEQ ID NO: 75939 - protein, 67 aa, Homo sapiens
  MOD_RES (1)..(1): Any amino acid
XLLQAGAELSVERVLEIIKQGVVALPKDRLKPLADRQVDRVLACQAFVYAASGFSQFHGLSVRNFQN

SEQ ID NO: 75940 - protein, 240 aa, Homo sapiens
MLCWGNASFGQLGLGGIDEEIVLEPRKSDFFINKRVRDVGCGLRHTVFVLDDGTVYTCGCNDLGQLGHEKSRKKPEQVVALDAQNIVAVSCGEAHTLALNDKGQVYAWGLDSDGQLGLVGSEECIRVPSCFPKIMCVDSLVRICSGLSYGRIRNIKSLSDIQIVQVACGYYHSLALSKASEVFCWGQNKYGQLGLGTDCKKQTSPQLLKSLLGIPFMQVAAGGAHSFVLTLSGAIFGWGR

SEQ ID NO: 75941 - protein, 19 aa, Homo sapiens
MTFYLFGIRSFPKLWKSPY

SEQ ID NO: 75942 - protein, 115 aa, Homo sapiens
MASKKREVQLQAEADNIVTLQPFRDKCEPVFLFSVNGKIIEKIQGANAPLVNKKVINLIDEERKIAAGEMARPQYPEIPLVDSDSEVSEESPCESVQELYSIAIIKPDAVISKKV

SEQ ID NO: 75943 - protein, 91 aa, Homo sapiens
MANKGPSYGMSREVQSKIEKKYDEELEERLVEWIIVQCGPDVGRPDRGRLGFQVWLKNGVILSKLVNSLYPDGSKPVKVPENPPSMVFKQM

SEQ ID NO: 75944 - protein, 142 aa, Homo sapiens
MWLKVGGLLRGTGGQLGQTVGWPCGALGPGPHRWGPCGGSWAQKFYQDGPGRGLGEEDIRRAREARPRKTPRPQLSDRSRERKVPASRISRLANFGGLAVGLGLGVLAEMAKKSMPGGRLQSGSCCVTQAGMQWYDHGSLQP

SEQ ID NO: 75945 - protein, 43 aa, Homo sapiens
MMLSLNNLQNIIYNPVIPFVGTIPDQLDPGTLIVIRGHVPSDA

SEQ ID NO: 75946 - protein, 350 aa, Homo sapiens
MPSPRPVLLRGARAALLLLLPPRLLARPSLLLRRSLSAASCPPISLPAAASRSSMDGAGAEEVLAPLRLAVRQQGDLVRKLKEDKAPQVDVDKAVAELKARKRVLEAKELALQPKDDIVDRAKMEDTLKRRFFYDQAFAIYGGVSGLYDFGPVGCALKNNIIQTWRQHFIQEEQILEIDCTMLTPEPVLKTSGHVDKFADFMVKDVKNGECFRADHLLKAHLQKLMSDKKCSVEKKSEMESVLAQLDNYGQQELADLFVNYNVKSPITGNDLSPPVSFNLMFKTFIGPGGNMPGYLRPETAQGIFLNFKRLLEFNQGKLPFAAAQIGNSFRNEISPRSGLIRVSKYAFPN

SEQ ID NO: 75947 - protein, 233 aa, Homo sapiens
MTEQMTLRGTLKGHNGWVTQIATTPQFPDMILSASRDKTIIMWKLTRDETNYGIPQRALRGHSHFVSDVVISSDGQFALSGSWDGTLRLWDLTTGTTTRRFVGHTKDVLSVAFSSDNRQIVSGSRDKTIKLWNTLGVCKYTVQDESHSEWVSCVRFSPNSSNPIIVSCGWDKLVKVWNLANCKLKTNHIGHTGYLNTVTVSPDGSLCASGGKTLFAGYTDNLVRVWQVTIGTR

SEQ ID NO: 75948 - protein, 110 aa, Homo sapiens
MEKGEKVLPPCYRQEPAPKDREAKVERPSTLRQEQRPLPNVSTERERPQPVQAFSSALHEAAPSQLEGKLPSPDVRQDDGEDTLFSEPKFAQVSSSNVVLKTGFDFLDNW

SEQ ID NO: 75949 - protein, 198 aa, Homo sapiens
METGRQRDASAEMFPMPRGLKYSNKDGIPEDLDGNLEEPRDQESELRSQDVMDLTEGDNEASASTPPSAKRQKTDTKGKKERKPTMDAEEAQRMTTLFSAMSEEQLSRYEVCRRSAFPKARIAALMQSITGRSVSENTAIAMAGIAKVFVGEVVEEALDVCEMWGETPPLQPKHLREAVRRLKPKGILPNSNYKKIMF

SEQ ID NO: 75950 - protein, 120 aa, Homo sapiens
MPLCPLAHAMQPQSVLHSGYFHPLLRAWQTATTTLNASNLIYPIFVTDVPDDIQPITSLPGVARYGVKRLEEMLRPLVEEGLRCVLIFGVPSRVPKDERGSAADSEESPAIEAIHLLRKT

SEQ ID NO: 75951 - protein, 475 aa, Homo sapiens
MSKLPRELTRDLERSLPAVASLGSSLSHSQSLSSHLLPPPEKRRAISDVRRTFCLFVTFDLLFISLLWIIELNVLAFFRFSGLLLGYAVLRLRHWWVIAVTTLVSSAFLIVKVILSELLSKGAFGYLLPIVSFVLAWLETWFLDFKVLPQEAEEERWYLAAQVAVARGPLLFSGALSEGQFYSPPESFAGSDNESDEEVAGKKSFSAQEREYIRQGKEATAVVDQILAQEENWKFEKNNEYGDTVYTIEVPFHGKTFILKTFLPCPAELVYQEVILQPERMVLWNKTVTACQILQRVEDNTLISYDVSAGAAGGVVSPRDFVNVRRIERRRDRYLSSGIATSHSAKPPTHKYVRGENGPGGFIVLKSASNPRVCTFVWILNTDLKVGCWGAARAACPGTSSTRASRPPCLNLPFTCDSASASWGPGRDCAPSHPAGQGPVATTSRARKGASWARTAHMGPGPRLSPSTEPRSAWS

SEQ ID NO: 75952 - protein, 49 aa, Homo sapiens
THKPEEDTFGVPWLSSVVRRTQPAHCTTSTTASPRPRHWMPGPTLWSLA

SEQ ID NO: 75953 - protein, 970 aa, Homo sapiens
MQQDQCCSARFKLKMLHRKTYHVKDLQGEIEAHTDVYHNLDENSQKILRSLEGSDDAVLLQRRLDNMNFKWSELRKKSLNIRSHLEASSDQWKRLHLSLQELLVWLQLKDDELSRQAPIGGDFPAVQKQNDVHRAFKRELKTKEPVIMSTLETVRIFLTEQPLEGLEKLYQEPRELPPEERAQNVTRLLRKQAEEVNTEWEKLNLHSADWQRKIDETLERLRELQEATDELDLKLRQAEVIKGSWQPVGDLLIDSLQDHLEKVKALRGEIAPLKENVSHVNDLARQLTTLGIQLSPYNLSTLEDLNTRWKLLQVAVEDRVRQLHEAHRDFGPASQHFLSTSVQGPWERAISPNKVPYYINHETQTTCWDHPKMTELYQSLADLNNVRFSAYRTAMKLRRLQKALCLDLLSLSAACDALDQHNLKQNDQPMDILQIINCLTTIYDRLEQEHNNLVNVPLCVDMCLNWLLNVYDTGRTGRIRVLSFKTGIISLCKAHLEDKYRYLFKQVASSTGFCDQRRLGLLLHDSIQIPRQLGEVASFGGSNIEPSVRSCFQFANNKPEIEAALFLDWMRLEPQSMVWLPVLHRVAAAETAKHQAKCNICKECPIIGFRYRSLKHFNYDICQSCFFSGRVAKGHKMHYPMVEYCTPTTSGEDVRDFAKVLKNKFRTKRYFAKHPRMGYLPVQTVLEGDNMETPVTLINFWPVDSAPASSPQLSHDDTHSRIEHYASRLAEMENSNGSYLNDSISPNESIDDEHLLIQHYCQSLNQDSPLSQPRSPAQILISLESEERGELERILADLEEENRNLQAEYDRLKQQHEHKGLSPLPSPPEMMPTSPQSPRDAELIAEAKLLRQHKGRLEARMQILEDHNKQLESQLHRLRQLLEQPQAEAKVNGTTVSSPSTSLQRSDSSQPMLLRVVGSQTSDSMGEEDLLSPPQDTSTGLEEVMEQLNNSFPSSRGRNTPGKPMREDTM

SEQ ID NO: 75954 - protein, 3879 aa, Homo sapiens
MTTMLQKSDSNASFLRAARAGNLDKVVEYLKGGIDINTCNQNGLNALHLAAKEGHVGLVQELLGRGSSVDSATKKGNTALHIASLAGQAEVVKVLVKEGANINAQSQNGFTPLYMAAQENHIDVVKYLLENGANQSTATEDGFTPLAVALQQGHNQAVAILLENDTKGKVRLPALHIAARKDDTKSAALLLQNDHNADVQSKMMVNRTTESGFTPLHIAAHYGNVNVATLLLNRGAAVDFTARNGITPLHVASKRGNTNMVKLLLDRGGQIDAKTRDGLTPLHCAARSGHDQVVELLLERGAPLLARTKNGLSPLHMAAQGDHVECVKHLLQHKAPVDDVTLDYLTALHVAAHCGHYRVTKLLLDKRANPNARALNGFTPLHIACKKNRIKVMELLVKYGASIQAITESGLTPIHVAAFMGHLNIVLLLLQNGASPDVTNIRGETALHMAARAGQVEVVRCLLRNGALVDARAREEQTPLHIASRLGKTEIVQLLLQHMAHPDAATTNGYTPLHISAREGQVDVASVLLEAGAAHSLATKKGFTPLHVAAKYGSLDVAKLLLQRRAAADSAGKNGLTPLHVAAHYDNQKVALLLLEKGASPHATAKNGYTPLHIAAKKNQMQIASTLLNYGAETNIVTKQGVTPLHLASQEGHTDMVTLLLDKGANIHMSTKSGLTSLHLAAQEDKVNVADILTKHGADQDAHTKLGYTPLIVACHYGNVKMVNFLLKQGANVNAKTKNGYTPLHQAAQQGHTHIINVLLQHGAKPNATTANGNTALAIAKRLGYISVVDTLKVVTEEVTTTTTTITEKHKLNVPETMTEVLDVSDEEGDDTMTGDGGEYLRPEDLKELGDDSLPSSQFLDGMNYLRYSLEGGRSDSLRSFSSDRSHTLSHASYLRDSAVMDDSVVIPSHQVSTLAKEAERNSYRLSWGTENLDNVALSSSPIHSGFLVSFMVDARGGAMRGCRHNGLRIIIPPRKCTAPTRVTCRLVKRHRLATMPPMVEGEGLASRLIEVGPSGAQFLGPVIVEIPHFAALRGKERELVVLRSENGDSWKEHFCDYTEDELNEILNGMDEVLDSPEDLEKKRICRIITRDFPQYFAVVSRIKQDSNLIGPEGGVLSSTVVPQVQAVFPEGALTKRIRVGLQAQPMHSELVKKILGNKATFSPIVTLEPRRRKFHKPITMTIPVPKASSDVMLNGFGGDAPTLRLLCSITGGTTPAQWEDITGTTPLTFVNECVSFTTNVSARFWLIDCRQIQESVTFASQVYREIICVPYMAKFVVFAKSHDPIEARLRCFCMTDDKVDKTLEQQENFAEVARSRDVEVLEGKPIYVDCFGNLVPLTKSGQHHIFSFFAFKENRLPLFVKVRDTTQEPCGRLSFMKEPKSTRGLVHQAICNLNITLPIYTKESESDQEQEEEIDMTSEKNDETESTETSVLKSHLVNEVPVLASPDLLSEVSEMKQDLIKMTAILTTDVSDKAGSIKVKELVKAAEEEPGEPFEIVERVKEDLEKVNEILRSGTCTRDESSVQSSRSERGLVEEEWVIVSDEEIEEARQKAPLEITEYPCVEVRIDKEIKGKVEKDSTGLVNYLTDDLNTCVPLPKEQLQTVQDKAGKKCEALAVGRSSEKEGKDIPPDETQSTQKQHKPSLGIKKPVRRKLKEKQKQKEEGLQASAEKAELKKGSSEESLGEDPGLAPEPLPTVKATSPLIEETPIGSIKDKVKALQKRVEDEQKGRSKLPIRVKGKEDVPKKTTHRPHPAASPSLKSERHAPGSPSPKTERHSTLSSSAKTERHPPVSPSSKTEKHSPVSPSAKTERHSPASSSSKTEKHSPVSPSTKTERHSPVSSTKTERHPPVSPSGKTDKRPPVSPSGRTEKHPPVSPGRTEKRLPVSPSGRTDKHQPVSTAGKTEKHLPVSPSGKTEKQPPVSPTSKTERIEETMSVRELMKAFQSGQDPSKHKTGLFEHKSAKQKQPQEKGKVRVEKEKGPILTQREAQKTENQTIKRGQRLPVTGTAESKRGVRVSSIGVKKEDAAGGKEKVLSHKIPEPVQSVPEEESHRESEVPKEKMADEQGDMDLQISPDRKTSTDFSEVIKQELEDNDKYQQFRLSEETEKAQLHLDQVLTSPFNTTFPLDYMKDEFLPALSLQSGALDGSSESLKNEGVAGSPCGSLMEGTPQISSEESYKHEGLAETPETSPESLSFSPKKSEEQTGETKESTKTETTTEIRSEKEHPTTKDITGGSEERGATVTEDSETSTESFQKEATLGSPKDTSPKRQDDCTGSCSVALAKETPTGLTEEAACDEGQRTFGSSAHKTQTDSEVQESTATSDETKALPLPEASVKTDTGTESKPQGVIRSPQGLELALPSRDSEVLSAVADDSLAVSHKDSLEASPVLEDNSSHKTPDSLEPSPLKESPCRDSLESSPVEPKMKAGIFPSHFPLPAAVAKTELLTEVASVRSRLLRDPDGSAEDDSLEQTSLMESSGKSPLSPDTPSSEEVSYEVTPKTTDVSTPKPAVIHECAEEDDSENGEKKRFTPEEEMFKMVTKIKMFDELEQEAKQKRDYKKEPKQEESSSSSDPDADCSVDVDEPKHTGSGEDESGVPVLVTSESRKVSSSSESEPELAQLKKGADSGLLPEPVIRVQPPSPLPSSMDSNSSPEEVQFQPVVSKQYTFKMNEDTQEEPGKSEEEKDSESHLAEDRHAVSTEAEDRSYDKLNRDTDQPKICDGHGCEAMSPSSSAAPVSSGLQSPTGDDVDEQPVIYKESLALQGTHEKDTEGEELDVSRAESPQADCPSESFSSSSSLPHCLVSEGKELDEDISATSSIQKTEVTKTDETFENLPKDCPSQDSSITTQTDRFSMDVPVSDLAENDEIYDPQITSPYENVPSQSFFSSEESKTQTDANHTTSFHSSEVYSVTITSPVEDVVVASSSSGTVLSKESNFEGQDIKMESQQESTLWEMQSDSVSSSFEPTMSATTTVVGEQISKVIITKTDVDSDSWSEIREDDEAFEARVKEEEQKIFGLMVDRQSQGTTPDTTPARTPTEEGTPTSEQNPFLFQEGKLFEMTRSGAIDMTKRSYADESFHFFQIGQESREETLSEDVKEGATGADPLPLETSAESLALSESKETVDDEADLLPDDVSEEVEEIPASDAQLNSQMGISASTETPTKEAVSVGTKDLPTVQTGDIPPLSGVKQISCPDSSEPAVQVQLDFSTLTRSVYSDRGDDSPDSSPEEQKSVIEIPTAPMENVPFTESKSKIPVRTMPTSTPAPPSAEYESSVSEDFLSSVDEENKADEAKPKSKLPVKVPLQRVEQQLSDLDTSVQKTVAPQGQDMASIAPDNRSKSESDASSLDSKTKCPVKTRSYTETETESRERAEELELESEEGATRPKILTSRLPVKSRSTTSSCRGGTSPTKESKEHFFDLYRNSIEFFEEISDEASKLVDRLTQSEREQEIVSDDESSSALEVSVIENLPPVETEHSVPEDIFDTRPIWDESIETLIERIPDENGHDHAEDPQDEQERIEERLAYIADHLGFSWTELARELDFTEEQIHQIRIENPNSLQDQSHALLKYWLERDGKHATDTNLVECLTKINRMDIVHLMETNTEPLQERISHSYAEIEQTITLDHSEGFSVLQEELCTAQHKQKEEQAVSKESETCDHPPIVSEEDISVGYSTFQDGVPKTEGDSSATALFPQTHKEQVQQDFSGKMQDLPEESSLEYQQEYFVTTPGTETSETQKAMIVPSSPSKTPEEVSTPAEEEKLYLQTPTSSERGGSPIIQEPEEPSEHREESSPRKTSLVIVESADNQPETCERLDEDAAFEKELTEELGELEASSDEEAMVTTRVVRRRVIIQGDDMPEIPPETVTEEEYIDEHGHTVVKKDNNE

SEQ ID NO: 75955 - protein, 86 aa, Homo sapiens
MRRQPAASLDPLAKEPGPPGSRDDRLEDALLSLGSVIDISGLQRAVKEALSAVLPRVETVYTYLLDGESQLVCEDPPHELPQEGKV

SEQ ID NO: 75956 - protein, 158 aa, Homo sapiens
MTLTLSVLICLGLSVGPRTCVQAGTLPKPTLWAEPASVIARGKPVTLWCQGPLETEEYRLDKEGLPWARKRQNPLEPGAKAKFHIPSTVYDSAGRYRCYYETPAGWSEPSDPLELVATGFYAEPTLLALPSPVVASGGNVTLQCDTLDGLLTFVLVEE

SEQ ID NO: 75957 - protein, 153 aa, Homo sapiens
MNAPLGGIWLWLPLLLTWLTPEVNSSWWYMRATGGSSRVMCDNVPGLVSSQRQLCHRHPDVMRAISQGVAEWTAECQHQFRQHRWNCNTLDRDHSLFGRVLLRSCKAVLETRVQVPRGERLMYSQDMLAGHGRLQENGRLSLEEVQWGHPGGH

SEQ ID NO: 75958 - protein, 159 aa, Homo sapiens
MARACLQAVKYLMFAFNLLFWLGGCGVLGVGIWLAATQGSFATLSSSFPSLSAANLLIITGAFVMAIGFVGCLGAIKENKCLLLTFFLLLLLVFLLEATIAILFFAYTDKIDRYAQQDLKKGLHLYGTQGNVGLTNAWSIIQTDFRCCGVSNYTDWFEV

SEQ ID NO: 75959 - protein, 174 aa, Homo sapiens
MQAGKPILYSYFRSSCSWRVRIALALKGIDYETVPINLIKDGGQQFSKDFQALNPMKQVPTLKIDGITIHQSNLSVLKQVGEEMQLTWAQNAITCGFNALEQILQSTAGIYCVGDEVTMADLCLVPQVANAERFKVDLTPYPTISSINKRLLVLEAFQVSHPCRQPDTPTELRA

SEQ ID NO: 75960 - protein, 103 aa, Homo sapiens
MASSPAQRRRGNDPLTSSPGRSSRRTDALTSSPGRDLPPFEDESEGLLGTEGPLEEEEDGEELIGDGMERDYRAIPELDAYEAEGLALDDEDVEELTASQREA

SEQ ID NO: 75961 - protein, 13 aa, Homo sapiens
MISLKVCGFIQIW

SEQ ID NO: 75962 - protein, 200 aa, Homo sapiens
MADPGPDPESESESVFPREVGLFADSYSEKSQFCFCGHVLTITQNFGSRLGVAARVWDAALSLCNYFESQNVDFRGKKVIELGAGTGIVGILAALQGWVSSASVAPAKAHILCWAPSVCLGLQQGAPHEAAAENRLLLCKLQESSGDLWRGPQTGRDLAPQGGPEGGLEQSCQAPREEDQRRPDWAVAGRKHNCISRGKL

SEQ ID NO: 75963 - protein, 170 aa, Homo sapiens
MEDERKNGAYGTPQKYDPTFKGPIYNRNKPYLFYFNIVKCASPLVLLEFQCPTPQICVEKCPDRYLTYLNARSSRDFEYYKQFCVPGFKNNKGVAEVLQDGDCPAVLIPSKPLARRCFPAIHAYKGVLMVGNETTYEDGHGSRKNITDLVEGAKKANGVLEARQLAMRIF

SEQ ID NO: 75964 - protein, 37 aa, Homo sapiens
MVENFKNLVAVGEDRHSLTLNFSSLENLFALRQQASK

SEQ ID NO: 75965 - protein, 277 aa, Homo sapiens
MQTRFRRIFPWKDASTKRMPEFIHFSPLKPYKGREWEKAGSEHVLETHLLPVGHGQSEGERMVVSDFHVFVRDVLQHVDSMQKDYPGLPVFLLGHSMGGAIAILTAAERPGHFAGMVLISPLVLANPESATTFKVLAAKVLNLVLPNLSLGPIDSSVLSRNKTEVDIYNSDPLICRAGLKVCFGIQLLNAVSRVERALPKLTVPFLLLQGSADRLCDSKGAYLLMELAKSQDKTLKIYEGAYHVLHKELPEVTNSVFHEINMWVSQRTATAGTASPP

SEQ ID NO: 75966 - protein, 127 aa, Homo sapiens
MAQQANVGELLAMLDSPMLGVRDDVTAVFKENLNSDRGPMLVNTLVDYYLETSSQPALHILTTLQEPHDKHLLDRINEYVGKAATRLSILSLLGHVIRLQPSWKHKLSQAPLLPSLLKCLKRHENIQ

SEQ ID NO: 75967 - protein, 144 aa, Homo sapiens
  MOD_RES (1)..(1): Any amino acid
XSQPRIFRIKLGNQWFSFPEPEALVGKLNRLSGNKAGQVWAPEGSTAFKCLLSARLCAALLSNISDCDETFNYWEPTHYLIYGEGFQTWEYSPAYAIRSYAYLLLHAWPAAFHARILQTNKILVFYFLRCLLAFVSCICELYFY

SEQ ID NO: 75968 - protein, 38 aa, Homo sapiens
MAGASVKVAVRVRPFNSREMSRDSKCIIQMSGSTTTIV

SEQ ID NO: 75969 - protein, 128 aa, Homo sapiens
  MOD_RES (1)..(1): Any amino acid
XLSPKHGILSIEQLISRVGVIGVTLMALLSGFGAVNCPYTYMSYFLRNVTDTDILALERRLLQTMDMIISKKKRMAMARRTMFQKGEVHNKPSGFWGMIKSVTTSASGSETSLSLCAKWITPWHKTIP

SEQ ID NO: 75970 - protein, 173 aa, Homo sapiens
MILEGGGVMNLNPGNNLLHQPPAWTDSYSTCNVSSGFFGGQWHEIHPQYWTKYQVWEWLQHLLDTNQLDANCIPFQEFDINGEHLCSMSLQEFTRAAGTAGQLLYSNLQHLKWNGQCSSDLFQSTHNVIVKTEQTEPSIMNTWKDENYLYDTNYGSTVDLLDSKTFCRAQISM

SEQ ID NO: 75971 - protein, 148 aa, Homo sapiens
MYPESTTGSPARLSLRQTGSPGMIYSTRYGSPKRQLQFYRNLGKSGLRVSCLGLGTWVTFGGQITDEMAEQLMTLAYDNGINLFDTAEVYAAGKAEVVLGNIIKKKGWRRSSLVITTKIFWGGKAETERGLSRKHIIEGLKASLERLQ

SEQ ID NO: 75972 - protein, 29 aa, Homo sapiens
MRFRYKCEGRSAGSIPGERSTDTTKTHPT

SEQ ID NO: 75973 - protein, 1563 aa, Homo sapiens
  MOD_RES (1)..(1): Any amino acid
XGVTHMDNPPYYRITSSYKIPSVTSGTTSSSNTMVAPTDGNPDNKPIKENIEESYVHLDIYSGLNSHLNRQHHRLESRYSSSSGGSYEEEKSDSMPLYSNWRLKVMEHNQGEPLPFPPAGGCWSPLVDYVPETSSPGLPLHRCNIAVILLTDLIIDHSVKVEWGSYLHLLLHAIFIGFDHCHPEVYEHCKRLLLHLLIVMGPNSNIRTVASVLLRNKEFNEPRVLTVKQVAHLDYNFTAGINDFIPDYQPSPMTDSGLSSSSTSSSISLGNNSAAISHLHTTILNEVDISVEQDGKVKTLMEFITSRKRGPLWNHEDVSAKNPSIKSAEQLTTFLKHVVSVFKQSSSEGIHLEHHLSEVALQTALSCSSRHYAGRSFQIFRALKQPLTATTLSDVLSRLVETVGDPGEDAQGFVIELLLTLESAIDTLAETMKHYDLLSALSQTSYHDPIMGNKYAANRKSTGQLNLSTSPINSSSYLGYNSNARSNSLRLSLIGDRRGDRRRSNTLDIMDGRINHSSSLARTRSLSSLREKGMYDVQSTTEPTNLMATIFWIAASLLESDYEYEYLLALRLLNKLLIHLPLDKSESREKIENVQSKLKWTNFPGLQQLFLKGFTSASTQEMTVHLLSKLISVSKHTLVDPSQLSGFPLNILCLLPHLIQHFDSPTQFCKETASRIAKVCAEEKCPTLVNLAHMMSLYSTHTYSRDCSNWINVVCRYLHDSFSDTTFNLVTYLAELLEKGLSSMQQSLLQIIYSLLSHIDLSAAPAKQFNLEIIKIIGKYVQSPYWKEALNILKLVVSRSASLVVPSDIPKTYGGDTGSPEISFTKIFNNVSKELPGKTLDFHFDISETPIIGNKYGDQHSAAGRNGKPKVIAVTRSTSSTSSGSNSNALVPVSWKRPQLSQRRTREKLMNVLSLCGPESGLPKNPSVVFSSNEDLEVGDQQTSLISTTEDINQEEEVAVEDNSSEQQFGVFKDFDFLDVELEDAEELQGESMDNFNWGVRRRSLDSIDKGDTPSLQEYQCSSSTPSLNLTNQEDTDESSEEEAALTASQILSRTQMLNSDSATDETIPDHPDLLLQSEDSTGSITTEEVLQIRDETPTLEASLDNANSRLPEDTTSVLKEEHVTTFEDEGSYIIQEQQESLVCQGILDLEETEMPEPLAPESYPESVCEEDVTLALKELDERCEEEEADFSGLSSQDEEEQDGFPEVQTSPLPSPFLSAIIAAFQPVAYDDEEEAWRCHVNQMLSDTDGSSAVFTFHVFSRLFQTIQRKFGEITNEAVSFLGDSLQRIGTKFKSSLEVMMLCSECPTVFVDAETLMSCGLLETLKFGVLELQEHLDTYNVKREAAEQWLDDCKRTFGAKEDMYRINTDAQQMEILAELELCRRLYKLHFQLLLLFQAYCKLINQVNTIKNEAEVINMSEELAQLESILKEAESASENEEIDISKAAQTTIETAIHSLIETLKNKEFISAVAQVKAFRSLWPSDIFGSCEDDPVQTLLHIYFHHQTLGQTGSFAVIGSNLDMSEANYKLMELNLEIRESLRMVQSYQLLAQAKPMGNMVSTGF

SEQ ID NO: 75974 - protein, 58 aa, Homo sapiens
MGTGDARENEFRGELLNQRWTHGGKASSCRTSRHLGRHCKMSLENEDKRARTRSKALR

SEQ ID NO: 75975 - protein, 48 aa, Homo sapiens
VLGTPTREQIREMNPNYTEFKFPQIKAHPWTKNSPSNRLSTPFSSLLT

SEQ ID NO: 75976 - protein, 223 aa, Homo sapiens
MEEKRRRARVQGAWAAPVKSQAIAQPATTAKSHLHQKPGQTWKNKEHHLSDREFVFKEPQQVVRRAPEPRVIEEGVYEISLSPTGVSRVCLYPGFVDVKEADWILEQLCQDVPWKQRTGIREDITYQQPRLTAWYGELPYTYSRITMEPNPHWHPVLRTLKNRIEENTGHTFNSLLCNLYRNEKDSVDWHSDDEPSLGRCPIIASLSFGATRTFEMRKKPPPE

SEQ ID NO: 75977 - protein, 502 aa, Homo sapiens
MGDILAHESELLGLVKEKDLVAAFDNGDQKVFFDLWEEHISSSIRDGDSFAQKLEFYLHIHFAIYLLKYSVGRPDKEELDEKISYFKTYLETKGAALSQTTEFLPFYALPFVPNPMVHPSFKELFQDSWTPELKLKLIKFLALISKASNTPKLLTIYKENGQSNKEILQQLHQQLVEAERRSVTYLKRYNKIQADYHNLIGVTAELVDSLEATVSGKMITPEYLQSVCVRLFSNQMRQSLAHSVDFTRPGTASTMLRASLAPVKLKDVPLLPSLDYEKLKKDLILGSDRLKAFLLQALRWRLTTSHPGEQRETVLQAYISNDLLDCYSHNQRSVLQLLHSTSDVVRQYMARLINAFASLAEGRLYLAQNTKVLQMLEGRLKEEDKDIITRENVLGALQKFSLRRPLQTAMIQDGLIFWLVDVLKDPDCLSDYTLEYSVALLMNLCLRSTGKNMCAKVAGLVLKVLSDLLGHENHEIQPYVNGALYSILSVPSIREEARAMVP

SEQ ID NO: 75978 - protein, 105 aa, Homo sapiens
MFPLKDAEMGAFTFFASALPHDVCGSNGLPLTPNSIKILGRFQILKTITHPRLCQYVDISRGKHERLVVVAEHCERSLEDLLRERKPVSCSTVLCIAFEVLQGLQ

SEQ ID NO: 75979 - protein, 143 aa, Homo sapiens
MAPGRAVAGLLLLAAAGLGGVAEGPGLAFSEDVLSVFGANLSLSAAQLQHLLEQMGAASRVGVPEPGQLHFNQFGNTESRPGWKKRAKFMYLFEGAQTVRNRDDCLDDNALRCPPQFHRWPGDWGFLHLVSPSGTQYFHSNPM

SEQ ID NO: 75980 - protein, 143 aa, Homo sapiens
MANSMNGRNPGGRGGNPRKGRILGIIDAIQDAVGPPKQAAADRRTVEKTWKLMDKVVRLCQNPKLQLKNSPPYILDILPDTYQHLRLILSKYDDNQKLAQLSENEYFKIYIDSLMKKSKRAIRLFKEGKERMYEEQSQDSSSL

SEQ ID NO: 75981 - protein, 162 aa, Homo sapiens
MGNPENIEDAYVAVIRPKNTASLNSREYRAKSYEILLHEVPIEGQKKKRKKVLLETKLQGNSEITQGILDYVVETTKPISPANQGIRGKRVVLMKKFPLDGEKMGREASLFIVPSVVKDNTKYTYTPGCPIFYCLQDIMRVCSESSTHFATLTARMLIALDK

SEQ ID NO: 75982 - protein, 100 aa, Homo sapiens
MVWKKLGSRNFSSCPSGSIQWIWDVLGECAQDGWDEASVGLGLISILCFAASTFPQFIKAYKTGNMDQALSLWFLLGWIGGDSCNLIGSFLADQLPLQTW

SEQ ID NO: 75983 - protein, 77 aa, Homo sapiens
MPEESSPRRTPQSIPYQDLPHLVNADGQYLFCRYWKPTGTPKALIFVSHGAGEHSGRYEELARMLMGLDLLVFAHDH

SEQ ID NO: 75984 - protein, 108 aa, Homo sapiens
LADMTARDLCQLLVYKSHCVDDNSWTLVEHHPHLGLERCLEDHELVVQVESTMASESKFLFRKNYAKYEFFKNPMNFFPEQMVTWCQQSNGSQTQLLQVLGHNRSLLK

SEQ ID NO: 75985 - protein, 971 aa, Homo sapiens
MWRCGGRQGLCVLRRLSGGHAHHRAWRWNSNRACERALQYKLGDKIHGFTVNQVTSVPELFLTAVKLTHDDTGARYLHLAREDTNNLFSVQFRTTPMDSTGVPHILEHTVLCGSQKYPCRDPFFKMLNRSLSTFMNAFTASDYTLYPFSTQNPKDFQNLLSVYLDATFFPCLRELDFWQEGWRLEHENPSDPQTPLVFKGVVFNEMKGAFTDNERIFSQHLQNRLLPDHTYSVVSGGDPLCIPELTWEQLKQFHATHYHPSNARFFTYGNFPLEQHLKQIHEEALSKFQKIEPSTVVPAQTPWDKPREFQITCGPDSFATDPSKQTTISVSFLLPDITDTFEAFTLSLLSSLLTSGPNSPFYKALIESGLGTDFSPDVGYNGYTREAYFSVGLQGIAEKDIETVRSLIDRTIDEVVEKGFEDDRIEALLHKIEIQMKHQSTSFGLMLTSYIASCWNHDGDPVELLKLGNQLAKFRQCLQENPKFLQEKVKQYFKNNQHKLTLSMRPDDKYHEKQAQVEATKLKQKVEALSPGDRQQIYEKGLELRSQQSKPQDASCLPALKVSDIEPTIPVTELDVVLTAGDIPVQYCAQPTNGMVYFRAFSSLNTLPEELRPYVPLFCSVLTNPCFEEEEHFKVLVKMTAQELANGIPDSGHLYASIRAGRTLTPAGDLQETFSGMDQVRLMKRIAEMTDIKPILRKLPRIKKHLLNGDNMRCSVNATPQQMPQTEKAVEDFLRSIGRSKKERRPVRPHTVEKPVPSSSGGDAHVPHGSQVIRKLVMEPTFKPWQMKTHFLMPFPVNYVGECIRTVPYTDPDHASLKILARLMTAKFLHTEIREKGGAYGGGAKLSHNGIFTLYSYRDPNTIETLQSFGKAVDWAKSGKFTQQDIDEAKLSVFSTVDAPVAPSDKGMDHFLYGLSDEMKQAHREQLFAVSHDKLLAVSDRYLGTGKSTHGLAILGPENPKIAKDPSWIIQ

SEQ ID NO: 75986 - protein, 145 aa, Homo sapiens
MNYQEAAIYLQEGENNDKFFTHPKDAKALAAYLFAHNHLFYLMELATALLLLLLSLCEAPAVPALRLGIYVHATLELFALMVVVFELCMKLRWLGLHTFIRHKRTMVKTSVLVVQFVEAIVVLVRQMSHVRVTRALRCIFLVDCR

SEQ ID NO: 75987 - protein, 149 aa, Homo sapiens
EISKLEERVYNVSAEIMAMKEEQVHLEQEIKGEVKVLNNITNDLRLKDWEHSQTLRNITLIQGPPGPPGEKGDRGPTGESGPRGFPGPIGPPGLKGDRGAIGFPGSRGLPGYAGRPGNSGPKGQKGEKGSGNTLKSRNLTTRKVFAISK

SEQ ID NO: 75988 - protein, 510 aa, Homo sapiens
MTPILTVLICLGLSLGPRTHVQAGHLPKPTLWAEPGSVITQGSPVTLRCQGGQETQEYRLYREKKTAPWITRIPQELVKKGQFPIPSITWEHTGRYRCYYGSDTAGRSESSDPLELVVTGAYIKPTLSAQPSPVVNSGGNVTLQCDSQVAFDGFILCKEGEDEHPQCLNSQPHARGSSRAIFSVGPVSPSRRWWYRCYAYDSNSPYEWSLPSDLLELLVLGVSKKPSLSVQPGPIVAPEETLTLQCGSDAGYNRFVLYKDGERDFLQLAGAQPQAGLSQANFTLGPVSRSYGGQYRCYGAHNLSSEWSAPSDPLDILIAGQFYDRVSLSVQPGPTVASGENVTLLCQSQGWMQTFLLTKEGAADDPWRLRSTYQSQKYQAEFPMGPVTSAHAGTYRCYGSQSSKPYLLTHPSDPLELVVSGPSGGPSSPTTGPTSTSGPEDQPLTPTGSDPQSGLGRHLGVVIGILVAVILLLLLLLLLFLILRHRRQGKHWTSSPAQLPMPRKKTSMLP

SEQ ID NO: 75989 - protein, 164 aa, Homo sapiens
MGQCGITSSKTVLVFLNLIFWVENEVDRSIQKVYKTYNGTNPDAASRAIDYVQRQLHCCGIHNYSDWENTDWFKETKNQSVPLSCCRETASNCNGSLAHPSDLYAEGCEALVVKKLQEIMMHVIWAALAFAAIQLLGMLCACIVLCRRSRDPAYELLITGGTYA

SEQ ID NO: 75990 - protein, 310 aa, Homo sapiens
  MOD_RES (1)..(1): Any amino acid
XFFCYICKASCSSQQEFQDHMSEPQHQQRLGEIQHMSQACLLSLLPVPRDVLETEDEEPPPRRWCNTCQLYYMGDLIQHRRTQDHKPPTPRRDVFAHVPVQGWSTARLVTDMIAKQSLRPFCTVCNRYFKTPRKFVEHVKSQGHKDKAKELKSLEKEIAGQDEDHFITVDAVGCFEGDEEEEEDDEDEEEIEVEEELCKQVRSRDISREEWKGSETYSPNTAYGVDFLVPVMGYICRICHKFYHSNSGAQLSHCKSLGHFENLQKYKAAKNPSPTTRPVSRRCAINARNALTALFTSSGRPPSQPNTQDK

SEQ ID NO: 75991 - protein, 208 aa, Homo sapiens
SLSSTLHDAVEMDLENSVGELSEGQRPQLTAAAENILMGHSLYMQPPVTNTQSLDQQCDPKPLSRQFDTVSGSIYEDSCASHGPMSLGELELEPNSKLVLPTTLLTAQENDVNLPVAAEDFSQYQLKQNQDVKQVEHKPSQSYLRVRNKSDIAPSQQQGGKAVPLSASQMPPAKMSVMLPSVNLEDCSQSLSLSTMQEDMESSGADTF

SEQ ID NO: 75992 - protein, 293 aa, Homo sapiens
MASNVTNKMDPHSMNSRVFIGNLNTLVVKKSDVEAIFSKYGKIAGCSVHKGFAFVQYDKEKNARAAVAGEDGRMIASQVVDINLAAEPKVNRGNAGVKRSAAEMYGSSFDLDYNLQRDYYGGMYSFPARVPPPPPIALAVVPSKRQRISGNTSRRGKSGFNSKSGKRGSSKSGKLKGDDLQAIKQELTQIKQKVDSLLENLEKIEKEHCKQGVEVKNAKSEEEQTSSSSKKDKTHVKMESEGGADDSVEEGDLLCDDDNEDQGDNQLELIKDDEKGVEEGEDDRDRANGQDDS

SEQ ID NO: 75993 - protein, 477 aa, Homo sapiens
MDSSEEHAGCPARGTCPVFLAMSAGTVRYAPSGLCPVLEGNLREEPWGTDSPPQPDQGLPPPLAAVPVPWKSTDPCQGHRESPGALVETSAGEEAQGQEGPAAAQLDVLRLRSSSMEIREKGSEFLKEELHRAQKELKLKDEECERLSKVREQLEQELEELTASLFEEAHKMVREANMKQAASEKQLKEARGKIDMLQAEVTALKTLVITSTPASPNRELHPQLLSPTKAGPRKGHSRHKSTSSTLCPAVCPAAGHTLTPDREGKEPGLAPLLSLLLCVVPSKAVHLTYEPAWPLPPGEPPAPASTPSPSFSRQVDTILFAEFQAWRESPTLDKTCPFLERVYREDVGPCLDFTMQELSVLVRAAVEDNTLTIEPVASQTLPTVKVAEVDCSSTNTCALSGLTRTCRHRIRLGDSKSHYYISPSSRARITAVCNFFTYIRYIQQGLVRQDAEPMFWEIMRLRKEMSLAKLGFFPQEA

SEQ ID NO: 75994 - protein, 128 aa, Homo sapiens
MMADEEEEVKPILQKLQELVDQLYSFRDCYFETHSVEDAGRKQQDVQKEMEKTLQQMEEVVGSVQGKAQVLMLTGKALNVTPDYSPKAEELLSKAVKLEPELVEAWNQLVQEQSLLAKPVNGASSAAD

SEQ ID NO: 75995 - protein, 66 aa, Homo sapiens
MATAAQGPLSLLWGWLWSERFWLPENVSWADLEGPADGYGYPRGRHILSVFPLAAGIFFVRLLFER

SEQ ID NO: 75996 - protein, 81 aa, Homo sapiens
MALSSAWRSVLPLWLLWSAACSRAASGDDNAFPFDIEGSSAVGRQDPPETSEPRVALGRLPPAAEKCNAGFFHTLSGECVP

SEQ ID NO: 75997 - protein, 26 aa, Homo sapiens
MISPDPRPSPGLARWAESYEAKCERR

SEQ ID NO: 75998 - protein, 84 aa, Homo sapiens
MELLTFKDVAIEFSPEEWKCLDTSQQNLYRDVMLENYRNLVSLGVSISNPDLVTSLEQRKEPYNLKIHETAARPPGHYRKRYLH

SEQ ID NO: 75999 - protein, 140 aa, Homo sapiens
MSGRGKQGGKARAKAKTRSSRAGLQFPVGRVHRLLRKGNYSERVGAGAPVYLAAVLEYLTAEILELAGNAARDNKKTRIIPRHLQLAIRNDEELNKLLAGFRSSQWLVPSRLLASPRVGKRHASSWPPRLLERALQPPAA

SEQ ID NO: 76000 - protein, 21 aa, Homo sapiens
MFFSAALRARAAGLTAHWRRI

SEQ ID NO: 76001 - protein, 238 aa, Homo sapiens
MKLLWWCDWLPERSHVFTQRELIEMLAISRNQKLLQAGEENQVLELLIHRDGEFQELMKLALNQGKIHHEMQVLEKEVEKRDSDIQQLQKQLKEAEQILATAVYQAKEKLKSIEKARKGAISSEEIIKYAHRISASNAVCAPLTWVPGDPRRPYPTDLEMRSGLLGQMNNPSTNGVNGHLPGDALAAGRLPDVLAPQYPWQSNDMSMNMLPPNHSSDFLLEPPGHNKENEDDVEIMST

SEQ ID NO: 76002 - protein, 22 aa, Homo sapiens
MEKAPPQPQHEGLKSKEHLPQQ

SEQ ID NO: 76003 - protein, 152 aa, Homo sapiens
MAGLPRRIIKETQRLLAEPVPGIKAEPDESNARYFHVVIAGPQDSPFEGGTFKLELFLPEEYPMAAPKVRFMTKIYHPNVDKLGRICLDILKGKCYLYQHMLLLSFLLFLLSIPCLECKHYTKIREVCGREVKQFWACFFHALSYWACCLHR

SEQ ID NO: 76004 - protein, 163 aa, Homo sapiens
MKPDETPMFDPSLLKEVDWSQNTATFSPAISPTHPGEGLVLRPLCTADLNRGFFKVLGQLTETGVVSPEQFMKSFEHMKKSGDYYVTVVEDVTLGQIVATATLIIEHKFIHSCAKRGRVEDVVVSDECRGKQLGKLLLSTLTLLSKKLNCYKITLECLPQNVG

SEQ ID NO: 76005 - protein, 56 aa, Homo sapiens
MDTPSSYEAAMELFSPDQDMREAGAQLKKLVDTLPQKPRESIIKLMEKIAQSSLCN

SEQ ID NO: 76006 - protein, 50 aa, Homo sapiens
MSFIFEWIYNGFSSVLQFLGLYKKSGKLVFLGLDNAGKTTLLHMLKDDRL

SEQ ID NO: 76007 - protein, 532 aa, Homo sapiens
MSTEEQYRIRQVNIYYYLEDDSMSVIEPVVENSGILQGKLIKRQRLAKNDRGDHYHWKDLNRGINITIYGKTFRVVDCDQFTQVFLESQGIELNPPEKMALDPYTELRKQPLRKYVTPSDFDQLKQFLTFDKQVLRFYAIWDDTDSMYGECRTYIIHYYLMDDTVEIREVHERNDGRDPFPLLMNRQRVPKVLVENAKNFPQCVLEISDQEVLEWYTAKDFIVGKSLTILGRTFFIYDCDPFTRRYYKEKFGITDLPRIDVSKREPPPVKQELPPYNGFGLVEDSAQNCFALIPKAPKKDVIKMLVNDNKVLRYLAVLESPIPEDKDRRFVFSYFLATDMISIFEPPVRNSGIIGGKYLGRTKVVKPYSTVDNPVYYGPSDFFIGAVIEVFGHRFIILDTDEYVLKYMESNAAQYSPEALASIQNHVRKREAPAPEAESKQTEKDPGVQELEALIDTIQKQLKDHSCKDNIREAFQIYDKEASGYVDRDMFFKICESLNVPVDDSLVKELIRMCSHGEGKINYYNFVRAFSN

SEQ ID NO: 76008 - protein, 179 aa, Homo sapiens
MHFQAFWLCLGLLFISINAEFMDDDVETEDFEENSEEIDVNESELSSEIKYKTPQPIGEVYFAETFDSGRLAGWVLSKAKKDDMDEEISIYDGRWEIEELKENQVPGDRGLVLKSRAKHHAISAVLAKPFIFADKPLIVQYEVNFQDGIDCGGAYIKLLADTDDLILENFYDKTSYIIM

SEQ ID NO: 76009 - protein, 52 aa, Homo sapiens
MKFPIHHLALSCDNLTLSACMMSSEYGSIIAFFDVRTFSNEAKQQKRPFAYH

SEQ ID NO: 76010 - protein, 985 aa, Homo sapiens
MALIMEPVSKWSPSQVVDWMKGLDDCLQQYIKNFEREKISGDQLLRITHQELEDLGVSRIGHQELILEAVDLLCALNYGLETENLKTLSHKLNASAKNLQNFITGRRRSGHYDGRTSRKLPNDFLTSVVDLIGAAKSLLAWLDRSPFAAVTDYSVTRNNVIQLCLELTTIVQQDCTVYETENKILHVCKTLSGVCDHIISLSSDPLVSQSAHLEVIQLANIKPSEGLGMYIKSTYDGLHVITGTTENSPADRCKKIHAGDEVIQVNHQTVPLIPRSPTSSVATPSSTISTPTKRDSSALQDLYIPPPPAEPYIPRDEKGNLPCEDLRGHMVGKPVHKGSESPNSFLDQEYRKRFNIVEEDTVLYCYEYEKGRSSSQGRRESTPTYGKLRPISMPVEYNWVGDYEDPNKMKRDSRRENSLLRYMSNEKIAQEEYMFQRNSKKDTGKKSKKKGDKSNSPTHYSLLPSLQMDALRQDIMGTPVPETTLYHTFQQSSLQHKSKKKNKGPIAGKSKRRISCKDLGRGDCEGWLWKKKDAKSYFSQKWKKYWFVLKDASLYWYINEEDEKAEGFISLPEFKIDRASECRKKYAFKACHPKIKSFYFAAEHLDDMNRWLNRINMLTAGYAERERIKQEQDYWSESDKEEADTPSTPKQDSPPPPYDTYPRPPSMSCASPYVEAKHSRLSSTETSQSQSSHEEFRQEVTGSSAVSPIRKTASQRRSWQDLIETPLTSSGLHYLQTLPLEDSVFSDSAAISPEHRRQSTLPTQKCHLQDHYGPYPLAESERMQVLNGNGGKPRSFTLPRDSGFNHCCLNAPVSACDPQDDVQPPEVEEEEEEEEEEGEAAGENIGEKSESREEKLGDSLQDLYRALEQASLSPLGEHRISTKMEYKLSFIKRCNDPVMNEKLHRLRILKSTLKAREGEVAIIDKVLDNPDLTSKEFQQWKQMYLDLFLDICQNTTSNDPLSISSEVDVITSSLAHTHSYIETHV

SEQ ID NO: 76011 - protein, 80 aa, Homo sapiens
MAKLLQPPPKFLPSEWHIANKNQYHRADAQRSRSERLVAESQRLVDEIEKTTRKSQSDVNKKLGRSALALTWCTTQWSMS

SEQ ID NO: 76012 - protein, 265 aa, Homo sapiens
MCTSETFQALDTFEARHDDIVLASYPKCGSNWILHIVSELIYAVSKKKYKYPEFPVLECGDSEKYQRMKGFPSPRILATHLHYDKLPGSIFENKAKILVIFRNPKDTAVSFLHFHNDVPDIPSYGSWDEFFRQFMKGQVSWGRYFDFAINWNKHLDGDNVKFILYEDLKENLAAGIKQIAEFLGFFLTGEQIQTISVQSTFQAMRAKSQDTHGAVGPFLFRKGEVGDWKNLFSEIQNQEMDEKFKECLAGTSLGAKLKYESYCQG

SEQ ID NO: 76013 - protein, 1300 aa, Homo sapiens
  MOD_RES (1)..(1): Any amino acid
XAVPTNGTVNNVAQEPVNTLGDISGNKTPDLSNQNSSDQANEEWETASESSDFNERRERDEKKNADLNAQTVVKVGENVLPPKREIAKRSFSSQRPVDRQNRRGNNGPPKSGRNFSGPRNERRSGPPSKSGKRGPFDDQPAGTTGVDLINGSSAHHQEGVPNGTGQKNSKDSTGKKREDPKPGPKKPKEKVDALSQFDLNNYASVVIIDDHPEVTVIEDPQSNLNDDGFTEVVSKKQQKRLQDEERRKKEEQVIQVWNKKNANEKGRSQTSKLPPRFAKKQATGIQQAQSSASVPPLASAPLPPSTSASVPASTSAPLPATLTPVPASTSAPVPASTLAPVLASTSAPVPASPLAPVSASASVSASVPASTSAAAITSSSAPASAPAPTPILASVSTPASVTILASASIPILASALASTSAPTPAPAASSPAAPVITAPTIPASAPTASVPLAPASASAPAPAPTPVSAPNPAPPAPAQTQAQTHKPVQNPLQTTSQSSKQPPPSIRLPSAQTPNGTDYVASGKSIQTPQSHGTLTAELWDNKVAPPAVLNDISKKLGPISPPQPPSVSAWNKPLTSFGSAPSSEGAKNGQESGLEIGTDTIQFGAPASNGNENEVVPVLSEKSADKIPEPKEQRQKQPRAGPIKAQKLPDLSPVENKEHKPGPIGKERSLKNRKVKDAQQVEPEGQEKPSPATVRSTDPVTTKETKAVSEMSTEIGTMISVSSAEYGTNAKMESARKAWENSPNVREKGSPVTSTAPPIATGVSSSASGPSTANYNSFSSASMPQIPVASVTPTASLSGAGTYTTSSLSTKSTTTSDPPNICKVKPQQLQTSSLPSASHFSQLSCMPSLIAQQQQNPQVYVSQSAAAQIPAFYMDTSHLFNTQHARLAPPSLAQQQGFQPGLSQPTSVQQIPIPIYAPLQGQHQAQLSLGAGPAVSQAQELFSSSLQPYRSQPAFMQSSLSQPSVVLSGTAIHNFPTVQHQELAKAQSGLAFQQTSNTQPIPILYEHQLGQASGLGGSQLIDTHLLQARANLTQASNLYSGQVQQPGQTNFYNTAQSPSALQQVTVPLPASQLSLPNFGSTGQPLIALPQTLQPPLQHTTPQAQAQSLSRPAQVSQPFRGLIPAGTQHSMIATTGKMSEMELKAFGSGIDIKPGTPPIAGRSTTPTSSPFRATSTSPNSQSSKMNSIVYQKQFQSAPATVRMTQPFPTQFAPQAKQRAEVLQSTQRFFSEQQQSKQIGGGKAQKVDSDSSKPPETLTDPPGVCQEKVEEKPPPAPSIATKPVRTGPIKPQAIKTEETKS

SEQ ID NO: 76014 - protein, 78 aa, Homo sapiens
VGLSGRVLKIPASWTNPSGKYHIGIKNGYDFYPKALKERIQKERKEKIWDPVHRVALAEACRKQEEFDVANNGSSQSK

SEQ ID NO: 76015 - protein, 763 aa, Homo sapiens
MAGWIQAQQLQGDALRQMQVLYGQHFPIEVRHYLAQWIESQPWDAIDLDNPQDRAQATQLLEGLVQELQKKAEHQVGEDGFLLKIKLGHYATQLQKTYDRCPLELVRCIRHILYNEQRLVREANNCSSPAGILVDAMSQKHLQINQTFEELRLVTQDTENELKKLQQTQEYFIIQYQESLRIQAQFAQLAQLSPQERLSRETALQQKQVSLEAWLQREAQTLQQYRVELAEKHQKTLQLLRKQQTIILDDELIQWKRRQQLAGNGGPPEGSLDVLQSWCEKLAEIIWQNRQQIRRAEHLCQQLPIPGPVEEMLAEVNATITDIISALVTSTFIIEKQPPQVLKTQTKFAATVRLLVGGKLNVHMNPPQVKATIISEQQAKSLLKNENTRNECSGEILNNCCVMEYHQATGTLSAHFRNMSLKRIKRADRRGAESVTEEKFTVLFESQFSVGSNELVFQVKGRVPFAVPDKVLWPQLCEALNMKFKAEVQSNRGLTKENLVFLAQKLFNNSSSHLEDYSGLSVSWSQFNRENLPGWNYTFWQWFDGVMEVLKKHHKPHWNDGAILGFVNKQQAHDLLINKPDGTFLLRFSDSEIGGITIAWKFDSPERNLWNLKPFTTRDFSIRSLADRLGDLSYLIYVFPDRPKDEVFSKYYTPVLAKAVDGYVKPQIKQVVPEFVNASADAGGSSATYMDQAPSPAVCPQAPYNMYPQNPDHVLDQDGEFDLDETMDVARHVEELLRRPMDSLDSRLSPPAGLFTSARGSLS

SEQ ID NO: 76016 - protein, 25 aa, Homo sapiens
MFVASERKMRAHQVLTFLLLFVITS

SEQ ID NO: 76017 - protein, 99 aa, Homo sapiens
  MOD_RES (1)..(1): Any amino acid
XSHKQHLARQFKAIKAKMDELRPLIPVLEEYKADAKLVLQFKEEVQNLTSVLNELQEEIGAYDYDELQSRVSNLEERLRACMQKLGVVHGRLSQQPLRT

SEQ ID NO: 76018 - protein, 247 aa, Homo sapiens
MFTLSQTSRAWFIDRARQAREERLVQKERERAAVVIQAHVRSFLCRSRLQRDIRREIDDFFKADDPESTKRSALCIFKIARKLLFLFRIKEDNERFEKLCRSILSSMDAENEPKVWYVSLACSKDLTLLWIQQIKNILWYCCDFLKQLKPEILQDSRLITLYLTMLVTFTDTSTWKILRGKGESLRPAMNHICANIMGHLNQHGFYSVLQVCDSCPPVCNFSTLQHLHLDFYICIQHTWCPPQKHFS

SEQ ID NO: 76019 - protein, 416 aa, Homo sapiens
MSPSHVVVNVSTARSGPLTTSSAPVSRAESLRPGSRSCTMSMSPTVIILACLGFFLDQSVWAHVGGQDKPFCSAWPSAVVPQGGHVTLRCHCRRGFNIFTLYKKDGVPVPELYNRIFWNSFLISPVTPAHAGTYRCRGFHPHSPTEWSAPSNPLVIMVTGLYEKPSLTARPGPTVRAGENVTLSCSSQSSFDIYHLSREGEAHELRLPAVPSINGTFQADFPLGPATHGETYRCFGSFHGSPYEWSDPSDPLPVSVTGNPSSSWPSPTEPSFKTGIARHLHAVIRYSVAIILFTILPFFLLHRWCSKKKNAAVMNQEPAGHRTVNREDSDEQDPQEVTYAQLDHCIFTQRKITGPSQRSKRPSTDTSVCIELPNAEPRALSPAHEHHSQALMGSSRETTALSQTQLASSNVPAAGI

SEQ ID NO: 76020 - protein, 46 aa, Homo sapiens
MSGSDGGLEEEPELSITLTLRMLMHGKEVGSIIGKKGETVKRIREQ

SEQ ID NO: 76021 - protein, 85 aa, Homo sapiens
MELCRSLALLGGSLGLMFCLIALSTDFWFEAVGPTHSAHSGLWPTGHGDIISGHGPLVSTTAAFAAGALSLGAHCGGPRPGYETL

SEQ ID NO: 76022 - protein, 43 aa, Homo sapiens
MDTRSGSQCSVTPEAIRNNEELVLPPRISRVNGWSLPLHYFRV

SEQ ID NO: 76023 - protein, 88 aa, Homo sapiens
ILMASVFMVCLALLGCFALLWCVYKKTKYAFSPRNSLPQHLKELSGINFSTSQKHFGPQIPKGTLFFILENTMPTYQNKGQIGAFASK

SEQ ID NO: 76024 - protein, 342 aa, Homo sapiens
MSMSPTVIILACLGFFLDQSVWAHVGGQDKPFCSAWPSAVVPQGGHVTLRCHYRRGFNIFTLYKKDGVPVPELYNRIFWNSFLISPVTPAHAGTYRCRGFHPHSPTEWSAPSNPLVIMVTGLYEKPSLTARLGPTVRAGENVTLSCSSQSSFDIYHLSREGEAHELRLPAVPSINGTFQADFPLGPATHGETYRCFGSFHGSPYEWSDPSDPLPVSVTGNPSSSWPSPTEPSFKTDAAVMNQEPAGHRTVNREDSDEQDPQEVTYAQLDHCIFTQRKITGPSQRSKRPSTDTSVCIELPNAEPRALSPAHEHHSQALMGSSRETTALSQTQLASSNVPAAGI

SEQ ID NO: 76025 - protein, 137 aa, Homo sapiens
  MOD_RES (1)..(1): Any amino acid
XIRIKEEEPDPEEWQLSGDSTLNTNDLTHLRVQVVDEEGDQQHQEGKRLRRVACTCPNCKEGGGRGTNLGKKKQHICHIPGCGKVYGKTSHLRAHLRWHSGERPFVCNWMYCGKRFTRSDELQRHRRTHTGPAVDRA

SEQ ID NO: 76026 - protein, 72 aa, Homo sapiens
EEEGGEEGKRNRVTVADLLKEDKKKKKFCCFRQRRAKDHASMPTSETESVNTENVSGEGENRGCCGSLWCWW

SEQ ID NO: 76027 - protein, 59 aa, Homo sapiens
  MOD_RES (1)..(1): Any amino acid
XKYISPDAAKPIPITEAMRNDIIARICGEDGQVDPNCFVLAQSIVFSAMEQDTWKKRMQ

SEQ ID NO: 76028 - protein, 107 aa, Homo sapiens
MFAEFFGGRNPFDTFFGQRNGEEGMDIDDPFSGFPMGMGGFTNVNFGRSRSAQEPARKKQDPPVTHDLRVSLEEIYSGCTKKMKISHKRLNPDGKSIRNEDKILTIE

SEQ ID NO: 76029 - protein, 3019 aa, Homo sapiens
MAPPPPPVLPVLLLLAAAAALPAMGLRAAAWEPRVPGGTRAFALRPGCTYAVGAACTPRAPRELLDVGRDGRLAGRRRVSGAGRPLPLQVRLVARSAPTALSRRLRARTHLPGCGARARLCGTGARLCGALCFPVPGGCAAAQHSALAAPTTLPACRCPPRPRPRCPGRPICLPPGGSVRLRLLCALRRAAGAVRVGLALEAATAGTPSASPSPSPPLPPNLPEARAGPARRARRGTSGRGSLKFPMPNYQVALFENEPAGTLILQLHAHYTIEGEEERVSYYMEGLFDERSRGYFRIDSATGAVSTDSVLDRETKETHVLRVKAVDYSTPPRSATTYITVLVKDTNDHSPVFEQSEYRERVRENLEVGYEVLTIRASDRDSPINANLRYRVLGGAWDVFQLNESSGVVSTRAVLDREEAAEYQLLVEANDQGRNPGPLSATATVYIEVEDENDNYPQFSEQNYVVQVPEDVGLNTAVLRVQATDRDQGQNAAIHYSILSGNVAGQFYLHSLSGILDVINPLDFEDVQKYSLSIKAQDGGRPPLINSSGVVSVQVLDVNDNEPIFVSSPFQATVLENVPLGYPVVHIQAVDADSGENARLHYRLVDTASTFLGGGSAGPKNPAPTPDFPFQIHNSSGWITVCAELDREEVEHYSFGVEAVDHGSPPMSSSTSVSITVLDVNDNDPVFTQPTYELRLNEDAAVGSSVLTLQARDRDANSVITYQLTGGNTRNRFALSSQRGGGLITLALPLDYKQEQQYVLAVTASDGTRSHTAHVLINVTDANTHRPVFQSSHYTVSVSEDRPVGTSIATLSANDEDTGENARITYVIQDPVPQFRIDPDSGTMYTMMELDYENQVAYTLTIMAQDNGIPQKSDTTTLEILILDANDNAPQFLWDFYQGSIFEDAPPSTSILQVSATDRDSGPNGRLLYTFQGGDDGDGDFYIEPTSGVIRTQRRLDRENVAVYNLWALAVDRGSPTPLSASVEIQVTILDINDNAPMFEKDELELFVEENNPVGSVVAKIRANDPDEGPNAQIMYQIVEGDMRHFFQLDLLNGDLRAMVELDFEVRREYVLVVQATSAPLVSRATVHILLVDQNDNPPVLPDFQILFNNYVTNKSNSFPTGVIGCIPAHDPDVSDSLNYTFVQGNELRLLLLDPATGELQLSRDLDNNRPLEALMEVSVSDGIHSVTAFCTLRVTIITDDMLTNSITVRLENMSQEKFLSPLLALFVEGVAAVLSTTKDDVFVFNVQNDTDVSSNILNVTFSALLPGGVRGQFFPSEDLQEQIYLNRTLLTTISTQRVLPFDDNICLREPCENYMKCVSVLRFDSSAPFLSSTTVLFRPIHPINGLRCRCPPGFTGDYCETEIDLCYSDPCGANGRCRSREGGYTCECFEDFTGEHCEVDARSGRCANGVCKNGGTCVNLLIGGFHCVCPPGEYERPYCEVTTRSFPPQSFVTFRGLRQRFHFTISLTFATQERNGLLLYNGRFNEKHDFIALEIVDEQVQLTFSAGETTTTVAPKVPSGVSDGRWHSVQVQYYNKPNIGHLGLPHGPSGEKMAVVTVDDCDTTMAVRFGKDIGNYSCAAQGTQTGSKKSLDLTGPLLLGGVPNLPEDFPVHNRQFVGCMRNLSVDGKNVDMAGFIANNGTREGCAARRNFCDGRRCQNGGTCVNRWNMYLCECPLRFGGKNCEQAMPHPQLFSGESVVSWSDLNIIISVPWYLGLMFRTRKEDSVLMEATSGGPTSFRLQILNNYLQFEVSHGPSDVESVMLSGLRVTDGEWHHLLIELKNVKEDSEMKHLVTMTLDYGMDQNKADIGGMLPGLTVRSVVVGGASEDKVSVRRGFRGCMQGVRMGGTPTNVATLNMNNALKVRVKDGCDVDDPCTSSPCPPNSRCHDAWEDYSCVCDKGYLGINCVDACHLNPCENMGACVRSPGSPQGYVCECGPSHYGPYCENKLDLPCPRGWWGNPVCGPCHCAVSKGFDPDCNKTNGQCQCKENYYKLLAQDTCLPCDCFPHGSHSRTCDMATGQCACKPGVIGRQCNRCDNPFAEVTTLGCEVIYNGCPKAFEAGIWWPQTKFGQPAAVPCPKGSVGNAVRHCSGEKGWLPPELFNCTTISFVDLRAMNEKLSRNETQVDGARALQLVRALRSATQHTGTLFGNDVRTAYQLLGHVLQHESWQQGFDLAATQDADFHEDVIHSGSALLAPATRAAWEQIQRSEGGTAQLLRRLEGYFSNVARNVRRTYLRPFVIVTANMILAVDIFDKFNFTGARVPRFDTIHEEFPRELESSVSFPADFFRPPEEKEGPLLRPAGRRTTPQTTRPGPGTEREAPISRRRRHPDDAGQFAVALVIIYRTLGQLLPERYDPDRRSLRLPHRPIINTPMVSTLVYSEGAPLPRPLERPVLVEFALLEVEERTKPVCVFWNHSLAVGGTGGWSARGCELLSRNRTHVACQCSHTASFAVLMDISRRENGEVLPLKIVTYAAVSLSLAALLVAFVLLSLVRMLRSNLHSIHKHLAVALFLSQLVFVIGINQTENPFLCTVVAILLHYIYMSTFAWTLVESLHVYRMLTEVRNIDTGPMRFYYVVGWGIPAIVTGLAVGLDPQGYGNPDFCWLSLQDTLIWSFAGPIGAVIIINTVTSVLSAKVSCQRKHHYYGKKGIVSLLRTAFLLLLLISATWLLGLLAVNRDALSFHYLFAIFSGLQGPFVLLFHCVLNQEVRKHLKGVLGGRKLHLEDSATTRATLLTRSLNCNTTFGDGPDMLRTDLGESTASLDSIVRDEGIQKLGVSSGLVRGSHGEPDASLMPRSCKDPPGHDSDSDSELSLDEQSSSYASSHSSDSEDDGVGAEEKWDPARGAVHSTPKGDAVANHVPAGWPDQSLAESDSEDPSGKPRLKVETKVSVELHREEQGSHRGEYPPDQESGGAARLASSQPPEQRKGILKNKVTYPPPLTLTEQTLKGRLREKLADCEQSPTSSRTSSLGSGGPDCAITVKSPGREPGRDHLNGVAMNVRTGSAQADGSDSEGSNETSI

SEQ ID NO: 76030 - protein, 903 aa, Homo sapiens
MAHRGGERDFQTSARRMGTSLLFQLSVHERELDLVFLDHSYAKPWSAHPDASSARPTRMLFVTPRRQHESTIESDVPIDVETVTSTPMPLYDNQKARSVMNECERHVIFARTDADAPPPPEDWEEHVNRTGWTMAQNKLFNKILKALQSDRLARLANEGACNEPVLRRVAVDKCARRVRQALASVSWDTKLIQWLHTTLVETLSLPMLAAYLDALQTLKGKIPTLIDRMLVSSNTKTGAAGAEALSLLLKRPWDPAVGVLSHNKPSKLPGSPLILIASSGPSSSVFPTSRRHRFWQSQLSCLGKVIPVATHLLNNGSGVGVLQCLEHMIGAVRSKVLEIHSHFPHKPIILIGWNTGALVACHVSVMEYVTAVVCLGFPLLTVDGPRGDVDDPLLDMKTPVLFVIGQNSLQCHPEAMEDFREKIRAENSLVVVGGADDNLRISKAKKKSEGLTQSMVDRCIQDEIVDFLTGVLTRAEGHMGSEPRDQDAEKKKKPRDVARRDLAFEVPERGSRPASPAAKLPASPSGSEDLSSVSSSPTSSPKTKVTTVTSAQKSSQIGSSQLLKRHVQRTEAVLTHKQAQAQFAAFLKQNMLVRKALPPGTSSCLFVPISSEPPEEGEKEDLRVQLKRHHPSSPLPGSKTSKRPKIKVSLISQGDTAGGPCAPSQGSAPEAAGGKPITMTLGQASAGAKELTGLLTTAKSSSSEGGVSASPVPSVVSSSTAPSALHTLQSRLVATSPGSSLPGATSASSLLQGLSFSLQDISSKTSGLPANPSPGPAPQATSVKLPTPMQSLGAITTGTSTIVRTIPVATTLSSLGATPGGKPTAIHQLLTNGGLAKLASSLPGLAQISNQASGLKVPTTITLTLRGQPSRITTLSPMGSGAAPSEESSSQVLPSSSQGVFVC

SEQ ID NO: 76031 - protein, 144 aa, Homo sapiens
MSYPGYPPTGYPPFPGYPPAGQESSFPPSGQYPYPSGFPPMGGGAYPQVPSSGYPGAGGYPAPGGYPAPGGYPGAPQPGGAPSYPGVPPGQGFGVPPGGAGFSGYPQPPSQSYGGGPAQVPLPGGFPGGQMPSQYPGGQPTYPS

SEQ ID NO: 76032 - protein, 147 aa, Homo sapiens
METPRRARSPVSPQFPGQAGCSDTMGSCCSCLNRDSVPDNHPTKFKVTNVDDEGVELGSGVMELTQSELVLHLHRREAVRWPYLCLRRYGYDSNLFSFESGRRCQTGQGIFAFKCSRAEEIFNLLQDLMQCNSINVMEEPVIITRNS

SEQ ID NO: 76033 - protein, 58 aa, Homo sapiens
MTDDESESVLSDSHEGSELELPVIQLCGLVEELRRSLRRLKFDGVKFREKCMSLKKIF

SEQ ID NO: 76034 - protein, 104 aa, Homo sapiens
  MOD_RES (1)..(1): Any amino acid
XGLCGWIREKDNDLHWEPIRDPAGITKMIKGLEKKIYDGKLKELGLLSLEKRRLRGKPLMVFKYMKGWHREGGDQLFSICTKNRTRGNWLRLEYKGAFLGRGHC

SEQ ID NO: 76035 - protein, 49 aa, Homo sapiens
MTGTRSRPQPAQNATTANTSRPLKSSGTRLLLAGMFCRSMAVSKVCRRQ

SEQ ID NO: 76036 - protein, 415 aa, Homo sapiens
MQNSHSGVNQLGGVFVNGRPLPDSTRQKIVELAHSGARPCDISRILQTHADAKVQVLDNQNVSNGCVSKILGRYYETGSIRPRAIGGSKPRVATPEVVSKIAQYKRECPSIFAWEIRDRLLSEGVCTNDNIPSVSSINRVLRNLASEKQQMGADGMYDKLRMLNGQTGSWGTRPGWYPGTSVPGQPTQDGCQQQEGGGENTNSISSNGEDSDEAQMRLQLKRKLQRNRTSFTQEQIEALEKEFERTHYPDVFARERLAAKIDLPEARIQVWFSNRRAKWRREEKLRNQRRQASNTPSHIPISSSFSTSVYQPIPQPTTPVSSFTSGSMLGRTDTALTNTYSALPPMPSFTMANNLPMQVSAAGGGLHNPGPREVRSGSGPADLIGCVCTLESFSHYSDWLDQSSRRQSIPSLLSD

SEQ ID NO: 76037 - protein, 22 aa, Homo sapiens
MEGDSYHNATTVNGTPVNHQPL

SEQ ID NO: 76038 - protein, 165 aa, Homo sapiens
MADGVDHIDIYADVGEEFNQEAEYGGHDQIDLYDDVISPSANNGDAPEDRDYMDTLPPTVGDDVGKGAAPNVVYTYTGKRIALYIGNLTWWTTDEDLTEAVHSLGVNDILEIKFFENRANGQSKGTFHHSKKEPCTWLAVTPISSLPICWQLLTCSGYACSGHFI

SEQ ID NO: 76039 - protein, 150 aa, Homo sapiens
MWDNISCWPSSVPGRMVEVECPRFLRMLTSRNGSLFRNCTQDGWSETFPRPNLACGVNVNDSSNEKRHSYLLKLKVMYTVGYSSSLVMLLVALGILCAFRRLHCTRNYIHMHLFVSFILRALSNFIKDAVLFSSDDVTYCDAHRAGCKLV

SEQ ID NO: 76040 - protein, 621 aa, Homo sapiens
GAVCAQPCPPGTFGQNCSQDCPCHHGGQCDHVTGQCHCTAGYMGDRCQEECPFGSFGFQCSQHCDCHNGGQCSPTTGACECEPGYKGPRCQERLCPEGLHGPGCTLPCPCDADNTISCHPVTGACTCQPGWSGHHCNESCPVGYYGDGCQLPCTCQNGADCHSITGGCTCAPGFMGEVCAVSCAAGTYGPNCSSICSCNNGGTCSPVDGSCTCKEGWQGLDCTLPCPSGTWGLNCNESCTCANGAACSPIDGSCSCTPGWLGDTCELPCPDGTFGLNCSEHCDCSHADGCDPVTGHCCCLAGWTGIRCDSTCPPGRWGPNCSVSCSCENGGSCSPEDGSCECAPGFRGPLCQRICPPGFYGHGCAQPCPLCVHSSRPCHHISGICECLPGFSGALCNQVCAGGYFGQDCAQLCSCANNGTCSPIDGSCQCFPGWIGKDCSQACPPGFWGPACFHACSCHNGASCSAEDGACHCTPGWTGLFCTQRKPHLLASQPLRIPCCGLLATVGIVQTSREGGMQAAPGLVVPDSCPTRTEELCRGSSRPDWIQGIDKPKVLEGQGCKAAQQHFLGRTVGAYASVRMAPAVTTSVASAPAAQASPGNTVSRDVPQEPLAMGVSSYVSA

SEQ ID NO: 76041 - protein, 44 aa, Homo sapiens
MVSAAAPSLLILLLLLLGSVPATDARSVPLKATFLEDVAGSGEA

SEQ ID NO: 76042 - protein, 131 aa, Homo sapiens
MLQQLLITLPTEASTWVKLRHPKAATERVALWEDVTKMFKAEGTVNLQGRICGLHSGGVGAAGPCSPESVPGGDAGELWEPGLSGMSAFQTWRDFPVGERRRTMADGERYFRSSKFRLEEQNKNQRVSLTE

SEQ ID NO: 76043 - protein, 292 aa, Homo sapiens
MASTDYSTYSQAAAQQGYSAYTAQPTQGYAQTTQQAYGQQSYGTYGQPTDVSYTQAQTTATYGQTAYATSYGQPPTGYTTPTAPQAYSQPVQGYGTGAYDTTTATVTTTQASYAAQSAYGTQPAYPAYGQQPAATAPTRPQDGNKPTETSQPQSSTGGYNQPSLGYGQSNYSYPQVPGSYPMQPVTAPPSYPPTSYSSTQPTSYDQSSYSQQNTYGQPSSYGQQSSYGQQSSYGQQPPTSYPPQTGSYSQAPSQYSQQSSSYGQQSSFRQDHPSSMGVYGQESGGFSGPGEN

SEQ ID NO: 76044 - protein, 85 aa, Homo sapiens
MGEEDYYLELCERPVQFEKANPVNCVFFDEANKQVFAVRSGGATGVVVKGPDDRNPISFRIFVILSLIIPSWNTHRSARLRMPTF

SEQ ID NO: 76045 - protein, 129 aa, Homo sapiens
MPYIDESPTMSPQLSARSQGGGDGVSPTPPEGLAPGVEAGKGLEMRKLVLSGFLASEEIYINQLEALLLPMKPLKATATTSQPVLTIQQIETIFYKIQDIYEIHKEFYDNLCPKVQQWDSQVTMGHLFQ

SEQ ID NO: 76046 - protein, 64 aa, Homo sapiens
MGEPAGVAGTMESPFSPGLFHRLDEDWDSALFAELGYFTDTDELQLEAANETKTILIILILIWI

SEQ ID NO: 76047 - protein, 202 aa, Homo sapiens
ILEVYSTKAKNYVNGHCTKYEPWQLIAWSVVWTLLIVWGYEFVFQPESLWSRFKKKCFKLTRKMPIIGRKIQDKLNKTKDDISKNMSFLKVDKEYVKALPSQGLSSSAVLEKLKEYSSMDAFWQEGRASGTVYSGEEKLTELLVKAYGDFAWSNPLHPDIFPGLRKIEAEIVRIACSLFNGGPDSCGCEALFLFCFSNMLAP

SEQ ID NO: 76048 - protein, 329 aa, Homo sapiens
CGNNYFQMTSCILSGSIQTTPQVSAGGSEAKPLIFTFVPTVRRLPTHTQLADTSKFLVKIPEESSDKSPETVNRSKSNDYLTLNAGSQQERDQAKLTCPSEVSGTILQEREFEANKLQGMQQSDLFKAEYVLIVDSEGEDEAASRKVEQGPPGGIGTAAVRPKSLAISSSLVSDVVRPKTQGTDLKTSSHPEMLHGMAPQQKHGQALDEPAKTESVSKDNTLEPPVETPTTLPRAAGRETKYANLSSPSSTVSESQLTKPGVIRPVPVKSRILLKKEEEVYEPNPFSKYLEDNSDLFSEQDVTVPPKPVSLHPLYQTKLYPPAKSLLHP

SEQ ID NO: 76049 - protein, 138 aa, Homo sapiens
MLFPTSAQESSRGLPDANDLCLGLQSLSLTGWDRPWSTQDSDSSAQSSTHSVKPSHFSTSALPVSVRGWSQRPFKDGGRVSDGPRASCSCCSHSLPNQCFKEMARSFCVAILGPPRSSQRPLQHRERGQAAPTSCSCE

SEQ ID NO: 76050 - protein, 61 aa, Homo sapiens
MDSVMPSQEPPVDDKNEDADLPSEETDGIAYISSSRKHDSIKDDSEDLKPVIDGMDGIKIS

SEQ ID NO: 76051 - protein, 25 aa, Homo sapiens
MMAIRELKVCLLGGIFYDQNCALWK

SEQ ID NO: 76052 - protein, 185 aa, Homo sapiens
  MOD_RES (1)..(1): Any amino acid
XESTSCLSEEQLKCLLDECILKQKSIIKLSSERKKEDIEDVTPVFPQLSRSIISKLLNESETKVQKTEVEDADMLESEECEASKGYYLTKALTGHNMSEALVTEAENMKCLQFSKDVIISDTKDYFMSKTLGIGRLKRPSFLDDPLYGISVSLSSEDQHLKLSSPENTIADEQETKDAAEECKEP

SEQ ID NO: 76053 - protein, 39 aa, Homo sapiens
  MOD_RES (1)..(1): Any amino acid
XVKPYTLALAFKEQICLQVPVNENDMKVDEVLYEDSSTA

SEQ ID NO: 76054 - protein, 479 aa, Homo sapiens
MWRLPRALCVHAAKTSKLSGPWSRPAAFMSTLLINQPQYAWLKELGLREENEGVYNGSWGGRGEVITTYCPANNEPIARVRQASVADYEETVKKAREAWKIWADIPAPKRGEIVRQIGDALREKIQVLGSLVSLEMGKILVEGVGEVQEYVDICDYAVGLSRMIGGPILPSERSGHALIEQWNPVGLVGIITAFNFPVAVYGWNNAIAMICGNVCLWKGAPTTSLISVAVTKIIAKVLEDNKLPGAICSLTCGGADIGTAMAKDERVNLLSFTGSTQVGKQVGLMVQERFGRSLLELGGNNAIIANVLYGPLHTKQAVSMFLGAVEEAKKEGGTVVYGGKVMDRPGNYVEPTIVTGLGHDASIAHTETFAPILYVFKFKNEEEVFAWNNEVKQGLSSSIFTKDLGRIFRWLGPKGSDCGIVNVNIPTSGAEIGGAFGGEKHTGGGRESGSDAWKQYMRRSTCTINYSKDLPLAQGIKFQ

SEQ ID NO: 76055 - protein, 103 aa, Homo sapiens
MRSMKALQKALSRAGSHCGRGGWGHPSRSPLLGGGVRHHLSEAAAQGRETPHSHQPQHQDQWQPTSLSWPSQTQTCGVSPCALWMVNGTLWATQRSPSACSPV

SEQ ID NO: 76056 - protein, 46 aa, Homo sapiens
MDSVRSGAFGHLFRPDNFIFGQSGAGNNWAKGHYTEGAELVDSVLD

SEQ ID NO: 76057 - protein, 148 aa, Homo sapiens
MLSDGCGSEEKISVPSCYGGIGAPVSRQVPASHDSELMAFMTRKLWDLEQQVKAQTDEILSKDQKIAALEDLVQTLRPHPAEATLQRQEELETMCVQLQRQVREMERFLSDYGLQWVGEPMDQEDSESKTVSEHGERDWMTAKKFWKP

SEQ ID NO: 76058 - protein, 736 aa, Homo sapiens
MEEEDLSFLYKSSPGRKHQGTVKRRQEEDHFQFPDMADGGYPNKIKRPCLEDVTLAMGPGAHPSTACAELQVPPLTINPSPAAMGVAGQSLLLENNPMNGNIMGSPFVVPQTTEVGLKGPTVPYYEKINSVPAVDQELQELLEELTKIQDPSPNELDLEKILGTKPEEPLVLDHPQATLSTTPKPSVQMSHLESLASSKEFASSCSQVTGMSLQIPSSSTGISYSIPSTSKQIVSPSSSMAQSKSQVQAMLPVALPPLPVPQWHHAHQLKALAASKQGSATKQQGPTPSWSGLPPPGLSPPYRPVPSPHPPPLPLPPPPPPFSPQSLMVSCMSSNTLSGSTLRGSPNALLSSMTSSSNAALGPAMPYAPEKLPSPALTQQPQFGPQSSILANLMSSTIKTPQGHLMSALPASNPGPSPPYRPEKLSSPGLPQQSFTPQCSLIRSLTPTSNLLSQQQQQQQQQQQANVIFKPISSNSSKTLSMIMQQGMASSSPGATEPFTFGNTKPLSHFVSEPGPQKMPSMPTTSRQPSLLHYLQQPTPTQASSATASSTATATLQLQQQQQQQQQQPDHSSFLLQQMMQQPQRFQRSVASDSMPALPRQGCCHLFAWTSAASSVKPQHQHGNSFTSRQDPQPGDVSPSNITHVDKACKLGEARHPQVSLGRQPPSCQALGSESFLPGSSFAHELARVTSSYSTSEAAPWGSWDPKAWRQVPAPLLPSCDATARGTEIRSYGNDP

SEQ ID NO: 76059 - protein, 109 aa, Homo sapiens
  MOD_RES (1)..(1): Any amino acid
XIPHATFKAMAYKEGTMLNCECKRGFRRIKSGSLYMLCTGNSSHSSWDNQCQCTSSATRNTTKQVTPQPEEQKERKTTEMQSPMQPVDQASLPDFQIQTEMAATMETSI

SEQ ID NO: 76060 - protein, 329 aa, Homo sapiens
MKQRFSALQLLKLLLLLQPPLPRALREALCPEPCNCVPDGALRCPGPTAGLTRLSLAYLPVKVIPSQAFRGLNEVIKIEISQIDSLERIEANAFDNLLNLSEILIQNTKNLRYIEPGAFINLPRLKYLSICNTGIRKFPDVTKVFSSESNFILEICDNLHITTIPGNAFQGMNNESVTLKLYGNGFEEVQSHAFNGTTLTSLELKENVHLEKMHNGAFRGATGPKTLDISSTKLQALPSYGLESIQRLIATSSYSLKKLPSRETFVNLLEATLTYPSHCCAFRNLPTKEQNFSHSISENFSKQCESTVRKVNNKTLLLHGALSAAHSLS

SEQ ID NO: 76061 - protein, 134 aa, Homo sapiens
MPSAEAKLKKNRCANCFDCPGCMHTLSTRATSISTQLPDDPAKTTMKKAYYLACGFCRWTSRDVGMADKSVASGGWQEPENPHTQRMNKLIEYYQQLAQKEKVERDRKKLARRRNYMPLAFSDKYGLGTRLQRP

SEQ ID NO: 76062 - protein, 100 aa, Homo sapiens
MVGEDADLPCHLFPTMSAETMELRWVSSSLRQVVNVYADGKEVEDRQSAPYRGRTSILRDGITAGKAALRIHNVTASDSGKYLCYFQDGDFYEKALVELK

SEQ ID NO: 76063 - protein, 796 aa, Homo sapiens
MAQEAPQEDTSPMALMDKGENELTGSASEESQETTTSTIITTTVITTEQAPALCSVSFSNPEGYIDSSDYPLLPLNNFLECTYNVTVYTGYGVELQVKSVNLSDGELLSIRGVDGPTLTVLANQTLLVEGQVIRSPTNTISVYFRTFQDDGLGTFQLHYQAFMLSCNFPRRPDSGDVTVMDLHSGGVAHFHCHLGYELQGAKMLTCINASKPHWSSQEPICSAPCGGAVHNATIGRVLSPSYPENTNGSQFCIWTIEAPEGQKLHLHFERLLLHDKDRMTVHSGQTNKSALLYDSLQTESVPFEGLLSEGNTIRIEFTSDQARAASTFNIRFEAFEKGHCYEPYIQNGNFTTSDPTYNIGTIVEFTCDPGHSLEQGPAIIECINVRDPYWNDTEPLCRAMCGGELSAVAGVVLSPNWPEPYVEGEDCIWKIHVGEEKRIFLDIQFLNLSNSDILTIYDGDEVMPHILGQYLGNSGPQKLYSSTPDLTIQFHSDPAGLIFGKGQGFIMNYIEVSRNDSCSDLPEIQNGWKTTSHTELVRGARITYQCDPGYDIVGSDTLTCQWDLSWSSDPPFCEKIMYCTDPGEVDHSTRLISDPVLLVGTTIQYTCNPGFVLEGSSLLTCYSRETGTPIWTSRLPHCVSEESLACDNPGLPENGYQILYKRLYLPGESLTFMCYEGFELMGEVTIRCILGQPSHWNGPLPVCKVNQDSFEHALEAEAAAETSLEGGNMALAIFIPVLIISLLLGGAYIYITRCRYYSNLRLPLMYSHPYSQITVETEFDNPIYETGETREYEVSI

SEQ ID NO: 76064 - protein, 129 aa, Homo sapiens
  MOD_RES (1)..(1): Any amino acid
XIGELLWGQFISAIPTRSLKFLKEAGHGTTKEEITKDAEGLDEIDHAEMELRRGQILWFRGLNRIQTQIDVINTFQTGASFKGVLRRQNMGQHLDVKLVPSSSYVAVAPVKSSPTTSVPAVSSPPMGSE

SEQ ID NO: 76065 - protein, 115 aa, Homo sapiens
MARRGPGWRPLLLLVLLAGAAQGGLYFRRGQTCYRPLRGDGLAPLGRSGSAQELGLAQCGWCQLCQHHPEPAHPPILRLLLGPRQHQRYGGSDQHQEEGSVALHPPVRAERHRLR

SEQ ID NO: 76066 - protein, 70 aa, Homo sapiens
MSARTAPFSWSGGKLRPKDQETLASGHTSWKALLFVAAARARRLGGAAASEPSAGSEAASPKSVQAPSGA

SEQ ID NO: 76067 - protein, 107 aa, Homo sapiens
MTHLNSLDVQLAQELGDFTDDDLDVVFTPKECRTLQPSLPEEGVELDPHVRDCVQTYIREWLIVNRKNQGSPEICGFKKTGSRKDFHKTLPKQTFESETLECSEPAA

SEQ ID NO: 76068 - protein, 402 aa, Homo sapiens
MPLQLLLLLILLGPGNSLQLWDTWADEAEKALGPLLARDRRQATEYEYLDYDFLPETEPPEMLRNSTDTTPLTGPGTPESTTVEPAARRSTGLDAGGAVTELTTELANMGNLSTDSAAMEIQTTQPAATEAQTTPLAATEAQTTRLTATEAQTTPLAATEAQTTPPAATEAQTTQPTGLEAQTTAPAAMEAQTTAPAAMEAQTTPPAAMEAQTTQTTAMEAQTTAPEATEAQTTQPTATEAQTTPLAAMEALSTEPSATEALSMEPTTKRGLFIPFSVSSVTHKGIPMAASNLSVNYPVGAPDHISVKQCLLAILILALVATIFFVCTVVLAVRLSRKGHMYPVRNYSPTEMVCISSLLPDGGEGPSATANGGLSKAKSPGLTPEPREDREGDDLTLHSFLP

SEQ ID NO: 76069 - protein, 54 aa, Homo sapiens
MRLPWELLVLQSFILCLADDSTLHGPIFIQEPSPVMFPLDSEEKKVKLNCEVKG

SEQ ID NO: 76070 - protein, 32 aa, Homo sapiens
MENGTQILRPTQDPSECTKEVKSLMWVYVLVG

SEQ ID NO: 76071 - protein, 208 aa, Homo sapiens
  MOD_RES (1)..(1): Any amino acid
XDELTRAYQFDIAKQTWHIQSNNQPPQPPVPPLGYVSGALISDLETDVADDDADDEEEALEIPRPLRALDQTPGSSMDNLDSSVTGKAFTSSQRPRPTSPFSTDSNTSAALSQSQRPRPTKKHKGGRMDQQPALPHRREGMTDEEALVPYSKPSFPSPGGHSSSGTASSKGSTGPRKTEVLRAGHQRNASDLLDIGYMGSNSQGQFTE

SEQ ID NO: 76072 - protein, 50 aa, Homo sapiens
MSDFVESEAEESEEEYNDEGEVVPRVTKKFVEEEDDDEEEEEENLDDQDE

SEQ ID NO: 76073 - protein, 70 aa, Homo sapiens
MQQAPQPYEFFSEENSPKWRGLLVSALRKKCKAWFSSIVLLMSCYSIYGFRNKCIPLSQLMKSLSIILKS

SEQ ID NO: 76074 - protein, 168 aa, Homo sapiens
MKGRIELGDVTPHNIKQLKRLNQVIFPVSYNDKFYKDVLEVGELAKLAYFNDIAVGAVCCRVDHSQNQKRLYIMTLGCLAPYRRLGIGTKMLNHVLNICEKDGTFDNIYLHVQISNESAIDFYRKFGFEIIETKKNYYKRIEPADAHVLQKNLKVPSGQNADVQKTDN

SEQ ID NO: 76075 - protein, 175 aa, Homo sapiens
MRRLNRKKTLSLVKELDAFPKVPESYVETSASGGTVSLIAFTTMALLTIMEFSVYQDTWMKYEYEVDKDFSSKLRINIDITVAMKCQYVGADVLDLAETMVASADGLVYEPTVFDLSPQQKEWQRMLQLIQSRLQEEHSLQDVIFKSAFKSTSTALPPREDDSSQSPNACRIHGH

SEQ ID NO: 76076 - protein, 91 aa, Homo sapiens
MGFSLSKSATQVSAIHMDSKVDDHLIRGTEKSRLEPATQLFQNTKKIRLEDTNQENFTRIEGTGTGSLSGKALGSVVYVKESDGLEMTDVE

SEQ ID NO: 76077 - protein, 399 aa, Homo sapiens
MIPTFTALLCLGLSLGPRTHMQAGPLPKPTLWAEPGSVISWGNSVTIWCQGTLEAREYRLDKEESPAPWDRQNPLEPKNKARFSIPSMTEDYAGRYRCYYRSPVGWSQPSDPLELVMTGAYSKPTLSALPSPLVTSGKSVTLLCQSRSPMDTFLLIKERAAHPLLHLRSEHGAQQHQAEFPMSPVTSVHGGTYRCFSSHGFSHYLLSHPSDPLELIVSGSLEGPRPSPTRSVSTAGPEDQPLMPTGSVPHSGLRRHWEVLIGVLVVSILLLSLLLFLLLQHWRQGKHRTLAQRQADFQRPPGAAEPEPKDGGLQRRSSPAADVQGENFCAAVKNTQPEDGVEMDTRQSPHDEDPQAVTYAKVKHSRPRREMASPPSPLSGEFLDTKDRQAEEDRQMDTE

SEQ ID NO: 76078 - protein, 95 aa, Homo sapiens
MDHHCPWVNNCVGENNQKYFVLFTMYIALISLHALIMVGFHFLHCFEEDWTKCSSFSPPTTVILLILLCFEGLLFLIFTSVMFGTQVHSICTDET

SEQ ID NO: 76079 - protein, 156 aa, Homo sapiens
MQHRGFLLLTLLALLALTSAVAKKKDKVKKGGPGSECAEWAWGPCTPSSKDCGVGFREGTCGAQTQRIRCRVPCNWKKEFGADCKYKFENWGACDGGTGTKVRQGTLKKARYNAQCQETIRVTKPCTPKTKAKAKGQRKEKGVGLSRGAAPPPPRL

SEQ ID NO: 76080 - protein, 33 aa, Homo sapiens
MVYYPELFVWVSQEPFPNKDMEGRLPKGRLPVP

SEQ ID NO: 76081 - protein, 678 aa, Homo sapiens
VHDQVLPTPNASSRVIVHVDLDCFYAQVEMISNPELKDKPLGVQQKYLVVTCNYEARKLGVKKLMNVRDAKEKCPQLVLVNGEDLTRYREMSYKVTEMVEKRLQQLQSDELSAVTVSGHVYNNQSINLLDVLHIRLLVGSQIAAEMREAMYNQLGLTGCAGVASNKLLAKLVSGVFKPNQQTVLLPESCQHLIHSLNHIKEIPGIGYKTAKCLEALGINSVRDLQTFSPKILEKELGISVAQRIQKLSFGEDNSPVILSGPPQSFSEEDSFKKCSSEVEAKNKIEELLASLLNRVCQDGRKPHTVRLIIRRYSSEKHYGRESRQCPIPSHVIQKLGTGNYDVMTPMVDILMKLFRNMVNVKMPFHLTLLSVCFCNLKALNTAKKGLIDYYLMPSLSTTSRSGKHSFKMKDTHMEDFPKDKETNRDFLPSGRIESTRTRESPLDTTNFSKEKDINEFPLCSLPEGVDQEVFKQLPVDIQEEILSGKSREKFQGKGSVSCPLHASRGVLSFFSKKQMQDIPINPRDHLSSSKQVSSVSPCEPGTSGFNSSSSSYMSSQKDYSYYLDNRLKDERISQGPKEPQGFHFTNSNPAVSAFHSFPNLQSEQLFSRNHTTDSHKQTVATDSHEGLTENREPDSVDEKITFPSDIDPQVFYELPEAVQKELLAEWKRAGSDFHIGHK

SEQ ID NO: 76082 - protein, 165 aa, Homo sapiens
MARLHEHLKYFVNMKISTDKSWQGVTIYFSGHETPGEGEHKIMEFIRSEKAKPDHDPNTRHCLYGLDADLIMLGLTSHEAHFSLLREEVRFGGKKTQRVCAPEETTFHLLHLSLMREYIDYEFSVLKEKITFKYDIERIIDDWILMGFLVGNDFIPHLPHLHINH

SEQ ID NO: 76083 - protein, 167 aa, Homo sapiens
MHRRGVGAGAIAKKKLAEAKYKERGTVLAEDQLAQMSKQLDMFKTNLEEFASKHKQEIRKNPEFRVQFQDMCATIGVDPLASGKGFWSEMLGVGDFYYELGVQIIEVCLALKHRNGGLITLEELHQQVLKGRGKFAQDVSQLERSGTISAHCNLRLLGSNDSSASAS

SEQ ID NO: 76084 - protein, 84 aa, Homo sapiens
MFPVFPCTLLAPPFPVLGLDSRGVGGLMNSFPPPQGHAQNPLQVGAELQSRFFASQGCAQSPFQAGSPQQSRQTSALNRTALQM

SEQ ID NO: 76085 - protein, 140 aa, Homo sapiens
MQFGELLAAVRKAQANVMLFLEEKEQAALSQANGIKAHLEYRSAEMEKSKQELERMAAISNTVQFLEMRMTSRLTRTQHTSISGCRRRTARSPTPRPGSIPTRTSPAGSCTGGRCCPSRVCTCTGTILRWRSSGQAPMLA

SEQ ID NO: 76086 - protein, 381 aa, Homo sapiens
MPHKIGFVVVSSSGHEDGFSARELMIHAPTVSGWRSPRFCQFPQEIVLQMVERCRIRKLQLLAHQYMISSKIEFYISESLPEYFAPYQAERFRRLGYVSLCDNEKTGCKARELKSVYVDAVGQFLKLIFHQNHVNKYNIYNQVALVAINIIGDPADFSDESNTASREKLIDHYLGHNSEDPALEGTYARKSDYISPLDDLAFDMYQDPEVAQIIRKLDERKREAVQKERYDYAKKLKQAIADLQKVGERLGRYEVEKRCAVEKEDYDLAKEKKQQMEQYRAEVYEQLELHSLLDAELMRRPFDLPLQPLARSGSPCHQKPMPSLPQLEERGTENQFAEPFLQEKPSSYSLTISPQHSAVDPLLPATDPHPKINVGRVPALR

SEQ ID NO: 76087 - protein, 26 aa, Homo sapiens
MAPEATKNFLPLLDAVSRDFVSVLHR

SEQ ID NO: 76088 - protein, 25 aa, Homo sapiens
MSQGSVSFKDVTVDFTQEEWQQLDP

SEQ ID NO: 76089 - protein, 467 aa, Homo sapiens
MAQALPWLLLWMGAGVLPAHGTQHGIRLPLRSGLGGAPLGLRLPRETDEEPEEPGRRGSFVEMVDNLRGKSGQGYYVEMTVGSPPQTLNILVDTGSSNFAVGAAPHPFLHRYYQRQLSSTYRDLRKGVYVPYTQGKWEGELGTDLVSIPHGPNVTVRANIAAITESDKFFINGSNWEGILGLAYAEIARPDDSLEPFFDSLVKQTHVPNLFSLQLCGAGFPLNQSEVLASVGGSMIIGGIDHSLYTGSLWYTPIRREWYYEVIIVRVEINGQDLKMDCKETEKFPDGFWLGEQLVCWQAGTTPWNIFPVISLYLMGEVTNQSFRITILPQQYLRPVEDVATSQDDCYKFAISQSSTGTVMGAVIMEGFYVVFDRARKRIGFAVSACHVHDEFRTAAVEGPFVTLDMEDCGYNIPQTDESTLMTIAYVMAAICALFMLPLCLMVCQWRCLRCLRQQHDDFADDISLLK

SEQ ID NO: 76090 - protein, 202 aa, Homo sapiens
MPKNSKVVKRELDDDVTESVKDLLSNEDAADDAFKTSELIVDGQEEKDTDVEEGSEVEDERPAWNSKLQYILAQVGFSVGLGNVWRFPYLCQKNGGGAYLLPYLILLMVIGIPLFFLELSVGQRIRRGSIGVWNYISPKLGGIGFASCVVCYFVALYYNVIIGWSLFYFSQSFQQPLPWDQCPLVKNASHTCKICIIQCFGI

SEQ ID NO: 76091 - protein, 138 aa, Homo sapiens
MSMILSASVIRVRDGLPLSASTDYEQSTGMQECRKYFKMLSRKLAQLPDRCTLKTGHYNINFISSLGVSYMMLCTENYPNVLAFSFLDELQKEFITTYNMMKTNTAVRPYCFIEFDNFIQRTKQRYNNPRSLSTKINL

SEQ ID NO: 76092 - protein, 332 aa, Homo sapiens
MPGKHQHFQEPEVGCCGKYFLFGFNIVFWVLGALFLAIGLWAWGEKGVLSNISALTDLGGLDPVWLFVVVGGVMSVLGFAGCIGALRENTFLLKFFSVFLGLIFFLELATGILAFVFKDWIRDQLNLFINNNVKAYRDDIDLQNLIDFAQEYWSCCGARGPNDWNLNIYFNCTDLNPSRERCGVPFSCCVRDPAEDVLNTQCGYDVRLKLVRGELEQQGFIHTKGCVGQFEKWLQDNLIVVAGVFMGIALLQIFGICLAQNLVSDIKAVKANWSKWNDDFENHWLTPTISEVLSTAGPQQNSLTGAPGPAPPSRHVFFGLGGLYPEPTFKNW

SEQ ID NO: 76093 - protein, 746 aa, Homo sapiens
MLMTLEMTELTDPHHTMGDYKVAHPQDPHHPSEKPVIHCHKCGEPCKGEVLRVQTKHFHIKCFTCKVCGCDLAQGGFFIKNGEYLCTLDYQRMYGTRCHGCGEFVEGEVVTALGKTYHPNCFACTICKRPFPPGDRVTFNGRDCLCQLCAQPMSSSPKETTFSSNCAGCGRDIKNGQALLALDKQWHLGCFKCKSCGKVLTGEYISKDGAPYCEKDYQGLFGVKCEACHQFITGKVLEAGDKHYHPSCARCSRCNQMFTEGEEMYLQGSTVWHPDCKQSTKTEEKLRLPNIRRSSSDFFYSKSLIRRTGRSPSLQPTRTSSESIYSRPGSSIPGSPGHTIYAKVDNEILDYKDLAAIPKVKAIYDIERPDLITYEPFYTSGYDDKQERQSLGESPRTLSPTPSAEGYQDVRDRMIHRSTSQGSINSPVYSRHSYTPTTSRSPQHFHRPGNEPSSGRNSPLPYRPDSRPLTPTYAQAPKHFHVPDQGINIYRKPPIYKQHAALAAQSKSSEDIIKFSKFPAAQAPDPSETPKIETDHWPGPPSFAVVGPDMKRRSSGREEDDEELLRRRQLQEEQLMKLNSGLGQLILKEEMEKESRERSSLLASRYDSPINSASHIPSSKTASLPGYGRNGLHRPVSTDFAQYNSYGDVSGGVRDFQTLPDGHMPAMRMDRGVSMPNMLEPKIFPYEMLMVTNRGRNKILREVDRTRLERHLAPEVFREIFGMSIQEFDRLPLWRRNDMKKKAKLF

SEQ ID NO: 76094 - protein, 363 aa, Homo sapiens
MIRAAPPPLFLLLLLLLLLVSWASRGEAAPDQDEIQRLPGLAKQPSFRQYSGYLKGSGSKHLHYWFVESQKDPENSPVVLWLNGGPGCSSLDGLLTEHGPFLVQPDGVTLEYNPYSWNLIANVLYLESPAGVGFSYSDDKFYATNDTEVAQSNFEALQDFFRLFPEYKNNKLFLTGESYAGIYIPTLAVLVMQDPSMNLQGLAVGNGLSSYEQNDNSLVYFAYYHGLLGNRLWSSLQTHCCSQNKCNFYDNKDLECVTNLQEVARIVGNSGLNIYNLYAPCAGGVPSHFRYEKDTVVVQDLGNIFTRLPLKRMWHQALLRSGDKVRMDPPCTNTTAASTYLNNPYVRKALNIPEQLPQWDMCK

SEQ ID NO: 76095 - protein, 92 aa, Homo sapiens
  MOD_RES (1)..(1): Any amino acid
XLQWLMLLSNESALPHVHTVSYGDDEDSLSSAYIQRVNTELMKAAARGLTLLFASGDSGAGCWSVSGRHQFRPTFPASSGRHILPGTFPHHK

SEQ ID NO: 76096 - protein, 1746 aa, Homo sapiens
MDGVSSEANEENDNIERPVRRRHSSILKPPRSPLQDLRGGNERVQESNALRNKKNSRRVSFADTIKVFQTESHMKIVRKSEMEETETGENLLLIQNKKLEDNYCEITGMNTLLSAPIHTQMQQKEFSIIEHTRERKHANDQTVIFSDENQMDLTSSHTVMITKGLLDNPISEKSTKIDTTSFLANLKLHTEDSRMKKEVNFSVDQNTSSENKIDFNDFIKRLKTGKCSAFPDVPDKENFEIPIYSKEPNSASSTHQMHVSLKEDENNSNITRLFREKDDGMNFTQCHTANIQTLIPTSSETNSRESKGNDITIYGNDFMDLTFNHTLQILPATGNFSEIENQTQNAMDVTTGYGTKASGNKTVFKSKQNTAFQDLSINSADKIHITRSHIMGAETHIVSQTCNQDARILAMTPESIYSNPSIQGCKTVFYSSCNDAMEMTKCLSNMREEKNLLKHDSNYAKMYCNPDAMSSLTEKTIYSGEENMDITKSHTVAIDNQIFKQDQSNVQIAAAPTPEKEMMLQNLMTTSEDGKMNVNCNSVPHVSKERIQQSLSNPLSISLTDRKTELLSGENMDLTESHTSNLGSQVPLAAYNLAPESTSESHSQSKSSSDECEEITKSRNEPFQRSDIIAKNSLTDTWNKDKDWVLKILPYLDKDSPQSADCNQEIATSHNIVYCGGVLDKQITNRNTVSWEQSLFSTTKPLFSSGQFSMKNHDTAISSHTVKSVLGQNSKLAEPLRKSLSNPTPDYCHDKMIICSEEEQNMDLTKSHTVVIGFGPSELQELGKTNLEHTTGQLTTMNRQIAVKVEKCGKSPIEKSGVLKSNCIMDVLEDESVQKPKFPKEKQNVKIWGRKSVGGPKIDKTIVFSEDDKNDMDITKSYTIEINHRPLLEKRDCHLVPLAGTSETILYTCRQDDMEITRSHTTALECKTVSPDEITTRPMDKTVVFVDNHVELEMTESHTVFIDYQEKERTDRPNFELSQRKSLGTPTVICTPTEESVFFPGNGESDRLVANDSQLTPLEEWSNNRGPVEVADNMELSKSATCKNIKDVQSPGFLNEPLSSKSQRRKSLKLKNDKTIVFSENHKNDMDITQSCMVEIDNESALEDKEDFHLAGASKTILYSCGQDDMEITRSHTTALECKTLLPNEIAIRPMDKTVLFTDNYSDLEVTDSHTVFIDCQATEKILEENPKFGIGKGKNLGVSFPKDNSCVQEIAEKQALAVGNKIVLHTEQKQQLFAATNRTTNEIIKFHSAAMDEKVIGKVVDQACTLEKAQVESCQLNNRDRRNVDFTSSHATAVCGSSDNYSCLPNVISCTDNLEGSAMLLCDKDEEKANYCPVQNDLAYANDFASEYYLESEGQPLSAPCPLLEKEEVIQTSTKGQLDCVITLHKDQDLIKDPRNLLANQTLVYSQDLGEMTKLNSKRVSFKLPKDQMKVYVDDIYVIPQPHFSTDQPPLPKKGQSSINKEEVILSKAGNKSLNIIENSSAPICENKPKILNSEEWFAAACKKELKENIQTTNYNTALDFHSNSDVTKQVIQTHVNAGEAPDPVITSNVPCFHSIKPNLNNLNGKTGEFLAFQTVHLPPLPEQLLELGNKAHNDMHIVQATEIHNINIISSNAKDSRDEENKKSHNGAETTSLPPKTVFKDKVRRCSLGIFLPRLPNKRNCSVTGIDDLEQIPADTTDINHLETQPVSSKDSGIGSVAGKLNLSPSQYINEENLPVYPDEINSSDSINIETEEKNVGTRRRRYS

SEQ ID NO: 76097 - protein, 178 aa, Homo sapiens
MEEIYAKFVSQKISKTRWRPLPPGSLQTAETFATGSWDNETKLSVLQENYISLWSIGDFGNLDSDGGFEGDHQLLCDIRHHGDVMDLQFFDQERIVAASSTGCVTVFLHHPNNQTLSVNQQWTTAHYHTGPGSPSYSSAPCTGVVCNNPEIVTVGEDGRINLFRADHKEAVRTIDNAD

SEQ ID NO: 76098 - protein, 88 aa, Homo sapiens
MYHSLSETRHPLQPEEQEVGIDPLSSYSNKSGGDSNKNGRRTSSTLDSEGTFNSYRKEWEELFVNNNYLATIRQKGINGQLRSSRFRS

SEQ ID NO: 76099 - protein, 38 aa, Homo sapiens
MQPLLCLGNLEDARERTGTLLAQHPAWGRTRAKPGSPL

SEQ ID NO: 76100 - protein, 116 aa, Homo sapiens
MGPWGEPELLVWRPEAVASEPPVPVGLEVKLGALVLLLVLTLLCSLVPICVLRRPGANHEGSAPVPTARVHPGHGLLPGPGDGADHTGLQGAVRAVTSGGNKGSAGNSEWWAAALA

SEQ ID NO: 76101 - protein, 153 aa, Homo sapiens
MYEIYVETCGQNTENQVNPATFGKLVRLVFPDLGTRRLGTRGSARYHYDGICIKKSSFFYAQYCYLIGEKRYHSGDAIAFEKSTNYNSIIQQEATCEDHSPMKTDPVGSPLSEFRRCPFLEQEQAKKYSCNMMAFLADEYCNYCRDILRNVRN

SEQ ID NO: 76102 - protein, 1910 aa, Homo sapiens
MTTMLQKSDSNASFLRAARAGNLDKVVEYLKGGIDINTCNQNGLNALHLAAKEGHVGLVQELLGRGSSVDSATKKGNTALHIASLAGQAEVVKVLVKEGANINAQSQNGFTPLYMAAQENHIDVVKYLLENGANQSTATEDGFTPLAVALQQGHNQAVAILLENDTKGKVRLPALHIAARKDDTKSAALLLQNDHNADVQSKMMVNRTTESGFTPLHIAAHYGNVNVATLLLNRGAAVDFTARNGITPLHVASKRGNTNMVKLLLDRGGQIDAKTRDGLTPLHCAARSGHDQVVELLLERGAPLLARTKNGLSPLHMAAQGDHVECVKHLLQHKAPVDDVTLDYLTALHVAAHCGHYRVTKLLLDKRANPNARALNGFTPLHIACKKNRIKVMELLVKYGASIQAITESGLTPIHVAAFMGHLNIVLLLLQNGASPDVTNIRGETALHMAARAGQVEVVRCLLRNGALVDARAREEQTPLHIASRLGKTEIVQLLLQHMAHPDAATTNGYTPLHISAREGQVDVASVLLEAGAAHSLATKKGFTPLHVAAKYGSLDVAKLLLQRRAAADSAGKNGLTPLHVAAHYDNQKVALLLLEKGASPHATAKNGYTPLHIAAKKNQMQIASTLLNYGAETNIVTKQGVTPLHLASQEGHTDMVTLLLDKGANIHMSTKSGLTSLHLAAQEDKVNVADILTKHGADQDAHTKLGYTPLIVACHYGNVKMVNFLLKQGANVNAKTKNGYTPLHQAAQQGHTHIINVLLQHGAKPNATTANGNTALAIAKRLGYISVVDTLKVVTEEVTTTTTTITEKHKLNVPETMTEVLDVSDEEGDDTMTGDGGEYLRPEDLKELGDDSLPSSQFLDGMNYLRYSLEGGRSDSLRSFSSDRSHTLSHASYLRDSAVMDDSVVIPSHQVSTLAKEAERNSYRLSWGTENLDNVALSSSPIHSGFLVSFMVDARGGAMRGCRHNGLRIIIPPRKCTAPTRVTCRLVKRHRLATMPPMVEGEGLASRLIEVGPSGAQFLGPVIVEIPHFAALRGKERELVVLRSENGDSWKEHFCDYTEDELNEILNGMDEVLDSPEDLEKKRICRIITRDFPQYFAVVSRIKQDSNLIGPEGGVLSSTVVPQVQAVFPEGALTKRIRVGLQAQPMHSELVKKILGNKATFSPIVTLEPRRRKFHKPITMTIPVPKASSDVMLNGFGGDAPTLRLLCSITGGTTPAQWEDITGTTPLTFVNECVSFTTNVSARFWLIDCRQIQESVTFASQVYREIICVPYMAKFVVFAKSHDPIEARLRCFCMTDDKVDKTLEQQENFAEVARSRDVEVLEGKPIYVDCFGNLVPLTKSGQHHIFSFFAFKENRLPLFVKVRDTTQEPCGRLSFMKEPKSTRGLVHQAICNLNITLPIYTKESESDQEQEEEIDMTSEKNPQDEQERIEERLAYIADHLGFSWTELARELDFTEEQIHQIRIENPNSLQDQSHALLKYWLERDGKHATDTNLVECLTKINRMDIVHLMETNTEPLQERISHSYAEIEQTITLDHSEGFSVLQEELCTAQHKQKEEQAVSKESETCDHPPIVSEEDISVGYSTFQDGVPKTEGDSSATALFPQTHKEQVQQDFSGKMQDLPEESSLEYQQEYFVTTPGTETSETQKAMIVPSSPSKTPEEVSTPAEEEKLYLQTPTSSERGGSPIIQEPEEPSEHREESSPRKTSLVIVESADNQPETCERLDEDAAFEKELTEELGELEASSDEEAMVTTRVVRRRVIIQGDDMPEIPPETVTEEEYIDEHGHTVVKKVTRKIIRRYVSSEGTEKEEIMVQGMPQEPVNIEEGDGYSKVIKRVVLKSDTEQSEVTLCEPSILSSTSQFQAEPVEGRRVSKVVKTTVVLGERMEKHLGDSSLATDLPSAKDDFEEDNNE

SEQ ID NO: 76103 - protein, 239 aa, Homo sapiens
MDILDQGALQRLFKKYSFMAVIHFAGLKAVGESVQKPLDYYRVNLTGTIQLLEIMKAHGVKNLVFSSSATVYGNPQYLPLDEAHPTGGCTNPYGKSKFFIEEMIRDLCQADKTWNAVLLRYFNPTGAHASGCIGEDPQGIPNNLMPYVSQVAIGRREALNVFGNDYDTEDGTGVRDYIHVVDLAKGHIAALRKLKEQCGCRIPYKVVARREGDVAACYANPSLAQEELGWTAALGLDRM

SEQ ID NO: 76104 - protein, 801 aa, Homo sapiens
MNLQPIFWIGLISSVCCVFAQTDENRCLKANAKSCGECIQAGPNCGWCTNSVSKTFLQEGMPTSARCDDLEALKKKGCPPDDIENPRGSKDIKKNKNVTNRSKGTAEKLKPEDITQIQPQQLVLRLRSGEPQTFTLKFKRAEDYPIDLYYLMDLSYSMKDDLENVKSLGTDLMNEMRRITSDFRIGFGSFVEKTVMPYISTTPAKLRNPCTSEQNCTSPFSYKNVLSLTNKGEVFNELVGKQRISGNLDSPEGGFDAIMQVAVCGSLIGWRNVTRLLVFSTDAGFHFAGDGKLGGIVLPNDGQCHLENNMYTMSHYYDYPSIAHLVQKLSENNIQTIFAVTEEFQPVYKELKNLIPKSAVGTLSANSSNVIQLIIDAYNSLSSEVILENGKLSEGVTISYKSYCKNGVNGTGENGRKCSNISIGDEVQFEISITSNKCPKKDSDSFKIRPLGFTEEVEVILQYICECECQSEGIPESPKCHEGNGTFECGACRCNEGRVGRHCECSTDEVNSEDMDAYCRKENSSEICSNNGECVCGQCVCRKRDNTNEIYSGKFCECDNFNCDRSNGLICGGNGVCKCRVCECNPNYTGSACDCSLDTSTCEASNGQICNGRGICECGVCKCTDPKFQGQTCEMCQTCLGVCAEHKECVQCRAFNKGEKKDTCTQECSYFNITKVESRDKLPQPVQPDPVSHCKEKDVDDCWFYFTYSVNGNNEVMVHVVENPECPTGPDIIPIVAGVVAGIVLIGLALLLIWKLLMIIHDRREFAKFEKEKMNAKWDTGENPIYKSAVTTVVNPKYEGK

SEQ ID NO: 76105 - protein, 65 aa, Homo sapiens
MKLKEVDRTAMQAWSPAQNHPIYLATGTSAQQLDATFSTNASLEIFELDLSDPSLDMKSCATFSS

SEQ ID NO: 76106 - protein, 159 aa, Homo sapiens
MGSFRTSKMPKPAEAPTAPSPAQTLENSEPAPVSQLQSRLEPKPQPPVAEATPRSQEATEAAPSCVGDMADTPRDAGLKQAPASRNEKAPVDFGYVGIDSILEQMRRKAMKQGFEFNIMVVGQSGLGKSTLINTLFKSKISRKSVQPTSEERIPKTIEI

SEQ ID NO: 76107 - protein, 616 aa, Homo sapiens
MTRLDRSSHSGGGHAKGSRPLNSLLAGHRVAQPASAPGSRASVQDIDLIDILWRQDIDLGAGREVFDYSHRQKEQDVEKELRDGGEQDTWAGEGAEALARNLLVDGETGESFPAQFPADISSITEAVPSESEPPALQNNLLSPLLTGTESPFDLEQQWQDLMSIMEMQAMEVNTSASEILYSAPPGDPLSTNYSLAPNTPINQNVSLHQASLGGCSQDFLLFSPEVESLPVASSSTLLPLAPSNSTSLNSTFGSTNLTGLFFPPQLNGTANDTAGPELPDPLGGLLDEAMLDEISLMDLAIEEGFNPVQASQLEEEFDSDSGLSLDSSHSPSSLSSSEGSSSSSSSSSSSSSSASSSASSSFSEEGAVGYSSDSETLDLEEAEGAVGYQPEYSKFCRMSYQDPAQLSCLPYLEHVGHNHTYNMAPSALDSADLPPPSALKKGSKEKQADFLDKQMSRDEHRARAMKIPFTNDKIINLPVEEFNELLSKYQLSEAQLSLIRDIRRRGKNKMAAQNCRKRKLDTILNLERDVEDLQRDKARLLREKVEFLRSLRQMKQKVQSLYQEVFGRLRDENGRPYSPSQYALQYAGDGSVLLIPRTMADQQARRQERKPKDRRK

SEQ ID NO: 76108 - protein, 190 aa, Homo sapiens
MSREPTPPLPGDMSTGPIAESWCYTQVKVVKFSYMWTINNFSFCREEMGEVLKSSTFSSGPSDKMKWCLRVNPKGLDDESKDYLSLYLLLVSCPKSEVRAKFKFSLLNAKREETKAMESQRAYRFVQGKDWGFKKFIRRDFLLDEANGLLPDDKLTLFCENLQHCLQKRRKHCTTLPKELPPPPPLQVVL

SEQ ID NO: 76109 - protein, 52 aa, Homo sapiens
NNNLERALDWIFSHPEFEEDSDFVIEMENNANANIISEAKPEGPRVKDGSGI

SEQ ID NO: 76110 - protein, 122 aa, Homo sapiens
QDHGLRPRPRVAQDHQDERCGDLRLDGAGECWDPDPHGRPDFGSILKRLEVIEQSALFQMPLESFHSLQEDWKLEIQHMFDDLRTKEKALSIRSQSRPLQLWISGKDPMGPAPLQAPASSPG

SEQ ID NO: 76111 - protein, 713 aa, Homo sapiens
IGPPSPGDDEEEAAAAAGAPAAAGATGDLASAQLGGAPNRWEVLSATPTTIKDEAGNLVQIPSAATSSGQYVLPLQNLQNQQIFSVAPGSDSSNGTVSSVQYQVIPQIQSADGQQVQIGFTGSSDNGGINQESSQIQIIPGSNQTLLASGTPSANIQNLIPQTGQVQVQGVAIGGSSFPGQTQVVANVPLGLPGNITFVPINSVDLDSLGLSGSSQTMTAGINADGHLINTGQAMDSSDNSERTGERVSPDINETNTDTDLFVPTSSSSQLPVTIDSTGILQQNTNSLTTSSGQVHSSDLQGNYIQSPVSEETQAQNIQVSTAQPVVQHLQLQESQQPTSQAQIVQGITPQTIHGVQASGQNISQQALQNLQLQLNPGTFLIQAQTVTPSGQVTWQTFQVQGVQNLQNLQIQNTAAQQITLTPVQTLTLGQVAAGGAFTSTPVSLSTGQLPNLQTVTVNSIDSAGIQLHPGENADSPADIRIKEEEPDPEEWQLSGDSTLNTNDLTHLRVQVVDEEGDQQHQEGKRLRRVACTCPNCKEGGGRGTNLGKKKQHICHIPGCGKVYGKTSHLRAHLRWHSGERPFVCNWMYCGKRFTRSDELQRHRRTHTGEKKFVCPECSKRFMRSDHLAKHIKTHQNKKGIHSSSTVLASVEAARDDTLITAGGTTLILANIQQGSVSGIGTVNTSATSNQDILTNTEIPLQLVTVSGNETME

SEQ ID NO: 76112 - protein, 147 aa, Homo sapiens
MKLFQRSTPAITLESPDIKYPLRLIDREIISHDTRRFRFALPSPQHILGLPVGQHIYLSARIDGNLVVRPYTPISSDDDKGFVDLVIKVYFKDTHPKFPAGGKMSQYLESMQIGDTIEFRGPSGLLVYQGKGKFAIRPDKKSNPIIR

SEQ ID NO: 76113 - protein, 46 aa, Homo sapiens
LGVWFSLGCAYLALEDYQGSAKAFQRCVTLEPDVCAYSTVLFTETL

SEQ ID NO: 76114 - protein, 399 aa, Homo sapiens
MPLLGLLPRRAWASLLSQLLRPPCASCTGAVRCQSQVAEAVLTSQLKAHQEKPNFIIKTPKGTRDLSPQHMVVREKILDLVISCFKRHGAKGMDTPAFELKDFDIAGQFDPMIPDAECLKIMCEILSGLQLGDFLIKMAWKDVRHEMVVKKGLAPEVADRIGDYVQCHGGVSLVEQMFQDPRLSQNKQALEGLGDLKLLFEYLTLFGIADKISFDLSLARGLDYYTGVIYEAVLLQTPTQAGEEPLNVGSVAAGGRYDGLVGMFDPKGHKVPCVGLSIGVERIFYIVEQRMKTKGEKVRTTETQVFVATPQKNFLQERLKLIAELWDSGIKAEMLYKNNPKLLTQLHYCESTGIPLVVIIGEQELKEGVIKIRSVASREEVAIKRENFVAEIQKRLSES

SEQ ID NO: 76115 - protein, 542 aa, Homo sapiens
MWRVCARRAQNVAPWAGLEARWTALQEVPGTPRVTSRSGPAPARRNSVTTGYGGVRALCGWTPSSGATPRNRLLLQLLGSPGRRYYSLPPHQKVPLPSLSPTMQAGTIARWEKKEGDKINEGDLIAEVETDKATVGFESLEECYMAKILVAEGTRDVPIGAIICITVGKPEDIEAFKNYTLDSSAAPTPQAAPAPTPAATASPPTPSAQAPGSSYPPHMQVAAVPPTPQPLAPTPSAPCPATPAGPKGRVFVSPLAKKLAVEKGIDLTQVKGTGPDGRITKKDIDSFVPSKVAPAPAAVVPPTGPGMAPVPTGVFTDIPISNIRRVIAQRLMQSKQTIPHYYLSIDVNMGEVLLVRKELNKILEGRSKISVNDFIIKASALACLKVPEANSSWMDTVIRQNHVVDVSVAVSTPAGLITPIVFNAHIKGVETIANDVVSLATKAREGKLQPHEFQGGTFTISNLGMFGIKNFSAIINPPQACILAIGASEDKLVPADNEKGFDVASMMSVTLSCDHRVVDGAVGAQWLAEFRKYLEKPITMLL

SEQ ID NO: 76116 - protein, 46 aa, Homo sapiens
MEKSTDTDEDNVTRTEYSDKTTQFPSVYAVPGTEQTEAVGGLSSKP

SEQ ID NO: 76117 - protein, 140 aa, Homo sapiens
MGHPSPGHLCPAGPRDLGCCLFLTCPSPVSPVPLASCPSVSVVLVASATSIFHVSLRWPQALVLPLFLLLTLGHTPSPPICEFGGAGVIPRTDSMGRRPSCQAIPAGHTPMPARPVPQPRVLRRPCFLKGGSPWGPCPPA

SEQ ID NO: 76118 - protein, 28 aa, Homo sapiens
MKSCGKRFHDEVGKFRFLNELIKVVSPK

SEQ ID NO: 76119 - protein, 328 aa, Homo sapiens
MQPLPPPQTNHEEPSRSRNHKTAKLPAPSIDRSTKPPLDRSLAPFDREPFTLGKKPPFSDKPSIPAGRSLGEHLPKIQKPPLPPTTERHERSSPLPGKKPPVPKHGWGPDRRENDEDDVHQRPLPQPALLPMSSNTFPSRSTKPSPMNPLPSSHMPGAFSESNSSFPQSASLPPYFSQGPSNRPPIRAEGRNFPLPLPNKPRPPSPAEEENSLNEEWYVSYITRPEAEAALRKINQDGTFLVRDSSKKTTTNPYVLMVLYKDKVYNIQIRYQKESQVYLLGTGLRGKEDFLSVSDIIDYFRKMPLLLIDGKNRGSRYQCTLTHAAGYP

SEQ ID NO: 76120 - protein, 107 aa, Homo sapiens
MSGDTCLCPASGAKPKLSGFKGGGLGNKYVQLNVGGSLYYTTVRALTRHDTMLKAMFSGRMEVLTDKEGWILIDRCGKHFGTILNYLRDDTITLPQNRQEIKELMAE

SEQ ID NO: 76121 - protein, 194 aa, Homo sapiens
MEDLFETFQDEMGFSNMEDDGPEEEERVAEPQANFNTPQALRFEELLANLLNEQHQIAKELFEQLKMKKPSAKQQKEVEKVKPQCKEVHQTLILDPAQRKRLQQQMQQHVQLLTQIHLLATCNPNLNPEASSTRICLKELGTFAQSSIALHHQYNPKFQTLFQPCNLMGAMQLIEDFSTHVSIDCSPHKTVKKT

SEQ ID NO: 76122 - protein, 137 aa, Homo sapiens
MSKDLVTFGDVAVNFSQEEWEWLNPAQRNLYRKVMLENYRSLVSLGVSVSKPDVISLLEQGKEPWMVKKEGTRGPCPDWEYVFKNSEFSSKQETYEESSKVVTVGARHLSYSLDYPSLREDCQSEDWYKNQLGSQEV

SEQ ID NO: 76123 - protein, 190 aa, Homo sapiens
MTVPWRPGKRRITYKEEEDLTLQPRSCLQCSESLVGLQEGKSTEQGNHDQLKELYSAGNLTVLATDPLLHQDPVQLDFHFRLTSQTSAHWHGLLCDRRLFLDIPYQALDQGNRESLTATLEYVEEKTNVDSVFVNFQNDRNDRGALLRAFSYMGFEVVRPDHPALPPLDNVIFMVYPLERDVGHLPSEPP

SEQ ID NO: 76124 - protein, 265 aa, Homo sapiens
  MOD_RES (1)..(1): Any amino acid
XVRAGEAEESSAVCQVDAEQRSKAQEAEAGVLGNEKGKEAEGSLTEASLPEAQVASGAGAGAPRASSPEKAEEDRRLPGSQAPPALVSSSQSLLEWCQEVTTGYRGVRITNFTTSWRNGLAFCAILHRFYPDKIDYASLDPLNIKQNNKQAFDGFAALGVSRLLEPADMVLLSVPDKLIVMTYLCQIRAFCTGQELQLVQLEGGGGAGTYRVGSAQPSPPDDLDAGGLAQRLRGHGAEGPQEPKEAADRADGAAPGVASRNAVAG

SEQ ID NO: 76125 - protein, 136 aa, Homo sapiens
MFRKGKKRHSSSSSQSSEISTKSKSVDSSLGGLSRSSTVASLDTDSTKSSGQSNNNSDTCAEFRIKYVGAIEKLKLSEGKGLEGPLDLINYIDVAQQDGKLPFVPPEEEFIMGVSKYGIKVSTSDQYDVLHRHALY

SEQ ID NO: 76126 - protein, 72 aa, Homo sapiens
MKQLQVLLLENNPLQSPPAQICTKGKVHIFKYLSIQACQIKTADSLYLHTMERPHLHQHVEDGKKDSDSGVG

SEQ ID NO: 76127 - protein, 87 aa, Homo sapiens
MQALVLLLCIGALLGHSSCQNPASPPEEGSPDPDSTGALVEEEDPFFKVPVNKLAAAVSNFGYDLYRVRSSTSPTTNVLLSPLSVAT

SEQ ID NO: 76128 - protein, 29 aa, Homo sapiens
  MOD_RES (1)..(1): Any amino acid
XNAIPIKSWFSDPSDTALLNLLPMLDALR

SEQ ID NO: 76129 - protein, 104 aa, Homo sapiens
MNQSIPVAPTPPRRVRLKPWLVAQVNSCQYPGLQWVNGEKKLFCIPWRHATRHGPSQDGDNTIFKGLTLSPRLECSGLISAHCSLDLPGSGLGQGDREIHRRRG

SEQ ID NO: 76130 - protein, 149 aa, Homo sapiens
MQEAGGSHHKVSVSPVVHVRGLCESVVEADLVEALEKFGTICYVMMMPFKRQALVEFENIDSAKECVTFAADEPVYIAGQQAFFNYSTSKRITRPGNTDDPSGGNKVLLLSIQNPLYPITVDVLYTVCNPVGKVQRIVIFKRNGIQAMV

SEQ ID NO: 76131 - protein, 231 aa, Homo sapiens
MKTQPFPSSLFFPDQLMKRLAARCFAGLLILSPLTVISDSRPADSGKAIEDGNLEEMEEEVRLKKRKRRRNVDKDPAKEDVEKAKKRRGRPPAEKLSPNPPKLTKQMNAIIDTVINYKDSSGRQLSEVFIQLPSRKELPEYYELIRKPVDFKKIKERIRNHKYRSLGDLEKDVMLLCHNAQTFNLEGSQIYEDSIVLQSVFKSARQKIAKEEESEDESNEEEEEEDEEESE

SEQ ID NO: 76132 - protein, 70 aa, Homo sapiens
MTSRILLRQQLMREQMQEQERREQQQKLQAAQFMQQRVPVSQTPAINVSVPTTLPSATQVPMEVLKVQTH

SEQ ID NO: 76133 - protein, 33 aa, Homo sapiens
MHPDLSPHLHTEECNVLINLLKECHKNGDGSLQ

SEQ ID NO: 76134 - protein, 237 aa, Homo sapiens
  MOD_RES (1)..(1): Any amino acid
XRVPKYIFRHNDVSHLRELLQRSDPSVPKIVAFETVHSMDGKAFGCVGGYIASTSSLIDTVRSYAAGFIFTTSLPPMLLAGALESVRILKSAEGRVLRRQHQRNVKLMRQMLMDAGLPVVHCPSHIIPVRVADAAKNTEVCDELMSRHNIYVQAINYPTVPRGEELLRIAPTPHHTPQMMNYFLENLLVTWKQVGLELKPHSSAECNFCRRPLHFEVMSEREKSYFSGLSKLVSAQA

SEQ ID NO: 76135 - protein, 135 aa, Homo sapiens
MPALLPVASRLLLLPRVLLTMASGSPPTQPSPASDSGSGYVPGSVSAAFVTCPNEKVAKEIARAVVEKRLAACVNLIPQITSIYEWKGKIEEDSEVLMMIKTQSSLVPALTDFVRSVHPYEVAESCHDEPCSCSS

SEQ ID NO: 76136 - protein, 174 aa, Homo sapiens
MGAYKYIQELWRKKQSDVMRFLLRVRCWQYRQLSALHRAPRPTRPDKARRLGYKAKQGYVIYRIRVRRGGRKRPVPKGATYGKPVHHGVNQLKFARSLQSVAEERAGRHCGALRVLNSYWVGEDSTYKFFEVILIDPFHKAIRRNPDTQWITKPVHKHREMRGLTSAGRKSRGL

SEQ ID NO: 76137 - protein, 42 aa, Homo sapiens
QVLQRNLEQEQQQRGVRWPASRAAQSPSTPAACSPLASDFSP

SEQ ID NO: 76138 - protein, 709 aa, Homo sapiens
EIFHVDQSNYFLNFKKEVRNKIYSRLLSLHSPNSYYGSRSPQELFKASGLTQFPWILQDYTSEELDLNNPAVFRDLSKPIGVVNEKNAKAMREKYENFEDPMGTIDKFHYGTHYSNSAGVMHYLIRVEPFTTLHIQLQSGRFDCADRQFHSIPATWQALMDNPYDVKELIPEFFYFPEFLENQNQFNLGRLQISKELVNDVILPKWAKSAEDFIYKHRKALESEYVSAHLHEWIDLIFGYKQRGPAAVEALNVFYYCSYEGAVDLDALTDEKERKALEGMINNFGQTPCQLLKEPHPPRLSAEEAVQKPTKIDTSTLNLFQHLPELKSFFIEGISDGIPLLKATIPKNQYRSFMSQGSPELLITISMNYVIGTHGWLPYDRNISNYFTFIKDQTVTNPKTQRSINGSFAPGLEITSKLFVVSHDAKLLFSAGYWDNSIQVMSLTKGKIISHIIRHMDIVTCLATDYCGIHLISGSRDTTCMIWQITQQGGVPVGLASKPFQILYGHTNEVLSVGISTELDMAVSGSRDGTVIIHTIQKGQYMRTLRPPCESSLFLTIPNLAISWEGHIVVYSSTEEKTTLKDKNALHLFSINGKYLGSQILKEQVSDICIIGEHIVTGSIQGFLSIRDLHSLNLSINPLAMRLPIHCVCVTKEYSHILVGLEDGKLIVVGVGKPAEMRSGQLSRKFWGSSKRLSQISAGETEYNTQDSK

SEQ ID NO: 76139 - protein, 81 aa, Homo sapiens
MTQQGAALQNYNNELVKCIEELCQKREELCRQIQEEEDEKQRLQNEILESSQTLLSVLKREAGNLTKATAPDQKSSGGRDS

SEQ ID NO: 76140 - protein, 286 aa, Homo sapiens
MLHLHHSWTPNIDRLAEDGVKLTQHISAASLCTPSRAAFLTGRYPVRSGMVSSIGYRVLQWTGASGGLPTNETTFAKILKEKGYATGLIGKWHLGLNCESASDHCHHPLHHGFDHFYGMPFSLMGDCARWELSEKRVNLEQKLNFLFQVLALVALTLVAGKLTHLIPVSWMPVIWSALSAVLLLASSYFVGALIVHADCFLMRNHTITEQPMCFQRTTPLILQEVASFLKRNKHGPFLLFVSFLHVHIPLITMENFLGKSLHGLYGDNVEEMDWMDGSLTLWTWRV

SEQ ID NO: 76141 - protein, 196 aa, Homo sapiens
HPHVYSPVIQGNARMMAPPTHAQPGLVSSSATQYGAHEQTHAMYACPKLPYNKETSPSFYFAISTGSLAQQYAHPNATLHPHTPHPQPSATPTGQQQSQHGGSHPAPSPVQHHQHQAAQALHLASPQQQSAIYHAGLAPTPPSMTPASNTQSPQNSFPAAQQTVFTIHPSHVQPAYTNPPHMAHVPQVIPALANFL

SEQ ID NO: 76142 - protein, 222 aa, Homo sapiens
  MOD_RES (1)..(1): Any amino acid
XEIKLNDFCKASEVNISKLMFVPSASGYKAKNGIQEMDCCSLESDWIYFHPDASGRIIHVGPNQVKVLKLTEIENNSSQHQISEDFVILANRENHKNENVLTVTASGRVVKKSFNLLDDDPEQETFKIVDYEDELDLLSVVAVTQIDAEGKAHLDFHCNEYGTLLKSIPLVESWDVTYSHEVYFDRDLVLHIEQKPNRVFSCYVYQMICDTGEEEETINRSC

SEQ ID NO: 76143 - protein, 58 aa, Homo sapiens
MYTLLVGKPPFETSCLKETYLRIKKNEYSIPKHINPVAASLIQKMLQTDPTARPTINE

SEQ ID NO: 76144 - protein, 214 aa, Homo sapiens
MATWDEKAVTRRAKVAPAERMSKFLRHFTVVGDDYHAWNINYKKWENEEEEEEEEQPPPTPVSGEEGRAAAPDVAPAPGPAPRAPLDFRGMLRKLFSSHRFQVIIICLVVLDALLVLAELILDLKIIQPDKNNYAAMVFHYMSITILVFFMMEIIFKLFVFRLEFFHHKFEILDAVVVVVSFILDIVLLFQEHQFEALGLLILLRLWRVARIIN

SEQ ID NO: 76145 - protein, 248 aa, Homo sapiens
  MOD_RES (1)..(1): Any amino acid
XDAATGACRCPTGFLGTDCNLTCPQGRFGPNCTHVCGCGQGAACDPVTGTCLCPPGRAGVRCERGCPQNRFGVGCEHTCSCRNGGLCHASNGSCSCGLGWTGRHCELACPPGRYGAACHLECSCHNNSTCEPATGTCRCGPGFYGQACEHPCPPGFHGAGCQGLCWCQHGAPCDPISGRCLCPAGFHGHFCERDCRRGQFGPSCTLHCDCGGGADCDPVSGQCHCVDGYMGPTCREGGPLRLPENPSL

SEQ ID NO: 76146 - protein, 140 aa, Homo sapiens
MVSSCCGSVCSDQGCSQDLCQETCCRPSCCQTTCCRTTCYRPSCCVSSCCRPQCCQSVCCQPTCCRPTCCETTCCHPRCCISSCCRPSCCMSSCCKPQCCQSVCCQPTCCRPSCCRPCCCRPTCVISTCPRPLCCASSCC

SEQ ID NO: 76147 - protein, 217 aa, Homo sapiens
MKCEHCTRKECSKKTKTDDQENVSADAPSPAQENGEKGEFHKLADAKIFLSDCLACDSCMTAEEGVQLSQQNAKDFFRVLNLNKKCDTSKHKVLVVSVCPQSLPYFAAKFNLSVTDASRRLCGFLKSLGWVRYAERVLGRPITAHLCTAKSPQQVMGSLVKDYFARQQNLSPEKIFHVIVAPCYDKKLEALQESLPPALHGSRGADCVLTSGESQAW

SEQ ID NO: 76148 - protein, 142 aa, Homo sapiens
MAEDLSAATSYTEDDFYCPVCQEVLKTPVRTTACQHVFCRKCFLTAMRESGAHCPLCRGNVTRRERACPERALDLENIMRKFSGSCRCCAKQIKFYRMRHHYKSCKKYQDEYGVSSIIPNFQISQDSVGNSSSGHPTFKCPL

SEQ ID NO: 76149 - protein, 98 aa, Homo sapiens
MSRPSSVSPRQPAPGGGGGGGPSPCGPGGGGRAKGLKDIRIDEEVKIAVNIALERFRYGDQREMEFPSSLTSTERAFIHRLSQSLGLVSKSKGFLSSF

SEQ ID NO: 76150 - protein, 420 aa, Homo sapiens [sequence omitted]

SEQ ID NO: 76151 - protein, 186 aa, Homo sapiens
MGDAGSERSKAPSLPPRCPCGFWGSSKTMNLCSKCFAETGFCHVDQAGLELLSSSDPPASASQSAGITDFQKKQPDDDSAPSTSNSQSDLFSEETTSDNNNTSITTPTLSPSQQPLPTELNVTSPSKEECGPCTDTAHVSLITPTKRSCGTDSQSENEASPVKRPRLLENTERSEETSRSKQKSRR

SEQ ID NO: 76152 - protein, 111 aa, Homo sapiens
MEANQCPLVVEPSYPDLVINVGEVTLGEENRKKLQKIQRDQEKERVMRAACALLNSGGGVIRMAKKVEHPVEMGLDLEQSLRELIQSSDLQAFFETKQQGRCFYIFVKSWS

SEQ ID NO: 76153 - protein, 843 aa, Homo sapiens
MAAHVGSRCASRSSAGSSNTGTRSSATPGARGPGCWRETLTHSVTPARASCSSAPAARALPRKSEGATRTNGGGWKTTDMEGAHASLSLEDEVSGAGSRQRPLEGKGGETPAAEEPGSLKNYAVFATRDVSAAPEKEEEEAEGPLRAQDLRESYIQLVQGVQEWQDGCMYQGEFGLNMKLGYGKFSWPTGESYHGQFYRDHCHGLGTYMWPDGSSFTGTFYLSHREGYGTMYMKTRLFQTHCHNDIVNLLLDCGADVNKCSDEGLTALSMCFLLHYPAQSFKPNVAERTIPEPQEPPKFPVVPILSSSFMDTNLESLYYEVNVPSQGSYELRPPPAPLLLPRVSGSHEGGHFQDTGQCGGSIDHRSSSLKGDSPLVKGSLGHVESGLEDVLGNTDRGSLCSAETKFESNVCVCDFSIELSQAMLERSAQSHSLLKMASPSPCTSSFDKGTMRRMALSMIERRKRWRTIKLLLRRGADPNLCCVPMQVLFLAVKAGDVDGVRLLLEHGARTDICFPPQLSTLTPLHIAAALPGEEGVQIVELLLHAITDVDAKASDEDDTYKPGKLDLLPSSLKLSNEPGPPQAYYSTDTALPEEGGRTALHMACEREDDNKVVKELLTQGADPNLPLTKGLGSALCVACDLTYEHQRNMDSKLALIDRLISHGADILKPVMLRQGEKEAVGTAVDYGYFRFFQDRRIARCPFHTLMPAERETFLARKRLLEYMGLQLRQAVFAKESQWDPTWLYLCKRAELIPSHRMKKKGPSLPRGLDVKEQGQIPFFKFCYQCGRSIGVRLLPCPRCYGILTCSKYCKTKAWTEFHKKDCGDLVAIVTQLEQVSRRREEFQ

SEQ ID NO: 76154 - protein, 229 aa, Homo sapiens
MDAVAFEDVAVNFTQEEWALLGPSQKNLYRYVMQETIRNLDCIRMIWEEQNTEDQYKNPRRNLRCHMVERFSESKDSSQCGETFSLIRDSIVNNSICPGEDPCQSAECEEVIMGHLSLNSHIRVDSGHKPHEYQEYGEKPHTHKQRGKAFSYHHSFQSRGRPHTGKKRYECKECGKTFSSRRNLRRHMVVQGGNRPYKFPIEDMRECTLGRNRMNVSSVLKPCLIPVPI

SEQ ID NO: 76155 - protein, 45 aa, Homo sapiens
MPKLVKNLLGEMPLWVCQSCRKSMEEDERQTGREHAVAISLSHTS

SEQ ID NO: 76156 - protein, 64 aa, Homo sapiens
  MOD_RES (1)..(1): Any amino acid
XSGPFCGTISSKKKKKMMYLTTRNAVAEDDRNKKQLYESEISGGLIKGVGNFKSTFLTSELPLC

SEQ ID NO: 76157 - protein, 244 aa, Homo sapiens
MESAIAEGGASRFSASSGGGGSRGAPQHYPKTAGNSEFLGKTPGQNAQKWIPARSTRRDDNSAANNSANEKERHDAIFRKVRGILNKLTPEKFDKLCLELLNVGVESKLILKGVILLIVDKALEEPKYSSLYAQLCLRLAEDAPNFDGPAAEGQPGQKQSTTFRRLLISKLQDEFENRTRNVDVYDKRENPLLPEEEEQRAIAKIKMLGNIKFIGELGKLDLIHESILHKCIKTLLEKKKRVQL

SEQ ID NO: 76158 - protein, 125 aa, Homo sapiens
  MOD_RES (1)..(1): Any amino acid
XIMDTTVDVDKRVMETNYFGPVALTKALLPSMIKRRQGHIVAISSIQGKMSIPFRSAFMDTTTAQGRSPVEVAQDVLAAVGKKKKDVILADLLPSLAVYLRTLAPGLFFSLMASRARKERKSKNS

SEQ ID NO: 76159 - protein, 574 aa, Homo sapiens
MRSAAKPWNPAIRAGGHGPDRVRPLPAASSGMKSSKSSTSLAFESRLSRLKRASSEDTLNKPGSTAASGVVRLKKTATAGAISELTESRLRSGTGQARWLMPVIPALWEAEVGGSRGQEMETILTNTVEKDYSYLKEICDHQAEQLSRTSLKLQEKASESDAEIKDMKETIFELEDQVEQHRAVKLHNNQLISELESSVIKLEEQKSDLERQLKTLTKQMKEETEEWRRFQADLQTAVVVANDIKCEAQQELRTVKRKLLEEEEKNARLQKELGDVQGHGRVVTSRAAPPPVDEEPESSEVDAAGRWPGVCVSRTSPTPPESATTVKSLIKSFDLGRPGGAGQNISVHKTPRSPLSGIPVRTAPAAAVSPMQRHSTYSSVRPASRGVTQRLDLPDLPLSDILKGRTETLKPDPHLRKSPSLESLSRPPSLGFGDTRLLSASTRAWKPQSKLSVERKDPLAALAREYGGSKRNALLKWCQKKTQGYANIDITNFSSSWSDGLAFCALLHTYLPAHIPYQELNSQEKKRNLLLAFEAAESVGIKPSLELSEMLYTDRPDWQSVMQYVAQIYKYFET

SEQ ID NO: 76160 - protein, 163 aa, Homo sapiens
INAHGLRDPSVPTGGCKESGCSWHGGPDGLYEYLRPSGTPARLSCLSKNLNYDTFGLAVPSTLPAGPEIGPSPAPPYGLFVGGRFQAPGARSSRPIRDSSGNLHGYVAEGGAKDIRAGRASPQEPGQPCCGPWRLHWSAGSLPWPRGWRGRERSSRLRRRRWS

SEQ ID NO: 76161 - protein, 28 aa, Homo sapiens
MSYFGEHFWGEKNHGFEVLYHSVKQGPI

SEQ ID NO: 76162 - protein, 942 aa, Homo sapiens
MEQGESRILRVKVVSGIDLAKKDIFGASDPYVKLSLYVADENRELALVQTKTIKKTLNPKWNEEFYFRVNPSNHRLLFEVFDENRLTRDDFLGQVDVPLSHLPTEDPTMERPYTFKDFLLRPRSHKSRVKGFLRLKMAYMPKNGGQDEENSDQRDDMEHGWEVVDSNDSASQHQEELPPPPLPPGWEEKVDNLGRTYYVNHNNRTTQWHRPSLMDVSSESDNNIRQINQEAAHRRFRSRRHISEDLEPEPSEGGDVPEPWETISEEVNIAGDSLGLALPPPPASPGSRTSPQELSEELSRRLQITPDSNGEQFSSLIQREPSSRLRSCSVTDAVAEQGHLPPPSVAYVHTTPGLPSGWEERKDAKGRTYYVNHNNRTTTWTRPIMQLAEDGASGSATNSNNHLIEPQIRRPRSLSSPTVTLSAPLEGAKDSPVRRAVKDTLSNPQSPQPSPYNSPKPQHKVTQSFLPPGWEMRIAPNGRPFFIDHNTKTTTWEDPRLKFPVHMRSKTSLNPNDLGPLPPGWEERIHLDGRTFYIDHNSKITQWEDPRLQNPAITGPAVPYSREFKQKYDYFRKKLKKPADIPNRFEMKLHRNNIFEESYRRIMSVKRPDVLKARLWIEFESEKGLDYGGVAREWFFLLSKEMFNPYYGLFEYSATDNYTLQINPNSGLCNEDHLSYFTFIGRVAGLAVFHGKLLDGFFIRPFYKMMLGKQITLNDMESVDSEYYNSLKWILENDPTELDLMFCIDEENFGQTYQVDLKPNGSEIMVTNENKREYIDLVIQWRFVNRVQKQMNAFLEGFTELLPIDLIKIFDENELELLMCGLGDVDVNDWRQHSIYKNGYCPNHPVIQWFWKAVLLMDAEKRIRLLQFVTGTSRVPMNGFAELYGSNGPQLFTIEQWGSPEKLPRAHTCFNRLDLPPYETFEDLREKLLMAVENAQGFEGVD

SEQ ID NO: 76163 - protein, 70 aa, Homo sapiens
MSLPIGIYRRAVSYDDTLEDPAPMTPPPSDMGSVPWKPVIPERKYQHLAKVEEGEASLPSPAMTLSSAID

SEQ ID NO: 76164 - protein, 120 aa, Homo sapiens
MWLLLTLSFLLASTAQDGDKLLEGDECAPHSQPWQVALYERGRFNCGASLISPHWVLSAAHCQSRFMRVRLGEHNLRKRDGPEQLRTTSRVIPHPRYEARSHRNDIMLLRLVQPARLNPQ

SEQ ID NO: 76165 - protein, 10 aa, Homo sapiens
EQYPFPGWLG

SEQ ID NO: 76166 - protein, 560 aa, Homo sapiens
MDSTLTASEIRQRFIDFFKRNEHTYVHSSATIPLDDPTLLFANAGMNQFKPIFLNTIDPSHPMAKLSRAANTQKCIRAGGKHNDLDDVGKDVYHHTFFEMLGSWSFGDYFKELACKMALELLTQEFGIPIERLYVTYFGGDEAAGLEADLECKQIWQNLGLDDTKILPGNMKDNFWEMGDTGPCGPCSEIHYDRIGGRDAAHLVNQDDPNVLEIWNLVFIQYNREADGILKPLPKKSIDTGMGLERLVSVLQNKMSNYDTDLFVPYFEAIQKGTGARPYTGKVGAEDADGIDMAYRVLADHARTITVALADGGRPDNTGRGYVLRRILRRAVRYAHEKLNASRGFFATLVDVVVQSLGDAFPELKKDPDMVKDIINEEEVQFLKTLSRGRRILDRKIQSLGDSKTIPGDTAWLLYDTYGFPVDLTGLIAEEKGLVVDMDGFEEERKLAQLKSQGKGAGGEDLIMLDIYAIEELRARGLEVTDDSPKYNYHLDSSGSYVFENTVATVMALRREKMFVEEVSTGQECGVVLDKTCFYAEQGGQIYDEGYLVKVDDSSEDSLQ

SEQ ID NO: 76167 - protein, 78 aa, Homo sapiens
MIPRKRYGSKNTDQGVYLGLSKTQVLSPATAGSSSSDIAPLPPPVTLVPPPPDTMSCRDRTQEFLSACKSLQTRQAGV

SEQ ID NO: 76168 - protein, 161 aa, Homo sapiens
MADKQISLPAKLINGGIAGLIGVTCVFPIDLAKTRLQNQQNGQRVYTSMSDCLIKTVRSEGYFGMYRGAAVNLTLVTPEKAIKLAANDFFRHQLSKDGQKLTLLKEMLAGCGAGTCQVIVTTPMEMLKIQLQDAGRIAAQRKILAAQGQLSAQGGAQPSVE

SEQ ID NO: 76169 - protein, 101 aa, Homo sapiens
MEFNPSDHPRASTIFLSKSQTDVREKRKSLFINHHPPGQIARKYSSCSTIFLDDSTVSQPNLKYTIKCVALAIYYHIKNRDPDGRMLLDIFDENLHPLSVI

SEQ ID NO: 76170 - protein, 104 aa, Homo sapiens
MKQTKLEIQKALAEDATVYEYDSIYDEMQKKKEENNPKLLLGKDRKPKYIHNLLKAVEIRKKEQEKRMEKKIQREREMEKGEFDDKEAFVTSAYKKKLQERAEE

SEQ ID NO: 76171 - protein, 184 aa, Homo sapiens
MISAAQLLDELMGRDRNLAPDEKRSNVRWDHESSTGFCHIGQAGLELLTSSDRSASVSQSAEVTGVSHCARLAFPTLLHSKIVCKYYLCGFCPAELFTNTRSDLGPCEKIHDENLRKQYEKSSRFMKVGYERDFLRYLQSLLAEVERRIRRGHARLALSQNQQSSGAAGPTGKNEEKIQVLTDK

SEQ ID NO: 76172 - protein, 226 aa, Homo sapiens
MEKRTCALCPKDVEYNVLYFAQSENIAAHENCLLYSSGLVECEDQDPLNPDRSFDVESVKKEIQRGRKLKCKFCHKRGATVGCDLKNCNKNYHFFCAKKDDAVPQSDGVRGIYKLLCQQHAQFPIIAQSAKFSGVKRKRGRKKPLSGNHVQPPETMKCNTFIRQVKEEHGRHTDATVKVPFLKKCKEAGLLNYLLEEILDKVHSIPEKLMDETTSESDQALPKQCA

SEQ ID NO: 76173 - protein, 226 aa, Homo sapiens
AVLVPTCRELTLQKGDIVYIHKEVDKNWLEGEHHGRLGIFPANYVEVLPADEIPKPIKPPTYQVLEYGEAVAQYTFKGDLEVELSFRKGEHICLIRKVNENWYEGRITGTGRQGIFPASYVQVSREPRLRLCDDGPQLPTSPRLTAAARSARHPSSPSALRSPADPIDLGGQTSPRRTGFSFPTQEPRPQTQNLGTPGPALSHSRGPSHPLDLGTSSPNTSQIHWT

SEQ ID NO: 76174 - protein, 743 aa, Homo sapiens
MLASPEPKGLVPFTKESFELIKQHIAKTHNEDHEEEDLKPTPDLEVGKKLPFIYGNLSQGMVSEPLEDVDPYYYKKKNTFIVLNKNRTIFRFNAASILCTLSPFNCIRRTTIKVLVHPFFQLFILISVLIDCVFMSLTNLPKWRPVLENTLLGIYTFEILVKLFARGVWAGSFSFLGDPWNWLDFSVTVFEVIIRYSPLDFIPTLQTARTLRILKIIPLNQGLKSLVGVLIHCLKQLIGVIILTLFFLSIFSLIGMGLFMGNLKHKCFRWPQENENETLHNRTGNPYYIRETENFYYLEGERYALLCGNRTDAGQCPEGYVCVKAGINPDQGFTNFDSFGWALFALFRLMAQDYPEVLYHQILYASGKVYMIFFVVVSFLFSFYMASLFLGILAMAYEEEKQRVGEISKKIEPKFQQTGKELQEGNETDEAKTIQIEMKKRSPISTDTSLDVLEDATLRHKEELEKSKKICPLYWYKFAKTFLIWNCSPCWLKLKEFVHRIIMAPFTDLFLIICIILNVCFLTLEHYPMSKQTNTLLNIGNLVFIGIFTAEMIFKIIAMHPYGYFQVGWNIFDSMIVFHGLIELCLANVAGMALLRLFRMLRIFKLGKYWPTFQILMWSLSNSWVALKDLVLLLFTFIFFSAAFGMKLFGKNYEEFVCHIDKDCQLPRWHMHDFFHSFLNVFRILCGEWVETLWDCMEVAGQSWCIPFYLMVILIGNLLVSSQFFYIFHENWYKVVWYFHDVH

SEQ ID NO: 76175 - protein, 1647 aa, Homo sapiens
MDDDSLDELVARSPGPDGHPQVGPADPAGDFESSVGSSGDSGDDSDSEHGDGTDGEDEGASEEEDLEDRSGSEDSEDDGETLLEVAGTQGKLEAAGSFNSDDDAESCPICLNAFRDQAVGTPENCAHYFCLDCIVEWSKNANSCPVDRTLFKCICIRAQFGGKILRKIPVENTKASEEEEDPTFCEVCGRSDREDRLLLCDGCDAGYHMECLDPPLQEVPVDEWFCPECAAPGVVLAADAGPVSEEEVSLLLADVVPTTSRLRPRAGRTRAIARTRQSERVRATVNRNRISTARRVQHTPGRLGSSLLDEAIEAVATGLSTAVYQRPLTPRTPARRKRKTRRRKKVPGRKKTPSGPSAKSKSSATRSKKRQHRVKKRRGKKVKSEATTRSRIARTLGLRRPVHSSCIPSVLKPVEPSLGLLRADIGAASLSLFGDPYELDPFDSEELSANPLSPLSAKRRALSRSALQSHQPVARPVSVGLSRRRLPAAVPEPDLEEEPVPDLLGSILSGQSLLMLGSSDVIIHRDGSLSAKRAAPVSFQRNSGSLSRGEEGFKGCLQPRALPSGSPAQGPSGNRPQSTGLSCQGRSRTPARTAGAPVRLDLPAAPGAVQARNLSNGSVPGFRQSHSPWFNGTNKHTLPLASAASKISSRDSKPPCRSVVPGPPLKPAPRRTDISELPRIPKIRRDDGGGRRDAAPAHGQSIEIPSACISRLTGREGTGQPGRGTRAESEASSRVPREPGVHTGSSRPPAPSSHGSLAPLGPSRGKGVGSTFESFRINIPGNMAHSSQLSSPGFCNTFRPVDDKEQRKENPSPLFSIKKTKQLRSEVYDPSDPTGSDSSAPGSSPERSGPGLLPSEITRTISINSPKAQTVQAVRCVTSYTVESIFGTEPEPPLGPSSAMSKLRGAVAAEGASDTEREEPTESQGLAARLRRPSPPEPWDEEDGASCSTFFGSEERTVTCVTVVEPEAPPSPDVLQAATHRVVELRPPSRSRSTSSSRSRKKAKRKRVSREHGRTRSGTRSESRDRSSRSASPSVGEERPRRQRSKAKSRRSSSDRSSSRERAKRKKAKDKSREHRRGPWGHSRRTSRSRSGSPGSSSYEHYESRKKKKRRSASRPRGRECSPTSSLERLCRHKHQRERSHERPDRKESVAWPRDRRKRRSRSPSSEHRAREHRRPRSREKWPQTRSHSPERKGAVREASPAPLAQGEPGREDLPTRLPALGEAHVSPEVATADKAPLQAPPVLEVAAECEPDDLDLDYGDSVEAGHVFDDFSSDAVFIQLDDMSSPPSPESTDSSPERDFPLKPALPPASLAVAAIQREVSLMHDEDPSQPPPLPEGTQEPHLLRPDAAEKAEAPSSPDVAPAGKEDSPSASGRVQEAARPEEVVSQTPLLRSRALVKRVTWNLQESESSAPAEDRAPRAPLHRPQKPREGAWDMEDVAPTGVRQAFSELPFPSHVLPEPGFPDTDPSQVYSPGLPPAPAQPSSIPPCALVSQPTVQFILQGSLPLVGCGAAQTLAPVPAALTPASEPASQATAASNSEEKTPAPRLAAEKTKKEEYMKKLHMQERAVEEVKLAIKPFYQKREVTKEEYKDILRKAVQKICHSKSGEINPVKVANLVKAYVDKYRHMRRHKKPEAGEEPPTQGAEG

SEQ ID NO: 76176 - protein, 43 aa, Homo sapiens
MAAASAGATRLLLLLLMAHSFEIDDSANFRKRGSLLWNQQDGT

SEQ ID NO: 76177 - protein, 104 aa, Homo sapiens
MVLELNASDDRGIDIIRGPILSFASTRTIFKKGFKLVILDEADAMTQDAQNALRRVIEKFTENTRFCLICNYLSKIIPALQSRCTRFRFGPLTPELMVPRLEHV

SEQ ID NO: 76178 - protein, 198 aa, Homo sapiens
  MOD_RES (1)..(1): Any amino acid
XPVMTYGHLEGLINEWNLELEDQEKYFLLQATQVNAWDHTLIENGEMIRILHGEVNKVKLDQKRLEQELDFILSQQQELEFLLTYLEESTRDQSGLHYLQDADEEHVEIYRLAESIDAQLKQMAQDLKDVVNHLNTFESSSDTTDPLHQICRILNAHMDSLQWIDRNSGMLRRKVEVVTRVFEDYRHEEHAHNVNTAF

SEQ ID NO: 76179 - protein, 38 aa, Homo sapiens
MAEQWELDEEGIRRLGALTLEQPGNPVFMFTPRPEFIL

SEQ ID NO: 76180 - protein, 132 aa, Homo sapiens
MLDQSLFWPPSEFSPVSDGFYLSHWTMKAGTLLSRHKERGVKCTDCPSSEKIALETSLSKELVASGMGWAAFNLSNVTGNSRILCSVYCNGSQITGSSNITVYRLPERVELAPLPPWQPVGQNFTLRCQVED

SEQ ID NO: 76181 - protein, 108 aa, Homo sapiens
  MOD_RES (1)..(1): Any amino acid
XPLMEAAENNHLEAVKYLIKAGALVDPKDAEGSTCLHLAAKKGHYEVVQYLLSNGQMDVNCQDDGGWTPMIWATEYKHVDLVKLLLSKGSDINIRDNVGCIYSKYTLG

SEQ ID NO: 76182 - protein, 335 aa, Homo sapiens
MNNVIVRLSQISEDVIRLFKKSKEIGLQMHEELLKVTNELYTVMKTYHMYHAESISAESKLKEAEKQEEKQFNKSGDLSMNLLRHEDRPQRRSSVKKIEKMKEKRQAKYSENKLKCTKARNDYLLNLAATNAAISKYYIHDVSDLIDCCDLGFHASLARTFRTYLSAEYNLETSRHEGLDVIENAVDNLDSRSDKHTVMDMCNQVFCPPLKFEFQPHMGDEVCQVSAQQPVQTELLMRYHQLQSRLATLKIENEEVRKTLDATMQTLQDMLTVEDFDVSDAFQHSRSTESVKSAASETYMSKINIAKRRANQQETEMFYFTKGPDDVFPICHPRL

SEQ ID NO: 76183 - protein, 300 aa, Homo sapiens
MGLSSCYCPEYLKDASKKMKNGLMFVKLVNPCSGEGAIYLFNMCLQQLFEVKVFKEKHHSWFINQSVQSGGLLHFATPVDPLFLLLHYLIKADKEGKFQPLDQVVVDNVFPNCILLLKLPGLEKLLHHVTEEKGNPEIDNKKYYKYSKEKTLKWLEKKVNQTVAALKTNNVNVSSRVQSTAFFSGDQASTDKEEDYIRYAHGLISDYIPKELSDDLSKYLKLPEPSASLPNPPSKKIKLSDEPVEAKEDYTKFNTKDLKTEKKNSKMTAAQKALAKVDKSGMKSIDTFFGVKNKKKIGKV

SEQ ID NO: 76184 - protein, 49 aa, Homo sapiens
MSQGNKMLLTFHTDFSNEENGTIMFYKGFLAYYQAVDLDECASRSKSGE

SEQ ID NO: 76185 - protein, 669 aa, Homo sapiens
MVSWGRFICLVVVTMATLSLARPSFSLVEDTTLEPEDAISSGDDEDDTDGAEDFVSENSNNKRAPYWTNTEKMEKRLHAVPAANTVKFRCPAGGNPMPTMRWLKNGKEFKQEHRIGGYKVRNQHWSLIMESVVPSDKGNYTCVVENEYGSINHTYHLDVVERSPHRPILQAGLPANASTVVGGDVEFVCKVYSDAQPHIQWIKHVEKNGSKYGPDGLPYLKVLKAAGVNTTDKEIEVLYIRNVTFEDAGEYTCLAGNSIGISFHSAWLTVLPAPGREKEITASPDYLEIAIYCIGVFLIACMVVTVILCRMKNTTKKPDFSSQPAVHKLTKRIPLRRQVSAESSSSMNSNTPLVRITTRLSSTADTPMLAGVSEYELPEDPKWEFPRDKLTLGKPLGEGCFGQVVMAEAVGIDKDKPKEAVTVAVKMLKDDATEKDLSDLVSEMEMMKMIGKHKNIINLLGACTQDGPLYVIVEYASKGNLREYLRARRPPGMEYSYDINRVPEEQMTFKDLVSCTYQLARGMEYLASQKCIHRDLAARNVLVTENNVMKIADFGLARDINNIDYYKKTTNGRLPVKWMAPEALFDRVYTHQSDVWSFGVLMWEIFTLGGSPYPGIPVEELFKLLKEGHRMDKPANCTNELYMMMRDCWHAVPSQRPTFKQLVEDLDRI

SEQ ID NO: 76186 - protein, 243 aa, Homo sapiens
MSSPGTESAGKSLQYRVDHLLSAVENELQAGSEKGDPTERELRVGLEESELWLRFKELTNEMIVTKNGRRMFPVLKVNVSGLDPNAMYSFLLDFVAADNHRWKYVNGEWVPGGKPEPQAPSCVYIHPDSPNFGAHWMKAPVSFSKVKLTNKLNGGGQIMLNSLHKYEPRIHIVRVGGPQRMITSHCFPETQFIAVTAYQNEEITALKIKYNPFAKAFLDAKERSDHKEMMEEPGDSQQPGYSQ

SEQ ID NO: 76187 - protein, 40 aa, Homo sapiens
  MOD_RES (1)..(1): Any amino acid
XMLSLSQGCNEVMYHPSVCLPSVSLSLFHSGRSSAWPSQQ

SEQ ID NO: 76188 - protein, 164 aa, Homo sapiens
MDDLCEANGTFAISLFKILGEEDNSRNVFFSPMSISSALAMVFMGAKGSTAAQMSQALCLYKDGDIHRGFQSLLSEVNRTGTQYLLRTANRLFGEKTCDFLPDFKEYCQKFYQAELEELSFAEDTEECRKHINDWVAEKTEGKISEVLDAGTVDPLTKLVLVNA

SEQ ID NO: 76189 - protein, 74 aa, Homo sapiens
MGDVLEQFFILTGLLVCLACLAKCVRFSRCVLLNYWKVLPKSFLRSMGQWAVITGAGDGIGKAYSFESGLQGGV

SEQ ID NO: 76190 - protein, 88 aa, Homo sapiens
MTEVMMNTQPMEEIGLSPRKDGLSYQIFPDPSDFDRCCKLKDRLPSIVVEPTEGEVESGELRWPPEEFLVQEDEQDNCEETAKENKEQ

SEQ ID NO: 76191 - protein, 211 aa, Homo sapiens
MGLRPMEGTFPHGIDILTTADYFAVGNRSNCFLVISVFIAGFPEYTQPMIDHLVTMKISHWDGVIRELAARALHNLAQQAPEFSATQVFPRLLSMTLSPDLHMRHGSILACAEVAYALYKLAAQENRPVTDHLDEQAVQGLKQIHQQLYDRQLYRGLGGQLMRQAVCVLIEKLSLSKMPFRGDTVIDGWQWLINDTLRHLHLISSHSRQQM

SEQ ID NO: 76192 - protein, 222 aa, Homo sapiens
MAGQPGHMPHGGSSNNLCHTLGPVHPPDPQRHPNTLSFRCSLADFQIEKKIGRGQFSEVYKATCLLDRKTVALKKVQIFEMMDAKARQDCVKEIGLLKQLNHPNIIKYLDSFIEDNELNIVLELADAGDLSQMIKYFKKQKRLIPERTVWKYFVQLCSAVEHMHSRRVMHRDIKPANVFITATGVVKLGDLGLGRFFSSETTAAHSLVGTPYYMSPERIHEN

SEQ ID NO: 76193 - protein, 153 aa, Homo sapiens
  MOD_RES (1)..(1): Any amino acid
XSEEDRSAGSVESPSVSSTHRVSDPKFHPLHSKIIIIKKGHAKDSQRYKVDYESQSTDTQNFSSESKRETEYGPCRREMEDTLNHLKFLNVLSPRGVHIPNCDKKGFYKKKQCRPSKGRKRGFCWCVDKYGQPLPGYTTKGKEDVHCYSMQSK

SEQ ID NO: 76194 - protein, 483 aa, Homo sapiens
  MOD_RES (1)..(1): Any amino acid
XVPWNFTFNVKFYPPDPAQLTEDITRYYLCLQLRQDIVAGRLPCSFATLALLGSYTIQSELGDYDPELHGVDYVSDFKLAPNQTKELEEKVMELHKSYRSMTPAQADLEFLENAKKLSMYGVDLHKAKDLEGVDIILGVCSSGLLVYKDKLRINRFPWPKVLKISYKRSSFFIKIRPGEQEQYESTIGFKLPSYRAAKKLWKVCVEHHTFFRLTSTDTIPKSKFLALGSKFRYSGRTQAQTRQASALIDRPAPHFERTASKRASRSLDGAAVDSADRSPRPTSAPAITQGQVAEGGVLDASAKKTVVPKAQKETVKAEVKKEDEPPEQAEPEPTEAWKDLDKSQEEIKKHHASISELKKNFMESVPEPRPSEWDKRLSTHSPFRTLNINGQIPTGEGVKKTSVLPSERKDEEKIKRQERSTERALPQQENEEILPKVSIPIPEDHKSLKKCHLYFSTFPSPRIPFMMSFLVILVLAVWWLVFL

SEQ ID NO: 76195 - protein, 165 aa, Homo sapiens
  MOD_RES (1)..(1): Any amino acid
XSTAAVVTTQGSEALLGQATPPGTGQFFVMMSPQEVLQGGSQRSIAPRTHPYSPKSEAPRTTRDEKRRAQHNEVERRRRDKINNWIVQLSKIIPDCSMESTKSGQVGFYPKLVIISRSFGRVTTACLKNCRDLTNCSWTMTCFDNRWKILKTRICCFELSCGTTD

SEQ ID NO: 76196 - protein, 596 aa, Homo sapiens
MAEETQHNKLAAAKKKLKEYWQKNRPRVPAGVNRNRKTNGSIPETATSGGCQPPGDSATGFHREGPTSSATLKDLESPCQERAVVLDSTSVKISRLKNTIKSLKQQKKQVEHQLEEEKKANNERQKAERELEVQIQTLIIQKEELNTDLYHMERSLRYFEEESKDLAVRLQHSLQCKGELESALSAVIATEKKKANQLSSCSKAHTEWELEQSLQDQALLKAQLTQICTLKKEKQQDMRRVEELERSLSKLKNQMAEPLPPEPPAVPSEVELQHLRKELERVAGELQSQVKNNQHISLLNRRQEERIREQEERLRKQEERLQEQHEKLRQLAKPQSVFEELNNENKSTLQLEQQVKELQEKLGEEHLEAASQQNQQLTAQLSLMALPGEGHGGEHLDSEGEEAPQPMPSVPEDLESREAMSSFMDHLKEKADLSELVKKQELRFIQYWQERCHQKIHHLLSEPGGRAKDAALGGGHHQAGAQGGDEGEAAGAAADGIAAYSNYNNGHRKFLAAAHNSADEPGPGAPAPQELGAADKHGDLREVTLTSSAQGEAREDPLLDKPTAQPIVQDHQEHPGLGSNCCVPLFCWAWLPRRRR

SEQ ID NO: 76197 - protein, 182 aa, Homo sapiens
  MOD_RES (1)..(1): Any amino acid
XRKLKGAILTTMLATRNFSAAKSLLKKPDGVKESTESSNTTIEDEDVKARKQEIIKVTEQLIEAINNGDFEAYTKICDPGLTAFEPEALGNLVEGMDFHRFYFENALSKSNKPIHTIILNPHVHLVGDDAACIAYIRLTQYMDGSGMPKTMQSEETRVWHRRDGKWQNVHFHRSGSPTVPIK

SEQ ID NO: 76198 - protein, 181 aa, Homo sapiens
MTPTSGGSTPPGITAPAVPSIPSPIGVNGFTGLPPQANGQPAAEAVFANGIHPYPAQSPTAADPLQQAYAGVQQYAGPAAYPAAYGQISQAFPQPPPMIPQQQREGPEGCNLFIYHLPQEFGDAELMQMFLPFGNVISSKVFVDRATNQSKCFGFVSFDNPASAQTAIQAMNGFQIGMKRL

SEQ ID NO: 76199 - protein, 143 aa, Homo sapiens
MERGDQPKRTRNENIFNCLYKNPEATFKLICFPWMGGGSTHFAKWGQDTHDLLEVHSLRLPGRESRVEEPLENDISQLVDEVVCALQPVIQDKPFAFFGHSMGSYIAFRTALGLKENNQPEPLHLFLSSATPVHSKAWHRIPK

SEQ ID NO: 76200 - protein, 102 aa, Homo sapiens
MGMWASLDALWEMPAEKRIFGAVLLFSWTVYLWETFLAQRQRRIYKTTTHVPPELGQIMDSETFEKSRLYQLDKSTFSFWSGLYSETEGTFQRIVEQLNNTT

SEQ ID NO: 76201 - protein, 76 aa, Homo sapiens
MEGLVVAAGGDVSLHNFSARLWEQLVHFHVMRLTDSLFLWVGATPHLRNLAVAMCSRYTGSEPAVGLRYPATASTK

SEQ ID NO: 76202 - protein, 1940 aa, Homo sapiens
MPPLPLARDTRQPPGASLLVRGFMVPCNACLILLATATLGFAVLLFLNNYKPGTHFTPVPPTPPDACRGMLCGFGAVCEPNAEGPGRASCVCKKSPCPSVVAPVCGSDASTYSNECELQRAQCSQQRRIRLLSRGPCGSRDPCSNVTCSFGSTCARSADGLTASCLCPATCRGAPEGTVCGSDGADYPGECQLLRRACARQENVFKKFDGPCDPCQGALPDPSRSCRVNPRTRRPEMLLRPESCPARQAPVCGDDGVTYENDCVMGRSGAARGLLLQKVRSGQCQGRDQCPEPCRFNAVCLSRRGRPRCSCDRVTCDGAYRPVCAQDGRTYDSDCWRQQAECRQQRAIPSKHQGPCDQAPSPCLGVQCAFGATCAVKNGQAACECLQACSSLYDPVCGSDGVTYGSACELEATACTLGREIQVARKGPCDRCGQCRFGALCEAETGRCVCPSECVALAQPVCGSDGHTYPSECMLHVHACTHQISLHVASAGPCETCGDAVCAFGAVCSAGQCVCPRCEHPPPGPVCGSDGVTYGSACELREAACLQQTQIEEARAGPCEQAECGSGGSGSGEDGDCEQELCRQRGGIWDEDSEDGPCVCDFSCQSVPGSPVCGSDGVTYSTECELKKARCESQRGLYVAAQGACRGPTFAPLPPVAPLHCAQTPYGCCQDNITAARGVGLAGCPSACQCNPHGSYGGTCDPATGQCSCRPGVGGLRCDRCEPGFWNFRGIVTDGRSGCTPCSCDPQGAVRDDCEQMTGLCSCKPGVAGPKCGQCPDGRALGPAGCEADASAPATCAEMRCEFGARCVEESGSAHCVCPMLTCPEANATKVCGSDGVTYGNECQLKTIACRQGLQISIQSLGPCQEAVAPSTHPTSASVTVTTPGLLLSQALPAPPGALPLAPSSTAHSQTTPPPSSRPRTTASVPRTTVWPVLTVPPTAPSPAPSLVASAFGESGSTDGSSDEELSGDQEASGGGSGGLEPLEGSSVATPGPPVERASCYNSALGCCSDGKTPSLDAEGSNCPATKVFQGVLELEGVEGQELFYTPEMADPKSELFGETARSIESTLDDLFRNSDVKKDFRSVRLRDLGPGKSVRAIVDVHFDPTTAFRAPDVARALLRQIQVSRRRSLGVRRPLQEHVRFMDFDWFPAFITGATSGAIAAGATARATTASRLPSSAVTPRAPHPSHTSQPVAKTTAAPTTRRPPTTAPSRVPGRRPPAPQQPPKPCDSQPCFHGGTCQDWALGGGFTCSCPAGRGGAVCEKVLGAPVPAFEGRSFLAFPTLRAYHTLRLALEFRALEPQGLLLYNGNARGKDFLALALLDGRVQLRFDTGSGPAVLTSAVPVEPGQWHRLELSRHWRRGTLSVDGETPVLGESPSGTDGLNLDTDLFVGGVPEDQAAVALERTFVGAGLRGCIRLLDVNNQRLELGIGPGAATRGSGVGECGDHPCLPNPCHGGAPCQNLEAGRFHCQCPPGRVGPTCADEKSPCQPNPCHGAAPCRVLPEGGAQCECPLGREGTFCQTASGQDGSGPFLADFNGFSHLELRGLHTFARDLGEKMALEVVFLARGPSGLLLYNGQKTDGKGDFVSLALRDRRLEFRYDLGKGAAVIRSREPVTLGAWTRVSLERNGRKGALRVGDGPRVLGESPVPHTVLNLKEPLYVGGAPDFSKLARAAAVSSGFDGAIQLVSLGGRQLLTPEHVLRQVDVTSFAGHPCTRASGHPCLNGASCVPREAAYVCLCPGGFSGPHCEKGLVEKSAGDVDTLAFDGRTFVEYLNAVTESEKALQSNHFELSLRTEATQGLVLWSGKATERADYVALAIVDGHLQLSYNLGSQPVVLRSTVPVNTNRWLRVVAHREQREGSLQVGNEAPVTGSSPLGATQLDTDGALWLGGLPELPVGPALPKAYGTGFVGCLRDVVVGRHPLHLLEDAVTKPELRPCPTP

SEQ ID NO: 76203 - protein, 197 aa, Homo sapiens
  MOD_RES (1)..(1): Any amino acid
XTTLRITYPEGAMQRPEQYERDSLFVLAGFKWQDFKWLKYIVYKERVSASDGFWKSVATRVPKEPPEIRILNPYFIQEAAFTLIGLPFNNGLMGRGNIPTLGSVAVTMALHGCDEVAVAGFGYDMSTPNAPLHYYETVRMAAIKEVSTVTEYWRVVTKKAPSPGRGSKGLSKGPTDHFISPFSPGRTISSERKSFCG

SEQ ID NO: 76204 - protein, 672 aa, Homo sapiens
MMQESGTETKSNGSAIQNGSGGSNHLLECGGLREGRSNGETPAVDIGAADLAHAQQQQQQVARQLLLQQQQQQQVSGLKSPKRNDKQPALQVPVSVAMMTPQVITPQQMQQILQQQVLSPQQLQVLLQQQQALMLQQQLQEFYKKQQEQLQLQLLQQQHAGKQPKEQQQVATQQLAFQQQLLQMQQLQQQHLLSLQRQGLLTIQPGQPALPLQPLAQGMIPTELQQLWKEVTSAHTAEETTGNNHSSLDLTTTCVSSSAPSKTSLIMNPHASTNGQLSVHTPKRESLSHEEHPHSHPLYGHGVCKWPGCEAVCEDFQSFLKHLNSEHALDDRSTAQCRVQMQVVQQLELQLAKDKERLQAMMTHLHVKSTEPKAAPQPLNLVSSVTLSKSASEASPQSLPHTPTTPTAPLTPVTQGPSVITTTSMHTVGPIRRRYSDKYNVPISSDIAQNQEFYKNAEVRPPFTYASLIRQAILESPEKQLTLNEIYNWFTRMFAYFRRNAATWKNAVRHNLSLHKCFVRVENVKGAVWTVDEVEFQKRRPQKISGNPSLIKNMQSSHAYCTPLNAALQASMAENSIPLYTTASMGNPTLGNLASAIREELNGAMEHTNSNESDSSPGRSPMQAVHPVHVKEEPLDPEEAEGPLSLVTTANHSPDFDHDRDYEDEPVNEDME

SEQ ID NO: 76205 - protein, 151 aa, Homo sapiens
MGKKGKVGKSRRDKFYHLAKETGYRSRSAFKLIQLNRRFQFLQKARALLDLCAAPGGWLQVAAKFMPVSSLIVGVDLVPIKPLPNVVTLQQDITTERCRQALRKELKTWKVDVVLNDGAPNVGASWVHDAYSQAHLTLMALRLACDFLARG

SEQ ID NO: 76206 - protein, 177 aa, Homo sapiens
  MOD_RES (1)..(1): Any amino acid
XGLSLPSQVRSERPLFSSNPELDNLGKMPIDLVIEDRDGGCREDFEDYPASCPSLPDQNNMWIRDHEDSGSVHLGTPGPSSGGLASQSGDNSSDQGDGLDTSVASPSSGGEDEDLDQERRRNKKRGIFPKVATNIMRAWLFQHLSRRSEAPVLPDVCLGLGSPSPGPRWARPWGSDC

SEQ ID NO: 76207 - protein, 141 aa, Homo sapiens
MSDPEMGWVPEPPTMTLGASRVELRVSCHGLLDRDTLTKPHPCVLLKLYSDEQWVEVERTEVLRSCSSPVFSRVLALEYFFEEKQPLQFHVFDAEDGATSPRNDTFLGSTECTLGQIVSQTKVTKPLLLKNGKTAGKSTIT

SEQ ID NO: 76208 - protein, 253 aa, Homo sapiens
MDVPAGFLLVGVKSPSLPDHLLVCAVDKRFLPDDNGHNALLGFSGNCVGCGKKGFCYFTEFSNHINLKLTTQPKKQKHLKYYLVRNAQGTLTKGPLICWKGSEFRSRQIPASTCSSSLFPALESTAAFPSEPVPGTNPSILMGAQQAGPASDHPSLNAAMGPAVFNGKDSPKCQQLAKNNLLALPRPSALGSSACPGRPGDPALLWAKARGGMGAAGLGPLSLLESDVASMRVRPGPQVPPESVGLGPGPGAL

SEQ ID NO: 76209 - protein, 208 aa, Homo sapiens
MDEPAQASGPYVEIIEQPKQRGMRFRYKCEGRSAGSIPGERSTDTTKTHPTIKINGYTGPGTVRISLVTKDPPHRPHPHELVGKDCRDGFYEAELCPDRCIHSFQNLGIQCVKKRDLEQAISQRIQTNNNPFQVPIEEQRGDYDLNAVRLCFQVTVRDPSGRPLRLPPVLSHPIFDNRAPNTAELKICRVNRNSGSCLGGDEIFLLCD

SEQ ID NO: 76210 - protein, 136 aa, Homo sapiens
MTQESFDTSGAGAGRGADPRVPPSSPATQVCFEEPQPSTSTSDLFPTASASSTEPSPAGRERSSSCGSGGGGISPKGSGPSVASDEVSSFASALPDRKTASFSSLEPQDQEDLEPVKKKMRGDGDLDLNGQLLVAQ

SEQ ID NO: 76211 - protein, 319 aa, Homo sapiens
MRLAEERAALAAENADGEPGADRRLRLLGTYVAMSLRPAAGAWERCAGSAEAEQLLQAFLGRDAAEGPRPLLVVRPGPRGLAIRPGLEVGPESGLAGAKALFFLRTGPEPPGPDSFRGAVVCGDLPAAPLEHLAALFSEVVLPVLANEKNRLNWPHMICEDVRRHAHSLQCDLSVILEQVKGKTLLPLPAGSEKMEFADSKSETVLDSIDKSVIYAIESAVIKWSYQVQVVLKRESSQPLLQGENPTPKVELEFWKSRYEDLKYIYNQLRTITVRGMAKLLDKLQSSYFPAFKAMYRDVVAGEDQQVFSQMCLTQVTVE

SEQ ID NO: 76212 - protein, 150 aa, Homo sapiens
  MOD_RES (1)..(1): Any amino acid
XEESSGSSPLPGQFTVPHSLALVPLLGQLCVADRENGRIQCFKTDTKEFVREIKHSSFGRNVFAISYIPGLLFAVNGKPHFGDQEPVQGFVMNFSNGEIIDIFKPVRKNWNIDQLKRLALRSRKSKILNTNSRRVQEEYWEDLEEREVEA

SEQ ID NO: 76213 - protein, 68 aa, Homo sapiens
  MOD_RES (1)..(1): Any amino acid
XVHVLLLDDLLLLLQRQDERLLLKSHSRTLTPTPDGKTMLRPVLRLTSAMTREVATAGVLSSLRLPDP

SEQ ID NO: 76214 - protein, 72 aa, Homo sapiens
MTLHATRGAALLSWVNSLHVADPVEAVLQLQDCSIFIKIIDRIHGTEEGQQILKQPVSERLDFVCSFLQKNR

SEQ ID NO: 76215 - protein, 90 aa, Homo sapiens
MALPQGSLTFRDVAVEFSQEEWKCLDPVQKALYRDVMLENYRNLGFLGLCLPDLNIISMLEQGKEPWTVVSQVKIARNPNCGECMKGVIT

SEQ ID NO: 76216 - protein, 483 aa, Homo sapiens
MHSFVKHLCSRYVVERQGTMALPALLTRLLPLRRLFVLGIGFFTLCFLMTSLGGQFSARRLGDSPFTIRTEVMGGPESRGVLRKMSDLLELMVKRMDALARLENSSELHRAGGDLHFPADRMPPGAGLMERIQAIAQNVSDIAVKVDQILRHSLLLHSKVSEGRRDQCEAPSDPKFPDCSGKVEWMRARWTSDPCYAFFGVDGTECSFLIYLSEVEWFCPPLPWRNQTAAQRAPKPLPKVQAVFRSNLSHLLDLMGSGKESLIFMKKRTKRLTAQWALAAQRLAQKLGATQRDQKQILVHIGFLTEESGDVFSPRVLKGGPLGEMVQWADILTALYVLGHGLRVTVSLKELQSNLGVPPGRGSCPLTMPLPFDLIYTDYHGLQQMKRHMGLSFKKYRCRIRVIDTFGTEPAYNHEEYATLHGYRTNWGYWNLNPKQFMTMFREGEVPGHPEQIHGDPWHRVLREPAAPRGASLCEEPRPLTAA

SEQ ID NO: 76217 - protein, 186 aa, Homo sapiens
MPLPVQVFNLQPASSVSGSGGAESQDRMRDSSAPSSASSSVTDLYCTPHSSRSDLVLPGTAGDFSLSASLSACTLLYEGAVEPMQIDVDPQEDPQNAPDVNYVVENPSLDLEQYAASYSGLMRIERLQFIADHCPTLRVEALKMALSFVQRTFNVDMYEEIHRKLSEATRELQNAPDAIPESGVEP

SEQ ID NO: 76218 - protein, 17 aa, Homo sapiens
MNKVFWREMVECFNKIS

SEQ ID NO: 76219 - protein, 97 aa, Homo sapiens
MALDSDLWSRLEEKARAKCERDEAGNPAKESSDADGEAEEEGESEKGAGPRSAGWRALRRLWDRVLGPARRWRRPLPSNVLYCAEIKDIGHLTRCTL

SEQ ID NO: 76220 - protein, 69 aa, Homo sapiens
VWVLYCDLICLDYDGNILDACTFALLAALKNGGSGLTGAKLQDCMSRAVTRHKEVKKLMDEVIKSMKPK

SEQ ID NO: 76221 - protein, 188 aa, Homo sapiens
  MOD_RES (1)..(1): Any amino acid
XIEIRDKEDSSWQLFTVQVQTEAIGEGSLEPSPQSQAEDGRSQAAVGAVPEGAWKDTAQLHKSEEAKRVLRYYLFQGQRYIWIETQQAFYQVSLLDHGRSCDDVHRSRHGLSLQDQMVRKAIYGPNVISIPVKSYPQLLVDEAFSIALWLADHYYWYALCIFLISSISICLSLYKTRKQSQTLRDMVK

SEQ ID NO: 76222 - protein, 99 aa, Homo sapiens
MVVSLVLGFLAMFVATMGMKCTRCGGDDKVKKARIAMGGGIIFIVAGLAALVACSWYGHQIVTDFYNPLIPTNIKYEFGPAIFIGWAGSALVILGGALL

SEQ ID NO: 76223 - protein, 86 aa, Homo sapiens
MSISSDEVNFLVYRYLQESGFSHSAFTFGIESHISQSNINGALVPPAALISIIQKGLQYVEAEVSINEDGTLFDGRPIESLSLIDA

SEQ ID NO: 76224 - protein, 94 aa, Homo sapiens
MGYARKVGWVTAGLVIGAGACYCIYRLTRGRKQNKEKMAEGGSGDVDDAGDCSGARYNDWSDDDDDSNESKSIVWYPPWARIGTEAGTRARARA

SEQ ID NO: 76225 - protein, 75 aa, Homo sapiens
MEWYELFQLGNCTFPHLRPEMDAPFWCNQGAACFFEGIDDVHWKENGTLVQVATISGCWLFKLLLIGACSLESSG

SEQ ID NO: 76226 - protein, 127 aa, Homo sapiens
  MOD_RES (1)..(1): Any amino acid
XVGKETIPTRSGQITCENELVQTQPHADNPSNTVTSVPTHCEEGPVHKSTQISLKRPRHRSVGIQAKVKAFGKRLCNATTQTEELWSRTSSLFDIYSSDSETDTDWDIKSEQSDLSYMAVQVKEETC

SEQ ID NO: 76227 - protein, 1090 aa, Homo sapiens
  MOD_RES (1)..(1): Any amino acid
XVNPAEPRFAGPVHLQYHPHLWPLCELQELCLQHRGRCRVVYGPLRPRPVHFYQDLSSMDLIRPRVSLVCQIVRVGHMELKEGKKHTCGLRRPFGVAVMDITDIIHGKVDDEEKQHFIPFQQIAMETYIRQRQLIMSPLITSHVIGENEPLTSVLNKVIAAKEVNHKGQGLWVSLKLLPGDLTQVQKNFSHLVDRSTAIARKMGFPEIILPGDVRNDIYVTLIHGEFDKGKKKTPKNVEVTMSVHDEEGKLLEKAIHPGAGYEGISEYKSVVYYQVKQPCWYETVKVSIAIEEVTRCHIRFTFRHRSSQETRDKSERAFGVAFVKLMNPDGTTLQDGRHDLVVYKGDNKKMEDAKFYLTLPGTKMEMEEKELQASKNLVTFTPSKDSTKDSFQIATLICSTKLTQNVDLLGLLNWRSNSQNIKHNLKKLMEVDGGEIVKFLQDTLDALFNIMMEMSDSETYDFLVFDALVFIISLIGDIKFQHFNPVLETYIYKHFSATLAYVKLSKVLNFYVANADDSSKTELLFAALKALKYLFRFIIQSRVLYLRFYGQSKDGDEFNNSIRQLFLAFNMLMDRPLEEAVKIKGAALKYLPSIINDVKLVFDPVELSVLFCKFIQSIPDNQLVRQKLNCMTKIVESTLFRQSECREVLLPLLTDQLSGQLDDNSNKPDHEASSQLLSNILEVLDRKDVGATAVHIQLIMERLLRRINRTVIGMNRQSPHIGSFVACMIALLQQMDDSHYSHYISTFKTRQDIIDFLMETFIMFKDLIGKNVYAKDWMVMNMTQNRVFLRAINQFAEVLTRFFMDQASFELQLWNNYFHLAVAFLTHESLQLETFSQAKRNKIVKKYGDMRKEIGFRIRDMWYNLGPHKIKFIPSMVGPILEVTLTPEVELRKATIPIFFDMMQCEFNFSGNGNFHMFENELITKLDQEVEGGRGDEQYKVLLEKLLLEHCRKHKYLSSSGEVFALLVSSLLENLLDYRTIIMQDESKENRMSCTVNVLNFYKEKKREDIYIRYLYKLRDLHRDCENYTEAAYTLLLHAELLQVNGSESLFQQGGVQCPFRLNSIHFMILMGKNFIPGISFYTSFFSSF

SEQ ID NO: 76228 - protein, 264 aa, Homo sapiens
VFIHNPHTRNQHVSASRVFQSPLESDVSLLSINQAVSCLTAGVLNPELGYDALLVGTQTNLLAYDVYNNSDLFYREVADGANAIVLGTLGDISSPLAIIGGNCALQGFNHEGSDLFWTVTGDNVNSLALCDFDGDGKKELLVGSEDFDIRVFKEDEIVAEMTETEIVTSLCPMYGSRFGYALSNGTVGVYDKTSRYWRIKSKNHAMSIHAFDLNSDGVNELITGWSNGKTGVSLCHPGWSAVAQSRLTATSASRVQAILLPQPP

SEQ ID NO: 76229 - protein, 232 aa, Homo sapiens
MSELEQLRQEAEQLRNQIRDARKACGDSTLTQITAGLDPVGRIQMRTRRTLRGHLAKIYAMHWGTDSRLLVSASQDGKLIIWDSYTTNKVHAIPLRSSWVMTCAYAPSGNFVACGGLDNICSIYSLKTREGNVRVSRELPGHTGYLSCCRFLDDNQIITSSGDTTCALWDIETGQQTVGFAGHSGDVMSLSLAPDGRTFVSGACDASIKLWDVRDSMCRQTFIGHESDINAV

SEQ ID NO: 76230 - protein, 371 aa, Homo sapiens
LTDRQTDTAPSPSYHLLPGRRRTVDAAASRGQGPEPAPGGGVEGVGARGVALKLFVQLLGCSRFGGAVVRAGEAEPSGAARSASSGREEPQPEEGEEEEEKEEERGPQWRLGARKPGSWTGEAAVCADSAPAARAPQALARASGRGGRVARRGAEESGPPHSPSRRGSASRAGPGRASETMNFLLSWVHWSLALLLYLHHAKWSQAAPMAEGGGQNHHEVVKFMDVYQRSYCHPIETLVDIFQEYPDEIEYIFKPSCVPLMRCGGCCNDEGLECVPTEESNITMQIMRIKPHQGQHIGEMSFLQHNKCECRPKKDRARQENPCGPCSERRKHLFVQDPQTCKCSCKNTDSRCKARQLELNERTCRSLTRKD

SEQ ID NO: 76231 - protein, 154 aa, Homo sapiens
MGEEDYYLELCERPVQFEKANPVNCVFFDEANKQVFAVRSGGATGVVVKGPDDRNPISFRMDDKGEVKCIKFSLENKILAVQRTSKTVDFCNFIPDNSQLEYTQECKGGLFGEERCIPTTVLPALQWPRVKRPSARPFSNLSALKRVGLRMPTF

SEQ ID NO: 76232 - protein, 40 aa, Homo sapiens
MVVVGTNEQVPLPRSQPACVCGRKNLISESQDLLLGCVML

SEQ ID NO: 76233 - protein, 123 aa, Homo sapiens
MALEAAGGPPEETLSLWKRLWGGLPPWRPYRPAVCWGGQETSAGGWAGEQRPAQGEDPTPADSRRLIPSAGRLWDCPGNGPEEPRPQHQAPLHLRGPQDEPGGRCAPDLLLLQVPDPRARAPG

SEQ ID NO: 76234 - protein, 95 aa, Homo sapiens
MDYRRLLMSRVVPGQFDDADSSDSENRDLKTVKEKDDILFEDLQDNVNENGEGEIEDEEEEGYDDDDDDWDWDEGVGKLAKGYVWNGGSNPQLVP

SEQ ID NO: 76235 - protein, 599 aa, Homo sapiens
MFTLSLLSRGHGKLGQDKQKLEVYFEPEDYLNWRSPEDYVPVSKPQDKNNASQHSWSLFLPKTFSTRKGALILYSEGFAISAWTPKERRKGPYCPRGPWRKLDLELHTLQDLKEAILAYGRQQLNLPMGDAGKRLEREKKRKTTVFLPSHSASSEKKHLHYLCDTALNRQAHYDPQLLQGEQDRAWQPYLHFRSQLESQAQRQIQPGHSAKRYLRGLLRTWPPDAMYRLWCAGYIKDSVLLQDSQLNVPKKLRPQQDLSGVPPKYHLLPVFPSFWIQQGKSFEQRQQGLDEGEAGAAGHVDQGPLAKNHGSQGTRLPPRRKQPWQEDETQAEDTSIENHLCLYASKESYNEKTQQTSRKAFGHGRIDHSWLPSDKSHITFCGGAFPNRKADLSDKQRNVKLHKARSSHLLQVLPAERSLFPPVASATGSRIITPGEVKKKKAPKALKLPPISEEPPRVLEPLKSQFKANEPPTELFILPVEIHYHTKQPPKEKAHRRGAPHPESEPESSEESTPVWRPPLKHASLETPWELTVHLPVDASRDTLSPQGSSSLPPASLGNLTLKGSKARHTRVHSQGKGVWKGDDDAPPHDVAPPLDLLP

SEQ ID NO: 76236 - protein, 84 aa, Homo sapiens
MPPKGKSGSGKAGKGGAASGSDSADKKAQGPKGGGNAVKVRHILCEKHGKIMEAMEKLKSGMRFNEVAAQYSEDKARQGAFRLR

SEQ ID NO: 76237 - protein, 157 aa, Homo sapiens
MRTSAEYFRLALSKLQSCDLFDEFDNIPCKKCVVVGNGGVLKNKTLGEKIDSYDVIIRMNNGPVLGHEEEVGRRTTFRLFYPESVFSDPIHNDPNTTVILTAFKPHDLRWLLELLMGDKINTNGFWKKPALNLIYKPYQIRILDPFIIRTAAYELLH

SEQ ID NO: 76238 - protein, 39 aa, Homo sapiens
SNVIDSLLQMTVESSHPPCPSDVHMSLHFLLRPPLSLTI

SEQ ID NO: 76239 - protein, 111 aa, Homo sapiens
MSGPGNKRAAGDGGSGPPEKKLSREEKTTTTLIEPIRLGGISSTEEMDLKVLQFKNKKLAERLEQRQACEDELRERIEKLEKRQATDDATLLIVNRYWAQLDETVEALLRC

SEQ ID NO: 76240 - protein, 969 aa, Homo sapiens
MVKLVLLSIVLLKVTVPKLSNDLLQLDFMPIHRGILAIAWSMADPELLLSCGKDAKILCSNPNTGEVLYELPTNTQWCFDIQWCPRNPAVLSAASFDGRISVYSIMGGSTDGLRQKQVDKLSSSFGNLDPFGTGQPLPPLQIPQQTAQHSIVLPLKKPPKWIRRPVGASFSFGGKLVTFENVRMPSHQGAEQQQQQHHVFISQVVTEKEFLSRSDQLQQAVQSQGFINYCQKKIDASQTEFEKNVWSFLKVNFEDDSRGKYLELLGYRKEDLGKKHIKEEKEESEFLPSSGGTFNISVSGDIDGLITQALLTGNFESAVDLCLHDNRMADAIILAIAGGQELLARTQKKYFAKSQSKITRLITAVVMKNWKEIVESCDLKNWREALAAVLTYAKPDEFSALCDLLGTRLENEGDSLLQTQACLCYICAGNVEKLVACWTKAQDGSHPLSLQDLIEKVVILRKAVQLTQAMDTSTVGVLLAAKMSQYANLLAAQGSIAAALAFLPDNTNQPNIMQLRDRLCRAQGEPVAGHESPKIPYEKQQLPKGRPGPVAGHHQMPRVQTQQYYPHVRIAPTVTTWSNKTPTALPSHPPAASPSDTQGENPPPPGFIMHGNVNPNAAGQLPTSPGHMHTQVPPYPQPQPYQPAQPYPFGTGGSAMYRPQQPVAPPTSNAYPNTPYISSASSYTGQSQLYAAQHQASSPTSSPATSFPPPPSSGASFQHGGPGAPPSSSAYALPPGTTGPQNGWNDPPALNRVPKKKKMPENFMPPVPITSPIMNPLGDPQSQMLQQQPSAPVPLSSQSSFPQPHLPGGQPFHGVQQPLGQTGMPPSFSKPNIEGAPGAPIGNTFQHVQSLPTKKITKKPIPDEHLILKTTFEDLIQRCLSSATDPQTKRKLDDASKRLEFLYDKLREQTLSPTITSGLHNIARSIETRNYSEGLTMHTHIVSTSNFSETSAFMPVLKVVLTQANKLGV

SEQ ID NO: 76241 - protein, 140 aa, Homo sapiens
MAATMFRATLRGWRTGVQRGCGLRLLSQTQGPPDYPRFVESVDEYQFVERLLPATRIPDPPKHEHYPTPSGWQPPRDPPPNLPYFVRRSRMHNIPVYKDITHGNRQMTVIRKVEGDIWVSGWVGLGLGLTLSGLKGQESF

SEQ ID NO: 76242 - protein, 354 aa, Homo sapiens
VWSITGSECLPGGNLFGIIILFYCAIIGGKLLGLIKLPTLPPLPSLLGMLLAGFLIRNIPVINDNVQIKHKWSSSLRSIALSIILVRAGLGLDSKALKKLKGVCVRLSMGPCIVEACTSALLAHYLLGLPWQWGFILGFVLGAVSPAVVVPSMLLLQGGGYGVEKGVPTLLMAAGSFDDILAITGFNTCLGIAFSTGSTVFNVLRGVLEVVIGVATGSVLGFFIQYFPSRDQDKLVCKRTFLVLGLSVLAVFSSVHFGFPGSGGLCTLVMAFLAGMGWTSEKAEVEKIIAVAWDIFQPLLFGLIGAEVSIASLRPETVGSADSITGNFGTERPKLLGPPSTQLRFHFFHIQLST

SEQ ID NO: 76243 - protein, 349 aa, Homo sapiens [sequence omitted]

SEQ ID NO: 76244 - protein, 66 aa, Homo sapiens
MGGSLLAPAPDHIVLWNCRVANAEEKLMDDLLNKTRYNNLIRPATSSSQLISIKLQLSLAQLISVG

SEQ ID NO: 76245 - protein, 100 aa, Homo sapiens
MVCTQKSKKTEFKTLEGVITRTKHGEKVSLSSKCAEIDREMISSLGVSKAVLNNVIFCHQEDSNWPLSEGKALKQKFDEIFSATRYIKALETLRQVRQTQ

SEQ ID NO: 76246 - protein, 69 aa, Homo sapiens
VMRDPNTKRSRGFGFVTYATVEEVDAAMNARPHKVDGRVVEPKRAVSREVRFSKTRCPLNCEKDICWWH

SEQ ID NO: 76247 - protein, 148 aa, Homo sapiens
MSRQVVRSSKFRHVFGQPAKADQCYEDVRVSQTTWDSGFCAVNPKFVALICEASGGGAFLVLPLGKTGRVDKNAPTVCGHTAPVLDIAWCPHNDNVIASGSEDCTVMVWEIPDGGLMLPLREPVVTLEGHTKRVGIVAWHTTAQNVLL

SEQ ID NO: 76248 - protein, 570 aa, Homo sapiens
  MOD_RES (1)..(1): Any amino acid
XSLLEENAEKAFYGSEEDEAKGAGSEETAAAAAPSRKPYVMDPDHRLLLRNTKPLLQSRSAAVVMAVAQLYFHLAPKAEVGVIAKALVRLLRSHSEVQYVVLQNVATMSIKRRGMFEPYLKSFYIRSTDPTQIKILKLEVLTNLANETNIPTVLREFQTYIRSMDKDFVAATIQAIGRCATNIGRVRDTCLNGLVQLLSNRDELVVAESVVVIKKLLQMQPAQHGEIIKHLAKLTDNIQVPMARASILWLIGEYCEHVPRIAPDVLRKMAKSFTAEEDIVKLQVINLAAKLYLTNSKQTKLLTQYVLSLAKYDQNYDIRDRARFTRQLIVPSEQGGALSRHAKKLFLAPKPAPVLESSFKDRDHFQLGSLSHLLNAKATGYQELPDWPEEAPDPSVRNVEVPEWTKCSNREKRKEKEKPFYSDSEGESGPTESADSDPESESESDSKSSSESGSGESSSESDNEDQDEDEEKGRGSESEQSEEDGKRKTKKKVPERKGEASSSDEGSDSSSSSSESEMTSESEEEQLEPASWSRKTPPSSKSAPATKEISLLDLEDCSLLNPSHLHFASS

SEQ ID NO: 76249 - protein, 78 aa, Homo sapiens
MPPMPSAPPVHPPPDGGWGWIVVGAAFISIGFSYAFPKAVTVFFKEIQQIFHTTYSEIAWISSIMLAVMYAGGWYHMQ

SEQ ID NO: 76250 - protein, 351 aa, Homo sapiens
MFPRPLTPLAAPNGAEPLGRALRRAPLGRARAGLGGPPLLLPSMLMFAVIVASSGLLLMIERGILAEMKPLPLHPPGREGTAWRGKAPKPGGLSLRAGDADLQVRQDVRNRTLRAVCGQPGMPRDPWDLPVGQRRTLLRHILVLAGVLDSVDVRLKMDHRSDLVFLADLRPEEIRYRLQHYFKFLFVREPLERLLSAYRNKFGEIREYQQRYGAEIVRRYRAGAGPSPAGDDVTFPEFLRYLVDEDPERMNEHWMPVYHLCQPCAVHYDFVGSYERLEADANQVLEWVRAPPHVRFPARQAWYRPASPESLHYHLCSAPRALLQDVLPKYILDFSLFAYPLPNVTKEACQQ

SEQ ID NO: 76251 - protein, 379 aa, Homo sapiens
MLVAGLLLWASLLTGAWPSFPTQDHLPATPRVRLSFKELKATGTAHFFNFLLNTTDYRILLKDEDHDRMYVGSKDYVLSLDLHDINREPLIIHWAASPQRIEECVLSGKDVNGECGNFVRLIQPWNRTHLYVCGTGAYNPMCTYVNRGRRAQDYIFYLEPERLESGKGKCPYDPKLDTASALINEELYAGVYIDFMGTDAAIFRTLGKQTAMRTDQYNSRWLNDPSFIHAELIPDSAERNDDKLYFFFRERSAEAPQSPAVYARIGRICLNDDGGHCCLVNKWSTFLKARLVCSVPGEDGIETHFDELQDVFVQQTQDVRNPVIYAVFTSSGSVFRGSAVCVYSMADIRMVFNGPFAHKEGPNYQWMPFSGKMPYPRPG

SEQ ID NO: 76252 - protein, 22 aa, Homo sapiens
MAKYNTGGNPTEDVSVNSRPFR

SEQ ID NO: 76253 - protein, 485 aa, Homo sapiens
MSKPHSEAGTAFIQTQQLHAAMADTFLEHMCRLDIDSPPITARNTGIICTIGPASRSVETLKEMIKSGMNVARLNFSHGTHEYHAETIKNVRTATESFASDPILYRPVAVALDTKGPEIRTGLIKGSGTAEVELKKGATLKITLDNAYMEKCDENILWLDYKNICKVVEVGSKIYVDDGLISLQVKQKGADFLVTEVENGGSLGSKKGVNLPGAAVDLPAVSEKDIQDLKFGVEQDVDMVFASFIRKASDVHEVRKVLGEKGKNIKIISKIENHEGVRRFDEILEASDGIMVARGDLGIEIPAEKVFLAQKMMIGRCNRAGKPVICATQMLESMIKKPRPTRAEGSDVANAVLDGADCIMLSGETAKGDYPLEAVRMQHLIAREAEAAMFHRKLFEELVRASSHSTDLMEAMAMGSVEASYKCLAAALIVLTESGRSAHQVARYRPRAPIIAVTRNPQTARQAHLYRGIFPVLCKDPVQEAWAED

SEQ ID NO: 76254 - protein, 152 aa, Homo sapiens
ETTIKFAPANLGYARGVDPPPCDAGTDQDSRWRLQYDVYQYFLPENDLTEEMLLKHLQRMVSVPQVKASALKVVTLTANDKTSVSFSSLPGQGVIYNVIVWDPFLNTSAAYIPAHTYACSFEAGEGSCASLAVLYLLLCLSTSSPSFITGLF

SEQ ID NO: 76255 - protein, 152 aa, Homo sapiens
PRNYLNTLSTALNILEKYGRNLLSPQRPRYWRGVKFNNPVFRSTVDAVQGGRDVLRLYGYTEEQPDGLSFPEGQEEPDEHQVATVTLEVLLLRTELSLLLQNTHPRQQALEQLLEDKVEDDMLQLSEFDPLLREIAPGPLTTPSVPGPVSSL

SEQ ID NO: 76256 - protein, 49 aa, Homo sapiens
MESFHTRFSAWTPFSNKSLNRQLFQERVALISHWFDLWTNKQRQEFLFA

SEQ ID NO: 76257 - protein, 127 aa, Homo sapiens
MVLRSLVEYSQDVLAHPVSEEHLPDVSLIGEFSDPAELGKLLQLVLGCAISCEKKQDHIQRIMTLEESVQHVVMEAIQELMTKDTPDSLSPETYGNFDSQSRRYYFLSEEAEEGDELQQRCLDLERQ

SEQ ID NO: 76258 - protein, 181 aa, Homo sapiens
MVPPPPGEESQTVILPPGWQSYLSPQGRRYYVNTTTNETTWERPSSSPGIPASPGSHRSSLPPTVNGYHASGTPAHPPETAHMSVRKSTGDSQNLGSSSPSKKQSKENTITELERLEVERVEMIRQHLCQYTQLRHETDMFNQSTVEPVDQLLRKVDPAKDRELWVREHKTGNIRPVDMEI

SEQ ID NO: 76259 - protein, 62 aa, Homo sapiens
MPRWWYNVTDGSCQLFVYGGCDGNSNNYLTKEECLKKCATVTENATGDLATSRNAADSSVPS

SEQ ID NO: 76260 - protein, 135 aa, Homo sapiens
MAGAGPTMLLREENGCCSRRQSSSSAGDSDGEREDSAAERARQQLEALLNKTMRIRMTDGRTLVGCFLCTDRDCNVILGSAQEFLKPSGQCPGNAHPPDSFSAGEPRVLGLAMVPGHHIVSIEVQRESLTGPPYL

SEQ ID NO: 76261 - protein, 71 aa, Homo sapiens
MACAAVMIPGLLRCSVGAIRIEAASLRLTLSTLRHLTLTSIMKSKRKTDHMERTASVLRRESNLFHQGRKH

SEQ ID NO: 76262 - protein, 37 aa, Homo sapiens
MLLYPAGFSFASLKSGTCACTQTGRAGEAGGLRKAGS

SEQ ID NO: 76263 - protein, 146 aa, Homo sapiens
MRGRQVAPETGGGCTGLSANTVCAGVRAVSLSSVKLRLLCSQVLKELLGQGIDYEKILKLTADAKFESGDVKATVAVLSFILSSAAKHSVDGESLSSELQQLGLPKEHAASLCRCYEEKQSPLQKHLRVCSLRKLKQAQTLMSSLG

SEQ ID NO: 76264 - protein, 130 aa, Homo sapiens
MVKSSLQRILNSHCFAREKEGDKPSATIHASRTMPLLSLHSRGGSSSERWPVSTAWCTWSPRPGAPKAKTTASSTTRSGPIFRTTSARHLSCSCATGRPPCSAPQPTSPPVASATRSRWWRGGTAPSMRK

SEQ ID NO: 76265 - protein, 133 aa, Homo sapiens
MILTKAQYDEIAQCLVSVPPTRQSLRKLKQRFPSQSQATLLSIFSQEYQKHIKRTHAKHHTSEAIESYYQRYLNGVVKNGAAPVLLDLANEVDYAPSLMARLILERFLQEHEETPPRPEKYYFQMQSLQVYYK

SEQ ID NO: 76266 - protein, 190 aa, Homo sapiens
  MOD_RES (1)..(1): Any amino acid
XGILPPDVGAGKVQAVNPRISNLTAAAAETYANISWEYEGPEHVNFYVEYGVAGTMASRQVDIATQGWFIGLMCAVALLILILLIVCFIRRNKGGKYPVKEKEDAHADPEIQPMKEDDGTFGEYSDAEDHKPLKKGSRTPSDRTVKKEDSDDSLVDYGEGVNGQFNEDGSFIGQYSGKKEKEPAEGNESS

SEQ ID NO: 76267 - protein, 151 aa, Homo sapiens
NQRAGWSAGLPLWTHMRAVLAREMDGRRVLGRFWSGWRRGLGVRPVPEDAGFGTEARHQRQPRGSCQRSGPLGDQPFAGLLPKNLSREELVDALRAAVVDRKGPLVTLNKPQGLPVTGKPGELTLFSVLPELSQSLGLREQELQVVRASGK

SEQ ID NO: 76268 - protein, 814 aa, Homo sapiens
MVLRRMHRPRSCSYQLLLEHQRPSCIQGLRWTPLTNSEESLDFSESLEQASTERVLRAGRQLHRHLLATCPNLIRDRKYHLRLYRQCCSGRELVDGILALGLGVHSRSQVVGICQVLLDEGALCHVKHDWAFQDRDAQFYRFPGPEPEPVRTHEMEEELAEAVALLSQRGPDALLTVALRKPPGQRTDEELDLIFEELLHIKAVAHLSNSVKRELAAVLLFEPHSKAGTVLFSQGDKGTSWYIIWKGSVNVVTHGKGLVTTLHEGDDFGQLALVNDAPRAATIILREDNCHFLRVDKQDFNRIIKDVEAKTMRLEEHGKVVLVLERASQGAGPSRPPTPGRNRYTVMSGTPEKILELLLEAMGPDSSAHDPTETFLSDFLLTHRVFMPSAQLCAALLHHFHVEPAGGSEQERSTYVCNKRQQILRLVSQWVALYGSMLHTDPVATSFLQKLSDLVGRDTRLSNLLREQWPERRRCHRLENGCGNASPQMKARNLPVWLPNQDEPLPGSSCAIQVGDKDAIGLQPDARGVATSLGLNERLFVVNPQEVHELIPHPDQLGPTVGSAEGLDLVSAKDLAGQLTDHDWSLFNSIHQVELIHYVLGPQHLRDVTTANLERFMRRFNELQYWVATELCLCPVPGPRAQLLRKFIKLAAHNSAISRLAHTWERLPHKVRKLYSALERLLDPSWNHRVYRLALAKLSPPVIPFMPLLLKDMTFIHEGNHTLVENLINFEKMRMMARAARMLHHCRSHNPVPLSPLRSRVSHLHEDSQVARISTCSEQSLSTRSPASTWAYVQQLKVIDNQRELSRLSRELEP

SEQ ID NO: 76269 - protein, 71 aa, Homo sapiens
  MOD_RES (1)..(1): Any amino acid
XFFENYTGVQVSRLPLPGLGVHPSSRGRGPLRSPTAGEGHPAGPADPARRARAASPPSSPHASCRSAEIAL

SEQ ID NO: 76270 - protein, 370 aa, Homo sapiens
MPGRSCVALVLLAAAVSCAVAQHAPPWTEDCRKSTYPPSGPTYRGAVPWYTINLDLPPYKRWHELMLDKAPVLKVIVNSLKNMINTFVPSGKIMQVVDEKLPGLLGNFPGPFEEEMKGIAAVTDIPLGHLIHGRNMDFGVFLGWNINNDTWVITEQLKPLTVNLDFQRNNKTVFKASSFAGYVGMLTGFKPGLFSLTLNERFSINGGYLGILEWILGKKDVMWIGFLTRTVLENSTSYEEAKNLLTKTKILAPAYFILGGNQSGEGCVITRDRKESLDVYELDAKQGRWYVVQTNYDRWKHPFFLDDRRTPAKMCLNRTSQENISFETMYDVLSTKPVLNKLTVYTTLIDVTKGQFETYLRDCPDPCIGW

SEQ ID NO: 76271 - protein, 58 aa, Homo sapiens
MAVGLCKAMSQGLVTFRDVALDFSQEEWEWLKPSQKDLYRDVMLENYRNLDSPFLSPT

SEQ ID NO: 76272 - protein, 399 aa, Homo sapiens
MLQDPDSDQPLNSLVKVILDKYYFLCGQPLHFIPRKQLCDGELDCPLGEDEEHCVKSFPEGPAVAVRLSKDRSTLQVLDSATGNWFSACFDNFTEALAETACRQMGYSSKPTFRAVEIGPDQDLDVVEITENSQELRMRNSSGPCLSGSLVSLHCLACGKSLKTPRVVGVEEASVDSWPWQVSIQYDKQHVCGGSILDPHWVLTAAHCFRKHTDVFNWKVRAGSDKLGSFPSLAVAKIIIIEFNPMYPKDNDIALMKLQFPLTFSGTVRPICLPFFDEELTPATPLWIIGWGFTKQNGGKMSDILLQASVQVIDSTRCNADDAYQGEVTEKMMCAGIPEGGVDTCQGDSGGPLMYQSDQWHVVGIVSWGYGCGGPSTPGVYTKVSAYLNWIYNVWKAEL

SEQ ID NO: 76273 - protein, 358 aa, Homo sapiens
MSVKEGAQRKWAALKEKLGPQDSDPTEANLESADPELCIRLLQMPSVVNYSGLRKRLEGSDGGWMVQFLEQSGLDLLLEALARLSGRGVARISDALLQLTCVSCVRAVMNSRQGIEYILSNQGYVRQLSQALDTSNVMVKKQVFELLAALCIYSPEGHVLTLDALDHYKTVCSQQYRFSIVMNELSGSDNVPYVVTLLSVINAVILGPEDLRARTQLRNEFIGLQLLDVLARLRDLEDADLLIQLEAFEEAKAEDEEELLRVSGGVDMSSHQEVFASLFHKVSCSPVSAQLLSVLQGLLHLEPTLRSSQLLWEALESLVNRAVLLASDAPPWREAWRRSSWPRWTMAWAQHGSPAIGG

SEQ ID NO: 76274 - protein, 37 aa, Homo sapiens
  MOD_RES (1)..(1): Any amino acid
XIFSQKPEFQDLSVFFLKLQWKNAVLLKSTDGRRICT

SEQ ID NO: 76275 - protein, 69 aa, Homo sapiens
MSGGGGGGGSAPSRFADYFVICGLDTETGLEPDELSALCQYIQASKARDGASPFISSTTEEIIEMHSLF

SEQ ID NO: 76276 - protein, 159 aa, Homo sapiens
MSLSPPCFTEEDRFSLEALQTIHKQMDDDKDGGIEVEESDEFIREDMKYKDATNKHSHLHREDKHITIEDLWKRWKTSEVHNWTLEDTLQWLIEFVELPQYEKNFRDNNVKGTTLPRIAVHEPSFMISQLKISDRSHRQKLQLKALDVVLFGPLTRPPH

SEQ ID NO: 76277 - protein, 1267 aa, Homo sapiens
MPLDFLPLCSALVHSDIFMYYRFINCPHVVLGQFVCIAQQDYWRILNHVEKNTHKVEEEGEIVMVHEHRELDRSGTRKGHIVIKATPERLIMHLIEEHSIVDPTYIEDFLLTYRTFLESPLDVGIKLLEWFKIDSLRDKVTRIVLLWVNNHFNDFEGDPAMTRFLEEFEKNLEDTKMNGHLRLLNIACAAKAKWRQVVLQKASRESPLQFSLNGGSEKGFGIFVEGVEPGSKAADSGLKRGDQIMEVNGQNFENITFMKAVEILRNNTHLALTVKTNIFVFKELLFRTEQEKSGVPHIPKIAEKKSNRHSIQHVPGDIEQTSQEKGSKKVKANTVSGGRNKIRKILDKTRFSILPPKLFSDGGLSQSQDDSIVGTRHCRHSLAIMPIPGTLSSSSPDLLQPTTSMLDFSNPSDIPDQVIRVFKVDQQSCYIIISKDTTAKEVVFHAVHEFGLTGASDTYSLCEVSVTPEGVIKQRRLPDQFSKLADRIQLNGRYYLKNNMETETLCSDEDAQELVKESQLSMLQLSTIEVATQLSMRDFDLFRNIEPTEYIDDLFKLNSKTGNTHLKRFEDIVNQETFWVASEILTEANQLKRMKIIKHFIKIALHCRECKNFNSMFAIISGLNLASVARLRGTWEKLPSKYEKHLQDLQDIFDPSRNMAKYRNILSSQSMQPPIIPLFPVVKKDMTFLHEGNDSKVDGLVNFEKLRMISKEIRQVVRMTSANMDPAMMFRQRSLSQGSTNSNMLDVQGGAHKKRARRSSLLNAKKLYEDAQMARKVKQYLSSLDVETDEEKFQMMSLQWEPAYGTLTKNLSEKRSAKSSEMSPVPMRSAGQTTKAHLHQPHRVSQVLQVPAVNLHPIRKKGQTKDPALNTSLPQKVLGTTEEISGKKHTEDTISVASSLHSSPPASPQGSPHKGYTLIPSAKSDNLSDSSHSEISSRSSIVSNCSVDSMSAALQDERCSSQALAVPESTGALEKTEHASGIGDHSQHGPGWTLLKPSLIKCLAVSSSVSNEEISQEHIIIEAADSGRGSWTSCSSSSHDNFQSLPNPKSWDFLNSYRHTHLDDPIAEVEPTDSEPYSCSKSCSRTCGQCKGSLERKSWTSSSSLSDTYEPNYGTVKQRVLESTPAESSEGLDPKDATDPVYKTVTSSTEKGLIVYCVTSPKKDDRYREPPPTPPGYLGISLADLKEGPHTHLKPPDYSVAVQRSKMMHNSLSRLPPASLSSNLVACVPSKIVTQPQRHNLQPFHPKLGDVTDADSEADENEQVSAV

SEQ ID NO: 76278 - protein, 1229 aa, Homo sapiens
MDREERKTINQGQEDEMEIYGYNLSRWKLAIVSLGVICSGGFLLLLLYWMPEWRVKATCVRAAIKDCEVVLLRTTDEFKMWFCAKIRVLSLETYPVSSPKSMSNKLSNGHAVCLIENPTEENRHRISKYSQTESQQIRYFTHHSVKYFWNDTIHNFDFLKKLLYGVNEIAVKVPSVFKLLIKEVLNPFYIFQLFSVILWSTDEYYYYALAIVVMSIVSIVSSLYSIRKQYVMLHDMVATHSTVRVSVCRVNEEIEEIFSTDLVPGDVMVIPLNGTIMPCDAVLINGTCIVNESMLTGESVPVTKTNLPNPSVDVKGIGDELYNPETHKRHTLFCGTTVIQTRFYTGELVKAIVVRTGFSTSKGQLVRSILYPKPTDFKLYRDAYLFLLCLVAVAGIGFIYTIINSILNEVQVGVIIIESLDIITITVPPALPAAMTAGIVYAQRRLKKIGIFCISPQRINICGQLNLVCFDKTGTLTEDGLDLWGIQRVENARFLSPEENVCNEMLVKSQFVACMATCHSLTKIEGVLSGDPLDLKMFEAIGWILEEATEEETALHNRIMPTVVRPPKQLLPESTPAGNQEMELFELPATYEIGIVRQFPFSSALQRMSVVARVLGDRKMDAYMKGAPEAIAGLCKPETVPVDFQNVLEDFTKQGFRVIALAHRKLESKLTWHKVQNISRDAIENNMDFMGLIIMQNKLKQETPAVLEDLHKANIRTVMVTGDSMLTAVSVARDCGMILPQDKVIIAEALPPKDGKVAKINWHYADSLTQCSHPSAIDPEAIPVKLVHDSLEDLQMTRYHFAMNGKSFSVILEHFQDLVPKLMLHGTVFARMAPDQKTQLIEALQNVDYFVGMCGDGANDCGALKRAHGGISLSELEASVASPFTSKTPSISCVPNLIREGRAALITSFCVFKFMALYSIIQYFSVTLLYSILSNLGDFQFLFIDLAIILVVVFTMSLNPAWKELVAQRPPSGLISGALLFSVLSQIIICIGFQSLGFFWVKQQPWYEVWHPKSDACNTTGSGFWNSSHVDNETELDEHNIQNYENTTVFFISSFQYLIVAIAFSKGKPFRQPCYKNYFFVFSVIFLYIFILFIMLYPVASVDQVLQIVCVPYQWRVTMLIIVLVNAFVSITVENFFLDMVLWKVVFNRDKQGEYRFSTTQPPQESVDRWGKCCLPWALGCRKKTPKAKYMYLAQELLVDPEWPPKPQTTTEAKALVKENGSCQIITIT

SEQ ID NO: 76279 - protein, 520 aa, Homo sapiens
TGDNLSSMLLENLTDNESENTNLKKKVFEKEAHIQELSCLFQSEKANTLKANRFSQSVKVVHERLQIQIHKREAENDKLKEYVKSLETKIAKWNLQSRMNKNEAIVMKEASRQKTVALKKASKVYKQRLDHFTGAIEKLTSQIRDQEAKLSETISASNAWKSHYEKIVIEKTELEVQIETMKKQIINLLEDLKKMEDHGKNSCEEILRKVHSIEYENETLNLENTKLKTTLAALKDEVVSVENELSELQEVEKKQKTLIEMYKTQVQKLQEAAEIVKSRCENLLHKNNQITKTKNKNVEKMRGQMESHLKELERVCDSLTAAERRLHECQESLQCCKGKCADQEHTIRELQGQVDGNHNLLTKLSLEEENCLIQLKCENLQQKLEQMDAENKELEKKLANQEECLKHSNLKFKEKSAEYTALARQLEAALEEGRQKVAEEIEKMSSRESALQIKILDLETELRKKNEEQNQLVCKMNSKAQHQEVCLKEVQNSLEKSENQNESIKNYLQFLKTSYVTMFE

SEQ ID NO: 76280 - protein, 243 aa, Homo sapiens
MSDSKEPRLQQLGLLEEEQLRGLGFRQTRGYKSLAGCLGHGPLVLQLLSFTLLAGLLVQVSKVPSSISQEQSRQDAIYQNLTQLKAAVERLCHPCPWEWTFFQGNCYFMSNSQRNWHDSITACKEVGAQLVVIKSAEEQNFLQLQSSRSNRFTWMGLSDLNQEGTWQWVDGSPLLPSFKQYWNRGEPNNVGEEDCAEFSGNGWNDDKCNLAKFWICKKSAASCSRDEEQFLSPAPATPNPPPA

SEQ ID NO: 76281 - protein, 94 aa, Homo sapiens
MPGISARGLSHEGRKQLAVNLTRVLALYRSILDAYIIVQVSVATHPAGPEVHGVCPGLYPDAWLSDPLRIPGEPQPELPTNSSIPETCQAQEAA

SEQ ID NO: 76282 - protein, 60 aa, Homo sapiens
NRELQIMRKLDHCNIVRLRYFFYSSGEKVLGTPTREQIREMNPNYTEFKFPQIKAHPWTK

SEQ ID NO: 76283 - protein, 1476 aa, Homo sapiens
MEPGCDEFLPPPECPVFEPSWAEFQDPLGYIAKIRPIAEKSGICKIRPPADWQPPFAVEVDNFRFTPRVQRLNELEIVIEEGGYEAICKDRRWARVAQRLHYPPGKNIGSLLRSHYERIIYPYEMFQSGANHVQCNTHPFDNEVKDKEYKPHSIPLRQSVQPSKFSSYSRRAKRLQPDPEPTEEDIEKHPELKKLQIYGPGPKMMGLGLMAKDKDKTVHKKVTCPPTVTVKDEQSGGGNVSSTLLKQHLSLEPCTKTTMQLRKNHSSAQFIDSYICQVCSRGDEDDKLLFCDGCDDNYHIFCLLPPLPEIPRGIWRCPKCILAECKQPPEAFGFEQATQEYSLQSFGEMADSFKSDYFNMPVHMVPTELVEKEFWRLVSSIEEDVTVEYGADIHSKEFGSGFPVSNSKQNLSPEEKEYATSGWNLNVMPVLDQSVLCHINADISGMKVPWLYVGMVFSAFCWHIEDHWSYSINYLHWGEPKTWYGVPSLAAEHLEEVMKMLTPELFDSQPDLLHQLVTLMNPNTLMSHGVPVVRTNQCAGEFVITFPRAYHSGFNQGYNFAEAVNFCTADWLPAGRQCIEHYRRLRRYCVFSHEELICKMAAFPETLDLNLAVAVHKEMFIMVQEERRLRKALLEKGVTEAEREAFELLPDDERQCIKCKTTCFLSALACYDCPDGLVCLSHINDLCKCSSSRQYLRYRYTLDELPTMLHKLKIRAESFDTWANKVRVALEVEDGRKRSFEELRALESEARERRFPNSELLQRLKNCLSEVEACIAQVLGLVSGQVARMDTPQLTLTELRVLLEQMGSLPCAMHQIGDVKDVLEQVEAYQAEAREALATLPSSPGLLRSLLERGQQLGVEVPEAHQLQQQVEQAQWLDEVKQALAPSAHRGSLVIMQGLLVMGAKIASSPSVDKARAELQELLTIAERWEEKAHFCLEARQKHPPATLEAIIRETENIPVHLPNIQALKEALTKAQAWIADVDEIQNGDHYPCLDDLEGLVAVGRDLPVGLEELRQLELQVLTAHSWREKASKTFLKKNSCYTLLEVLCPCADAGSDSTKRSRWMEKALGLYQCDTELLGLSAQDLRDPGSVIVAFKEGEQKEKEGILQLRRTNSAKPSPLAPSLMASSPTSICVCGQVPAGVGVLQCDLCQDWFHGQCVSVPHLLTSPKPSLTSSPLLAWWEWDTKFLCPLCMRSRRPRLETILALLVALQRLPVRLPEGEALQCLTERAIGWQDRARKALASEDVTALLRQLAELRQQLQAKPRPEEASVYTSATACDPIREGSGNNISKVQGLLENGDSVTSPENMAPGKGSDLELLSSLLPQLTGPVLELPEAIRAPLEELMMEGDLLEVTLDENHSIWQLLQAGQPPDLDRIRTLLELEKFEHQGSRTRSRALERRRRRQKVDQGRNVENLVQQELQSKRARSSGIMSQVGREEEHYQEKADRENMFLTPSTDHSPFLKGNQNSLQHKDSG

SEQ ID NO: 76284 - protein, 96 aa, Homo sapiens
  MOD_RES (1)..(1): Any amino acid
XLARELNFSVDEINQIRVENPNSLISQSFMLLKKWVTRDGKNATTDALTSVLTKINRIDIVTLLEGPIFDYGNISGTRSFADENNVFHDPVDGNRI

SEQ ID NO: 76285 - protein, 276 aa, Homo sapiens
MWAFSELPMPLLINLIVSLLGFVATVTLIPAFRGHFIAARLCGQDLNKTSRQQIPESQGVISGAVFLIILFCFIPFPFLNCFVKEQCKAFPHHEFVALIGALLAICCMIFLGFADDVLNLRWRHKLLLPTAASLPLLMVYFTNFGNTTIVVPKPFRPILGLHLDLGILYYVYMGLLAVFCTNAINILAGINGLEAGQSLVISASIIVFNLVELEGDCRDDHVFSLYFMIPFFFTTLGLLYHNWCSTSSTHCLSSCISSPALATAYPDSISRQANWR

SEQ ID NO: 76286 - protein, 508 aa, Homo sapiens
MSAAPAYSEDKGGSAGPGEPEYGHDPASGGIFSSDYKRHDDLKEMLDTNKDSLKLEAMKRIVAMIARGKNASDLFPAVVKNVACKNIEVKKLVYVYLVRYAEEQQDLALLSISTFQRGLKDPNQLIRASALRVLSSIRVPIIVPIMMLAIKEAASDMSPYVRKTAAHAIPKLYSLDSDQKDQLIEVIEKLLADKTTLVAGSVVMAFEEVCPERIDLIHKNYRKLCNLLIDVEEWGQVVIISMLTRYARTQFLSPTQNESLLEENAEKAFYGSEEDEAKGAGSEETAAAAAPSRKPYVMDPDHRLLLRNTKPLLQSRSAAVVMAVAQLYFHLAPKAEVGVIAKALVRLLRSHSEVQYVVLQNVATMSIKRRGMFEPYLKSFYIRSTDPTQIKILKLEVLTNLANETNIPTVLREFQTYIRSMDKDFVAATIQAIGRCATNIGRVRDTCLNGLVQLLSNRDELVVAESVVVIKKLLQMQPAQHGEIIKHLAKLTDNIQVFRWKEQRHWTM

SEQ ID NO: 76287 - protein, 87 aa, Homo sapiens
MGPGQPASTCVHLAPRTQLDGRSDPKVLQTQNQLQFNRNVPTHSSNLAIRYSCPHAIRIEKLKHSYNESYHCKDADCRVGPDLGSSV

SEQ ID NO: 76288 - protein, 21 aa, Homo sapiens
MARLGNCSLTWAALIILLLPG

SEQ ID NO: 76289 - protein, 236 aa, Homo sapiens
MSRRYDSRTTIFSPEGRLYQVEYAMEAIGHAGTCLGILANDGVLLAAERRNIHKLLDEVFFSEKIYKLNEDMACSVAGITSDANVLTNELRLIAQRYLLQYQEPIPCEQLVTALCDIKQAYTQFGGKRPFGVSLLYIGWDKHYGFQLYQSDPSGNYGGWKATCIGNNSAAAVSMLKQDYKEGEMTLKSALALAIKVLNKTMDVSKLSAEKVEIATLTRENGKTVIRVLKQKEVEQL

SEQ ID NO: 76290 - protein, 169 aa, Homo sapiens
  MOD_RES (1)..(1): Any amino acid
XPKVFRQYWDIPDGTDCHRKAYSTTSIASVAGLTAAAYRVTLNPPGTFLEGVAKVGQYTFTADTGSERPRGSCCARLEALALPVYPAAAVGAVFGLTTCISAHVREKPDDPLNYFLGGCAGGLTLGARTTLTHGSPGPSQATVAVAPLSGRAAVSAAGGCVFLLLPACV

SEQ ID NO: 76291 - protein, 355 aa, Homo sapiens
MDSEGLQTKVVENQTYDERLEINDSEEVASIYTPTPRHQGLPRSAHLPNKAMADNSSDECEEENNKEKKKTSQLTPQRGFSENEDDDDDDDDSSETDSDSDDDDEEHGAPLEGAYDPADYEHLPVSAEIKELFQYISRYTPQLIDLDHKLKPFIPDFIPAVGDIDAFLKVPRPDGKPDNLGLLVLDEPSTKQSDPTVLSLWLTENSKQHNITQHMKVKSLEDAEKNPKAIDTWIESISELHRSKPPATVHYTRPMPDIDTLMQEWSPEFEELLGKVSLPTAEIDCSLAEYIDMICAILDIPVYKSRIQSLHLLFSLYSEFKNSQHFKALAEGKKAFTPSSNSTSQAGDMETLTFS

SEQ ID NO: 76292 - protein, 112 aa, Homo sapiens
MLAIGLSLCDHLSQDVFCLHESKFEEERMVAGWLTNYSQDSVTFEDVAVDFTQEEWTLLDQTQRNLYRDVMLENYKNLVAVDWESHINTKWSAPQQNFLQGKTSSVVEMNSE

SEQ ID NO: 76293 - protein, 42 aa, Homo sapiens
  MOD_RES (1)..(1): Any amino acid
XQLVVAGTIIIQNIGAMSSYLLIIKTELPAAIAEFLTGDYSR

SEQ ID NO: 76294 - protein, 370 aa, Homo sapiens
MQLPRWWELGDPCAWTGQGRGTRRMSPATTGTFLLTVYSIFSKVHSDRNVYPSAGVLFVHVLEREYFKGEFPPYPKPGEISNDPITFNTNLMGYPDRPGWLRYIQRTPYSDGVLYGSPTAENVGKPTIIEITAYNRRTFETARHNLIINIMSAEDFPLPYQAEFFIKNMNVEEMLASEVLGDFLGAVKNVWQPERLNAINITSALDRGGRVPLPINDLKEGVYVMVGADVPFSSCLREVENPQNQLRCSQEMEPVITCDKKFRTQFYIDWCKISLVDKTKQVSTYQEVIRGEGILPDGGEYKPPSDSLKSRDYYTDFLITLAVPSAVALVLFLILAYIMCCRREGVEKRNMQTPEEQMKRPFIQVFQNLQ

SEQ ID NO: 76295 - protein, 106 aa, Homo sapiens
MESVTFEDVAVEFIQEWALLDSARRSLCKYRMLDQCRTLASRGTPPCKPSCVSQLGQRAEPKATERGILRATGVAWESQLKPEELPSMQDLLEEASSRDMQMVDPM

SEQ ID NO: 76296 - protein, 202 aa, Homo sapiens
LRIDPVPNTHPLLVFVNPKSGGKQGQRLRLFKDVPDSRILVCGGDGTVGWILETIDKANLPVLPPVAVLPLGTGNDLARCLRWGGGYEGQNLAKILKDLEMSKVVHMDRWSVEVIPQQTEEKSDPVPFQIINNYFSIGVDASIAHRFHIMREKYPEKFNSRMKNKLWYFEFATSESIFSTCKKLEESLTVEICGKPLDLSNL

SEQ ID NO: 76297 - protein, 118 aa, Homo sapiens
MSKLPRELTRDLERSLPAVASLGSSLSHSQSLSSHLLPPPEKRRAISDVRRTFCLFVTFDLLFISLLWIIELNTNTGIRKNLEQEIIQYNFKTSFFDIFVLAFFRFSGLLLGYAVLRL

SEQ ID NO: 76298 - protein, 172 aa, Homo sapiens
MAMQMQLEANADTSVEEESFGPQPISRLEQCGINANDVKKLEEAGFHTVEAVAYAPKKELINIKGISEAKADKILAEAAKLVPMGFTTATEFHQRRSEIIQITTGSKELDKLLQGGIETGSITEMFGEFRTGKTQICHTLAVTCQLPIDRGGGEGKAMYIDTEGTFRPERLL

SEQ ID NO: 76299 - protein, 463 aa, Homo sapiens
MGTRSAIAAPRILCSRGLRSGSARATGSGVERSPSAANPTLMTSLRTWPLPWALPSPTCLGPPIPPRRQRIFSFEINVSVAIITFASEPKVLMSVLNDNSRDMTEVISSLENANYKDHENGTGTNTYAALNSVYLMMNNQMRLLGMETMAWQEIRHAIILLTDGKSNMGGSPKTAVDHIREILNINQKRNDYLDIYAIGVGKLDVDWRELNELGSKKDGERHAFILQDTKALHQVFEHMLDVSKLTDTICGVGNMSANASDQERTPWHVTIKPKSQETCRGALISDQWVLTAAHCFRDGNDHSLWRVNVGDPKSQWGKEFLIEKAVISPGFDVFAKKNQGILEFYGDDIALLKLAQKVKMSTHARPICLPCTMEANLALRRPQGSTCRDHENELLNKQSVPAHFVALNGSKLNINLKMGVEWTSCAEVVSQEKTMFPNLTDVREVVTDQFLCSGTQEDESPCK

SEQ ID NO: 76300 - protein, 176 aa, Homo sapiens [sequence omitted]

SEQ ID NO: 76301 - protein, 75 aa, Homo sapiens
MDQEPVGGVERGEAVAASGAAAAAAFGESAGQMSNERGFENVELGVIGKKKKVPRRVIHFVSGETMEEYSTDEDE

SEQ ID NO: 76302 - protein, 192 aa, Homo sapiens
MWQLWASLCCLLVLANARSRPSFHPLSDELVNYVNKRNTTWQAGHNFYNVDMSYLKRLCGTFLGGPKPPQSCNGGYPAEAWNFWTRKGLVSGGLYESHVGYNSYSVSNSEKDIMAEIYKNGPVEGAFSVYSDFLLYKSGVYQHVTGEMMGGHAIRILGWGVENGTPYWLVANSWNTDWGDNGEWLPPSCQEQ

SEQ ID NO: 76303 - protein, 226 aa, Homo sapiens
MSGSVLFTAGERWRCFLTPSRSSLYWALHNFCCRKKSTTPKKITPNVTFCDENAKEPENALDKLFSSEQQASILHVLNTASTKELEAFRLLRGRRSINIVEHRENFGPFQNLESLMNVPLFKYKSTVQVCNSILCPKTGREKRKSPENRFLRKLLKPDIERERLKAVNSIISIVFGTRRIAWAHLDRKLTVLDWQQSDRWSLMRGIYSSSVYLEEVRQLHLQIPTC

SEQ ID NO: 76304 - protein, 227 aa, Homo sapiens
PPSHIIGDEEIPENCLEQLEMGFPRGAQPAPLLCSVLKASGSLQQLSLDSATFASPQDFGLVLQTLKEYNLALKRLSFHDMNLADCQSEVLFLLQNLTLQEITFSFCRLFEKRPAQFLPEMVAAMKGNSTLKGLRLPGNRLGNAGLLALADVFSEDSSSSLCQLDISWSYTPKDKAGLLSDVANKARFLPRMPELTKCTKLKYSSRSFWMGVPEMSTRRLVFKLSRA

SEQ ID NO: 76305 - protein, 19 aa, Homo sapiens
MAELTVEVRGSNGAFYKAI

SEQ ID NO: 76306 - protein, 1887 aa, Homo sapiens
MPPATTVSLRELADLSIGTPEVGAVNFTALHTLIVAMLKNLDLQNTRIDFQPSSPEPSRSLQSVRSSFSIPHLPAPKEVPKGAPREKRRGVGQAPSSALESQVKDLGGQVEDLSKQLKRVDGQVQGIATHVQHFSQASGLDLAALEWPEEQEVGVRAFDRVRTGSIMKDAAEELSFARVLLQRVDELEKLFKDREQFLELVSRKLSLVPGAEEVTMVTWEELEQAITDGWRASQAGSETLMGFSKHGGFTSLTSPEGTLSGDSTKQPSIEQALDSASGLGPDRTASGSGGTAHPSDGVSSREQSKVPSGTGRQQQPRARDEAGVPRLHQSSTFQFKSDSDRHRSREKLTSTQPRRNARPGPVQQDLPLARDQPSSVPASQSQVHLRPDRRGLEPTGMNQPGLVPASTYPHGVVPLSMGQLGVPPPEMDDRELIPFVVDEQRMLPPSVPGRDQQGLELPSTDQHGLVSVSAYQHGMTFPGTDQRSMEPLGMDQRGCVISGMGQQGLVPPGIDQQGLTLPVVDQHGLVLPFTDQHGLVSPGLMPISADQQGFVQPSLEATGFIQPGTEQHDLIQSGRFQRALVQRGAYQPGLVQPGADQRGLVRPGMDQSGLAQPGADQRGLVWPGMDQSGLAQPGRDQHGLIQPGTGQHDLVQSGTGQGVLVQPGVDQPGMVQPGRFQRALVQPGAYQPGLVQPGADQIDVVQPGADQHGLVQSGADQSDLAQPGAVQHGLVQPGVDQRGLAQPRADHQRGLVPPGADQRGLVQPGADQHGLVQPGVDQHGLAQPGEVQRSLVQPGIVQRGLVQPGAVQRGLVQPGAVQRGLVQPGVDQRGLVQPGAVQRGLVQPGAVQHGLVQPGADQRGLVQPGVDQRGLVQPGVDQRGLVQPGMDQRGLIQPGADQPGLVQPGAGQLGMVQPGIGQQGMVQPQADPHGLVQPGAYPLGLVQPGAYLHDLSQSGTYPRGLVQPGMDQYGLRQPGAYQPGLIAPGTKLRGSSTFQADSTGFISVRPYQHGMVPPGREQYGQVSPLLASQGLASPGIDRRSLVPPETYQQGLMHPGTDQHSPIPLSTGLGSTHPDQQHVASPGPGEHDQVYPDAAQHGHAFSLFDSHDSMYPGYRGPGYLSADQHGQEGLDPNRTRASDRHGIPAQKAPGQDVTLFRSPDSVDRVLSEGSEVSSEVLSERRNSLRRMSSSFPTAVETFHLMGELSSLYVGLKESMKDLDEEQAGQTDLEKIQFLLAQMVKRTIPPELQEQLKTVKTLAKEVWQEKAKVERLQRILEGEGNQEAGKELKAGELRLQLGVLRVTVADIEKELAELRESQDRGKAAMENSVSEASLYLQDQLDKLRMIIESMLTSSSTLLSMSMAPHKAHTLAPGQIDPEATCPACSLDVSHQVSTLVRRYEQLQDMVNSLAVSRPSKKAKLQRQDEELLGRVQSAILQVQGDCEKLNITTSNLIEDHRQKQKDIAMLYQGLEKLEKEKANREHLEMEIDVKADKSALATKVSRVQFDATTEQLNHMMQELVAKMSGQEQDWQKMLDRLLTEMDNKLDRLELDPVKQLLEDRWKSLRQQLRERPPLYQADEAAAMRRQLLAHFHCLSCDRPLETPVTGHAIPVTPAGPGLPGHHSIRPYTVFELEQVRQHSRNLKLGSAFPRGDLAQMEQSVGRLRSMHSKMLMNIEKVQIHFGGSTKASSQIIRELLHAQCLGSPCYKRVTDMADYTYSTVPRRCGGSHTLTYPYHRSRPQHLPRGLYPTEEIQIAMKHDEVDILGLDGHIYKGRMDTRLPGILRKDSSGTSKRKSQQPRPHVHRPPSLSSNGQLPSRPQSAQISAGNTSVSSRQQKDRPSSEGRLSQPNTAHPPSSAAVANRGLERHVDMPPGEGLEEPTRGPRSSTAQ

SEQ ID NO: 76307 - protein, 35 aa, Homo sapiens
MQPILLLLAFLLLPRADAAGEKGQADQSCAAPQAT

SEQ ID NO: 76308 - protein, 910 aa, Homo sapiens
  MOD_RES (1)..(1): Any amino acid
XTSQSSKQPPPSIRLPSAQTPNGTDYVASGKSIQTPQSHGTLTAELWDNKVAPPAVLNDISKKCPISPPQPPSVSAWNKPLTSFGSAPSSEGAKNGQESGLEIGTDTIQFGAPASNGNENEVVPVLSEKSADKIPEPKEQRQKQPRAGPIKAQKLPDLSPVENKEHKPGPIGKERSLKNRKVKDAQQVEPEGQEKPSPATVRSTDPVTTKETKAVSEMSTEIGTMISVSSAEYGTNAKESVTDYTTPSSSLPNTVATNNTKMEDTLVNNVPLPNTLPLPKRETIQQSSSLTSVPPTTFSLTFKMESARKAWENSPNVREKGSPVTSTAPPIATGVSSSASGPSTANYNSFSSASMPQIPVASVTPTASLSGAGTYTTSSLSTKSTTTSDPPNICKVKPQQLQTSSLPSASHFSQLSCMPSLIAQQQQNPQVYVSQSAAAQIPAFYMDTSHLFNTQHARLAPPSLAQQQGFQPGLSQPTSVQQIPIPIYAPLQGQHQAQLSLGAGPAVSQAQELFSSSLQPYRSQPAFMQSSLSQPSVVLSGTAIHNFPTVQHQELAKAQSGLAFQQTSNTQPIPILYEHQLGQASGLGGSQLIDTHLLQARANLTQASNLYSGQVQQPGQTNFYNTAQSPSALQQVNYGMVTVPLPASQLSLPNFGSTGQPLIALPQTLQPPLQHTTPQAQAQSLSRPAQVSQPFRGLIPAGTQHSMIATTGKMSEMELKAFGSGIDIKPGTPPIAGRSTTPTSSPFRATSTSPNSQSSKMNSIVYQKQFQSAPATVRMTQPFPTQFAPQILSQPNLVPPLVRAPHTNTFPAPVQRPPMALASQMPPPLTTGLMSHARLPHVARGPCGSLSGVRGNQAQAALKAEQDMKKRAVGRGLSHKTFGPRCWQSREQRFFSPRNGSSLNSNRANR

SEQ ID NO: 76309 - protein, 115 aa, Homo sapiens
MNDFGIKNMDQVAPVANSYRGTLKRQPAFDTFDGSLFAVFPSLNEEQTLQEVPTGLDSISHDSANCELPLLTPCSKAVMSQALKATFSGFKKEQRRLGIPKNPWLWSEQQVCQWL

SEQ ID NO: 76310 - protein, 50 aa, Homo sapiens
MTTASTSQVRQNYHQDSEAAINRQINLELYASYVYLSMIVTATCLWGSLV

SEQ ID NO: 76311 - protein, 76 aa, Homo sapiens
MLRNLLALRQIGQRTISTASRRHFKNKVPEKQKLFQEQHMPYMSWLWLHFPRSRSDFSHPSNRLVQFHSALYGPVI

SEQ ID NO: 76312 - protein, 52 aa, Homo sapiens
MIPVTEFRQFSEQQPAFRVLKPWWDVFTDYLSVAMLMIGVFGCTLQEVHGCL

SEQ ID NO: 76313 - protein, 300 aa, Homo sapiens
MAELQEVQITEEKPLLPGQTPEAAKTHSVETPYGSVTFTVYGTPKPKRPAILTYHDVGLNYKSCFQPLFQFEDMQEIIQNFVRVHVDAPGMEEGAPVFPLGYQYPSLDQLADMIPCVLQYLNFSTIIGVGVGAGAYILARYALNHPDTVEGLVLINIDPNAKGWMDWAAHKLTGLTSSIPEMILGHLFSQEELSGNSELIQKYRNIITHAPNLDNIELYWNSYNNRRDLNFERGGDITLRCPVMLVVGDQAPHEDAVVECNSKLDPTQTSFLKMADSGGQPQLTQPGKLTEAFKYFLQGM

SEQ ID NO: 76314 - protein, 345 aa, Homo sapiens
MNITLYSFLYVLRLNEGNSTGRNIDERKKMQGENFTIWSIFFLEGFSQYPGLEVVLFVFSLVMYLTTLLGNSTLILITILDSRLKTPMYLFLGNLSFMDICYTSASVPTLLVNLLSSQKTIIFSGCAVQMYLSLAMGSTECVLLAVMAYDRYVAICNPLRYSIIMNRCVCARMATVSWVTGCLTALLETSFALQIPLCGNLIDHFTCEILAVLKLACTSSLLMNTIMLVVSILLLPIPMLLVCISYIFILSTILRITSAEGRNKAFSTCGAHLTVVILYYGAALSMYLKPSSSNAQKIDKIISLLYGVLTPMLNPIIYSLRNKEVKDAMKKLLGKITLHQTHEHL

SEQ ID NO: 76315 - protein, 427 aa, Homo sapiens
MTAAPASPQQIRDRLLQAIDPQSNEVRCETTVIRNMVAVLEVISSLEKYPITKEALEETRLGKLINDVRKKTKNEELAKRAKKLLRSWQKLIEPAHQHEAALRGLAGATGSANGGAHNCRPEVGAAGPPRSIHDLKSRNDLQRLPGQRLDRLGSRKRRGDQRDLGHPGPPPKVSKASHDPLVPNSSPLPTNGISGSPESFASSLDGSGHAGPEGSRLERDENDKHSGKIPVNAVRPHTSSPGLGKPPGPCLQPKASVLQQLDRVDETPGPPHPKGPPRCSFSPRNSRHEGSFARQQSLYAPKGSVPSPSPRPQALDATQVPSPLPLAQPSTPPVRRLELLPSAESPVCWLEQPESHQRLAGPGCKAGLSPAEPLLSRAGFSPDSSKADSDAASSGGSDSKKKKRSCEIHGSTISGCSTSWAATPSSL

SEQ ID NO: 76316 - protein, 442 aa, Homo sapiens
MNASEFRRRGKEMVDYMANYMEGIEGRQVYPDVEPGYLRPLIPAAAPQEPDTFEDIINDVEKIIMPGAASPACTELETVMMDWLGKMLELPKAFLNEKAGEGGGVIQGSASEATLVALLAARTKVIHRLQAASPELTQAAIMEKLVAYSSDQAHSSVERAGLIGGVKLKAIPSDGNFAMRASALQEALERDKAAGLIPFFMVATLGTTTCCSFDNLLEVGPICNKEDIWLHVDAAYAGSAFICPEFRHLLNGVEFADSFNFNPHKWLLVNFDCSAMWVKKRTDLTGAFRLDPTYLKHSHQDSGLITDYRHWQIPLGRRFRSLKMWFVFRMYGVKGLQAYIRKHVQLSHEFESLVRQDPRFEICVEVILGLVCFRLKGSNKVNEALLQRINSAKKIHLVPCHLRDKFVLRFAICSRTVESAHVQRAWEHIKELAADVLRAERE

SEQ ID NO: 76317 - protein, 649 aa, Homo sapiens
CLSCRNYSRGGVCVTHCNFLNGEPREFAHEAECFSCHPECQPMEGTATCNGSGSDTCAQCAHFRDGPHCVSSCPHGVLGAKGPIYKYPDVQNECRPCHENCTQGCKGPELQDCLGQTLVLIGKTHLTMALTVIAGLVVIFMMLGGTFLYWRGRRIQNKRAMRRYLERGESIEPLDPSEKTPIKWMALESIHFGKYTHQSDVWSYGVTVWELMTFGAEPYAGLRLAEVPDLLEKGERLAQPQICTIDVYMVMVKCWMIDENIRPTFKELANEFTRMARDPPRYLVIKRESGPGIAPGPEPHGLTNKKLEEVELEPELDLDLDLEAEEDNLATTTLGSALSLPVGTLNRPRGSQSLLSPSSGYMPMNQGNLGESCQESAVSGSSERCPRPVSLHPMPRGCLASESSEGHVTGSEAELQEKVSMCRSRSRSRSPRPRGDSAYHSQRHSLLTPVTPLSPPGLEEEDVNGYVMPDTHLKGTPSSREGTLSSVGLSSVLGTEEEDEDEEYEYMNRRRRHSPPHPPRPSSLEELGYEYMDVGSDLSASLGSTQSCPLHPVPIMPTAGTTPDEDYEYMNRQRDGGGPGGDYAAMGACPASEQGYEEMRAFQGPGHQAPHVHYARLKTLRSLEATDSAFDNPDYWHSRLFPKANAQRT

SEQ ID NO: 76318 - protein, 73 aa, Homo sapiens
MTPGVRVSTDPEQVTFEDVVVGFSQEEWGQLKPAQRTLYRDVMLDTFRLLVSVGSCSVTQAGVQWLNLSSLQP

SEQ ID NO: 76319 - protein, 84 aa, Homo sapiens
MADLSLLQEDLQEDADGSLDFVSQDEMLTPLGRLDKYAASENIFNRTNCESGADGTGASHRTVLSRKPAFNTICFFKILTTYCG

SEQ ID NO: 76320 - protein, 178 aa, Homo sapiens
MEDDAPVIYGLEFQESSSQAVLASSASLEGKGQLKFTSGRWSPHHNCTQVATANDTTLRGWDTRSMSQIYCIENAHGQLVRDLDFNPNKQYYLASCGDDCKVKFWDTRNVTEPVKTLEEHSHWVWNVRYNHSHDQLVLTGSSDSRVILSNMVSISSEPFGHLVDDDDISDQEDHRSEE

SEQ ID NO: 76321 - protein, 190 aa, Homo sapiens
NMCFPKIEVISSLSDDSDPELDYTSLPVLENLPTDTLSNIFAVSKDTSKAARVPFTDIFKKEAKRDLEIRKQDTKSPRPLIQELSDEDPSGQLLMPPTCQRDAAPLTSSGDRDSDFLAASSPEMGFHHVDQAGLELLTSGDLFASASQSAGITVPTESAATPPETCVGVAQPSQALPTWDLTAFPAPKAS

SEQ ID NO: 76322 - protein, 469 aa, Homo sapiens
MKWEDQNIGDQCQNAKRNLRSHTCEIKDDSQCGETFGQIPDSIVNKNTPRVNPCDSGECGEVVLGHSSLNCNIRVDTGHKSCEHQEYGEKPYTHKQRGKAISHQHSFQTHERPPTGKKPFDCKECAKTFSSLGNLRRHMAAHHGDGPYKCKLCGKAFVWPSLFHLHERTHTGEKPYECKQCSKAFPFYSSYLRHERIHTGEKAYECKQCSKAFPDYSTYLRHERTHTGEKPYKCTQCGKAFSCYYYTRLHERTHTGEQPYACKQCGKTFYHHTSFRRHMIRHTGDGPHKCKICGKGFDCPSSVRNHETTHTGEKPYECKQCGKVLSHSSSFRSHMITHTGDGPQKCKICGKAFGCPSLFQRHERTHTGEKPYQCKQCGKAFSLAGSLRRHEATHTGVKPYKCQCGKAFSDLSSFQNHETTHTGEKPYECKECGKAFSCFKYLSQHKRTHTVEKPYECKTCRKAFSHFSN

SEQ ID NO: 76323 - protein, 223 aa, Homo sapiens
MKIFCSRANPTTGSVEWLEEDEHYDYHQEIARSSYADMLHDKDRNVKYYQGIRAAVSRVKDRGQKALVLDIGTGTGLLSMMAVTAGADFCYAIEVFKPMADAAVKIVEKNGFSDKIKVINKHSTEVTVGPEGDMPCRANILVTELFDTELIGEGALPSYEHAHRHLVEENCEAVPHRATVYAQLVESGRMWSWNKLFPIHVQTSLGEQVIVPPVDVESCPGAP

SEQ ID NO: 76324 - protein, 152 aa, Homo sapiens
  MOD_RES (1)..(1): Any amino acid
XNFQFHDPAPRTVCNGGYTPRRDASQHPDPAWYQTWPGPGSKPSASTKIPASQHTQNWSATWTKDSKRRDKRWVKYEGIGPVDESGMPIAPRSSVDRPRDWYRRMFQQIHRKMPEEAGTTLKSYLEAPSTTDLEHSPLCCSPQIRCSDAGKK

SEQ ID NO: 76325 - protein, 1061 aa, Homo sapiens
MAAMAPALTDAAAEAHHIRFKLAPPSSTLSPGSAENNGNANILIAANGTKRKAIAAEDPSLDFRNNPTKEDLGKLQPLVASYLCSDVTSVPSKESLKLQGVFSKQTVLKSHPLLSQSYELRAELLGRQPVLEFSLENLRTMNTSGQTALPQAPVNGLAKKLTKSSTHSDHDNSTSLNGGKRALTSSALHGGEMGGSESGDLKGGMTNCTLPHRSLDVEHTTLYSNNSTANKSSVNSMEQPALQGSSRLSPGTDSSSNLGGVKLEGKKSPLSSILFSALDSDTRITALLRRQADIESRARRLQKRLQVVQAKQVERHIQHQLGGFLEKTLSKLPNLESLRPRSQLMLTRKAEAALRKAASETTTSEGLSNFLKSNSISEELERFTASGIANLRCSEQAFDSDVTDSSSGGESDIEEEELTRADPEQRHVPLRRRSEWKWAADRAAIVSRWNWLQAHVSDLEYRIRQQTDIYKQIRANKGLIVLGEVPPPEHTTDLFLPLSSEVKTDHGTDKLIESVSQPLENHGAPIIGHISESLSTKSCGALRPVNGVINTLQPVLADHIPGDSSDAEEQLHKKQRLNLVSSSSDGTCVAARTRPVLSCKKRRLVRPNSIVPLSKKVHRNSTIRPGCDVNPSCALCGSGSINTMPPEIHYEAPLLERLSQLDSCVHPVLAFPDDVPTSLHFQSMLKSQWQNKPFDKIKPPKKLSLKHRAPMPGSLPDSARKDRHKLVSSFLTTAKLSHHQTRPDRTHRQHLDDVGAVPMVERVTAPKAERLLNPPPPVHDPNHSKMRLRDHSSERSEVLKHHTDMSSSSYLAATHHPPHSPLVRQLSTSSDSPAPASSSSQVTASTSQQPVRRRRGESSFDINNIVIPMSVAATTRVEKLQYKEILTPSWREVDLQSLKGSPDEENEEIEDLSDAAFAALHAKCEEMERARWLWTTSVPPQRRGSRSPISPELHSAPLTPVARDTPRHLASEDTRCSTPELGLDEQSVQPWERRTFPLAHSPQAECEDQLDAQERAARCTRRTSGSKTGRETEAAPTSPPIVPLKSRHLVAAATAQRPTHR

SEQ ID NO: 76326 - protein, 859 aa, Homo sapiens
MRALAVLSVTLVMACTEAFFPFISRGKELLWGKPEESRVSSVLEESKRLVDTAMYATMQRNLKKRGILSPAQLLSFSKLPEPTSGVIARAAEIMETSIQAMKRKVNLKTQQSQHPTDALSEDLLSIIANMSGCLPYMLPPKCPNTCLANKYRPITGACNNRDHPRWGASNTALARWLPPVYEDGFSQPRGWNPGFLYNGFPLPPVREVTRHVIQVSNEVVTDDDRYSDLLMAWGQYIDHDIAFTPQSTSKAAFGGGSDCQMTCENQNPCFPIQLPEEARPAAGTACLPFYRSSAACGTGDQGALFGNLSTANPRQQMNGLTSFLDASTVYGSSPALERQLRNWTSAEGLLRVHARLRDSGRAYLPFVPPRAPAACAPEPGIPGETRGPCFLAGDGRASEVPSLTALHTLWLREHNRLAAALKALNAHWSADAVYQEARKVVGALHQIITLRDYIPRILGPEAFQQYVGPYEGYDSTANPTVSNVFSTAAFRFGHATIHPLVRRLDASFQEHPDLPGLWLHQAFFSPWTLLRGGYNEWREFCGLPRLETPADLSTAIASRSVADKILDLYKHPDNIDVWLGGLAENFLPRARTGPLFACLIGKQMKALRDGDWFWWENSHVFTDAQRRELEKHSLSRVICDNTGLTRVPMDAFQVGKFPEDFESCDSITGMNLEAWRETFPQDDKCGFPESVENGDFVHCEESGRRVLVYSCRHGYELQGREQLTCTQEGWDFQPPLCKDVNECADGAHPPCHASARCRNTKGGFQCLCADPYELGDDGRTCVDSGRLPRVTWISMSLAALLIGGFAGLTSTVICRWTRTGTKSTLPISETGGGTPELRCGKHQAVGTSPQRAAAQDSEQ

SEQ ID NO: 76327 - protein, 31 aa, Homo sapiens
  MOD_RES (1)..(1): Any amino acid
XGFGGSRGGGGYGGSGDGYNGFGNDGPLSHS

SEQ ID NO: 76328 - protein, 283 aa, Homo sapiens
MAAAAVSGALGRAGWRLLQLRCLPVARCRQALVPRAFHASAVGLRSSDEQKQQPPNSFSQQHSETQGAEKPDPESSHSPPRYTDQGGEEEEDYESEEQLQHRILTAALEFVPAHGWTAEAIAEGAQSLGLSSAAASMFGKDGSELILHFVTQCNTRLTRVLEEEQKLALSILMLPHNIPSSLSLLTSMVDDMWHYAGDQSTDFNWYTRRAMLAAIYNTTELVMMQDSSPDFEDTWRFLENRVNDAMNMGHTAKQVKSTGEALVQGLMGAAVTLKNLTGLNQRR

SEQ ID NO: 76329 - protein, 74 aa, Homo sapiens
MQKSCEENEGKPQNMPKAEEDRPLEDVPQEDTPVRHLDPEEMIRGVDELERLREEIRRVRNKFVMMHWKQRHSR

SEQ ID NO: 76330 - protein, 271 aa, Homo sapiens
MRATPLAAPAGSLSRKKRLELDDNLDTERPVQKRARSGPQPRLPPCLLPLSPPTAPDRATAVATASRLGPYVLLEPEEGGRAYQALHCPTGTEYTCKVYPVQEALAVLEPYARLPPHKHVARPTEVLAGTQLLYAFFTRTHGDMHSLVRSRHRIPEPEAAVLFRQMATALAHCHQHGLVLRDLKLCRFVFADRERKKLVLENLEDSCVLTGPDDSLWDKHACPAYVGPEILSSRASYSGKAADVWSLGVALFTMLAGHYPFQDSEPVLLFG

SEQ ID NO: 76331 - protein, 291 aa, Homo sapiens
MHQKLLKSAHYIELGSYQYWPVLVPRGIRLYTYEQIPGSLKDNPYITDGYRAYLPSRLCIKSLFILSNETVNIWSHLLGFFLFFTLGIYDMTSVLPSASASREDFVICSICLFCFQVCMLCSVGYHLFSCHRSEKTCRRWMALDYAGISIGILGCYVSGVFYAFYCNNYWRQVYLITVLAMILAVFFAQIHPNYLTQQWQRLRSIIFCSVSGYGVIPTLHWVWLNGGIGAPIVQDFAPRVIVMYMIALLAFLFYISKVPERYFPENIFRWKITKRTLGGVNNSLQNLYLLV

SEQ ID NO: 76332 - protein, 241 aa, Homo sapiens
  MOD_RES (1)..(1): Any amino acid
XEALPVRLLRPLLLRPHFQDAPPGDPRHGQGAQVPTLRQEVQPGNLKRHLRIHSGEKPYVCIHCQRQFADPGALQRHVRIHTGEKPCQCVMCGKAFTQASSLIAHVRQHTGEKPYVCERCGKRFVQSSQLANHIRHHDNIRPHKCSVCSKAFVNVGDLSKHIIIHTGEKPYLCDKCGRGFNRVDNLRSHVKTVHQGKAGIKILEPEEGSEVSVVTVDDMVTLATEALAATAVTQLTVVPVG

SEQ ID NO: 76333 - protein, 83 aa, Homo sapiens
  MOD_RES (1)..(1): Any amino acid
XTKLGHGLLSGQYSKPPVKSELIEQVMKEEHKRNRIGSENPSDVFRFLVEERIQCCQTRKVRYTERVDYLMQLPVAMEAATNK

SEQ ID NO: 76334 - protein, 145 aa, Homo sapiens
MEAMWLLCVALAVLAWGFLWVWDSSERMKSREQGGRLGAESRTLLVIAHPDDEAMFFAPTVLGLARLRHWVYLLCFSAGNYYNQGETRKKELLQSCDVLGIPLSSVMIIDNRLSYLRLMCLSEAQGPQQHTPVSQSSDYSSLGMG

SEQ ID NO: 76335 - protein, 112 aa, Homo sapiens
MDDKASVGKISVSSDSVSTLNSEDFVLVSRQGDETPSTNNGSDDEKTGLKIVGNGSEQQLQKELADVLMDPPMDDQPGEKELVKRSQLDGEGDGPLSNQLSASSTINPVPLV

SEQ ID NO: 76336 - protein, 153 aa, Homo sapiens
MQKGDTNIKPILQVINIRPITTGNSPPRYRLLMSDGLNTLSSFMLATQLNPLVEEEQLSSNCVCQIHRFIVNTLKDGRRVVILMELEVLKSAEAVGVKIGNPVPYNEGLGQPQVAPPAPAASPAASSRPQPQNGSSGMGSTVSKAYGASKTFG

SEQ ID NO: 76337 - protein, 102 aa, Homo sapiens
  MOD_RES (1)..(1): Any amino acid
XAYGVPPSAWTGSVDILLEYRSSENPVRYGQCWVFAGVFNTFLRCLGIPARIVTNYFSAHDNDANLQMDIFLEEDGNVNSKLTKDSVWYPSIPAAGMSPKSA

SEQ ID NO: 76338 - protein, 682 aa, Homo sapiens
  MOD_RES (1)..(1): Any amino acid
XHNHYVMCAQFHPTEDLVVSASLDQTVRVWDISDAVVKHVLEGHDRGVNWAAFHPTMPLIVSGADDRQVKIWRMNESKAWEVDTCRGHYNNVSCAVFHPRQELILSNSEDKSIRVWDMSKRTGVQTFRRDHDRFWVLAAHPNLNLFAAGHDGGMIVFKLERERPAYAVHGNMLHYVKDRFLRQLDFNSSKDVAVMQLRSGSKFPVFNMSYNPAENAVLLCTRASNLENSTYDLYTIPKDADSQNPDAPEGKRSSGLTAVWVARNRFAVLDRMHSLLIKNLKNEITKKVQVPNCDEIFYAGTGNLLLRDADSITLFDVQQKRTLASVKISKVKYVIWSADMSHVALLAKHAIVICNRKLDALCNIHENIRVKSGAWDESGVFIYTTSNHIKYAVTTGDHGIIRTLDLPIYVTRVKGNNVYCLDRECRPRVLTIDPTEFKFKLALINRKYDEVLHMVRNAKLVGQSIIAYLQKKGYPEVALHFVKDEKTRFSLALECGNIEIALEAAKALDDKNCWEKLGEVALLQGNHQIVEMCYQRTKNFDKLSFLYLITGNLEKLRKMMKIAEIRKDMSGHYQNALYLGDVSERVRILKNCGQKSLAYLTAATHGLDEEAESLKETFDPEKETIPDIDPNAKLLQPPAPIMPLDTNWPLLTVSKGFFEGTIASKGKGGALAADIDIDTVGT

SEQ ID NO: 76339 - protein, 209 aa, Homo sapiens; identical to SEQ ID NO: 43167

SEQ ID NO: 76340 - protein, 192 aa, Homo sapiens
MPSFQLPAMATSTMASFSHKDTEKGSMENEPVALEETQKTDPAMEPRFKVVDWDKDLVDWRKPLLWQVGHLGEKYDEWVHQPVTRPIRLFHSDLIEGLSKTVWYSVPIIWVPLVLYLSWSYYRTFAQGNVRLFTSFTTEYTVAVPKSMFPGLFMLGTFLWSLIEYLIHRFLFHMKPPSDSYYLIMLHFVMHG

SEQ ID NO: 76341 - protein, 197 aa, Homo sapiens
MEQFVQVIMEAWVKGVNPKGNSTNPSNWDFGSSFFFAGTVVTTIGYGNLAPSTEAGQVFCVFYALLGIPLNVIFLNHLGTGLRAHLAAIERWEDRPRRSQVLQVLGLALFLTLGTLVILIFPPMVFSHVEGWSFSEGFYFAFITLSTIGFGDYVVGLRQGCGAKAAPGRRPRRGSTAARGVQVTPQDFPISKKGLGS

SEQ ID NO: 76342 - protein, 141 aa, Homo sapiens
MIKFFLMVNKQGQTRLSKYYEHVDINKRTLLETEVIKSCLSRSNEQCSFIEYKDFKLIYRQYAALFIVVGVNDTENEMAIYEFIHNFVEVLDEYFSRVSELDVSFFNTVFHSTWQMHSGPYQMESRSVTQAGVQWHNLGSL

SEQ ID NO: 76343 - protein, 126 aa, Homo sapiens
LIPILHQKAKRGTPHQAKQAVHCIHAIFTNKEVQLAQIFEPLSRSLNADVPEQLITPLVSLGHISMLAPDQFASPMKSVVANFIVKDLLMNDRSTGEKNGKLWSPDEEVSPEVLAKHFGRQSRRIA

SEQ ID NO: 76344 - protein, 789 aa, Homo sapiens
MTSPAKFKKDKEIIAEYDTQVKEIRAQLTEQMKCLDQQCELRVQLLQDLQDFFRKKAEIEMDYSRNLEKLAERFLAKTRSTKDQQFKKDQNVLSPVNCWNLLLNQVKRESRDHTTLSDIYLNNIIPRFVQVSEDSGRLFKKSKEVGQQLQDDLMKVLNELYSVMKTYHMYNADSISAQSKLKEAEKQEEKQIGKSVKQEDRQTPRSPDSTANVRIEEKHVRRSSVKKIEKMKEKRQAKYTENKLKAIKARNEYLLALEATNASVFKYYIHDLSDLIDCCDLGYHASLNRALRTFLSAELNLEQSKHEGLDAIENAVENLDATSDKQRLMEMYNNVFCPPMKFEFQPHMGDMASQLCAQQPVQSELVQRCQQLQSRLSTLKIENEEVKKTMEATLQTIQDIVTVEDFDVSDCFQYSNSMESVKSTVSETFMSKPSIAKRRANQQETEQFYFTKMKEYLEGRNLITKLQAKHDLLQKTLGESQRTDCSLARRSSTVRKQDSSQAIPLVVESCIRFISRHGLQHEGIFRVSGSQVEVNDIKNAFERGEDPLAGDQNDHDMDSIAGVLKLYFRGLEHPLFPKDIFHDLMACVTMDNLQERALHIRKVLLVLPKTTLIIMRYLFAFLNHLSQFSEENMMDPYNLAICFGPSLMSVPEGHDQVSCQAHVNELIKTIIIQHENIFPSPRELEGPVYSRGGSMEDYCDSPHGETTSVEDSTQDVTAEHHTSDDECEPIEAIAKFDYVGRTARELSFKKGASLLLYQRASDDWWEGRHNGIDGLIPHQYIVVQDTLIS

SEQ ID NO: 76345 - protein, 673 aa, Homo sapiens
MLRMRVPALLVLLFCFRGRAGPSPHFLQQPEDLVVLLGEEARLPCALGAYWGLVQWTKSGLALGGQRDLPGWSRYWISGNAANGQHDLHIRPVELEDEASYECQATQAGLRSRPAQLHVLVPPEAPQVLGGPSVSLVAGVPANLTCRSRGDARPTPELLWFRDGVLLDGATFHQTLLKEGTPGSVESTLTLTPFSHDDGATFVCRARSQALPTGRDTAITLSLQYPPEVTLSASPHTVQEGEKVIFLCQATAQPPVTGYRWAKGGSPVLGARGPRLEVVADASFLTEPVSCEVSNAVGSANRSTALDVLFGPILQAKPEPVSVDVGEDASFSCAWRGNPLPRVTWTRRGGAQVLGSGATLRLPSVGPEDAGDYVCRAEAGLSGLRGGAAEARLTVNAPPVVTALHSAPAFLRGPARLQCLVFASPAPDAVVWSWDEGFLEAGSQGRFLVETFPAPESRGGLGPGLISVLHISGTQESDFSRSFNCSARNRLGEGGAQASLGRRASASFSEQKNLMRIPGSSDGSSSRGPEEEETGSREDRGPIVHTDHSDLVLEEEGTLETKDPTNGYYKVRGVSVSLSLGEAPGGGLFLPPPSPLGPPGTPTFYDFNPHLGMVPPCRLYRARAGYLTTPHPRAFTSYIKPTSFGPPDLAPGTPPFPYAAFPTPSHPRLQTHV

SEQ ID NO: 76346 - protein, 101 aa, Homo sapiens
MWNGRIRGIHRLGAAVAPEGNQKKKRTILQFLTNYFYDVEALRDYLLQREMYKVHEKNRSYTWLEKQHGPYGAGAFFILKQGGAVKFRDKEWIRPDKYGHF

SEQ ID NO: 76347 - protein, 106 aa, Homo sapiens
  MOD_RES (1)..(1): Any amino acid
XPTTSRPALDVKGGTSPAKEDANQEMSSVAYSNLAVKDRKAVAILHYPGVASNGTKSPAIIDSDPVDEEVLMSLVVELGLDRANELPELWLGQNEFDFTADFPSSC

SEQ ID NO: 76348 - protein, 234 aa, Homo sapiens
KVKTVCSKILANLEQGLAEDGGMSSVTQEGRQASIRLWRSRLGRVMYSMANCLLLMKDYVLAVEAYHSVIKYYPEQEPQLLSGIGRISLQQIGDIKTAEKYFQDVEKVTQKLDGLQGKIMVLMNSAFLHLGQNNFAEAHRFFTEILRMDPRNAVANNNAAVCLLYLGKLKDSLRQLEAMVQQDPRHYLHESVLFNLTTMYELESSRSMQKKQALLEAVAGKEGDSFNTQCLKLA

SEQ ID NO: 76349 - protein, 143 aa, Homo sapiens
MSVIFFACVVRVRDGLPLSASTDFYHTQDFLEWRRRLKSLALRLAQYPGRGSAEGCDFSIQHFKGSGRKTVSGIGRTEETIYLQQTATGLFKAKQVQNSVFLLSGTWPAWLSAPASVQQPWPSASWRPCGGNSQLPMTLPALA

SEQ ID NO: 76350 - protein, 392 aa, Homo sapiens
MSFFPELYFNVDNGYLEGLVRGLKAGVLSQADYLNLVQCETLEDLKLHLQSTDYGNFLANEASPLTVSVIDDRLKEKMVVEFRHMRNHAYEPLASFLDFITQESEAGTPEGPGNMPKLGSRPSPGHRPPFLRVSLLPWPPSSYSYMIDNVILLITGTLHQRSIAELVPKCHPLGSFEQMEAVNIAQTPAELYNAILVDTPLAAFFQDCISEQDLDEMNIEIIRNTLYKAYLESFYKFCTLLGGTTADAMCPILEFEADRRAFIITINSFGTELSKEDRAKLFPHCGRLYPEGLAQLARADDYEQVKNVADYYPEYKLLFEGAGSNPGDKTLEDRFFEHEVKLNKLAFLNQFHFGVFYAFVKLKEQECRNIVWIAECIAQRHRAKIDNYIPIF

SEQ ID NO: 76351 - protein, 129 aa, Homo sapiens
MREYKLVVLGSGGVGKSALTVQFVQGIFVEKYDPTIEDSYRKQVEVDCQQCMLEILDTAGTEQFTAMRDLYMKNGQGFALVYSITAQSTFNDLQDLREQILRVKDTEDVPMILVGNKCDLEDERVVGKE

SEQ ID NO: 76352 - protein, 1112 aa, Homo sapiens
MRTSLQAVALWGQKAPPHSITAIMITDDQRTIVTGSQEGQLCLWNLSHELKISAKELLFGHSASVTCLARARDFSKQPYIVSAAENGEMCVWNVTNGQCMEKATLPYRHTAICYYHCSFRMTGEGWLLCCGEYQDVLIIDAKTLAVVHSFRSSQFPDWINCMCIVHSMRIQEDSLLVVSVAGELKVWDLSSSINSIQEKQDVYEKESKFLESLNCQTIRFCTYTERLLLVVFSKCWKVYDYCDFSLLLTEVSRNGQFFAGGEVIAAHRILIWTEDGHSYIYQLLNRWAQMGAAYKTFSGLSKSIYPADGRVLKETIYPHLLCSTSVQENKSRPFVMGYMNERKEPFYKVLFSGEVSGRITLWHIPDVPVSKFDGSPREIPVTATWTLQDNFDKHDTMSQSIIDYFSGLKDGAGTAVVTSSEYIPSLDKLICGCEDGTIIITQALNAAKARLLEGGSLVKDSPPHKVLKGHHQSVTSLLYPHGLSSKLDQSWMLSGDLDSCVILWDIFTEEILHKFFLEAGPVTSLLMSPEKFKLRGEQIICCVCGDHSVALLHLEGKSCLLHARKHLFPVRMIKWHPVENFLIVGCADDSVYIWEIETGTLERHETGERARIILNCCDDSQLVKSVLPIASETLKHKSIEQRSSSPYQLGPLPCPGLQVESSCKVTDAKFCPRPFNVLPVKTKWSNVGFHILLFDLENLVELLLPTPLSDVDSSSSFYGGEVLRRAKSTVEKKTLTLRKSKTACGPLSAEALAKPITESLAQGDNTIKFSEENDGIKRQKKMKISKKMQPKPSRKVDASLTIDTAKLFLSCLLPWGVDKDLDYLCIKHLNILKLQGPISLGISLNEDNFSLMLPGWDLCNSGMIKDYSGVNLFSRKVLDLSDKYTATLPNQVGIPRGLENNCDSLRESDTIVYLLSRLFLVNKLVNMPLELACRVGSSFRMESIHNKMRGAGNDILNMSSFYSCLRNGKNESHVPEADLSLLKLISCWRDQSVQVTEAIQAVLLAEVQQHMKSLGKIPVNSQPVSMAENGNCEMKQMLPKLEWTEELELQCVRNTLPLQTPVSPVKHDSNSNSANFQDVEDMPDRCALEESESPGEPRHHSWIAKVCPCKVS

SEQ ID NO: 76353 - protein, 230 aa, Homo sapiens
  MOD_RES (1)..(1): Any amino acid
XLTCTEQNFISKSGYHQSASEHGLVVIAPDTSPRGCNIKGEDESWDFGTGAGFYVDATEDPWKTNYRMYSYVTEELPQLINANFPVDPQRMSIFGHSMGGHGALICALKNPGKYKSVSAFAPICNPVLCPWGKKAFSGYLGTDQSKWKAYDATHLVKSYPGSQLDILIDQGKDDQFLLDGQLLPDNFIAACTEKKIPVVFRLQEHGRVKSGLHSLKRISLRFVVIESTTE

SEQ ID NO: 76354 - protein, 471 aa, Homo sapiens
MSRRVVRQSKFRHVFGQAAKADQAYEDIRVSKVTWDSSFCAVNPKFLAIIVEAGGGGAFIVLPLAKTGRVDKNYPLVTGHTAPVLDIDWCPHNDNVIASASDDTTIMVWQIPDYTPMRNITEPIITLEGHSKRVGILSWHPTARNVLLSAGGDNVIIIWNVGTGEVLLSLDDMHPDVIHSVCWNSNGSLLATTCKDKTLRIIDPRKGQVVAEQARPHEGARPLRAVFTADGKLLSTGFSRMSERQLALWDPNNFEEPVALQEMDTSNGVLLPFYDPDSSIVYLCGKGDSSIRYFEITDEPPFVHYLNTFSSKEPQRGMGFMPKRGLDVSKCEIARFYKLHERKCEPIIMTVPRKSDLFQDDLYPDTPGPEPALEADEWLSGQDAEPVLISLRDGYVPPKHRELRVTKRNILDVRPPSGPRRSQSASDAPLSQHTLETLLEEIKALRERVQAQEQRITALENMLCELVDGTD

SEQ ID NO: 76355 - protein, 96 aa, Homo sapiens
  MOD_RES (1)..(1): Any amino acid
XETPKPSISSSNLNPREAMEAVILTCDPATPAASYQWWMNGQSLPMTHRLQLSKTNRTLFIFGVTKYIAGPYECEIRNPVSASRSDPVTLNLLRSY

SEQ ID NO: 76356 - protein, 202 aa, Homo sapiens
MDSVEKTTNRSEQKSRKFLKSLIRKQPQELLLVIGTGVSAAVAPGIPALCSWRSCIEAVIEAAEQLEVLHPGDVAEFRRKVTKDRDLLVVAHDLIRKMSPRTGDAKPSFFQDCLMEVFDDLEQHIRSPVVLQSILSLMDRGAMVLTTNYDNLLEAFGRRQNKPMESLDLKDKTKVWAGAAGSLQVWGVLCPGSCSHFVAVNY

SEQ ID NO: 76357 - protein, 161 aa, Homo sapiens
  MOD_RES (1)..(1): Any amino acid
XIWMHAEEREECKGKQKDGTSFGEYGGWYKACKVDSPTVTTTLKNLGALYRRQGKFEAAETLEEAAMRSRKQGLDNVHKQRVAEVLNDPENMEKRRSRESLNVDVVKYESGPDGGEEVSMSVEWNGVSTVHSGHVLREAPPSGACQAFLLSHVLDLLLFSN

SEQ ID NO: 76358 - protein, 151 aa, Homo sapiens
MSLLGPKVLLFLAAFIITSDDVTQATPETFTEDPNLVNDPATDETVLAVLADIAPSTDDLECWDEKFTCTRLYSVHRPVKQCIHQLCFTSLRRMYIVNKEICSRLVCKEHEAMKDELCRQMAGLPPRRLRRSNYFRLPPCENVDLQRPNGL

SEQ ID NO: 76359 - protein, 160 aa, Homo sapiens
MATMLEGRCQTQPRSSPSGREASLWSSGFGMKLEAVTPFLGKYRPFVGRCCQTCTPKSWESLFHRSITDLGFCNVILVKEENTRFRGWLVRRLCYFLWSLEQHIPPCQDVPQKIMESTGVQNLLSGRVPGGTGEGQVPDLVKKEVQRILGHIQAPPRPFL

SEQ ID NO: 76360 - protein, 40 aa, Homo sapiens
MLRRILQRTPGRVGSQGSDLDSSATPINTVDVNNESSSER

SEQ ID NO: 76361 - protein, 98 aa, Homo sapiens
EDMRKTFREQGLRNGSSILIQDSHDDNSLLTKEEKWVTSMNEIDWLHVKNLCQLESEEKQVKISATVNTMVFDIRIKAIKELKLMKELGNHLHFLFGS

SEQ ID NO: 76362 - protein, 63 aa, Homo sapiens
MSSGTELLWPGAALLVLLGVAASLCVRCSRPGAKRSEKIYQQRSLREDQQSFTGSRTYSLVGQ

SEQ ID NO: 76363 - protein, 65 aa, Homo sapiens
MQSNKTFNLEKQNHTPRKHHQHHHQQQHHQQQQQQPPPPPIPANGQQASSQNEGLTIDLKNFRKP

SEQ ID NO: 76364 - protein, 141 aa, Homo sapiens
MRDYDEVTAFLGEWGPFQRLIFFLLSASIIPNGFTGLSSVFLIATPEHRCRVPDAANLSSAWRNHTVPLRLRDGREVPHSCRRYRLATIANFSALGLEPGRDVDLGQLEQESCLDGWEFSQDVYLSTIVTEGQKFLASQFV

SEQ ID NO: 76365 - protein, 44 aa, Homo sapiens
MSPEDKSPITPGSRGRYSRDRACFLLTDYAPSPDGSIRKALVTA

SEQ ID NO: 76366 - protein, 245 aa, Homo sapiens
  MOD_RES (1)..(1): Any amino acid
XINDIAFKPDGTQLILAAGSRLLVYDTSDGTLLQPLKGHKDTVYCVAYAKDGKRFASGSADKSVIIWTSKLEGILKYTHNDAIQCVSYNPITHQLASCSSSDFGLWSPEQKSVSKHKSSSKIICCREERNDILAVADWGQKVSFYQLSGKQIGKDRALNFDPCCISYFTKGEYILLGGSDKQVSLFTKDGVRLGTVGEQNSWVWTCQAKPDSNYVVVGCQDGTISFYQLIFSTVHGLYKDRYAYR

SEQ ID NO: 76367 - protein, 125 aa, Homo sapiens
MDSVVFEDVDVNFTQEEWALLDPSQKNLYRDVMQETFRNLASVGKKWKDQKIEDEYKNPRRNLSLRKWSWSLYARQTLGLDSPSVAPKRLLSGYQISYSERPRVPLPQLLSLCRLHRDPHYSREP

SEQ ID NO: 76368 - protein, 161 aa, Homo sapiens
MSSLGGGSQDAGGSSSSSTNGSGGSGSSGPKAGAADKSAVVAAAAPASVADDTPPPERRNKSGIISEPLNKSLRRSRPLSHYSSFGSSGGSGGGSMMGGESADKATAAAAAASLLANGHDLAAAMAVDKSNPTSKHKSGAVASLLSKAERATELAAEGQLT

SEQ ID NO: 76369 - protein, 88 aa, Homo sapiens
MEADIITNLRCRLKEAEEERLKAAQYGLQLVESQNELQNQLDKCRNEMMTMTESYEQEKYTLQREVELKSRMLESLSCECEAIKQQQK

SEQ ID NO: 76370 - protein, 313 aa, Homo sapiens
FFPLIEVNKVYYFSKGTLKIANKQFTAVKNDYEMTFNNETSVMPCEDDHHLPTVQFDFTGIDDLENKSKDSLVDIIGICKSYEDATKITVRSNNREVAKRNIYLMDTSGKVVTATLWGEDADKFDGSRQPVLAIKGARVSDFGGRSLSVLSSSTIIANPDIPEAYKLRGWFDAEGQALDGVSISDLKSGGVGGSNTNWKTLYEVKSENLGQGDKVNIADFQENQWVTCFQESAEAILGQNAAYLGELKDKNEQAFEEVFQNANFRSFIFRVRVKVETYNDESRIKATVMDVKPVDYREYGRRLVMSIRRSALM

SEQ ID NO: 76371 - protein, 89 aa, Homo sapiens
MVSESDFSKDVAVQVLPLDKIEENNKQKANDIFISQYTMGQKDALRTVLKQKDRVCHVAQLVLNSWAQAVFLPQPPTVLGLQSSKHACF

SEQ ID NO: 76372 - protein, 130 aa, Homo sapiens
MGRLDGKVIILTAAAQGIGQAAALAFAREGAKVIATDINESKLQELEKYPGIQTRVLDVTKKKQIDQFANEVERLDVLFNVAGFVHHGTVLDCEEKDWDFSMNLNVRSMYLMIKAFLPKMLAQKSGNIIN

SEQ ID NO: 76373 - protein, 189 aa, Homo sapiens
MQKIKSLMTRQGLKSPQESLSDLGAIESLRVPGKEEFRELREQPSDPQAEQELINSIEQVYFSVDSFDIVKYELELPPVLNLQELEAYRDKLKQQQAAVSKKVADLILEKQPAYVKELERVTSLQTGLQLAAVICTNGRRHLNIAKEGFTQASLGLLANQRKRQLLIGLLKSLRTIKTLQRTDVRLSEM

SEQ ID NO: 76374 - protein, 268 aa, Homo sapiens
MAMESTATAAVAAELVSADKIEDVPAPSTSADKVERMENGVLGNALEGVHVEEEEGEKTEDESLVENNDNIDETEGSEEDDKENDKTEEMPNDSVLENKSLQENEEEEIGNLELAWDMLDLAKIIFKRQETKEAQLYAAQAHLKLGEVSVESENYVQAVEEFQSCLNLQEQYLEAHDRLLAETHYQLGLAYGYNSQYDEAVAQFSKSIEVIENRMAVLNEQVKEAEGSSAEYKKEIEELKELLPEIREKIEDAKESQRSGNVAELALK

SEQ ID NO: 76375 - protein, 264 aa, Homo sapiens
MNVTPEVKSRGMKFAEEQLLKHGWTQGKGLGRKENGITQALRVTLKQDTHGVGHDPAKEFTNHWWNELFNKTAANLVVETGQMATLTSGGEKPNKDLESCSDDDNQGSKSPKILTDEMLLQACEGRTAHKAARLGITMKAKLARLEAQEQAFLARLKGQDPGAPQLQSESKPPKKKKKKRRQKEEEEATASERNDADEKHPEHAEQNIRKSKKKKRRHQEGKVSDEREGTTKGNEKEDAAGTSGLGELNSREQTNQSLRKGKKK

SEQ ID NO: 76376 - protein, 366 aa, Homo sapiens
MGWGGGGGCTPRPPIHQQPPERRVVTVVFLGLLLDLLAFTLLLPLLPGLLESHGRAHDPLYGSWQGGVDWFATAIGMPVEKRYNSVLFGGLIGSAFSVLQFLCAPLTGATSDCLGRRPVMLLCLMGVATSYAVWATSRSFAAFLASRLIGGISKGNVSLSTAIVADLGSPLARSQGMAVIGVAFSLGFTLGPMLGASLPLEMAPWFALLFAASDLLFIFCFLPETLPLEKRAPSIALGFRDAADLLSPLALLRFSAVARGQDPPSGDRLSSLRRLGLVYFLYLFLFSGLEYTLSFLTHQRFQFSRPSCCWCPPSSSSAGDVLCPCWAWGCCSTPLPPPLWCPACPPWSLAMAHQGRRARSWVHCAA

SEQ ID NO: 76377 - protein, 257 aa, Homo sapiens
MFSEQAAQRAHTLLSPPSANNATFARVPVATYTNSSQPFRLGERSFSRQYAHIYATRLIQMRPFLENRAQQHWGTVLAVFGSVRDDGKFLVEDYCFADLAPQKPAPPLDTDRFVLLVSGLGLGGGGGESLLGTQLLVDVVTGQLGDEGEQCSAAHVSRVILAGNLLSHSTQSRDSINKAKYLTKKTQAASVEAVKMLDEILLQLSASVPVDVMPGEFDPTNYTLPQQPLHPCMFPLATAYSTLQLVTNPYQATIDGV

SEQ ID NO: 76378 - protein, 32 aa, Homo sapiens
MWQLWASLCCLLVLANARSRPSFHPLSDELVN

SEQ ID NO: 76379 - protein, 778 aa, Homo sapiens
MTSSSPAGLEGSDLSSINTMMSAVMSVGKVTENGGSPQGIKSPSKPPGPNRIGRRNQETKEEKSSYNCPLCEKICTTQHQLTMHIRQHNTDTGGADHSCSICGKSLSSASSLDRHMLVHSGERPYKCTVCGQSFTTNGNMHRHMKIHEKDPNSATATAPPSPLKRRRLSSKRKLSHDAESEREDPAPAKKMVEDGQSGDLEKKADEVFHCPVCFKEFVCKYGLETHMETHSDNPLRCDICCVTFRTHRGLLRHNALVHKQLPRDAMGRPFIQNNPSIPAGFHDLGFTDFSCRKFPRISQAWCETNLRRCISEQHRFVCDTCDKAFPMLCSLALHKQTHVAADQGQEKPQATPLPGDALDQKGFLALLGLQHTKDVRPAPAEEPLPDDNQAIQLQTLKCQLPQDPGCTNLLSLSPFEAASLGGSLTVLPATKDSIKHLSLQPFQKGFIIQPDSSIVVKPISGESAIELADIQQILKMAASAPPQISLPPFSKAPAAPLQAIFKHMPPLKPKPLVTPRTVVATSTPPPLINAQQASPGCISPSLPPPPLKLLKGSVEAASNAHLLQSKSGTQPHAATRLSLQQPRAELPGQPEMKTQLEQDSIIEALLPLSMEAKIKQEITEGELKAFMTAPGGKKTPAMRKVLYPCRFCNQVFAFSGVLRAHVRSHLGISPYQCNICDYIAADKAALIRHLRTHSGERPYICKICHYPFTVKANCERHLRKKHLKATRKDIEKNIEYVSSSAAELVDAFCAPDTVCRLCGEDLKHYRALRIHMRTHCGR

SEQ ID NO: 76380 - protein, 71 aa, Homo sapiens
  MOD_RES (1)..(1): Any amino acid
XTLGQTDFPAHSRKPAPSNEPEYLCKWMGLPYSECSWEDEALIGKKFQNCIDSFHSRNNSKTIPTRECKVW

SEQ ID NO: 76381 - protein, 196 aa, Homo sapiens
MSSTSSKRAPTTATQRLKQDYLRIKKDPVPYICAEPLPSNILEWHYVVRGPEMTPYEGGYYHGKLIFPREFPFKPPSIYMITPNGRFKCNTRLCLSITDFHPDTWNPAWSVSTILTGLLSFMVEKGPTLGSIETSDFTKRQLAVQSLAFNLKDKVFCELFPEVVEEIKQKQKAQDELSSRPQTLPLPDVVPDGETH

SEQ ID NO: 76382 - protein, 570 aa, Homo sapiens
MPVKRLREVVSQNHGDHLVLLKDELPCVPPALSANKRLPVGTGTSLNGTSRGSSDLTSARNCYQPLLENPMVSESDFSKDVAVQVLPLDKIEENNKQKANDIFISQYTMGQKDALRTVLKQKAQSMPVFKEVKVHLLEDAGIEKDAVTQETRISPSGIDSATTVAAATAAAIATAAPLIKVQSDLEAKVNSVTELLSKLQETDKHLQRVTEQQTSIQRKQEKLHCHDHEKQMNVFMEQHIRHLEKLQQQQIDIQTHFISAALKTSSFQPVSMPSSRAVEKYSVKPEHPNLGSCNPSLYNTFASKQAPLKEVEDTSFDKQKSPLETPAPRRFAPVPVSRDDELSKRENLLEEKENMEVSCHRGNVRLLEQILNNNDSLTRKSESSNTTSLTRSKIGWTPEKTNRFPSCEELETTKVTMQKSDDVLHDLGQKEKETNSMVQPKESLSMLKLPDLPQNSVKLQTTNTTRSVLKDAEKILRGVQNNKKVLEENLEAIIRAKDGAAMYSLINALSTNREMSEKIRIRKTVDEWIKTISAEIQDELSRTDYEQKRFDQKNQRTKKGAFESNHSNTR

SEQ ID NO: 76383 - protein, 132 aa, Homo sapiens
MTPTSGGSTPPGITAPAVPSIPSPIGVNGFTGLPPQANGQPAAEAVFANGIHPYPAQSPTAADPLQQAYAGVQQYAAAAYPAAYGQISQAFPQPPPMIPQQQREGPEGCNLFIYHLPQEFGDAELMQMFLPF

SEQ ID NO: 76384 - protein, 123 aa, Homo sapiens
MRKVKKLRLDKENTGSWRSFSLNSEGAERMATTGTPTADRGDAAATDDPAARFQVQKHSWDGLRSIIHGSRKYSGLIVNKAPHDFQFVQKTDESGPHSHRLYYLGMPYGSRENSLLYSEIPKK

SEQ ID NO: 76385 - protein, 93 aa, Homo sapiens
  MOD_RES (1)..(1): Any amino acid
XDSASASLSSAAATGTSTSTPAAPTARKQLDKEQVRKAVDALLTHCKSRKNNYGLLLNENESLFLMVVLWKIPSKELRVRLDEILRCCPAGVQ

SEQ ID NO: 76386 - protein, 14 aa, Homo sapiens
  MOD_RES (1)..(1): Any amino acid
XGRLKECECTFLSI

SEQ ID NO: 76387 - protein, 236 aa, Homo sapiens
MRAHAQRGRGCTRRSAAVLMARHGLPLLPLLSLLVGAWLKLGNGQATSMVQLQGGRFLMGTNSPDSRDGDGPVREATVKPFAIDIFPVTNKDFRDFVREKKYRTEAEMFGWSFVFEDFVSDELRNKATQPMKGKFPKGDKAEDGFHGVSPVNAFPAQNNYGLYDLLGNVWEWTASPYQAAEQDMRVLRGASWIDTADGSANHRARVTTRMGNTPDSASDNLGFRCAADAGRPPGEL

SEQ ID NO: 76388 - protein, 142 aa, Homo sapiens
MGSRNSSSAGSGSGDPSEGLPRRGAGLRRSEEEEEEDEDVDLAQVLAYLLRRGQVRLVQGGGAANLQFIQALLDSEEENDRAWDGRLGDRYNPPVDATPDTRELEFNEIKTQVELATGQLGLRRAAQKHSFPRMLHQRERGL

SEQ ID NO: 76389 - protein, 125 aa, Homo sapiens
MSEEAKRGAPNPWLFEEPEETRGLGFDEIRQQQQKIIQEQDAGLDALSSIISRQKQMGQEIGNELDEQNEIIDDLANLVENTDEKLRNETRRVNMVDRKSASCGMIMVILLLLVAIVVVAVWPTN

SEQ ID NO: 76390 - protein, 47 aa, Homo sapiens
MTATLRPYLSAVRATLQAALCLENFSSQVVERHNKPEVEVRGMISAF

SEQ ID NO: 76391 - protein, 806 aa, Homo sapiens
MAAEEADVDIEGDVVAAAGAQPGSGENTASVLQKDHYLDSSWRTENGLIPWTLDNTISEENRAVIEKMLLEEEYYLSKKSQPEKVWLDQKEDDKKYMKSLQKTAKIMVHSPTKPASYSVKWTIEEKELFEQGLAKFGRRWTKISKLIGSRTVLQVKSYARQYFKNKVKCGLDKETPNQKTGHNLQVKNEDKGTKAWTPSCLRGRADPNLNAVKIEKLSDDEEVDITDEVDELSSQTPQKNSSSDLLLDFPNSKMHETNQGEFITSDSQEALFSKSSRGCLQNEKQDETLSSSEITLWTEKQSNGDKKSIELNDQKFNELIKNCNKHDGRGIIVDARQLPSPEPCEIQKNLNDNEMLFHSCQMVEESHEEEELKPPEQEIEIDRNIIQEEEKQAIPEFFEGRQAKTPERYLKIRNYILDQWEICKPKYLNKTSVRPGLKNCGDVNCIGRIHTYLELIGAINFGCEQAVYNRPQTVDKVRIRDRKDAVEAYQLAQRLQSMRTRRRRVRDPWGNWCDAKDLEGQTFEHLSAEELAKRREEEKGRPVKSLKVPRPTKSSFDPFQLIPCNFFSEEKQEPFQVKVASEALLIMDLHAHVSMAEVIGLLGGRYSEVDKVVEVCAAEPCNSLSTGLQCEMDPVSQTQASETLAVRGFSVIGWYHSHPAFDPNPSLRDIDTQAKYQSYFSRGGAKFIGMIVSPYNRNNPLPYSQITCLVISEEISPDGSYRLPYKFEVQQMLEEPQWGLVFEKTRWIIEKYRLSHSSVPMDKIFRRDSDLTCLQKALSSFSRALRIQSQSPALSRHIHDQQRQLE

SEQ ID NO: 76392 - protein, 54 aa, Homo sapiens
MMDEPWWEGRVASDVHCTLREKGRSSQENPQKESGNRGQELEVWREELWSHSTE

SEQ ID NO: 76393 - protein, 357 aa, Homo sapiens
MKPILLQGHERSITQIKYNREGDLLFTVAKDPIVNVWYSVNGERLGTYMGHTGAVWCVDADWDTKHVLTGSADNSCRLWDCETGKQLALLKTNSAVRTCGFDFGGNIIMFSTDKQMGYQCFVSFFDLRDPSQIDNNEPYMKIPCNDSKITSAVWGPLGECIIAGHESGELNQYSAKRSQPSVEGALSQGGGVYIKPWRINGASSRKERTSHRQKEQQRQRHRVKKSGEVLVNVKEHSRQINDIQLSRDMTMFVTASKDNTAKLFDSTTLEHQKTFRTERPVNSAALSPNYDHVVLGGGQEAMDVTTTSTRIGKFEARFFHLAFEEEFGRVKGHFGPINSVAFHPDGKRQADHLRSGV

SEQ ID NO: 76394 - protein, 103 aa, Homo sapiens
MERKNPSRESPRRLSAKVGKGTEMKKVARQLGMAAAESDKDSGFSDGSSECLSSAEQMESEDMLSALGWSREDRPRQNSKTAKNAFPTLSPMVVMKNVLVKQQ

SEQ ID NO: 76395 - protein, 49 aa, Homo sapiens
  MOD_RES (1)..(1): Any amino acid
XLRVLADTYDSVYLHPNSYSCACLASGSVLRLVDAVLGAEIRNGMAIIR

SEQ ID NO: 76396 - protein, 273 aa, Homo sapiens
MATTVPDGCRNGLKSKYYRLCDKAEAWGIVLETVATAGVVTSVAFMLTLPILVCKVQDSNRRKMLPTQFLFLLGVLGIFGLTFAFIIGLDGSTGPTRFFLFGILFSICFSCLLAHAVSLTKLVRGRKPLSLLVILGLAVGFSLVQDVIAIEYIVLTMNRTNVNVFSELSAPRRNEDFVLLLTYVLFLMALTFLMSSFTFCGSFTGWKRHGAHIYLTMLLSIAIWVAWITLLMLPDFDRRWDDTILSSALAANGWVFLLAYVSPEFWLLTKQRN

SEQ ID NO: 76397 - protein, 39 aa, Homo sapiens
MKQPIMADGPRCKRRKQANPRRKNVVNYDNVVDTGSETD

SEQ ID NO: 76398 - protein, 658 aa, Homo sapiens
MLLKISEITMPGKIFPLKMAHDLDTGSNGLQRYTISSNPHFHVLTRNRSEGRKFPELVLDKPLDREEQPQLRLTLIALDGGSPPRSGTSEIQIQVLDINDNVPEFAQELYEAQVPENNPLGSLVITVSARDLDAGSFGKVSYALFQVDDVNQPFEINAITGEIRLRKALDFEEIQSYDVDVEATDGGGLSGKCSLVVRVLDVNDNAPELTMSFFISLIPENLPEITVAVFSVSDADSGHNQQVICSIENNLPFLLRPSVENFYTLVTEGALDRESRAEYNITITVTDLGTPRLKTQQSITVQVSDVNDNAPAFTQTSYTLFVRENNSPALHIGSVSATDRDSGINAQVTYSLLPPQDPHLPLSSLVSINADNGHLFALRSLDYEALQSFEFRVGATDRGSPALSSEALVRLLVLDANDNSPFVLYPLQNGSAPCTELVPRAAEPGYLVTKVVAVDGDSGQNAWLSYQLLKATELGLFGVWAHNGEVRTARLLSERDAAKHRLVVLVKDNGEPPRSATATLHVLLVDGFSQPYLPLPEAAPAQAQADSLTVYLVVALASVSSLFLFSVLLFVAVRLCRRSRAASVGRYSVPEGPFPGHLVDVSGTGTLSQSYQYKVCLTGGSETNEFKFLKPIMPNFPPQGTEREMEETPTSRNSFPFS

SEQ ID NO: 76399 - protein, 120 aa, Homo sapiens
MASSAREHLLFVRRRNPQMRYTLSPENLQSLAAQSSMPENMTLQRANSDTDLVTSESRSSLTASMYEYTLGQAQNLIIFWDIKEEVDPSDWIGLYHIDENSPANFWDSKNRGVTGTQKGQ

SEQ ID NO: 76400 - protein, 544 aa, Homo sapiens
MPTQQPAAPSTRAPKPSRSLSGSLCALFSDADSGSGMKAELPPGPGAVGREMTKEEKLQLRKEKKQQKKKRKEEKGAEPETGSAVSAAQCQVGPTRELPESGIQLGTPREKVPAGRSKAELRAERRAKQEAERALKQARKGEQGGPPPKASPSTAGETPSGVKRLPEYPQVDDLLLRRLVKKPERQQVPTRKDYGSKVSLFSHLPQYSRQNSLTQFMSIPSSVIHPAMVRLGLQYSQGLVSGSNARCIALLRALQQVIQDYTTPPNEELSRDLVNKLKPYMSFLTQCRPLSASMHNAIKFLNKEITSVGSSKREEEAKSELRAAIDRYVQEKIVLAAQAISRFAYQKISNGDVILVYGCSSLVSRILQEAWTEGRRFRVVVVDSRPWLEGRHTLRSLVHAGVPASYLLIPAASYVLPEVSKVLLGAHALLANGSVMSRVGTAQLALVARAHNVPVLVCCETYKFCERVQTDAFVSNELDDPDDLQCKRGEHVALANWQNHASLRLLNLVYDVTPPELVDLVITELGMIPCSSVPVVLRVKSSDQ

SEQ ID NO: 76401 - protein, 210 aa, Homo sapiens
MSWTDHYLQWNVSEYPGVKTVRFPDGQIWKPDILLYNSADERFDATFHTNVLVNSSGHCQYLPPGIFKSSCYIDVRWFPFDVQHCKLKFGSWSYGGWSLDLQMQEADISGYIPNGEWDLVGIPGKRSERFYECCKEPYPDVTFTVTMRRRTLYYGLNLLIPCVLISALALLVFLLPADSGEKISLGITVLLSLTVFMLLVAEIMPATSDS

SEQ ID NO: 76402 - protein, 571 aa, Homo sapiens
MRMESRGDPRATTNTQAQRFHSPKKNPEDQTMPQNRTIYVTLKVNHRRNQDMKLKLTHSENSSLYMALNTLQAVRKEIETHQGQEMLVRGTEGIKEYINLGMPLSCFPEGGQVVITFSQSKSKQKEDNHIFGRQDKASTECVKFYIHAIGIGKCKRRIVKCGKLHKKGRKLCVYAFKGETIKDALCKDGRFLSFLENDDWKLIENNDTILESTQPVDELEGRYFQVEVEKRMVPSAAASQNPESEKRNTCVLREQIVAQYPSLKRESEKIIENFKKKMKVKNGETLFELHRTTFGKVTKNSSSIKVVKLLVRLSDSVGYLFWDSATTGYATCFVFKGLFILTCRHVIDSIVGDGIEPSKWATIIGQCVRVTFGYEELKDKETNYFFVEPWFEIHNEELDYAVLKLKENGQQVPMELYNGITPVPLSGLIHIIGHPYGEKKQIDACAVIPQGQRAKKCQERVQSKKAESPEYVHMYTQRSFQKIVHNPDVITYDTEFFFGASGSPVFDSKGSLVAMHAAGFAYTYQNETRSIIEFGSTMESILLDIKQRHKPWYEEVFVNQQDVEMMSDEDL

SEQ ID NO: 76403 - protein, 80 aa, Homo sapiens
MESLSELQNPLLPRSPAHLHGPYPYPETPPSWSCQEKLYSYLLGGAGPAGAHQLLDPGSLQLAVEAWYRPSCLLGRDKVK

SEQ ID NO: 76404 - protein, 1119 aa, Homo sapiens
MSPALQDLSQPEGLKKTLRDEINAILQKRIMVLDGGMGTMIQREKLNEEHFRGQEFKDHARPLKGNNDILSITQPDVIYQIHKEYLLAGADIIETNTFSSTSIAQADYGLEHLAYRMNMCSAGVARKAAEEVTLQTGIKRFVAGALGPTNKTLSVSPSVERPDYRNITFDELVEAYQEQAKGLLDGGVDILLIETIFDTANAKAALFALQNLFEEKYAPRPIFISGTIVDKSGRTLSGQTGEGFVISVSHGEPLCIGLNCALGAAEMRPFIEIIGKCTTAYVLCYPNAGLPNTFGDYDETPSMMAKHLKDFAMDGLVNIVGGCCGSTPDHIREIAEAVKNCKPRVPPATAFEGHMLLSGLEPFRIGPYTNFVNIGERCNVAGSRKFAKLIMAGNYEEALCVAKVQVEMGAQVLDVNMDDGMLDGPSAMTRFCNLIASEPDIAKVPLCIDSSNFAVIEAGLKCCQGKCIVNSISLKEGEDDFLEKARKIKKYGAAMVVMAFDEEGQTQGTGGKKVIQTDEWRNGPVEERLEYALVKGIEKHIIEDTEEARLNQKKYPRPLNIIEGPLMNGMKIVGDLFGAGKMFLPQVIKSARVMKKAVGHLIPFMEKEREETRVLNGTVEEEDPYQGTIVLATVKGDVHDIGKNIVGVVLGCNNFRVIDLGVMTPCDKILKAALDHKADIIGLSGLITPSLDEMIFVAKEMERLAIRIPLLIGGATTSKTHTAVKIAPRYSAPVIHVLDASKSVVVCSQLLDENLKDEYFEEIMEEYEDIRQDHYESLKERRYLPLSQARKSGFQMDWLSEPHPVKPTFIGTQVFEDYDLQKLVDYIDWKPFFDVWQLRGKYPNRGFPKIFNDKTVGGEARKVYDDAHNMLNTLISQKKLRARGVVGFWPAQSIQDDIHLYAEAAVPQAAEPIATFYGLRQQAEKDSASTEPYYCLSDFIAPLHSGIRDYLGLFAVACFGVEELSKAYEDDGDDYSSIMVKALGDRLAEAFAEELHERVRRELWAYCGSEQLDVADLRRLRYKGIRPAPGYPSQPDHTEKLTMWRLADIEQSTGIRLTESLAMAPASAVSGLYFSNLKSKYFAVGKISKDQVEDYALRKNISVAEVEKWLGPILGYDTD

SEQ ID NO: 76405 - protein, 169 aa, Homo sapiens
MARRGPGWRPLLLLVLLAGAAQGGLYFRRGQTCYRPLRGDGLAPLGRSTYPRPHEYLSPADLPKSWDWRNVDGVNYASITRNQHIPQYCGSCWAHASTSAMADRINIKRKGAWPSTLLSVQNVIDCGNAGSCEGGNDLSVWDYAHQHGIPDETCNNYQAKDQGLGKGFS

SEQ ID NO: 76406 - protein, 77 aa, Homo sapiens
MRLFLSLPVLVVVLSIVLEGPAPAQGTPDVSSALDKLKEFGNTLEDKARELISRIKQSELSAKMREWFSETFQKVKE

SEQ ID NO: 76407 - protein, 56 aa, Homo sapiens
MQSNKTFNLEKQNHTPRKHHQHHHQQQHHQQQQQQPPPPPIPANGQQASSQSVLDY

SEQ ID NO: 76408 - protein, 65 aa, Homo sapiens
MLRCLYHWHRPVLNRRWSRLCLPKQYLFTMKLQSPEFQSLFTEGLKSLTDKVLLCHPGWSAVARS

SEQ ID NO: 76409 - protein, 149 aa, Homo sapiens
MCVCQDPTSCPAPIGEFEKVCSNDNKTFDSSCHFFATKCTLEGTKKGHKLHLDYIGPCKYIPPCLDSELTEFPLRMRDWLKNVLVTLYERDEDNNLLTEKQKLRVKKIHENEKRLEAGDHPVELLARDFEKNYNMYIFPVHWQFGQLDQ

SEQ ID NO: 76410 - protein, 1158 aa, Homo sapiens
MCDCPQGYQLKNNTCVKQENTCLRNQYRCSNGNCINSIWWCDFDNDCGDMSDERNCPTTICDLDTQFRCQESGTCIPLSYKCDLEDDCGDNSDESHCEMHQCRSDEYNCSSGMCIRSSWVCDGDNDCRDWSDEANCTAIYHTCEASNFQCRNGHCIPQRWACDGDTDCQDGSDEDPVNCEKKCNGFRCPNGTCIPSSKHCDGLRDCSDGSDEQHCEPLCTHFMDFVCKNRQQCLFHSMVCDGIIQCRDGSDEDAAFAGCSQDPEFHKVCDEFGFQCQNGVCISLIWKCDGMDDCGDYSDEANCENPTEAPNCSRYFQFRCENGHCIPNRWKCDRENDCGDWSDEKDCGDSHILPFSTPGPSTCLPNYYRCSSGTCVMDTWVCDGYRDCADGSDEEACPLLANVTAASTPTQLGRCDRFEFECHQPKTCIPNWKRCDGHQDCQDGRDEANCPTHSTLTCMSREFQCEDGEACIVLSERCDGFLDCSDESDEKACSDELTVYKVQNLQWTADFSGDVTLTWMRPKKMPSASCVYNVYYRVVGESIWKTLETHSNKTNTVLKVLKPDTTYQVKVQVQCLSKAHNTNDFVTLRTPEGLPDAPRNLQLSLPREAEGVIVGHWAPPIHTHGLIREYIVEYSRSGSKMWASQRAASNFTEIKNLLVNTLYTVRVAAVTSRGIGNWSDSKSITTIKGKVIPPPDIHIDSYGENYLSFTLTMESDIKVNGYVVNLFWAFDTHKQERRTLNFRGSILSHKVGNLTAHTSYEISAWAKTDLGDSPLAFEHVMTRGVRPPAPSLKAKAINQTAVECTWTGPRNVVYGIFYATSFLDLYRNPKSLTTSLHNKTVIVSKDEQYLFLVRVVVPYQGPSSDYVVVKMIPDSRLPPRHLHVVHTGKTSVVIKWESPYDSPDQDLLYAVAVKDLIRKTDRSYKVKSRNSTVEYTLNKLEPGGKYHIIVQLGNMSKDSSIKITTVSLSAPDALKIITENDHVLLFWKSLALKEKHFNESRGYEIHMFDSAMNITAYLGNTTDNFFKISNLKMGHNYTFTVQARCLFGNQICGEPAILLYDELGSGADASATQAARSTDVAAVVVPILFLILLSLGVGFAILYTKHRRLQSSFTAFANSHYSSRLGSAIFSSGDDLGEDDEDAPMITGFSDDVPMVIA

SEQ ID NO: 76411 - protein, 646 aa, Homo sapiens
MVKQLIFSSIPETQIQDRCQNVSDKQNQAKLYDTAMKLINSLLKEFSDAQIKVFRPDKGNQFPGGKVSSVPKVPPRYKEPTTDEAPSSIKIKSADKMPPMHKMMRKPSSDKIPSIDKTLVNKVVHSSVCNILNDYGSQDSIWKNINSNGENLARRLTSAVINEIFQRQVNLIFCDEVSVSACLPLESKDVVKKVQKLAQTASKECQTSSPYTIILPHKFLENVISALFSKIFSTISSTKTKEPEDNLSTELNFLQMKLVSAVATEISQDKYMTIQYVETLQSDDDEIIQLVVQSVYNNLLPQFGSQEIIQNCVTSGCKILSENIVDLVLPKPSHADKLSYNIIEEIAVKFLSKLLSIFPKVHKERTKSLETDMQKITSKVLNSVQEFISKSKIKLVPPTKESPTVPVADNATIENIVNSIYTSVLKHSGSYTSVFKDLMGKSNVLSDTIGFLMVNAISNSEFQPQVEEEVSNSELVLEAVKIMEKVIKIIDELKSKEKSSSRKGLTLDAKLLEEVLALFLAKLIRLPSSSSKDEKNLSKTELNKIASQLSKLVTAEISRSSISLIASDPEEHCLNPENTERIYQVVDSVYSNILQQSGTNKEFYYDIKDTNTAFPKKVASLIIDGVSSFPLIQLTQQFQMLISLES

SEQ ID NO: 76412 - protein, 52 aa, Homo sapiens
MENSTTTISREELEELQEAFNKIDIDNSGYVSDYELQDLFKEASLPLPGYKV

SEQ ID NO: 76413 - protein, 182 aa, Homo sapiens
MAIYKQSQHMTEVVRRCPHHERCSDSDGLAPPQHLIRVEGNLRVEYLDDRNTFRHSVVVPYEPPEVGSDCTTIHYNYMCNSSCMGGMNRRPILTIITLEDSSGNLLGRNSFEVRVCACPGRDRRTEEENLRKKGEPHHELPPGSTKRALPNNTSSSPQPKKKPLDGEYFTLQDQTSFQKENC

SEQ ID NO: 76414 - protein, 79 aa, Homo sapiens
  MOD_RES (1)..(1): Any amino acid
XYGKVFLVRKISGHDTGKLYAMKVLKKATIVQKAKTTEHTRTERQVLEHIRQSPFLVTLHYAFQTETKLHLILVGDYIS

SEQ ID NO: 76415 - protein, 62 aa, Homo sapiens
MRKVKKLRLDKENTGSWRRRSLALLPRLECSGTILAPCNLHLPGSSDSSASASQVAGSTASR

SEQ ID NO: 76416 - protein, 125 aa, Homo sapiens
MQWRLQVNRLQELIDQLECKAPRLEPLREEDLAKGPDLHILMAQRQVQVAEEGLQDFHRALRCYVDFTGAQSHCLHVSAQKMLDGASFTLYEFWQDEASWRRHQQSPGSKAFQRILIDHLRAPDT

SEQ ID NO: 76417 - protein, 143 aa, Homo sapiens
MPECWDGVGEGNAGAVKLAGLGDPRWSPGHLLSPGHQEHDIETPYGLLHVVIRGSPKGNRPAILTYHDVGLNHKLCFNTFFNFEDMQEITKHFVVCHVDAPGQQVGASQFPQGYQFPSMEQLAAMLPSVVQHFGFKYVIGIGV

SEQ ID NO: 76418 - protein, 81 aa, Homo sapiens
MDSSQHLVTFEDVAVDFTQEEWTLLDQAQRDLYRDVMLENYKNLIILAGSELFKRSLMSGLEQMEELRTGVTGVLQGEKQY

SEQ ID NO: 76419 - protein, 718 aa, Homo sapiens
MLQQELLSRTSLETQKLDLMTEVSELKLKLVGMEKEQREQEEKQRKAEELLQELRHLKIKVEELENERNQYEWKLKATKAEVAQLQEQVALKDAEIERLHSQLSRTAALHSESHTERDQEIQRLKMGMETLLLANEDKDRRIEELTGLLNQYRKVKEIVMVTQGPSERTLSINEEEPEGGFSKWNATNKDPEELFKQEMPPRCSSPTVGPPPLPQKSLETRAQKKLSCSLEDLRSESVDKCMDGNQPFPVLEPKDSPFLAEHKYPTLPGKLSGATPNGEAAKSPPTICQPDATGSSLLRLRDTESGWDDTAVVNDLSSTSSGTESGPQSPLTPDGKRNPKGIKKFWGKIRRTQSGNFYTDTLGMAEFRRGGLRATAGPRLSRTRDSKGQKSDANAPFAQWSTERVCAWLEDFGLAQYVIFARQWVSSGHTLLTATPQDMEKELGIKHPLHRKKLVLAVKAINTKQEEKSALLDHIWVTRWLDDIGLPQYKDQFHESRVDRRMLQYLTVNDLLFLKVTSQLHHLSIKCAIHVLHVNKFNPHCLHRRPADESNLSPSEVVQWSNHRVMEWLRSVDLAEYAPNLRGSGVHGGLIILEPRFTGDTLAMLLNIPPQKTLLRRHLTTKFNALIGPEAEQEKREKMASPAYTPLTTTAKVRPRKLGFSHFGNIRKKKFDESTDYICPMEPSDGVSDSHRVYSGYRGLSPLDAPELDGLDQVGQIS

SEQ ID NO: 76420 - protein, 146 aa, Homo sapiens
MSDEREVAEAATGEDASSPPPKTEAASDPQHPAASEGAAAAAASPPLLRCLVLTGFGGYDKVKLQSRPAAPPAPGPGQLTLRLRACGLNFADLMARQGLYDRLPPLPVTPGMEGAGVVIAVGEGVSDRKAGDRVMVLNRSGMWQEE

SEQ ID NO: 76421 - protein, 66 aa, Homo sapiens
  MOD_RES (1)..(1): Any amino acid
XATCMKMGYEEVSQKFTSIRRVRGDNYCALRATLFQAMSQAVGLPPWLQDPELMLVRCCCSYQKNS

SEQ ID NO: 76422 - protein, 245 aa, Homo sapiens
MGQRDQRLDRERKGPQDDPGSYQGPERRNFLKEDAMKTKTHYHAMHADCLQELRRYLKSGVVLRRTVPPMVNVTRSEASEGNITVTCRASGFYPWNITLSWRQDGVSLSHDTQQWGDVLPDGNGTYQTWVATRICQGEEQRFTCYMEHSGNHSTHPVPSGKVLVLQSHWQTFHVSAVAAAAIFVIIIFYVRCCKKKTSAAEGPELVSLQVLDQHPVGTSDHRDATQLGFQPLMSDLGSTGSTEGA

SEQ ID NO: 76423 - protein, 643 aa, Homo sapiens
MFESCSGFSGFCASPIEESHGALISSCNSRTMTDGLVTFRDVAIDFSQEEWECLDPAQRDLYVDVMLENYSNLVSLDLESKTYETKKIFSENDIFEINFSQWEMKDKSKTLGLEASIFRNNWKCKSIFEGLKGHQEGYFSQMIISYEKIPSYRKSKSLTPHQRIHNTEKSYVCKECGKACSHGSKLVQHERTHTAEKHFECKECGKNYLSAYQLNVHQRFHTGEKPYECKECGKTFSWGSSLVKHERIHTGEKPYECKECGKAFSRGYHLTQHQKIHTGVKSYKCKECGKAFFWGSSLAKHEIIHTGEKPYKCKECGKAFSRGYQLTQHQKIHTGKKPYECKICGKAFCWGYQLTRHQIFHTGEKPYECKECGKAFNCGSSLIQHERIHTGEKPYECKECGKAFSRGYHLSQHQKIHTGEKPFECKECGKAFSWGSSLVKHERVHTGEKSHECKECGKTFCSGYQLTRHQVFHTGEKPYECKECGKAFNCGSSLVQHERIHTGEKPYECKECGKAFSRGYHLTQHQKIHTGEKPFKCKECGKAFSWGSSLVKHERVHTNEKSYECKDCGKAFGSGYQLSVHQRFHTGEKLYQRKEFGKTFTCGSKLVHERTHSNDKPYKYNECGEAFLWTTYSNEKIDTDETL

SEQ ID NO: 76424 - protein, 182 aa, Homo sapiens
  MOD_RES (1)..(1): Any amino acid
XGPEICGAQRCENTPGSYRCTPACDPGYQPTPGGGCQDVDECRNRSFCGAHAVCQNLPGSFQCLCDQGYEGARDGRHCVDVNECETLQGVCGAALCENVEGSFLCVCPNSPEEFDPMTGRCVPPRTSADVDECQLFRDQVCKSGVCVNTAPGYSCYCSNGYYYHTQRLECIDNDECADEEPA

SEQ ID NO: 76425 - protein, 27 aa, Homo sapiens
MQGDARRRRNENYFDDIPRSKLERQMA

SEQ ID NO: 76426 - protein, 260 aa, Homo sapiens
  MOD_RES (1)..(1): Any amino acid
XDSKIMISDFGLSKMEDPGSVLSTACGTPGYVAPEVLAQKPYSKAVDCWSIGVIAYILLCGYPPFYDENDAKLFEQILKAEYEFDSPYWDDISDSAKDFIRHLMEKDPEKRFTCEQALQHPWIAGDTALDKNIHQSVSEQIKKNFAKSKWKQAFNATAVVRHMRKLQLGTSQEGQGQTASHGELLTPVAGGEERALQKGMGGPQRCTRAGVEGLPLRPPLFCLPMQGRQLAVAVETAAWSRAQNCPPHCPTSSRALDLGS

SEQ ID NO: 76427 - protein, 130 aa, Homo sapiens
  MOD_RES (1)..(1): Any amino acid
XANERLMTLKIAEMKEAMRTLIFPPSMHFFQAKHLIERSQVFNILRMMPKGAALHLHDIGIVTMDWLVRNVTYRPHCHICFTPRGIMQFRFAHPTPRPSEKCSKWILLEDYRKRVQNVTEFDDRVNPVSC

SEQ ID NO: 76428 - protein, 144 aa, Homo sapiens
MSSPLQRAVGDTKRALSASSSSSASLPFDDRDSNHTSEGNGDSLLADEDTDFEDSLNRNVKKRAAKRPPKTTPVAKHPKKGSRVVHRHSRKQSEPPANDLFNAVKAAKSDMQSLVDEWLDSYKQDQDAGFLELVNFFIQSCGCK

SEQ ID NO: 76429 - protein, 103 aa, Homo sapiens
MAQQAADKYLYVDKNFINNPLAQADWAAKKLVWVPSDKSGFEPASLKEEVGEEAIVELVENGKKVKVNKDDIQKMNPPKFSKVEDMAELTCLNEASVLHNLKE

SEQ ID NO: 76430 - protein, 331 aa, Homo sapiens
MARSLSIMFVPNSWLNGYHKVAMNGKARKEAVQTAAKELLKFVNRSPSPFHAVAECRNRLLQAGFSELKETEKWNIKPESKYFMTRNSSTIIAFAVGGQYVPGNGFSLIGAHTDSPCLRVKRRSRRSQVGFQQVGVETYGGGIWSTWFDRDLTLAGRVIVKCPTSGRLEQQLVHVERPILRIPHLAIHLQRNINENFGPNTEMHLVPILATAIQEELEKGTPEPGPLNAVVLGGAYDEFIFAPRLDNLHSCFCALQALIDSCAGPGSLATEPHVRMVTLYDNEEVGSESAQGAQSLLTELVLRRISASCQHPTAFEEAIPKSFMISADMAH

SEQ ID NO: 76431 - protein, 257 aa, Homo sapiens
MKVNRETKRLYVGGLSQDISEADLQNQFSRFGEVSDVEIITRKDDQGNPQKVFAYINISVAEADLKKCMSVLNKTKWKGGTLQIQLAKESFLHRLAQEREAAKAKKEESTTGNANLLEKTGGVDFHMKAVPGTEVPGHKNWVVSKFGRVLPVLHLKNQHKRKIIKYDPSKYCHNLKKIGEDFSNTIPISSLTWELEGGNDPMSKKRRGEFSDFHGPPKKIIKVQKDESSTGSLAMSTRPRRVIERPPLTQQQAAQKR

SEQ ID NO: 76432 - protein, 160 aa, Homo sapiens
PPPGNRKMHGDLMYLFVITAEDRQVSITASTRGFYLNQSTAYHFNPKPASPRFLSHSLVELLNQISPTFKKNFAVLQKKRCTAGQPPRRSMPWIACVQRTPTPRGWAMRSTFLDRPETGMRSCRRRGSCLARTCLSGCSEKGPYSRCTATSPRQPPGAPW

SEQ ID NO: 76433 - protein, 232 aa, Homo sapiens
MGCVQCKDKEATKLTEERDGSLNQSSGYRYGTDPTPQHYPSFGVTSIPNYNNFHAAGGQGLTVFGGVNSSSHTGTLRTRGGTGVTLFVALYDYEARTEDDLSFHKGEKFQILNSSEGDWWEARSLTTGETGYIPSNYVAPVDSIQAEEWYFGKLGRKDAERQLLSFGNPRGTFLIRESETTKGAYSLSIRDWDDMKGDHVKHYKIRKLDNGGYYITTRAQFETLQQLVQHYS

SEQ ID NO: 76434 - protein, 264 aa, Homo sapiens
MAALFLSAPPQAEVTFEDVAVYLSREEWGRLGPAQRGLYRDVMLETYGNLVSLALGTRTEYKELTSQETFGEEDPQGSEPVEACDHISKSEGSLEKLVEQRGPRAVTLTNGESSRESGGNLRLLSRPVPDQRPHKCDICEQSFEQRSYLNNHKRVHRSKKTNTVRNSGEIFSANLVVKEDQKIPTGKKLHYCSYCGKTFRYSANLVKHQRLHTEEKPYKCDECGKAFSQSCEFINHRRMHSGEIPYRCDECGKTFTRRPNLMKH

SEQ ID NO: 76435 - protein, 297 aa, Homo sapiens
MAEARKRRELLPLIYHHLLRAGYVRAAREVKEQSGQKCFLAQPVTLLDIYTHWQQTSELGRKRKAEEDAALQAKKTRVSDPISTSESSEEEEEAEAETAKATPRLASTNSSVLGADLPSSMKEKAKAETEKAGKTGNSMPHPATGKTVANLLSGKSPRKSAEPSANTTLVSETEEEGSVPAFGAAAKPGMVSAGQADSSSEDTSSSSDETDVEAKASGKTSQVGAASAPAKESPRKGAAPAPPGKTGPAVAKAQAGKREEDSQSSSEESDSEEEAPAQAKPSGKAPQVRAASAPAKE

SEQ ID NO: 76436 - protein, 128 aa, Homo sapiens
MGRVRKGKQKPGGAVGSFKAERTPVPSLFPALGVVLGRGGGAMGHMLLPFRLGLGGPIGSGHQFFPWIHIGDLAGILTHALEANHVHGVLNGVAPSSATNAEFAQTLGAALGRRAFIPLPSAVVQAVF

SEQ ID NO: 76437 - protein, 52 aa, Homo sapiens
MTILGTTFGMVFSLLQVVSGESGYAQNGDLEDAELDDYSFSCYSQLEVNGSQ

SEQ ID NO: 76438 - protein, 128 aa, Homo sapiens
MNGETIACAEGCQAIVDTGTSLLTGPTSPIANIQSDIGASENSDGDMVVSCSAISSLPDIVFTINGVQYPVPPSAYILQSEGSCISGFQGMNVPTESGELWILGDVFIRQYFTVFDRANNQVGLAPVA

SEQ ID NO: 76439 - protein, 768 aa, Homo sapiens
MVNAGAMSGSGNLMDFLDEPFPDVGTYEDFHTIDWLREKSRDTDRHRKITSKSKESIWEFIKSLLDAWSGWVVMLLIGLLAGTLAGVIDLAVDWMTDLKEGVCLSAFWYSHEQCCWTSNETTFEDRDKCPLWQKWSELLVNQSEICLFWMFHGASAYILNYLMYILWALLFAFLAVSLVRVFAPYACGSGIPEIKTILSGFIIRGYLGKWTLLIKTVTLVLVVSSGLSLGKEGPLVHVACCCGNFFSSLFSKYSKNEGKRREVLSAAAAAGVSVAFGAPIGGVLFSLEEVSYYFPLKTLWRSFFAALVAAFTLRSINPFGNSRLVLFYVEYHTPWYMAELFPFILLGVFGGLWGTLFIRCNIAWCRRRKTTRLGKYPVLEVIVVTAITAIIAYPNPYTRQSTSELISELFNDCGALESSQLCDYINDPNMTRPVDDIPDRPAGVGVYTAMWQLALALIFKIVVTIFTFGMKIPSGLFIPSMAVGAIAGRMVGIGVEQLAYHHHDWIIFRNWCRPGADCVTPGLYAMVGAAACLGGVTRMTVSLVVIMFELTGGLEYIVPLMAAAVTSKWVADAFGKEGIYEAHIHLNGYPFLDVKDEFTHRTLATDVMRPRRGEPPLSVLTQDSMTVEDVETLIKETDYNGFPVVVSRDSERLIGFAQRRELILAIKNARQRQEGIVSNSIMYFTEEPPELPANSPHPLKLRRILNLSPFTVTDHTPMETVVDIFRKLGLRQCLVTRSGRLLGIITKKDVLRHMAQMANQDPESIMFN

SEQ ID NO: 76440 - protein, 117 aa, Homo sapiens
MKTPWKVLLGLLGAAALVTIITVPVVLLNKGNDATADSRKTYTLTDYLKNTYRLKLYSLRWISDHEYLYKQENNILVFNAEYGNSSVFLENSTFHMAKWIFLSFLKCSLPWLLFSLL

SEQ ID NO: 76441 - protein, 2131 aa, Homo sapiens
MFSKKPHGDVKKSTQKVLDTKKDALTRLKHLRIVIENAESIDLKQFFDQHFSHIYYVFFENFVTIEASLKQKGHKSQREELDAILFIFEKILQLLPERIHQRWQFHSIGLILKKLLHTGNSLKIRREGVRLFLLWLQALQNNCSKEQLWMFSCLIPGFSAPQSEHGPRTLDNLINPPLNLQETQVTIEEITPLVPPQSGDKGQEDLTSYFLEALLKYIVIQVKSLEWKNKENQERGFSFLFSHFKKYYLPYIFPNICKENSLYHPILDIPQMRPKPHYVVIKKDAETNEAIYCTKEPFIKARVIVIRWLVSFWLEPKPHTGPHIPGMEGEVLPKNIQRAAASLVSREESKNDNADKTDRTTEPEQSHSNTSTLTEREPSSSSLCSIDEEHLTDIEIVRRVFSSKRSNVNFVTEIFRQAFLLPICEAAAMRKVVKVYQEWIQQEEKPLFMQEPEEIVITSSDLPCIENVTDHDISMEEGEKREEENGTNTADHVRNSSWAKNGSYQGALHNASEEATEQNIRAGTQAVLQVFIINSSNIFLLEPANEIKNLLDEHTDMCKRILNIYRYMVVQVSMDKKTWEQMLLVLLRVTESVLKMPSQAFLQFQGKKNMTLAGRLAGPLFQTLIVAWIKANLNVYISRELWDDLLSVLSSLTYWEELATEWSLTMETLTKVLARNLYSLDLSDLPLDKLSEQKQKKHKGKGVGHEFQKVSVDKSFSRGWSRDQPGQAPMRQRSATTTGSPGTEKARSIVRQKTVAMRSRSIGECALPSAYIRSAKSAPVLIHTSKPFLPDIVLTPLSDELSDIDDAQILPRSTRVRHFSQSEETGNEVFGALNEEQPLPRSSSTSDILEPFTVERAKVNKEDMSQKLPPLNSDIGGSSANVPDLMDEFIAERLRSGNASTMTRRGSSPGSLEIPKDLPDILNKQNQMRPIDDPGVPSEWTSPASAGSSDLISSDSHSDSFSAFQYDGRKFDNFGFGTDTGVTSSADVDSGSGHHQSAEEQEVASLTTLHIDSETSSLNQQAFSAEVATITGSESASPVHSPLGSRSQTPSPSTLNIDHMEQKDLQLDEKLHHSVLQTPDDLEISEFPSECCSVMAGGTLTGWHADVATVMWRRMLGILGDVNSIMDPEIHAQVFDYLCELWQNLAKIRDNLGISTDNLTSPSPPVLIPPLRILTPWLFKATMLTDKYKQGKLHAYKLICNTMKRRQDVSPNRDFLTHFYNIMHCGLLHIDQDIVNTIIKHCSPQFFSLGLPGATMLIMDFIVAAGRVASSAFLNAPRVEAQVLLGSLVCFPNLYCELPSLHPNIPDVAVSQFTDVKELIIKTVLSSARDEPSGPARCVALCSLGIWICEELVHESHHPQIKEALNVICVSLKFTNKTVAHVACNMLHMLVHYVPRLQIYQPDSPLKIIQILIATITHLLPSTEASSYEMDKRLVVSLLLCLLDWIMALPLKTLLQPFHATGAESDKTEKSVLNCIYKVLHGCVYGAQCFSNPRYFPMSLSDLASVDYDPFMHLESLKEPEPLHSPDSERSSKLQPVTEVKTQMQHGLISIAARTVITHLVNHLGHYPMSGGPAMLTSQVCENHDNHYSESTELSPELFESPNIQFFVLNNTTLVSCIQIRSEENMPGGGLSAGLASANSNVRIIVRDLSGKYSWDSAILYGPPPVSGLSEPTSFMLSLSHQEKPEEPPTSNECLEDITVKDGLSLQFKRFRETVPTWDTIRDEEDVLDELLQYLGVTSPECLQRTGISLNIPAPQPVCISEKQENDVINAILKQHTEEKEFVEKHFNDLNMKAVEQDEPIPQKPQSAFYYCRLLLSILGMNSWDKRRSFHLLKKNEKLLRELRNLDSRQCRETHKIAVFYVAEGQEDKHSILTNTGGSQAYEDFVAGLGWEVNLTNHCGFMGGLQKNKSTGLTTPYFATSTVEVIFHVSTRMPSDSDDSLTKKLRHLGNDEVHIVWSEHTRDYRRGIIPTEFGDVLIVIYPMKNHMFSIQIMKKPEVPFFGPLFDGAIVNGKVLPIMVRATAINASRALKSLIPLYQNFYEERARYLQTIVQHHLEPTTFEDFAAQVFSPAPYHHLPSDAVGSYPEILPSETPTATQVDGADLASPMSPRTSKSRMSMKLRRSSGSANKS

SEQ ID NO: 76442 - protein, 234 aa, Homo sapiens
MMGHRPVLVLSQNTKRESGRKVQSGNINAAKTIADIIRTCLGPKSMMKMLLDPMGGIVMTNDGNAILREIQVQHPAAKSMIEISRTQDEEVGDGTTSVIILGEMLSVAEHFLEQQMHPTVVISAYRKALDDMISTLKKISIPVDISDSDMMLNIINSSITTKAISRWSSLACNIALDAVKMVQFEENGRKEIDIKKYARVEKIPGGIIEDSCVLRGVMINKDVTHPRMRRYIKN

SEQ ID NO: 76443 - protein, 114 aa, Homo sapiens
MERLTLPLGGAAAVDEYLEYRRIVGEDDGGKLFTPEEYEEYKRKVLPLRLQNRLFVSWRSPTGMDCKLVGPETLCFCTHRVLLCHSGWSAVARSWLIAASTSWAQAILRPQPPK

SEQ ID NO: 76444 - protein, 68 aa, Homo sapiens
MRGHESSVFSISVHASGKYAITTSSDTAQLWDLDTFQRKRKLNIRQSVGIQKVFFLPLSNTILSCFKD

SEQ ID NO: 76445 - protein, 841 aa, Homo sapiens
GPLRLLALLLLLLLLLLLQLQHLAAAAADPLLGGQGPAKDCEKDQFQCRNERCIPSVWRCDEDDDCLDHSDEDDCPKKTCADSDFTCDNGHCIHERWKCDGEEECPDGSDESEATCTKQVCPAEKLSCGPTSHKCVPASWRCDGEKDCEGGADEAGCATSLGTCRGDEFQCGDGTCVLAIKHCNQEQDCPDGSDEAGCLQVPPTFLGNRRRPRGLNECLHNNGGCSHICTDLKIGFECTCPAGFQLLDQKTCGDIDECKDPDACSQICVNYKGYFKCECYPGYEMDLLTKNCKAAAGKSPSLIFTNRHEVRRIDLVKRNYSRLIPMLKNVVALDVEVATNRIYWCDLSYRKIYSAYMDKASDPKEQEVLIDEQLHSPEGLAVDWVHKHIYWTDSGNKTISVATVDGGRRRTLFSRNLSEPRAIAVDPLRGFMYWSDWGDQAKIEKSGLNGVDRQTLVSDNIEWPNGITLDLLSQRLYWVDSKLHQLSSIDFSGGNRKTLISSTDFLSHPFGIAVFEDKVFWTDLENEAIFSANRLNGLEISILAENLNNPHDIVIFHELKQPRAPDACELSVQPNGGCEYLCLPAPQISSHSPKYTCACPDTMWLGPDMKRCYRAPQSTSTTTLASTMTRTVPATTRAPGTTVHRSTYQNHSTETPSLTAAVPSSVSVPRAPSISPSTLSPATSNHSQHYANEDSKMGSTVTAAVIGIIVPIVVIALLCMSGYLIWRNWKRKNTKSMNFDNPVYRKTTEEEDEDELHIGRTAQIGHVYPAAISSFDRPLWAEPCLGETREPEDPAPALKELFVLPGEPRSQLHQLPKNPLSELPVVKSKRVALSLEDDGLP

SEQ ID NO: 76446 - protein, 167 aa, Homo sapiens
MSAKDLMRMEKIVLEKVCWKVKATTAFQFLQLYYSLLQENLPLERRNSINFERLEAQLKACHCRIIFSKAKPSVLALSIIALEIQAQKCVELTEGIECLQKHSKINGRDLTFWQELVSKCLTEYSSNKCSKPNVQKLKWIVSGRTARQLKHSYYRITHLPTIPEMVP

SEQ ID NO: 76447 - protein, 93 aa, Homo sapiens
  MOD_RES (1)..(1): Any amino acid
XFREKSLLIWIIGQKFPKSMEISLSGTVTFGAKSHEKQPFDPICTGETAYLKLHFRILDYTLTGCYADQHSVQVFASGKPKISARKLHRFKLT

SEQ ID NO: 76448 - protein, 70 aa, Homo sapiens
MSGLDDMTDSDSCLSRKKIKKTESGMYACDLCDKTFQKSSSLLRHKYEHTVYDSHASREEELSAWFWSGT

SEQ ID NO: 76449 - protein, 161 aa, Homo sapiens
MGNGKSIAGDQKAVPTQETHVWYRTFMMEYPSGLQTLHEFKTLLGLQGLNQKANKHIDQVYNTFDTNKDGFVDFLEFIAAVNLIMQEKMEQKLKWYFKLYDADGNGSIDKNELLDMFMAVQALNGQQTLSPEEFINLVFHKIDINNDGNGATLYWITFPTK

SEQ ID NO: 76450 - protein, 66 aa, Homo sapiens
MELGGHWDMNSAPRLVSETAERKQEQKTGTEAEAADSGAVGARRFLLCLYLVGFLVSASVGAGSKC

SEQ ID NO: 76451 - protein, 219 aa, Homo sapiens
  MOD_RES (1)..(1): Any amino acid
XSSPFTLSALLPISTVTVSPTPSSHLASSTIAFPSTPRTTASTHTAPAFSSQSTTSRSTSLTTRVPTSGFVSLTSGVTGIPTSPVTNLTTRHPGPTLSPTTRFLTSSLTAHGSTPASAPVSSLGTPTPTSPGESTGGRPAPRPPRCSQPHPREVRAPHPGACCPISFNIITQQVDARCSCCRPLHSYEQQLELPCPDPSTPGRRLVLTLQVFSHCVCSS

SEQ ID NO: 76452 - protein, 118 aa, Homo sapiens
MAAADLSHGHYLSGDPVCLHEEKTPAGRIVADCLTDCYQDSVTFDDVAVDFTQEEWTLLDSTQRSLYSDVMLENYKNLATVGGQIIKPSLISWLEQEESRTVQGGVLQGRKTQWKGTL

SEQ ID NO: 76453 - protein, 207 aa, Homo sapiens
MSTVICMKQREEEFLLTIRPFANRMQKSPCYIPIVSSATLWDRSTPSAKHIPCYERTSVPCSRFINHMKNFSESPKFRSLHFLNFPVFPERTQNSMACKRLLHTCQYIVPRCSVSTVSFDEESYEEFRSSPAPSSETDEAPLIFTARGETEERARGAPKQAWNSSFLEQLVKKPNWAHSVNPVHLEAQGIHISRHTRPKGQPLSSPK

SEQ ID NO: 76454 - protein, 139 aa, Homo sapiens
MAVTITLKTLQQQTFKIRMEPDETVKVLKEKIEAEKGRDAFPVAGQKLIYAGKILSDDVPIRDYRIDEKNFVVVMVTKTKAGQGTSAPPEASPTAAPESSTSFPPAPTSGMSHPPPAAREDKSPSEESAPTTSPESVSG

SEQ ID NO: 76455 - protein, 56 aa, Homo sapiens
MDEQEALNSIMNDLVALQMNRRHRMPGYETMKNKDTGHSNRVTSESSSSTTGRGEL

SEQ ID NO: 76456 - protein, 207 aa, Homo sapiens
MAEALNQEFLATRSNEKQELQELNDRFANFIEKELRELRRELELLGRERDRVQVERDGLAEDLAALKQRLEEETRKREDAEHNLVLFRKDVDDATLSRLELERKIESLMDEIEFLKKLHEEELRDLQVSVESQQVQQVEVEATVKPELTAALRDIRAQYESIAAKNLQEAEEWYKSKYADLSDAANRNHEALRQAKQEMNESRRQIQ

SEQ ID NO: 76457 - protein, 191 aa, Homo sapiens
MSSAMLVTCLPDPSSSFREDAPRPPVPGEEGETPPCQPGVGKGQVTKPMPVSSNTRRNEDGLGEPEGRASPDSPLTRWTKSLHSLLGDQDGAYLFRTFLEREKCVDTLDFWFACNGFRQMNLKDTKTLRVAKAIYKRYIENNSIVSKQLKPATKTYIRDGIKKQQIDSIMFDQAQTEIQSVMEENAYQMFL

SEQ ID NO: 76458 - protein, 156 aa, Homo sapiens
  MOD_RES (1)..(1): Any amino acid
XGKAQRKISAIHILDVLVLNGTDVREQHFNQRIQLAEKFVKAVSKPSRPDMNPIRVKEVYRLEEMEKIFVRLEMKIIKGSSGTPKLSYTGRDDRHFVPMGLYIVRTVNEPWTMGFSKSFKKKFFYNKKTKDSTFDLPADSIAPFHLPSLACLSKMD

SEQ ID NO: 76459 - protein, 71 aa, Homo sapiens
MDFRTACEETKTGICLLQDGNQEPFKVRLHLAKDILMIQEQDVICVSGKNGDHQKTNSRRIWIKHKGRSRT

SEQ ID NO: 76460 - protein, 99 aa, Homo sapiens
MPFNVAEGKEVLLLVHNLPQQLFGYSWYKGERVDGNRQIVGYAIGTQQATPGPANSGRETIYPNASLLIQNVTQNDTGFYTLQVIKSDLVNEEATGQFH

SEQ ID NO: 76461 - protein, 147 aa, Homo sapiens
MLPRLVLNSWAQMICLPQLPKFPRAMGTSHPAFLVLGCLLTGLSLILCQLSLPSILPNENEKVVQLNSSFSLRCFGESEVSWQYPMSEEESSDVEIRNEENNSGLFVTVLEVSSASAAHTGLYTCYYNHTQTEENELEGRHIYIYVP

SEQ ID NO: 76462 - protein, 267 aa, Homo sapiens
MAQNLKDLAGRLPAGPRGMGTALKLLLGAGAVAYGVRESVFTVEGGHRAIFFNRIGGVQQDTILAEGLHFRIPWFQYPIIYDIRARPRKISSPTGSKDLQMVNISLRVLSRPNAQELPSMYQRLGLDYEERVLPSIVNEVLKSVVAKFNASQLITQRAQVSLLIRRELTERAKDFSLILDDVAITELSFSREYTAAVEAKQVAQQEAQRAQFLVEKAKQEQRQKIVQAEGEAEAAKMLGEALSKNPGYIKLRKIRAAQNISKTPHQG

SEQ ID NO: 76463 - protein, 76 aa, Homo sapiens
MMVQRLGLISPPASQVSTACNQISPSLQRAMNAANLNIPPSDTRILWAAAEVLSPTLPRFPENCAACQLLQCGAFV

SEQ ID NO: 76464 - protein, 121 aa, Homo sapiens
MCHLQEEAGGRWKGGGCLSLKGPGSVTGTAGDSLTVWCQYESMYKGYNKYWCRGQYDTSCESIVETKGEEKVERNGRVSIRDHPEALAFTVTMQNLNEDDAGSYWCKIQTVWVLDSWSRDP

SEQ ID NO: 76465 - protein, 147 aa, Homo sapiens
MGLEAQRLPGAEEAPVRVALRVRPLLPKELLHGHQSCLQVEPGLGRVTLGRDRHFGFHVVLAEDAGQEAVYQACVQPLLEAFFEGFNATVFAYGQTGSGKTYTMGEASVEHHPPALAGAYELPGLGAMGRVQLKWQEALRCLPSLPP

SEQ ID NO: 76466 - protein, 210 aa, Homo sapiens
MGKLRPGRVEWLASGHTERPHLFQNLLLFLWALLNCGLGVSAQGPGEWTPWVSWTRCSSSCGRGVSVRSRRCLRLPGEEPCWGDSHEYRLCQLPDCPPGAVPFRDLQCALYNGRPVLGTQKTYQWVPFHGAPNQCDLNCLAEGHAFYHSFGRVLDGTACSPGAQGVCVAGRCLSAGCDGLLGSGALEDRCGRCGGANDSCLFVQRVFRDA

SEQ ID NO: 76467 - protein, 1434 aa, Homo sapiens
MYERHKRRYSLCDISKVDRTVDVVLLKINRENWCTIEPCPDAASLLASKQSPECENFLDVGLGRECTSKQGVLKRESGSDSDLFHSPSDDMDSIIFPKPEEEHLACDITGSSSSTDDTASLDRHSSHGSDVSLSQILKPNRSRDRQSLDGFYSHGMGAEGRESESEPADPGDVEEEEMDSITEVPANCSVLRSSMRSLSPFRRHSWGPGKNAASDAEMNHRSFSLEGLTGGAGVGNKPSSSLEVSSANAEELRHPFSGEERVDSLVSLSEEDLESDQREHRMFDQQICHRSKQQGFNYCTSAISSPLTKSISLMTISHPGLDNSRPFHSTFHNTSANLTESITEENYNFLPHSPSKKDSEWKSGTKVSRTFSYIKNKMSSSKKSKEKEKEKDKIKEKEKDSKDKEKDKKTVNGHTFSSIPVVGPISCSQCMKPFTNKDAYTCANCSAFVHKGCRESLASCAKVKMKPKGSLQAHDTSSLPTVIMRNKPSQPKERPRSAVLLVDETATTPIFANRRSQQSVSLSKSVSIQNITGVGNDENMSNTWKFLSHSTDSLNKISKVNESTESLTDEGVGTDMNEGQLLGDFEIESKQLEAESWSRIIDSKFLKQQKKDVVKRQEVIYELMQTEFHHVRTLKIMSGVYSQGMMADLLFEQQMVEKLFPCLDELISIHSQFFQRILERKKESLVDKSEKNFLIKRIGDVLVNQFSGENAERLKKTYGKFCGQHNQSVNYFKDLYAKDKRFQAFVKKKMSSSVVRRLGIPECILLVTQRITKYPVLFQRILQCTKDNEVEQEDLAQSLSLVKDVIGAVDSKVASYEKKVRLNEIYTKTDSKSIMRMKSGQMFAKEDLKRKKLVRDGSVFLKNAAGRLKEVQAVLLTDILVFLQEKDQKYIFASLDQKSTVISLKKLIVREVAHEEKGLFLISMGMTDPEMVEVHASSKEERNSWIQIIQDTINTLNRDEDEGIPSENEEEKKMLDTRARELKEQLHQKDQKILLLLEEKEMIFRDMAECSTPLPEDCSPTHSPRVLFRSNTEEALKGGPLMKSAINEVEILQGLVSGNLGGTLGPTVSSPIEQDVVGPVSLPRRAETFGGFDSHQMNASKGGEKEEGDDGQDLRRTESDSGLKKGGNANLVFMLKRNSEQVVQSVVHLYELLSALQGVVLQQDSYIEDQKLVLSERALTRSLSRPSSLIEQEKQRSLEKQRQDLANLQKQQAQYLEEKRRREREWEARERELREREALLAQREEEVQQGQQDLEKEREELQQKKGTYQYDLERLRAAQKQLEREQEQLRREAERLSQRQTERDLCQVSHPHTKLMRIPSFFPSPEEPPSPSAPSIAKSGSLDSELSVSPKRNSISRTHKDKGPFHILSSTSQTNKGPEGQSQAPASTSASTRLFGLTKPKEKKEKKKKNKTSRSQPGDGPASEVSAEGEEIFC

SEQ ID NO: 76468 - protein, 153 aa, Homo sapiens
  MOD_RES (1)..(1): Any amino acid
XPPAASSCLGLPRSWRLRLAYLRAVPSWDLLLPSPTSERLTRSVESWGTQCRRCMRWCPTSRSIAVCTDGKLFNHLETIWRFSPGIPAYPRTCTVDFSISFEFRSLLHSQLATMFFDEVVKQNVAAFERRAATKFGPETAIPRELMFHEVHQT

SEQ ID NO: 76469 - protein, 208 aa, Homo sapiens
MAGVTITATVILVSAGEAYLVYTDRLYSRSDFNNYVAAVYKVLGTFLFGAAVSQSLTDLAKYMIGRLRPNFLAVCDPDWSRVNCSVYVQLEKVCRGNPADVTEARLSFYSGHSSFGMYCMVFLALYVQARLCWKWARLLRPTVQFFLVAFALYVGYTRVSDYKHHWSDVLVGLLQGALVAALTVCYISDFFKARPPQHCLKEEELERK

SEQ ID NO: 76470 - protein, 174 aa, Homo sapiens
MNLLPCNPHGNGLLYAGFNQDHGCFACGMENGFRVYNTDPLKEKEKQVMIWDDLKKKTVIEIEFSTEVKAVKLRRDRIVVVLDSMIKVFTFTHNPHQLHVFETCYNPKGLCVLCPNSNNSLLAFPGTHTGHVQLVDLASTEKPPVDIPAHEGVLSCIALNLQGTRIATASEKGI

SEQ ID NO: 76471 - protein, 208 aa, Homo sapiens
MSFSATILFSPPSGSEARCCCCACKSETNGGNTGSQGGNPPPSTPITVTGHGLAVQSSEQLLHVIYQRVDKAVGLAEAALGLARANNELLKRLQEEVGDLRQGKVSIPDEDGESRAHSSPPEEPGPLKESPGEAFKALSAVEEECDSVGSGVQVVIEELRQLGAASVGPGPLGFPATQRDMRLPGCTLAASEAAPLLNPLVDDYVASE

SEQ ID NO: 76472 - protein, 97 aa, Homo sapiens
MPLARDLLHPSLEEEKKKHKKKRLVQSPNSYFMDVKCPGCYKITTVFSHAQTVVLCVGCSTVLCQPTGGKARLTEGISFGILQPSDEIDDYKCLYLH

SEQ ID NO: 76473 - protein, 59 aa, Homo sapiens
MSEKEGMSEVLEDTISQFRKESRSQSMKEPGFIKETSNLINEASDYLEGKSSNQIYETH

SEQ ID NO: 76474 - protein, 1355 aa, Homo sapiens
MKSCGVSLATAAAAAAAFGDEEKKMAAGKASGESEEASPSLTAEEREALGGLDSRLFGFVRFHEDGARTKALLGKNAAFLYGLGLVYFHYNAFQWAIKAFQEVLYVDPSFCRAKEIHLRLGLMFKVNTDYESSLKHFQLALVDCNPCTLSNAEIQFHIAHLYETQRKYHSAKEAYEQLLQTENLSAQVKATVLQQLGWMHHTVDLLGDKATKESYAIQYLQKSLEADPNSGQSWYFLGRCYSSIGKVQDAFISYRQSIDKSEASADTWCSIGVLYQQQNQPMDALQAYICAVQLDHGHAAAWMDLGTLYESCNQPQDAIKCYLNATRSKSCSNTSALAARIKYLQACKPHHPNTEPVLGLSQTPISQQSLPLHMIPSSQVDDLSSPAKRKRTSSPTKNTSDNWSGGHAVSHPPVQQQAHSWCLTPQKLQHLEQLRANRNNLNPAQKLMLEQLESQFVLMQQHQMRPTGVAQVRSTGIPNGPTADSSLPTNSVSGQQPQLALTRVPSVSQPGVRPACPGQPLANGPFSAGHVPCSTSRTLGSTDTILIGNNHITGSGSNGNVPYLQRNALTLPHNRTNLTSSAEEPWKNQLSNSTQGLHKGQSSHSAGPNGERPLSSTGPSQHLQAAGSGIQNQNGHPTLPSNSVTQGAALNHLSSHTATSGGQQGITLTKESKPSGNILTVPETSRHTGETPNSTASVEGLPNHVHQMTADAVCSPSHGDSKSPGLLSSDNPQLSALLMGKANNNVGTGTCDKVNNIHPAVHTKTDNSVASSPSSAISTATPSPKSTEQTTTNSVTSLNSPHSGLHTINGEGMEESQSPMKTDLLLVNHKPSPQIIPSMSVSIYPSSAEVLKACRNLGKNGLSNSSILLDKCPPPRPPSSPYPPLPKDKLNPPTPSIYLENKRDAFFPPLHQFCTNPNNPVTVIRGLAGALKLDLGLFSTKTLVEANNEHMVEVRTQLLQPADENWDPTGTKKIWHCESNRSHTTIAKYAQYQASSFQESLREENEKRSHHKDHSDSESTSSDNSGRRRKGPFKTIKFGTNIDLSDDKKWKLQLHELTKLPAFVRVVSAGNLLSHVGHTILGMNTVQLYMKVPGSRTPGHQENNNFCSVNINIGPGDCEWFVVPEGYWGVLNDFCEKNNLNFLMGSWWPNLEDLYEANVPVYRFIQRPGDLVWINAGTVHWVQAIGWCNNIAWNVGPLTACQYKLAVERYEWNKLQSVKSIVPMVHLSWNMARNIKVSDPKLFEMIKYCLLRTLKQCQTLREALIAAGKEIIWHGRTKEEPAHYCSICEVEVFDLLFVTNESNSRKTYIVHCQDCARKTSGNLENFVVLEQYKMEDLMQVYDQFTLAPPLPSASS

SEQ ID NO: 76475 - protein, 80 aa, Homo sapiens
MVQASGHRRSTRGSKMVSWSVIAKIQEILQRKMVREFLAEFMSTYVMMAWLTGMLQLCLFAITDQENNPALPGTEALVIG

SEQ ID NO: 76476 - protein, 262 aa, Homo sapiens
MALSRGLPRELAEAVAGGRVLVVGAGGIGCELLKNLVLTGFSHIDLVAKESVLQFYPKANIVAYHDSIMNPDYNVEFFRQFILVMNALDNRAARNHVNRMCLAADVPLIESGTAGYLGQVTTIKKGVTECYECHPKPTQRTFPGCTIRNTPSEPIHCIVWAKYLFNQLFGEEDADQEVSPDRADPEAAWEPTEAEARARASNEDGDIKRISTKEWAKSTGYDPVKLFTKLFKDDIRYLLTMDKLWRKRKPPVPLDWAEVQSQ

SEQ ID NO: 76477 - protein, 1131 aa, Homo sapiens
MRCLAPRPAGSYLSEPQGSSQCATMELGPLEGGYLELLNSDADPLCLYHFYDQMDLAGEEEIELYSEPDTDTINCDQFSRLLCDMEGDEETREAYANIAELDQYVFQDSQLEGLSKDIFIEHIGPDEVIGESMEMPAEVGQKSQKRPFPEELPADLKHWKPAEPPTVVTGSLLVGPVSDCSTLPCLPLPALFNQEPASGQMRLEKTDQIPMPFSSSSLSCLNLPEGPIQFVPTISTLPHGLWQISEAGTGVSSIFIYHGEVPQASQVPPPSGFTVHGLPTSPDRPGSTSPFAPSATDLPSMPEPALTSRANMTEHKTSPTQCPAAGEVSNKLPKWPEPVEQFYRSLQDTYGAEPAGPDGILVEVDLVQARLERSSSKSLERELATPDWAERQLAQGGLAEVLLAAKEHRRPRETRVIAVLGKAGQGKSYWAGAVSRAWACGRLPQYDFVFSVPCHCLNRPGDAYGLQDLLFSLGPQPLVAADEVFSHILKRPDRVLLILDGFEELEAQDGFLHSTCGPAPAEPCSLRGLLAGLFQKKLLRGCTLLLTARPRGRLVQSLSKADALFELSGFSMEQAQAYVMRYFESSGMTEHQDRALTLLRDRPLLLSHSHSPTLCRAVCQLSEALLELGEDAKLPSTLTGLYVGLLGRAALDSPPGALAELAKLAWELGRRHQSTLQEDQFPSADVRTWAMAKGLVQHPPRAAESELAFPSFLLQCFLGALWLALSGEIKDKELPQYLALTPRKKRPYDNWLEGVPRFLAGLIFQPPARCLGALLGPSAAASVDRKQKVLARYLKRLQPGTLRARQLLELLHCAHEAEEAGIWQHVVQELPGRLSFLGTRLTPPDAHVLGKALEAAGQDFSLDLRSTGICPSGLGSLVGLSCVTRFRAALSDTVALWESLQQHGETKLLQAAEEKFTIEPFKAKSLKDVEDLGKLVQTQRTRSSSEDTAGELPAVRDLKKLEFALGPVSGPQAFPKLVRILTAFSSLQHLDLDALSENKIGDEGVSQLSATFPQLKSLETLNLSQNNITDLGAYKLAEALPSLAASLLRLSLYNNCICDVGAESLARVLPDMVSLRVMDVQYNKFTAAGAQQLAASLRRCPHVETLAMWTPTIPFSVQEHLQQQDSRISLR

SEQ ID NO: 76478 - protein, 323 aa, Homo sapiens
MHNFEEELTCPICYSIFEDPRVLPCSHTFCRNCLENILQASGNFYIWRPLRIPLKCPNCRSITEIAPTGIESLPVNFALRAIIEKYQQEDHPDIVTCPEHYRQPLNVYCLLDKKLVCGHCLTIGQHHGHPIDDLQSAYLKEKDTPQKLLEQLTDTHWTDLTHLIEKLKEQKSHSEKMIQGDKEAVLQYFKELNDTLEQKKKSFLTALCDVGNLINQEYTPQIERMKEIREQQLELMALTISLQEESPLKFLEKVDDVRQHVQILKQRPLPEVQPVEIYPRVSKILKEEWSRTEIGQIKNVLIPKMKISPKRMSCSWPDEGTDK

SEQ ID NO: 76479 - protein, 88 aa, Homo sapiens
SYPLFVGFALLRLVAFHLGLLFVWLCQRFSRALMAAKRSSGAAPAPASASAPAPVPGGEAERVRVFHKQAFEYISIALRIDEDEKVTY

SEQ ID NO: 76480 - protein, 105 aa, Homo sapiens
MAYNDTDRNQTEKLLKRVRELEQEVQRLKKEQAKNKEDSNIRENSAGAGKTKRAFDFSAHGRRHVALRIAYMGWGYQGFASQENTNNTIEEKLFEALTKTRLVES

SEQ ID NO: 76481 - protein, 207 aa, Homo sapiens
MADIIARLREDGIQKRVIQEGRGELPDFQDGTKVESPGTYQQDPWAMTDEEKAKAVPLIHQEGNRLYREGHVKEAAAKYYDAIACLKNLQMKEQPGSPEWIQLDQQITPLLLNYCQCKLVVEEYYEVLDHCSSILNKYDDNVKAYFKRGKAHAAVWNAQEAQADFAKVLELDPALAPVVSRELRALEARIRQKDEEDKARFRGIFSH

SEQ ID NO: 76482 - protein, 343 aa, Homo sapiens
MMEGLKKRTRKAFGIRKKEKDTDSTGSPDRDGIKKSNGAPNGFYAEIDWERYNSPELDEEGYSIRPEEPGSTKGKHFYSSSESEEEEESHKKFNIKIKPLQSKDILKNAATVDELKASIGNIALSPSPVGAIKRNLSSEEVARPRRSTPTPELISKKPPDDTTALAPLFGPPLESAFDEQKTEVLLDQPEIWGSGQPINPSMESPKLTRPFPTGTPPPLPPKNVPATPPRTGSPLTIGPGASSPARPATPLVPCRSTTPPPPPPRPPSRPKLPPGKPGVGDVSRPFSPPIHSSSPPPIAPLARAESTSSISSTNSLSAATTPTVGKNSLLSFNPFVVLTGYFL

SEQ ID NO: 76483 - protein, 135 aa, Homo sapiens
  MOD_RES (1)..(1): Any amino acid
XLLLASYFLLLTSPEAQDPGGEEEAESAARQPLIRTEAPESKPGSSSSLSLRERWTVFKGLLWYIVPLVVVYFAEYFINQGLFELLFFWNTSLSHAQQYRWYQMLYQAGVFASRSSLRCCRIRFTWALALLQAGM

SEQ ID NO: 76484 - protein, 229 aa, Homo sapiens
MPLAFCGSENHSAAYRVDQGVLNNGCFVDALNVVPHVFLLFITFPILFIGWGSQSSKVHIHHSTWLHFPGHNLRWILTFMLLFVLVCEIAEGILSDGPAGVLDPGLHHQDHQVCQVLGPRHRLLAATLLPHRAAGDPLWDAAPRGGQCHQGEEIHLLQDTEGGEASRGPARPGGTLPAALRESAVQRHLLVDERLHQDCPQEAHRLASHREAAHRHEGPHQLPTALRGL

SEQ ID NO: 76485 - protein, 39 aa, Homo sapiens
MKMANSLRGEVLKLYKNKKYNILGRVTMTNSSGKETKPL

SEQ ID NO: 76486 - protein, 128 aa, Homo sapiens
NSVLSTSTNRSRNSPLLERASLGQASIQNGKDSTAPQRVPVASPSAHNISSSGGAPDRTNFPRGVSSRSTFHAGQLRQVRDQQNLPYGVTPASPSGHSQGRRGASGSIFSKFTSKFVRRNLSFRFARR

SEQ ID NO: 76487 - protein, 178 aa, Homo sapiens
VLSKGYTKNDFAIHTLKNNFEADAYFVKVIVLSGLCSNDCPRKITPFGVNQPGPYIMYTTVDANGYLKNGSGRSANFLDHLYVGIPRPSGEKSIRKQEWTAIIPNSQLIVIPYPHNVPRSWSAKLYLTPSNIVLLTAIALIGVCVFILAIIGILHWQEKKADDREKRQEAHRFHFDAM

SEQ ID NO: 76488 - protein, 429 aa, Homo sapiens
  MOD_RES (1)..(1): Any amino acid
XHDAPLTIEFPNLDKTSAEWLKVNGLKAKKLSLYQVLAPNAFSPVEEFVPILQKTVSSTIHEKAMIQFEWHDGTVKNIHVDPPFLYKYQQQLSRAMRMYERRIEWLSLASRRIWGTVCEKRVVVLLDISATNSMYIIHIQHSLRLLLEEQLSNKDCFNLIAFGSTIESWRPEMVPVSHNNLQSAWRWALNLRCRGSRNVLSALRKAVEVDFKDKDKHQSQGIYLFTGGIPDQDMPTLSAYMAEACGGCDLQLNVCLFYVGEPKMDTTPPARYASHTDTAAAYKEVTRAAGGRFHWFGDTGIYESDDINSIMSEMEKALNYSQKCAFLMASLKNHSGKVLGSSALPKEKPKTLQLRSQPKKLCPPRPTVPLGARMSIKDDPDREKSPPLKSLKWRPLSSRVGISPGMAEWLRAEFWSQQDQLRPSQRKKG

SEQ ID NO: 76489 - protein, 428 aa, Homo sapiens
MHLVTFCLGEDDGVHTVEDASRKLAVMDSQGRVWAQEMLLRVSPDHVTLLDPASKEELESYPLGAIVRCDAVMPPGRSRSLLLLVCQEPERAQPDVHFFQGLRLGAELIREDIQGALHNYRSGRGERRAAALRATQEELQRDRSPAAETPPLQRRPSVRAVISTVERGAGRGRPQAKPIPEAEEAQRPEPVGTSSNADSASPDLGPRGPDLAVLQAEREVDILNHVFDDVESFVSRLQKSAEAARVLEHRERGRRSRRRAAGEGLLTLRAKPPSEAEYTDVLQKIKYAFSLLARLRGNIADPSSPELLHFLFGPLQMIVNTSGGPEFASSVRRPHLTSDAVALLRDNVTPRENELWTSLGDSWTRPGLELSPEEGPPYRPEFFSGWEPPVTDPQSRAWEDPVEKQLQHERRRRQQSAPQVAVNGWVRW

SEQ ID NO: 76490 - protein, 47 aa, Homo sapiens
MEPEAGTNRTAVAEFILLGLVQTEEMQPVVFVLLLFAYLVTTGGNLS

SEQ ID NO: 76491 - protein, 382 aa, Homo sapiens
MAVQGSQRRLLGSLNSTPTAIPQLGLAANQTGARCLEVSISDGLFLSLGLVSLVENALVVATIAKNRNLHSPMYCFICCLALSDLLVSGSNVLETAVILLLEAGALVARAAVLQQLDNVIDVITCSSMLSSLCFLGAIAVDRYISIFYALRYHSIVTLPRARRAVAAIWVASVVFSTLFIAYYDHVAVLLCLVVFFLAMLVLMAVLYVHMLARACQHAQGIARLHKRQRPVHQGFGLKGAVTLTILLGIFFLCWGPFFLHLTLIVLCPEHPTCGCIFKNFNLFLALIICNAIIDPLIYAFHSQELRRTLKEVLTCSCSQDRALVSWDVKSLGGSVCQELLPQQPQEKGLCDQKASSTALQRLLQKEVKSLPQAKGPGLQEPP

SEQ ID NO: 76492 - protein, 200 aa, Homo sapiens
EHSYSSLGLKAKMDAGWTGLQASDIMWTISDTGWILNILGSLLESWTLGACTFVHLLPKFDPLVILKTLSSYPIKSMMGAPIVYRMLLQQDLSSYKFPHLQNCLAGGESLLPETLENWRAQTGLDIREFYGQTETGLTCMVSKTMKIKPGYMGTAASCYDVQVIDDKGNVLPPGTEGDIGIRVKPIRPIGIFSGYVVSSP

SEQ ID NO: 76493 - protein, 132 aa, Homo sapiens
LMATLKAPLRVHITSLLPTPEDNLEIVLHRWENNSCVEKKVLGEKTENPKKFKINYTVANEATLLDTDYDNFLFLCLQDTTTPIQSMMCQYLARVLVEDDEIMQGFIRAFRPLPRHLWYLLDLKQMEEPCRF

SEQ ID NO: 76494 - protein, 298 aa, Homo sapiens
MRASLLLSVLRPAGPVAVGISLGFTLSLLSVTWVEEPCGPGPPQPGDSELPPRGNTNAARRPNSVQPGAEREKPGAGEGAGENWEPRVLPYHPAQPGQAAKKAVRTRYISTELGIRQRLLVAVLTSQTTLPTLGVAVNRTLGHRLERVVFLTGARGRRAPPGMAVVTLGEERPIGHLHLALRHLLEQHGDDFDWFFLVPDTTYTEAHGLARLTGHLSLASAAHLYLGRPQDFIGGEPTPGRYCHGGFGVLLSRMLLQQLRPHLEGCRNDIVSARPDEWLGRCILDATGVGCTGDHEVG

SEQ ID NO: 76495 - protein, 602 aa, Homo sapiens
MHRGLIHPQSRAVGGDAMTPIVTVLICLGTIPKPTLWAEPDSVITQGSPVTLSCQGSLEAQEYRLYREKKSASWITRIRPELVKNGQFHIPSITWEHTGRYGCQYYSRARWSELSDPLVLVMTGAYPKPTLSAQPSPVVTSGGRVTLQCESQVAFGGFILCKEGEEEHPQCLNSQPHARGSSRAIFSVGPVSPNRRWSHRCYGYDLNSPYVWSSPSDLLELLVPGVSKKPSLSVQPGPVVAPGESLTLQCVSDVGYDRFVLYKEGERDLRQLPGRQPQAGLSQANFTLGPVSRSYGGQYRCYGAHNLSSECSAPSDPLDILITGQIRGTPFISVQPGPTVASGENVTLLCQSWRQFHTFLLTKAGAADAPLRLRSIHEYPKYQAEFPMSPVTSAHAGTYRCYGSLNSDPYLLSHPSEPLELVVSGPSMGSSPPPTGPISTPGPEDQPLTPTGSDPQSGLGRHLGVVIGILVAVVLLLLLLLLLFLILRHRRQGKHWTSTQRKADFQHPAGAVGPEPTDRGLQWRSSPAADAQEENLYAAVKDTQPEDGVEMDTRAAASEAPQDVTYAQLHSLTLRRKATEPPPSQEREPPAEPSIYATLAIH

SEQ ID NO: 76496 - protein, 384 aa, Homo sapiens
MVAEVCSMPAASAVKKPFDLRSKMGKWCHHRFPCCRGSGKSNMGTSGDHDDSFMKTLRSKMGKCCHHCFPCCRGSGTSNVGTSGDHDNSFMKTLRSKMGKWCCHCFPCCRGSGKSNVGTWGDYDDSAFMEPRYHVRREDLDKLHRAAWWGKVPRKDLIVMLRDTDMNKRDKQKRTALHLASANGNSEVVQLLLDRRCQLNVLDNKKRTALIKAVQCQEDECVLMLLEHGADGNIQDEYGNTALHYAIYNEDKLMAKALLLYGADIESKNKCGLTPLLLGVHEQKQEVVKFLIKKKANLNALDRYGRTALILAVCCGSASIVNLLLEQNVDVSSQDLSGQTAREYAVSSHHHVICELLSDYKEKQMLKISSENSNPENVSRTRNK

SEQ ID NO: 76497 - protein, 296 aa, Homo sapiens
  MOD_RES (1)..(1): Any amino acid
XRPLGVQQPGARLPGEGNAGLLGLGPEAAAPGKRIRKPSLLYEGFESPTMASVPALQLTPANPPPPEVSNPKKPGRVTNQLQYLHKVVMKALWKHQFAWPFRQPVDAVKLGLPDYHKIIKQPMDMGTIKRRLENNYYWAASECMQDFNTMFTNCYIYNKPTDDIVLMAQTLEKIFLQKVASMPQEEQELVVTIPKNSHKKGAKLAALQGSVTSAHQVPAVSSVSHTALYTPPPEIPTTVFNIPHPSVISSPLLKSLHSAGPPLLAVTAAPPAQPLAKKKGVKRKADTTTPTPTAIL

SEQ ID NO: 76498 - protein, 56 aa, Homo sapiens
MASGAEPLFSDPGAGSLTWGLIAGTLTLKIPGAAGMVQKVMTYQQPFSNRRTVPIG

SEQ ID NO: 76499 - protein, 248 aa, Homo sapiens
MSLMVVSMACVGFFLLQGAWPHEGLYEKPSLSAQPGPTVLAGESVTLSCSSRSSYDMYHLSREGEAHECRFSAGPKVNGTFQADFPLGPATHGGTYRCFGSFRDSPYEWSNSSDPLLVSVTGNPSNSWPSPTEPSSKTGNPRHLHILIGTSVVIILFILLFFLLHRWCSNKKNAAVMDQESAGNRTANSEDSDEQDPQEVTYTQLNHCVFTQRKITRPSQRPKTPPTDIIVYTELPNAESRSKVVSCP

SEQ ID NO: 76500 - protein, 97 aa, Homo sapiens
MRLDNMLLAEGVAGPEKGGGSAAAAAAAAASGGAGSDNSVEHSDYRAKLSQIRQIYHTELEKYEQACNEFTTHVMNLLREQSRTRPISPKEIERMVS

SEQ ID NO: 76501 - protein, 289 aa, Homo sapiens
MIPASAKAPHKQPHKQDEDSGTEVGEGTDEWAQSKATVRPPDQLELTDAELKEEFTRILTANNPHAPQNIVRYSFKEGTYKPIGFVNQLAVHYTQVGNLIPKDSDEGRRQHYRDELVAGSQESVKVISETGNLEEDEEPKELETEPGSQTDVPAAGAAEKVTEEELMTPKQPKERKLTNQFNFSERASQTYNNPVRDRECQTEPPPRTNFSATANQWEIYDAYVEELEKQEKTKEKEKAKTPVAKKSGKMAMRKLTSMESQTDDLIKLSQAAKIMERMVNQNTYDDIAQ

SEQ ID NO: 76502 - protein, 62 aa, Homo sapiens
DEERDPLLHSFGHLKEVLNSITDPTHEGTAEGMENMADAVTHARFVGTDPASDEVVLMKILQ

SEQ ID NO: 76503 - protein, 22 aa, Homo sapiens
  MOD_RES (1)..(1): Any amino acid
XPSDRDAFLEEFRTSLPKSCDL

SEQ ID NO: 76504 - protein, 108 aa, Homo sapiens
MRQRLLPSVTSLLLVALLFPGSSQARHVNHSATEALGELRERAPGQGTNGFQLLRHAVKRDLLQPRTPPYQGDVPPGIRNTICHMQQGICRLFFCHSGTGQQHRQRCG

SEQ ID NO: 76505 - protein, 68 aa, Homo sapiens
MVKKIEISQHAKYTCSFCGKTKMKRRAVGIWHCGSCMKTVAGGAWTYNTTSAVTVKSAIRRLKELKDQ

SEQ ID NO: 76506 - protein, 133 aa, Homo sapiens
FVAHGLMILARNYLDVYPYDHWSDKILPVYEQGSHFQPSTVEMVDGETSPPKLLTEADLIALMEKHGIGQWLLWVRMPLMRSTSRPSKPGCTWASPQTSGSSLGTWAWDLWKVMIPWAMKCLSLTSGLNWKLI

SEQ ID NO: 76507 - protein, 518 aa, Homo sapiens
MNNHVSSKPSTMKLKHTINPILLYFIHFLISLYTILTYIPFYFFSESRQEKSNRIKAKPVNSKPDSAYRSVNSLDGLASVLYPGCDTLDKVFTYAKNKFKNKRLLGTREVLNEEDEVQPNGKIFKKVILGQYNWLSYEDVFVRAFNFGNGLQMLGQKPKTNIAIFCETRAEWMIAAQACFMYNFQLVTLYATLGGPAIVHALNETEVTNIITSKELLQTKLKDIVSLVPRLRHIITVDGKPPTWSEFPKGIIVHTMAAVEALGAKASMENQPHSKPLPSDIAVIMYTSGSTGLPKGVMISHSNIIAGITGMAERIPELGEEDVYIGYLPLAHVLELSAELVCLSHGCRIGYSSPQTLADQSSKIKKGSKGDTSMLKPTLMAAVPEIMDRIYKNVMNKVSEMSSFQRNLFILAYNYKMEQISKGRNTPLCDSFVFRKVRSLLGGNIRLLLCGGAPLSATTQRFMNICFCCPVGQGYGLTESAGAGTISEGSVLHGQRLECDARRFFGCGTTILAEWEHH

SEQ ID NO: 76508 - protein, 1019 aa, Homo sapiens
MDLNNNSLKTKAQVPMVLTAGPKWLLDVTWQGVEDNKNNCIVYSKGGQLWCTTTKAISEGEELIAFVVDFDSRLQAASQMTLTEGMYPARLLDSIQLLPQQAAMASILPTAIVNKDIFPCKSCGIWYRSERNLQAHLMYYCSGRQREAAPVSEENEDSAHQISSLCPFPQCTKSFSNARALEMHLNSHSGVKMEEFLPPGASLKCTVCSYTADSVINFHQHLFSHLTQAAFRCNHCHFGFQTQRELLQHQELHVPSGKLPRESDMEHSPSATEDSLQPATDLLTRSELPQSQKAMQTKDASSDTELDKCEKKTQLFLTNQRPEIQPTTNKQSFSYTKIKSEPSSPRLASSPVQPNIGPSFPVGPFLSQFSFPQDITMVPQASEILAKMSELVHRRLRHGSSSYPPVIYSPLMPKGATCFECNITFNNLDNYLVHKKHYCSSRWQQMAKSPEFPSVSEKMPEALSPNTGQTSINLLNPAAHSADPENPLLQTSCINSSTVLDLIGPNGKGHDKDFSTQTKKLSTSSNNDDKINGKPVDVKNPSVPLVDGESDPNKTTCEACNITFSRHETYMVHKQYYCATRHDPPLKRSASNKVPAMQRTMRTRKRRKMYEMCLPEQEQRPPLVQQRFLDVANLNNPCTSTQEPTEGLGECYHPRCDIFPGIVSKHLETSLTINKCVPVSKCDTTHSSVSCLEMDVPIDLSKKCLSQSERTTTSPKRLLDYHECTVCKISFNKVENYLAHKQNFCPVTAHQRNDLGQLDGKVFPNPESERNSPDVSYERSIIKCEKNGNLKQPSPNGNLFSSHLATLQGLKVFSEAAQLIATKEENRHLFLPQCLYPGAIKKAKGADQLSPYYGIKPSDYISGSLVIHNTDIEQSRNAENESPKGQASSNGCAALKKDSLPLLPKNRGMVIVNGGLKQDERPAANPQQENISQNPQHEDDHKSPSWISENPLAANENVSPGIPSAEEQLSSIAKGVNGSSQAPTSGKYCRLCDIQFNNLSNFITHKKFYCSSHAAEHVK

SEQ ID NO: 76509 - protein, 152 aa, Homo sapiens
MWSGTSPRCWVSPRRLDRYICTYINVQERDPKAHRFLGLLYELEENTEKAVECYRRSVELNPTQKDLVLKIAELLCKNDVTDGRAKYWVERAAKLFPGSPAIYKLKEQLLDCEGEDGWNKLFDLIQSELYVRPDDVHVNIRLVELYRSTKRL

SEQ ID NO: 76510 - protein, 115 aa, Homo sapiens
  MOD_RES (1)..(1): Any amino acid
XMDDIQLCKDIMDLKQELQNLVAIPEKEKTKLQKQREDELIQKIHKLVQKRDFLVDDAEVERLREQEEDKEMADFLRIKLKPLDKVTKSPANEEVAVNPLPFSSGGCKRLQAEAE

SEQ ID NO: 76511 - protein, 906 aa, Homo sapiens
  MOD_RES (1)..(1): Any amino acid
XRILFAQSEPLVPSAAALARMDAYALAPYAGAGPLVGVPGVGAPTPFSFPKRAHLLFPPPREEGLGFPSFLDPDRHFLSAFRREEPPRMPGGALEPHAGLRPLSRRLEAEAGPAGELAGARGFFQARHLEMDAFKRHSFATEGAGAVENFAAARQVSRQTFLSHGDDFRFQTSHFHRDQLYQQQYQWDPQLTPARPQGLFEKLRGGRAGFADPDDFTLGAGPRFPELGPDGHQRLDYVPSSASREVRHGSDPAFAPGPRGLEPSGAPRPNLTQRFPCQAAARPGPDPAPEAEPERRGGPEGRAGLRRWRLASYLSGCHGEDGGDDGLPAPMEAEAYEDDVLAPGGRAPAGDLLPSAFRVPAAFPTKVPVPGPGSGGNGPEREGPEEPGLAKQDSFRSRLNPLVQRSSRLRSSLIFSTSQAEGAAGAAAATEKVQLLHKEQTVSETLGPGGEAVRSAASTKVAELLEKYKGPARDPGGGAGAITVASHSKAVVSQAWREEVAAPGAVGGERRSLESCLLDLRDSFAQQLHQEAERQPGAASLTAAQLLDTLGRSGSDRLPSRFLSAQSHSTSPQGLDSPLPLEGSGAHQVLHNESKGSPTSAYPERKGSPTPGFSTRRGSPTTGFIEQKGSPTSAYPERRGSPVPPVPERRSSPVPPVPERRGSLTLTISGESPKAGPAEEGPSGPMEVLRKGSLRLRQLLSPKGERRMEDEGGFPVPQENGQPESPRRLSLGQGDSTEAATEERGPRARLSSATANALYSSNLRDDTKAILEQISAHGQKHRAVPAPSPGPTHNSPELGRPPAAGVLAPDMSDKDKCSAIFRSDSLGTQGRLSRTLPASAEERDRLLRRMESMRKEKRVYSRFEVFCKKEEASSPGAGEGPAEEGTRDSKVGKFVPKILGTFKSKK

SEQ ID NO: 76512 - protein, 51 aa, Homo sapiens
MEATGVLPFVRGVDLSGNDFKMVRVGSVAPQRLPWAGGAIEGGEQGLCASP

SEQ ID NO: 76513 - protein, 355 aa, Homo sapiens
MKKFSRMPKSEGGSGGGAAGGGAGGAGAGAGCGSGGSSVGVRVFAVGRHQVTLEESLAEGGFSTVFLVRTHGGIRCALKRMYVNNMPDLNVCKREITIMKELSGHKNIVGYLDCAVNSISDNVWEVLILMEYCRAGQVVNQMNKKLQTGFTEPEVLQIFCDTCEAVARLHQCKTPIIHRDLKVENILLNDGGNYVLCDFGSATNKFLNPQKDGVNVVEEEIKKYTTLSYRAPEMINLYGGKPITTKADIWALGCLLYKLCFFTLPFGESQVAICDGNFTIPDNSRYSRNIHCLIRFMLEPDPEHRPDIFQVSYFAFKFAKKDCPVSNINKCCKQLLRHGALLTEILLFLQLFLNR

SEQ ID NO: 76514 - protein, 174 aa, Homo sapiens
MEKTQETVQRILLEPYKYLLQLPGKQVRTKLSQAFNHWLKVPEDKLQIIIEVTEMLHNASLLIDDIEDNSKLRRGFPVAHSIYGIPSVINSANYVYFLGLEKVLTLDHPDAVKLFTRQLLELHQGQGLDIYWRDNYTCPTEEEYKAMVLQKTGGLFGLAPYHLLKNLLFSRNSK

SEQ ID NO: 76515 - protein, 189 aa, Homo sapiens
MLSGILLGNGTLPATILTSLFTDSLVKEGIAASFAVKLFKAWMAEKDANSVTSSLRKANLDKRLLELFPVNRQSVDHFAKYFTDAGLKELSDFLRVQQSLGTRKELQKELQERLSQECPIKEVVLYVKEEMKIVVLFYKADVLSEEAILKWYKEAHVAKGKSVFLDQMKKFVEWLQNAEEESESEGEEN

SEQ ID NO: 76516 - protein, 114 aa, Homo sapiens
MQDEERYMTLNVQSKKRSSAQTSQLTFKDYSVTLHWYKILLGISGTVNGILTLTLISLILLVSQGVLLKCQKGSCSNATQYEDTGDLKVNNGTRRNISNKDLCASRSADQTDSS

SEQ ID NO: 76517 - protein, 212 aa, Homo sapiens
MATLSFVFLLLGAVSWPPASASGQEFWPGQSAADILSGAASRRRYLLYDVNPPEGFNLRRDVYIRIASLLKTLLKTEEWVLVLPPWGRLYHWQSPDIHQVRIPWSEFFDLPSLNKNIPVIEYEQFIAGRRTACGVCFVVSQCSARDKESGGPFIDQVYVLQSYAEGWKEGTWEEKVDERPCIDQLLYSQDKHEYYRCLLRLLPLPQRMVLGL

SEQ ID NO: 76518 - protein, 317 aa, Homo sapiens
MTVARPSVPAALPLLGELPRLLLLVLLCLPAVWGDCGLPPDVPNAQPALEGRTSFPEDTVITYKCEESFVKIPGEKDSVICLKGSQWSDIEEFCNQKSCPNPGEIRNGQIDVPGGILFGATISFSCNTGYKLFGSTSSFCLISGSSVQWSDPLPECREIYCPAPPQIDNGIIQGERDHYGYRQSVTYACNKGFTMIGEHSIYCTVNNDEGEWSGPPPECRGKSLTSKVPPTVQKPTTVNVPTTEVSPTSQKTTTKTTTPNAQATRSTPVSRTTKHFHETTPNKGSGTTSGTTRLLSGHTCFTLTGLLGTLVTMGLLT

SEQ ID NO: 76519 - protein, 471 aa, Homo sapiens
MLCEGEAQKRKAEESGMPLTQGHLTFRDVAIEFSQEEWKCLDPVQKALYRDVMLENYRNLVSLGICLPDLSIISMMKQRTEPWTVENEMKVAKNPDRWEGIKDINTGRSCAVRSKAGNKPITNQLGLTFQLPLPELEIFQGEGKIYECNQVQKFISHSSSVSPLQRIYSGVKTHIFNKHRNDFVDFPLLSQEQKAHIRRKPYECNEQGKVFRVSSSLPNHQVIHTADKPNRCHECGKTVRDKSGLAEHWRIRTGEKPYKCKECGKLFNRIAYLARHEKVHTGESPYKCNECGKVFSRITYLVRHQKIHTREKPHKCNKCGKVYSSSSYLAQHWRIHTGEKLYKCNKCGKEFSGHSSLTTHLLIHTGEKPYKCKECDKAFRHKFSLTVHQRNHNGEKPYKCHECGKVFTQVSHLARHQKIHTGEKPYKCNECGKVFTQNSHLANHQRIHTGEKPYKCHVCGLSLWSGKESVR

SEQ ID NO: 76520 - protein, 1127 aa, Homo sapiens
MGLGKTVQIIAFLSGMFDASLVNHVLLIMPTNLINTWVKEFIKWTPGMRVKTFHGPSKDERTRNLNRIQQRNGVIITTYQMLINNWQQLSSFRGQEFVWDYVILDEAHKIKTSSTKSAICARAIPASNRLLLTGTPIQNNLQELWSLFDFACQGSLLGTLKTFKMEYENPITRAREKDATPGEKALGFKISENLMAIIKPYFLRRTKEDVQKKKSSNPEARLNEKNPDVDAICEMPSLSRKNDLIIWIRLVPLQEEIYRKFVSLDHIKELLMETRSPLAELGVLKKLCDHPRLLSARACCLLNLGTFSAQDGNEGEDSPDVDHIDQVTDDTLMEESGKMIFLMDLLKRLRDEGHQTLVFSQSRQILNIIERLLKNRHFKTLRIDGTVTHLLEREKRINLFQQNKDYSVFLLTTQVGGVGLTLTAATRVVIFDPSWNPATDAQAVDRVYRIGQKENVVVYRLITCGTVEEKIYRRQVFKDSLIRQTTGEKKNPFRYFSKQELRELFTIEDLQNSVTQLQLQSLHAAQRKSDIKLDEHIAYLQSLGIAGISDHDLMYTCDLSVKEELDVVEESHYIQQRVQKAQFLVEFESQNKEFLMEQQRTRNEGAWLREPVFPSSTKKKCPKLNKPQPQPSPLLSTHHTQEEDISSKMASVVIDDLPKEGEKQDLSSIKVNVTTLQDGKGTGSADSIATLPKGFGSVEELCTNSSLGMEKSFATKNEAVQKETLQEGPKQEALQEDPLESFNYVLSKSTKADIGPNLDQLKDDEILRHCNPWPIISITNESQNAESNVSIIEIADDLSASHSALQDAQASEAKLEEEPSASSPQYACDFNLFLEDSADNRQNFSSQSLEHVEKENSLCGSAPNSRAGFVHSKTCLSWEFSEKDDEPEEVVVKAKIRSKARRIVSDGEDEDDSFKDTSSINPFNTSLFQFSSVKQFDASTPKNDISPPGRFFSSQIPSSVNKSMNSRRSLASRRSLINMVLDHVEDMEERLDDSSEAKGPEDYPEEGVEESSGEASKYTEEDPSGETLSSENKSSWLMTSKPSALAQETSLGAPEPLSGEQLVGSPQDKAAEATNDYETLVKRGKELKECGKIQEALNCLVKALDIKSADPEVMLLTLSLYKQLNNN

SEQ ID NO: 76521 - protein, 56 aa, Homo sapiens
MGSRNSSSAGSGSGDPSEGLPRRGAGLRRSEEEEEEDEDVDLAQVLAYLLRSGCYP

SEQ ID NO: 76522 - protein, 182 aa, Homo sapiens
MDHLESFIAECDRRTELAKKRLAETQEEISAEVSAKAEKVHELNEEIGKLLAKAEQLGAEGNVDESQKILMEVEKVRAKKKEAEEEYRNSMPASSFQQQKLRVCEVCSAYLGLHDNDRRLADHFGGKLHLGFIQIREKLDQLRKTVAEKQEKRNQDRLRRREEREREERLSRRSGSRTRDRR

SEQ ID NO: 76523 - protein, 440 aa, Homo sapiens
MHKSSSIWGDAPPTPQPKCADFQSANLFEGTDLKVQFLLFVPSNPSCGQLVEGSSDLQNSGFNATLGTKLIIHGFRVLGTKPSWIDTFIRTLLRATNANVIAVDWIYGSTGVYFSAVKNVIKLSLEISLFLNKLLVLGVSESSIHIIGVSLGAHVGGMVGQLFGGQLGQITGLDPAGPEYTRASVEERLDAGDALFVEAIHTDTDNLGIRIPVGHVDYFVNGGQDQPGCPTFFYAGYSYLICDHMRAVHLYISALENSCPLMAFPCASYKAFLAGRCLDCFNPFLLSCPRIGLVEQGGVKIEPLPKEVKVYLLTTSSAPYCMHHSLVEFHLKELRNKDTNIEVTFLSSNITSSSKITIPKQQRYGKGIIAHATPQCQINQVKFKFQSSNRVWKKDRTTIIGKFCTALLPVNDREKMVCLPEPVNLQASVTVSCDLKIACV

SEQ ID NO: 76524 - protein, 322 aa, Homo sapiens
MTMTTENPNQTVVSHFFLEGLRYTAKHSSLFFLLFLLIYSITVAGNLLILLTVGSDSHLSLPMYHFLGHLSFLDACLSTVTVPKVMAGLLTLDGKVISFEGCAVQLYCFHFLASTECFLYTVMAYDRYLAICQPLHYPVAMNRRMCAEMAGITWAIGATHAAIHTSLTFRLLYCGPCHIAYFFCDIPPVLKLACTDTTINELVMLASIGIVAAGCLILIVISYIFIVAAVLRIRTAQGRQRAFSPCTAQLTGVLLYYVPPVCIYLQPRSSEAGAGAPAVFYTIVTPMLNPFIYTLRNKEVKHALQRLLCSSFRESTAGSPPP

SEQ ID NO: 76525 - protein, 79 aa, Homo sapiens
MDMAQEPVTFRDVAIYFSREEWACLEPSQRALYRDVMLDNFSSVAALGFCSPRPDLVSRLEQWEEPWVEDRERPEFQAV

SEQ ID NO: 76526 - protein, 115 aa, Homo sapiens
MFLLLALLTELGRLQAHEGSEGIFLHVTVPRKIKSNDSEVSERKMIYIITIDGQPYTLHLGKQSFLPQNFLVYTYNETGSLHSVSPYFMMHCHYQGYAAEFPNSFVTLSICSGLR

SEQ ID NO: 76527 - protein, 39 aa, Homo sapiens
MPKGGRKGGHKGRARQYTSPEEIDAQLQAEKQKARVVHF

SEQ ID NO: 76528 - protein, 1746 aa, Homo sapiens
LGHPEPDYRWLKDNMPLELSGRFQKTVTGLLIENIRPSDSGSYVCEVSNRYGTAKVIGRLYVKQPLKATISPRKVKSSVGSQVSLSCSVTGTEDQELSWYRNGEILNPGKNVRITGINHENLIMDHMVKSDGGAYQCFVRKDKLSAQDYVQVVLEDGTPKIISAFSEKVVSPAEPVSLMCNVKGTPLPTITWTLDDDPILKGGSHRISQMITSEGNVVSYLNISSSQVRDGGVYRCTANNSAGVVLYQARINVRGPASIRPMKNITAIAGRDTYIHCRVIGYPYYSIKWYKNSNLLPFNHRQVAFENNGTLKLSDVQKEVDEGEYTCNVLVQPQLSTSQSVHVTVKVPPFIQPFEFPRFSIGQRVFIPCVVVSGDLPITITWQKDGRPIPGSLGVTIDNIDFTSSLRISNLSLMHNGNYTCIARNEAAAVEHQSQLIVRVPPKFVVQPRDQDGIYGKAVILNCSAEGYPVPTIVWKFSKGAGVPQFQPIALNGRIQVLSNGSLLIKHVVEEDSGYYLCKVSNDVGADVSKSMYLTVKIPAMITSYPNTTLATQGQKKEMSCTAHGEKPIIVRWEKEDRIINPEMARYLVSTKEVGEEVISTLQILPTVREDSGFFSCHAINSYGEDRGIIQLTVQEPPDPPEIEIKDVKARTITLRWTMGFDGNSPITGYDIECKNKSDSWDSAQRTKDVSPQLNSATIIDIHPSSTYSIRMYAKNRIGKSEPSNELTITADEAAPDGPPQEVHLEPISSQSIRVTWKAPKKHLQNGIIRGYQIGYREYSTGGNFQFNIISVDTSGDSEVYTLDNLNKFTQYGLVVQACNRAGTGPSSQEIITTTLEDVPSYPPENVQAIATSPESISISWSTLSKEALNGILQGFRVIYWANLMDGELGEIKNITTTQPSLELDGLEKYTNYSIQVLAFTRAGDGVRSEQIFTRTKEDVPGPPAGVKAAAASASMVFVSWLPPLKLNGIIRKYTVFCSHPYPTVISEFEASPDSFSYRIPNLSRNRQYSVWVVAVTSAGRGNSSEIITVEPLAKAPARILTFSGTVTTPWMKDIVLPCKAVGDPSPAVKWMKDSNGTPSLVTIDGRRSIFSNGSFIIRTVKAEDSGYYSCIANNNWGSDEIILNLQVQVPPDQPRLTVSKTTSSSITLSWLPGDNGGSSIRGYILQYSEDNSEQWGSFPISPSERSYRLENLKCGTWYKFTLTAQNGVGPGRISEIIEAKTLGKEPQFSKEQELFASINTTRVRLNLIGWNDGGCPITSFTLEYRPFGTTVWTTAQRTSLSKSYILYDLQEATWYELQMRVCNSAGCAEKQANFATLNYDGSTIPPLIKSVVQNEEGLTTNEGLKMLVTISCILVGVLLLFVLLLVVRRRRREQRLKRLRDAKSLAEMLMSKNTRTSDTLSKQQQTLRMHIDIPRAQLLIEERDTMETIDDRSTVLLTDADFGEAAKQKSLTVTHTVHYQSVSQATGPLVDVSDARPGTNPTTRRNAKAGPTARNRYASQWTLNRPHPTISAHTLTTDWRLPTPRAAGSVDKESDSYSVSPSQDTDRARSSMVSTESASSTYEELARAYEHAKMEEQLRHAKFTITECFISDTSSEQLTAGTNEYTDSLTSSTPSESGICRFTASPPKPQDGGRVMNMAVPKAHRPGGPGTSRDLSLGQACLEPQKSRTLKRPTVLEPIPMEAASSASSTREGQSWQPGAVATLPQREGAELGQAAKMSSSQESLLDSRGHLKGNNPYAKSYTLV

SEQ ID NO: 76529 - protein, 8 aa, Homo sapiens
MSLDIQSL

SEQ ID NO: 76530 - protein, 78 aa, Homo sapiens
MVEADRPGKLFIGGLNTETNEKALEAVFGKYGRIVEVLLMKDRETNKSRGFAFVTFESPADAKDAARDMNGKMTVDIP

SEQ ID NO: 76531 - protein, 118 aa, Homo sapiens
MLPHQRLRGSGGGALGSDAPAMTSSPVSRVVYNGKRTSSPRSPPSSSEIFTPAHEENVRFIYEAWQGVERDLRGQVPGGERGLVEEYVEKVPNPSLKTFKPIDLSDLKRRSTQDAKKS

SEQ ID NO: 76532 - protein, 238 aa, Homo sapiens
MAEAGKVPLSLGLTGGEAAEWPLQRYARCIPSNTRDPPGPCLEAGTAPCPTWKVFDSNEESGYLVLTIVISGHFFIFQGQTLLDKSRLFRVQFSGESKEQALEHCCSCVQKLAQYITVQVPDGNIQELQLIPGPPRATESQGKDSAKSVPRQPGSHQHSEQQQVCVTAGTGAPDGRTSLTQLAQTLLASEELPHVYEQSAWGAEELGPFLRLCLMDQNFPAFVEEVEKELKKLAGLRN

SEQ ID NO: 76533 - protein, 397 aa, Homo sapiens
MRVMAPRTLILLLSGALALTETWACSHSMRYFYTAVSRPGRGEPRFIAVGYVDDTQFVQFDSDAASPRGEPRAPWVEQEGPEYWDRETQKYKRQAQTDRVNLRKLRGYYNQSEAGSHTLQRMYGCDLGPDGRLLRGYNQFAYDGKDYIALNEDLRSWTAADKAAQITQRKWEAAREAEQRRAYLEGTCVEWLRRYLENGKKTLQRAEHPKTHVTHHPVSDHEATLRCWALGFYPAEITLTWQRDGEDQTQDTELVETRPAGDGTFQKWAAVVVPSGEEQRYTCHVQHEGLPEPLTLRWGPSSQPTIPIVGIVAGLAVLAVLAVLGAVMAVVMCRRKSSGREGVRSGVWPATVPRALMSLSSLVKPETAACVGLRCRISSHLSFVTSRASGISFCKGI

SEQ ID NO: 76534 - protein, 425 aa, Homo sapiens
MASGQFVNKLQEEVICPICLDILQKPVTIDCGHNFCLKCITQIGETSCGFFKCPLCKTSVRKNAIRFNSLLRNLVEKIQALQASEVQSKRKEATCPRHQEMFHYFCEDDGKFLCFVCRESKDHKSHNVSLIEEAAQNYQGQIQEQIQVLQQKEKETVQVKAQGVHRVDVFTDQVEHEKQRILTEFELLHQVLEEEKNFLLSRIYWLGHEGTEAGKHYVASTEPQLNDLKKLIDSLKTKQNMPPRQLLEDIKVVLCRSEEFQFLNPTPVPLELEKKLSEAKSRHDSITGSLKKFKDQLQADRKKDENRFFKSMNKNDMKSWGLLQKNNHKMNKTSEPGSSSAGGRTTSGPPNHHSSAPSHSLFRASSAGKVTFPVCLLASYDEISGQGASSQDTKTFDVALSEELHAALSEWLTAIRAWFCKVPSS

SEQ ID NO: 76535 - protein, 203 aa, Homo sapiens
MGFKPPHPEWIMSCSELSFCLSHPRVQDLPLDESNMVIPSDTDFLDTWEAMEDLVITGLVKNIGVSNFNHEQLERLLNKPGLRFKPLTNQIECHPYLTQKNLISFCQSRDVSVTAYRPLGGSCEGVDLIDNPVIKRIAKEHGKSPAQILIRFQIQRNVIVIPGSITPSHIKENIQVFDFELTQHDMDNILSLNRNLRLAMFPM

SEQ ID NO: 76536 - protein, 638 aa, Homo sapiens
MPLPLLPMDLKGEPGPPGKPGPRGPPGPPGFPGKPGMGKPGLHGQPGPAGPPGFSRMGKAGPPGLPGKVGPPGQPGLRGEPGIRGDQGLRGPPGPPGLPGPSGITIPGKPGAQGVPGPPGFQGEPGPQGEPGPPGDRGLKGDNGVGQPGLPGAPGQGGAPGPPGLPGPAGLGKPGLDGLPGAPGDKGESGPPGVPGPRGEPGAVGPKGPPGVDGVGVPGAAGLPGPQGPSGAKGEPGTRGPPGLIGPTGYGMPGLPGPKGDRGPAGVPGLLGDRGEPGEDGEPGEQGPQGLGGPPGLPGSAGLPGRRGPPGPKGEAGPGGPPGVPGIRGDQGPSGLAGKPGVPGERGLPGAHGPPGPTGPKGEPGFTGRPGGPGVAGALGQKGDLGLPGQPGLRGPSGIPGLQGPAGPIGPQGLPGLKGEPGLPGPPGEGRAGEPGTAGPTGPPGVPGSPGITGPPGPPGPPGPPGAPGAFDETGIAGLHLPNGGVEGAVLGKGGKPQFGLGELSAHATPAFTAVLTSPFPASGMPVKFDRTLYNGHSGYNPATGIFTCPVGGVYYFAYHVHVKGTNVWVALYKNNVPATYTYDEYKKGYLDQASGGAVLQLRPNDQVWVQMPSDQANGLYSTEYIHSSFSGFLLCPT

SEQ ID NO: 76537 - protein, 523 aa, Homo sapiens
MQWIRGGSGMLITGDSIVSAEAVWDHVTMANRELAFKAGDVIKVLDASNKDWWWGQIDDEEGWFPASFVRLWVNQEDEVEEGPSDVQNGHLDPNSDCLCLGRPLQNRDQMRANVINEIMSTERHYIKHLKDICEGYLKQCRKRRDMFSDEQLKVIFGNIEDIYRFQMGFVRDLEKQYNNDDPHLSEIGPCFLEHQDGFWIYSEYCNNHLDACMELSKLMKDSRYQHFFEACRLLQQMIDIAIDGFLLTPVQKICKYPLQLAELLKYTAQDHSDYRYVAAALAVMRNVTQQINERKRRLENIDKIAQWQASVLDWEGEDILDRSSELIYTGEMAWIYQPYGRNQQRVFFLFDHQMVLCKKDLIRRDILYYKGRIDMDKYEVVDIEDGRDDDFNVSMKNAFKLHNKETEEIHLFFAKKLEEKIRWLRAFREERKMVQEDEKIGFEISENQKRQAAMTVRKVPKQKGVNSARSVPPSYPPPQDPLNHGQYLVPDGIAQSQVFEFTEPKRSQSPFWQNFSRLTPFKK

SEQ ID NO: 76538 - protein, 134 aa, Homo sapiens
MAARRSQRRRGRRGEPGTALLVPLALGLGLALACLGLLLAVVSLGSRASLSAQEPAQEELVAEEDQDPSELNPQTEESQDPAPFLNRLVRPRRSAPKGRKTRARRAIAAHYEVHPRPGQDGAQADGGYTTCLRP

SEQ ID NO: 76539 - protein, 436 aa, Homo sapiens
MVGQRVLLLVAFLLSGVLLSEAAKILTISTLGGSHYLLLDRVSQILQEHGHNVTMLHQSGKFLIPDIKEEEKSYQVIRWFSPEDHQKRIKKHFDSYIETALDGRKESEALVKLMEIFGTQCSYLLSRKDIMDSLKNENYDLVFVEAFDFCSFLIAEKLVKPFVAILPTTFGSLDFGLPSPLSYVPVFPSLLTDHMDFWGRVKNFLMFFSFSRSQWDMQSTFDNTIKEHFPEGSRPVLSHLLLKAELWFVNSDFAFDFARPLLPNTVYIGGLMEKPIKPVPQDLDNFIANFGDAGFVLVAFGSMLNTHQSQEVLKKMHNAFAHLPQGVIWTCQSSHWPRDVHLATNVKIVDWLPQSDLLAHPSIRLFVTHGGQNSVMEAIRHGVPMVGLPVNGDQHGNMVRVVAKNYGVSIRLNQVTADTLTLTMKQVIEDKRYVAL

SEQ ID NO: 76540 - protein, 303 aa, Homo sapiens
MARKLIHLEIKPAIRNQIIRELQVLHECNSPYIVGFYGAFYSDGEISICMEHMDGGSLDQVLKEAKRIPEEILGKVSIAVLRGLAYLREKHQIMHRDVKPSNILVNSRGEIKLCDFGVSGQLIDSMANSFVGTRSYMAPERLQGTHYSVQSDIWSMGLSLVELAVGRYPIPPPDAKELEAIFGRPVVDGEEGEPHSISPRPRPPGRPVSGHGMDSRPAMAIFELLDYIVNEPPPKLPNGVFTPDFQEFVNKCLIKNPAERADLKMLTNHTFIKRSEVEEVDFAGWLCKTLRLNQPGTPTRTAV

SEQ ID NO: 76541 - protein, 168 aa, Homo sapiens
MNNQKVVAVLLQECKQVLDQLLLEAPDVSEEDKSEDQRCRALLPSELRTLIQEAKEMKWPFVPEKWQYKQAVGPEDKTNLKDVIGAGLQQLLASLRASILARDCAAAAAIVFLVDRFLYGLDVSGKLLQVAKGLHKLQPATPIAPQVVIRQARISVNSDTVQLPTLPT

SEQ ID NO: 76542 - protein, 141 aa, Homo sapiens
MFYSGLLTEGGRKETDMREAASLRQQRRMKQAVQFIHKDSADLLPLDGLKKLGSSKDMQPHNILQRRLMETNLSKLRSGPRVPWASKTNKLNQAKSEGLKKSEEDDMILVSCQCAGKDVKALVDTGCLYNLISLACVDRLG

SEQ ID NO: 76543 - protein, 308 aa, Homo sapiens
MSETKLTGDAFELYCDVVGSPTPEIQWWYAEVNRAESFRQLWDGARKRRVTVNTAYGSNGVSVLRITRLTLEDSGTYECRASNDPKRNDLRQNPSITWIRAQATISVLQKPRIVTSEEVIIRDSPVLPVTLQCNLTSSSHTLTYSYWTKNGVELSATRKNASNMEYRINKPRAEDSGEYHCVYHFVSAPKANATIEVKAAPDITGHKRSENKNEGQDATMYCKSVGYPHPDWIWRKKENGMPMDIVNTSGRFFIINKENYTELNIVNLQITEDPGEYECNATNAIGSASVVTVLRVRSHLAPLWPFLG

SEQ ID NO: 76544 - protein, 181 aa, Homo sapiens
MAIFSVYVVNKAGGLIYQLDSYAPRAEAEKTFSYPLDLLLKLHDERVLVAFGQRDGIRVGHAVLAINGMDVNGRYTADGKEVLEYLGNPANYPVSIRFGRPRLTSNEKLMLASMFHSLFAIGSQLSPEQGSSGIEMLETDTFKLHCYQTLTEMPIRCELFDQNLKLALEVAEKAGTFGPGS

SEQ ID NO: 76545 - protein, 404 aa, Homo sapiens
MAATEISVLSEQFTKIKELELMPEKGLKEEEKDGVCREKDHRSPSELEAERTSGAFQDSVLEEEVELVLAPSEESEKYILTLQTVHFTSEAVELQDMSLLSIQQQEGVQVVVQQPGPGLLWLEEGPRQSLQQCVAISIQQELYSPQEMEVLQFHALEENVMVASEDSKLAVSLAETTGLIKLEEEQEKNQLLAERTKEQLFFVETMSGDERSDEIVLTVSNSNVEEQEDQPTAGQADAEKAKSTKNQRKTKGAKGTFHCDVCMFTSSRMSSFNRHMKTHTSEKPHLCHLCLKTFRTVTLLRNHVNTHTGTRPYKCNDCNMAFVTSGELVRHRRYKHTHEKPFKCSMCKYASVEVKPFLDLKLHGILVEAAVQVTPSVTNSRICYKQAFYYSYKIYAGNNMHSLL

SEQ ID NO: 76546 - protein, 73 aa, Homo sapiens
MSLQSAQYLRQAEVLKADMTDSKLGPAEVWTSRQALQDLYQKMLVTDLEYALDKKVEQDLGTSVCPVSHCYTK

SEQ ID NO: 76547 - protein, 68 aa, Homo sapiens
MNGEAICSALPTIPYHKLADLRYLSRGASGTVSSARHADWRVQVAVKHLHIHTPLLDRKLNILMLLGH

SEQ ID NO: 76548 - protein, 398 aa, Homo sapiens
  MOD_RES (1)..(1): Any amino acid
XMSPTVIILACLGFFLDQSVWAHVGGQDKPFCSAWPSAVVPQGGHVTLRCHYRRGFNIFTLYKKDGVPVPELYNRIFWNSFLISPVTPAHAGTYRCRGFHPHSPTEWSAPSNPLVIMVTGLYEKPSLTARPGPTVRAGENVTLSCSSQSSFDIYHLSREGEAHELRLPAVPSINGTFQADFPLGPATHGETYRCFGSFHGSPYEWSDPSDPLPVSVTGNPSSSWPSPTEPSFKTGIARHLHAVIRYSVAIILFTILPFFLLHRWCSKKKVSLTKQRPENSGPCAEAGWEHADAAVMNQEPAGHRTVNREDSDEQDPQEVTYAQLDHCIFTQRKITGPSQRSKRPSTDTSVCIELPNAEPRALSPAHEHHSQALMGSSRETTALSQTQLASSNVPAAGI

SEQ ID NO: 76549 - protein, 140 aa, Homo sapiens
MSTERTSWTSLSTIQKIALGLGIPASATVAYILYRRYRESREERLTFVGEDDIEIEMRVPQEAVKLIIGRQGANIKQLRKQTGARIDVDTEDVGDERVLLISGFPVQGEAARQFVLSVRHLEPKLPVTKNQKGHYYYQDL

SEQ ID NO: 76550 - protein, 165 aa, Homo sapiens
MKQLPAATVRLLSSSQIITSVVSVVKELIENSLDAGATSVDVKLENYGFDKIEVRDNGEGIKAVDAPVMAMKYYTSKINSHEDLENLTTYGFRGEALGSICCIAEVLITTRTAADNFSTQYVLDGSGHILSQKPSHLGQGSHSVTQAGLQWHHLGSLQPLPPRLK

SEQ ID NO: 76551 - protein, 60 aa, Homo sapiens
  MOD_RES (1)..(1): Any amino acid
XLTAEPTIVAQLCVPAQETAPAKLIVYLQRFRPQDYQRLLEVNSSRERPQETEDPDHCLG

SEQ ID NO: 76552 - protein, 158 aa, Homo sapiens
MLPSLVPCVGKTVWLYLQAWPNPVFEGDALTLRCQGWKNTPLSQVKFYRDGKFLHFSKENQTLSMGAATVQSRGQYSCSGQVMYIPQTFTQTSETAMVQVQELFPPPVLSAIPSPEPREGSLVTLRCQTKLHPLRVARSRSRAPSWRSECRLLYPVLC

SEQ ID NO: 76553 - protein, 317 aa, Homo sapiens
MKVFCEVLEELYKKICMFQNSDKLLSHMAAQCLALLLYFQLREKITLSNSWIAFCQKNLSEYSESNKAIYCLWTLTAIIKEIFKDSCSQKTEILKQFLTHFDTIFEVFYNSLFSQHFENCRDTSKIVNILMCFLDLLELLIASRIHLKLHFTCQRILFLKPSCMLEVITWPIQAFVKRKVIIFLKKCLLCKVGEDLCRGSVPALMPPDHHVAVDMLALANAVLQAVNSGLLKTLSVYEKHSFFGGDEVQPECELITSPDHVILRAASLVIMKSLEIKFQNYSSASEVKGNSPNSFCMQCVIIYLSTVIHNYQISGLV

SEQ ID NO: 76554 - protein, 143 aa, Homo sapiens
MLTPLGRLDKYAASENIFNRQMVARSLLDTLREVCDDERDCIAVLERISRLADDSEPTVRAELMEQVPHIALFCQENRPSIPYAFSKFLLPIVVRYLADQNNQVRKTSQAALLALLEQELIERFDVETKVCPVLIELTAPDSN

SEQ ID NO: 76555 - protein, 222 aa, Homo sapiens
MQLRNPELHLGCALALRFLALVSWDIPGARALDNGLARTPTMGWLHWERFMCNLDCQEEPDSCISEKLFMEMAELMVSEGWKDAGYEYLCIDDCWMAPQRDSEGRLQADPQRFPHGIRQLANYVHSKGLKLGIYADVGNKTCAGFPGSFGYYDIDAQTFADWGVDLLKFDGCYCDSLENLADGYKHMSLALNRTGRSIVYSCEWPLYMWPFQKSSTLFGSIC

SEQ ID NO: 76556 - protein, 188 aa, Homo sapiens
MNPAAEAEFNILLATDSYKVTHYKQYPPNTSKVYSYFECREKKTENSKLRKVKYEETVFYGLQYILNKYLKGKVVTKEKIQEAKDVYKEHFQDDVFNEKGWNYILEKYDGHLPIEIKAVPEGFVIPRGNVLFTVENTDPECYWLTNWIETFLWSFLTTKKKGEIKELFLSESRNPAILSFSHWELNSH

SEQ ID NO: 76557 - protein, 84 aa, Homo sapiens
MGDRERNKKRLLELLRAPDTGNAHCADCGAADPDWASYKLGIFICLNCCGVHRNFPDISRVKSVRLDFWDDSIVEGLKGTMDSS

SEQ ID NO: 76558 - protein, 1480 aa, Homo sapiens
MSLSFCGNNISSYNINDGVLQNSCFVDALNLVPHVFLLFITFPILFIGWGSQSSKVQIHHNTWLHFPGHNLRWILTFALLFVHVCEIAEGIVSDSRRESRHLHLFMPAVMGFVATTTSIVYYHNIETSNFPKLLLALFLYWVMAFITKTIKLVKYCQSGLDISNLRFCITGMMVILNGLLMAVEINVIRVRRYVFFMNPQKVKPPEDLQDLGVRFLQPFVNLLSKATYWWMNTLIISAHKKPIDLKAIGKLPIAMRAVTNYVCLKDAYEEQKKKVADHPNRTPSIWLAMYRAFGRPILLSSTFRYLADLLGFAGPLCISGIVQRVNETQNGTNNTTGISETLSSKEFLENAYVLAVLLFLALILQRTFLQASYYVTIETGINLRGALLAMIYNKILRLSTSNLSMGEMTLGQINNLVAIETNQLMWFLFLCPNLWAMPVQIIMGVILLYNLLGSSALVGAAVIVLLAPIQYFIATKLAEAQKSTLDYSTERLKKTNEILKGIKLLKLYAWEHIFCKSVEETRMKELSSLKTFALYTSLSIFMNAAIPIAAVLATFVTHAYASGNNLKPAEAFASLSLFHILVTPLFLLSTVVRFAVKAIISVQKLNEFLLSDEIGDDSWRTGESSLPFESCKKHTGVQPKTINRKQPGRYHLDSYEQSTRRLRPAETEDIAIKVTNGYFSWGSGLATLSNIDIRIPTGQLTMIVGQVGCGKSSLLLAILGEMQTLEGKVHWSNVNESEPSFEATRSRNRYSVAYAAQKPWLLNATVEENITFGSPFNKQRYKAVTDACSLQPDIDLLPFGDQTEIGERGINLSGGQRQRICVARALYQNTNIVFLDDPFSALDIHLSDHLMQEGILKFLQDDKRTLVLVTHKLQYLTHADWIIAMKDGSVLREGTLKDIQTKDVELYEHWKTLMNRQDQELEKDMEADQTTLERKTLRRAMYSREAKAQMEDEDEEEEEEEDEDDNMSTVMRLRTKMPWKTCWRYLTSGGFFLLILMIFSKLLKHSVIVAIDYWLATWTSEYSINNTGKADQTYYVAGFSILCGAGIFLCLVTSLTVEWMGLTAAKNLHHNLLNKIILGPIRFFDTTPLGLILNRFSADTNIIDQHIPPTLESLTRSTLLCLSAIGMISYATPVFLVALLPLGVAFYFIQKYFRVASKDLQELDDSTQLPLLCHFSETAEGLTTIRAFRHETRFKQRMLELTDTNNIAYLFLSAANRWLEVRTDYLGACIVLTASIASISGSSNSGLVGLGLLYALTITNYLNWVVRNLADLEVQMGAVKKVNSFLTMESENYEGTMDPSQVPEHWPQEGEIKIHDLCVRYENNLKPVLKHVKAYIKPGQKVGICGRTGSGKSSLSLAFFRMVDIFDGKIVIDGIDISKLPLHTLRSRLSIILQDPILFSGSIRYISQCYPSPLPPPHHSPQSVIFPFLCPCDLIVQFPPMSENMRCLVFCSCDSLLRMMVSSFIHVPTKDMNSSFCMAA

SEQ ID NO: 76559 - protein, 657 aa, Homo sapiens
MQSTANYLWHTDDLLGQGATASVYKARNKKSGELVAVKVFNTTSYLRPREVQVREFEVLRKLNHQNIVKLFAVEETGGSRQKVLVMEYCSSGSLLSVLESPENAFGLPEDEFLVVLRCVVAGMNHLRENGIVHRDIKPGNIMRLVGEEGQSIYKLTDFGAARELDDDEKFVSVYGTEEYLHPDMYERAVLRKPQQKAFGVTVDLWSIGVTLYHAATGSLPFIPFGGPRRNKEIMYRITTEKPAGAIAGAQRRENGPLEWSYTLPITCQLSLGLQSQLVPILANILEVEQAKCWGFDQFFAETSDILQRVVVHVFSLSQAVLHHIYIHAHNTIAIFQEAVHKQTSVAPRHQEYLFEGHLCVLEPSVSAQHIAHTTASSPLTLFSTAIPKGLAFRDPALDVPKFVPKVDLQADYNTAKGVLGAGYQALRLARALLDGQELMFRGLHWVMEVLQATCRRTLEVARTSLLYLSSSLGTERFSSVAGTPEIQELKAAAELRSRLRTLAEVLSRCSQNITETQESLSSLNRELVKSRDQVHEDRSIQQIQCCLDKMNFIYKQFKKSRMRPGLGYNEEQIHKLDKVNFSHLAKRLLQVFQEECVQKYQASLVTHGKRMRVVHETRNHLRLVGCSVAACNTEAQGVQESLSKHARALRGDEAAGI

SEQ ID NO: 76560 - protein, 1413 aa, Homo sapiens
MSWKRNYFSGGRGSVQGMFAPRSSTSIAPSKGLSNEPGQNSCFLNSALQVLWHLDIFRRSFRQLTTHKCMGDSCIFCALKGIFNQFQCSSEKVLPSDTLRSALAKTFQDEQRFQLGIMDDAAECFENLLMRIHFHIADETKEDICTAQHCISHQKFAMTLFEQCVCTSCGATSDPLPFIQMVHYISTTSLCNQAICMLERREKPSPSMFGELLQNASTMGDLRNCPSNCGERIRIRRVLMNAPQIITIGLVWDSDHSDLAEDVIHSLGTCLKLGDLFFRVTDDRAKQSELYLVGMICYYGKHYSTFFFQTKIRKWMYFDDAHVKEIGPKWKDVVTKCIKGHYQPLLLLYADPQGTPVSTQDLPPQAEFQSYSRTCYDSEDSGREPSISSDTRTDSSTESYPYKHSHHESVVSHFSSDSQGTVIYNVENDSMSQSSRDTGHLTDSECNQKHTSKKGSLIERKRSSGRVRRKGDEPQASGYHSEGETLKEKQAPRNASKPSSSTNRLRDFKETVSNMIHNRPSLASQTNVGSHCRGRGGDQPDKKPPRTLPLHSRDWEIESTSSESKSSSSSKYRPTWRPKRESLNIDSIFSKDKRKHCGYTQLSPFSEDSAKEFIPDEPSKPPSYDIKFGGPSPQYKRWGPARPGSHLLEQHPRLIQRMESGYESSERNSSSPVSLDAALPESSNVYRDPSAKRSAGLVPSWRHIPKSHSSSILEVDSTASMGGWTKSQPFSGEEISSKSELDELQEEVARRAQEQELRRKREKELEAAKGFNPHPSRFMDLDELQNQGRSDGFERSLQEAESVFEESLHLEQKGDCAAALALCNEAISKLRLALHGASCSTHSRALVDKKLQISIRKARSLQDRMQQQQSPQQPSQPSACLPTQAGTLSQPTSEQPIPLQVLLSQEAQLESGMDTEFGASSFFHSPASCHESHSSLSPESSAPQHSSPSRSALKLLTSVEVDNIEPSAFHRQGLPKAPGWTEKNSHHSWEPLDAPEGKLQGSRCDNSSCSKLPPQEGRGIAQEQLFQEKKDPANPSPVMPGIATSERGDEHSLGCSPSNSSAQPSLPLYRTCHPIMPVASSFVLHCPDPVQKTNQCLQGQSLKTSLTLKVDRGSEETYRPEFPSTKGLVRSLAEQFQRMQGVSMRDSTGFKDRSLSGSLRKNSSPSDSKPPFSQGQEKGHWPWAKQQSSLEGGDRPLSWEESTEHSSLALNSGLPNGETSSGGQPRLAEPDIYQEKLSQVRDVRSKDLGSSTDLGTSLPLDSWVNITRFCDSQLKHGAPRPGMKSSPHDSHTCVTYPERNHILLHPHWNQDTEQETSELESLYQASLQASQAGCSGWGQQDTAWHPLSQTGSADGMGRRLHSAHDPGLSKTSTAEMEHGLHEARTELQGVSSSFWLCVTGVKLPKGPSTQEGL

SEQ ID NO: 76561 - protein, 206 aa, Homo sapiens
IFEAVGAQGTVVLDEESLHVDDLDLFDGDSGLRFAEDLEVSELKVGADLEREGDLGEVPPHAVHESNHLTDLYRRDETIQVKGNGYVQSPRFPNSYPRNLLLTWRLHSQENTRIQLVFDNQFGLEEAENDICRYDFVEVEDISETSTIIRGRWCGHKEVPPRIKSRTNQIKITFKSDDYFVAKPGFKIYYSLLEDFQPAAASETNW

SEQ ID NO: 76562 - protein, 702 aa, Homo sapiens
  MOD_RES (1)..(1): Any amino acid
XGVGMPSRDRNIGAPGQDTPGVSLHPLSLDSPDREPGADAPLELGDSSPQGPMSLESLAPPESTDEGAETERRWKRLSGRLGRSESLRVSDRRRPSRGSLGAKGRGGGRSRSDVDMDPSSATAVLGPARRATPEPGDEGEPGRSGLELEPEEPPGWRELVPPDTLHSLPKSQVKRQEVISELLVTEAAHVRMLRVLHDLFFQPMAECLFFPLEELQNIFPSLDELIEVHSLFLDRLMKRRQESGYLIEEIGDVLLARFDGAEGSWFQKISSRFCSRQSFALEQLKAKQRKDPRFCAFVQEAESRPRCRRLQLKDMIPTEMQRLTKYPLLLQSIGQNTEEPTEREKVELAAECCREILHHVNQAVRDMEDLLRLKDYQRRLDLSHLRQSSDPMLSEFKNLDITKKKLVHEGPLTWRVTKDKAVEVHVLLLDDLLLLLQRQDERLLLKSHSRTLTPTPDGKTMLRPVLRLTSAMTREVATDHKAFYVLFTWDQEAQIYELVAQTVSERKNWCALITETAGSLKVPAPASRPKPRPSPSSTREPLLSSSENGNGGRETSPADARTERILSDLLPFCRPGPEGQLAATALRKGVGGGILPPETPPVSAWGELCPPAWLHLRFPPRKHPILTTTCEVGTAMMDAHFTDVETEVLTGKVTWPKSHRDEVSLDLNAGARWRWRRCVQDPCWTRKPGPGLEHGPAHTQPG

SEQ ID NO: 76563 - protein, 51 aa, Homo sapiens
MMFVGFLGCYGAIQESQCLLGTFFTCLVILFACEVAAGIWGFVNKDQIAKD

SEQ ID NO: 76564 - protein, 102 aa, Homo sapiens
MAGLSRALSSVFLEAKDAHSVLKRFPRANEFLEELRQGTIERECMEEICSYEEVKEVFENKEKTACTTLGLVLGVGVASGIARTGPGNADQSEARKDTQPKA

SEQ ID NO: 76565 - protein, 177 aa, Homo sapiens
MADKQISLPAKLINGGIAGLIGVTCVFPIDLAKTRLQNQQNGQRVYTSMSDCLIKTVRSEGYFGMYRGAAVNLTLVTPEKAIKLAANDFFRHQLSKDGQKLTLLKEMLAGCGAGTCQVIVTTPMEMLKIQLQDAGRIAAQRKILAAQGQLSAQGGAQPSVEAPAAPRPTATQLTRDL

SEQ ID NO: 76566 - protein, 227 aa, Homo sapiens
MACLLETPIRMSVLSEVTASSRHYVDRLFDPDPQKVLQGVIDMKNAVIGNNKQKANLIVLGAVPRLLYLLQQETSSTELKTECAVVLGSLAMGTENNVKSLLDCHIIPALLQGLLSPDLKFIEACLRCLRTIFTSPVTPEELLYTGPDHQTILFNHGAVQNIAHLLTSLSYKVRMQALKCFSVLAFENPQVSMTLVNVLVDGELLPQIFVKMLQRDKPIEMQLTSAK

SEQ ID NO: 76567 - protein, 85 aa, Homo sapiens
MAATGANAEKAESHNDCPVRLLNPNIAKMKEDILYHFNLTTSRHNFPALFGDVKFVCVGGSPSRMKAFISMVWAFLLSQSCCMSS

SEQ ID NO: 76568 - protein, 59 aa, Homo sapiens
MARGCLCCLKYMMFLFNLIFWDPPVGENGLTGLAEGGSVFSCQEVVESGGHLARPALSI

SEQ ID NO: 76569 - protein, 91 aa, Homo sapiens
MLHNMKGQFAEHLLGAGFVSSRNPKDPESNINSDNEKIIKAVICAGLYPKVAKIRLNLGKKRKMVKVYTKTDGLVAVHPKSVNVEQTDFHY

SEQ ID NO: 76570 - protein, 231 aa, Homo sapiens
  MOD_RES (1)..(1): Any amino acid
XQQKSFVKLQKKHYKEMKDLVKRHHKKTTDLIKEHTTKYNEIQNDYLRRRAALEKSAKKDSKKKSEPSSPDHGSSTIEQDLAALDAEMTQKLIDLKDKQQQQLLNLRQEQYYSEKYQKREHIKLLIQKLTDVAEECQNNQLKKLKEICEKEKKELKKKMDKKRQEKITEAKSKDKSQMEEEKTEMIRSYIQEVVQYIKRLEEAQSKRQEKLVEKHKEIRQQILDEKPKVAP

SEQ ID NO: 76571 - protein, 63 aa, Homo sapiens
MADSGLDKKSTKCPDCSSASQKDVLCVCSSKTRVPPVLVVEMSQTSSIGSAESLISLERKKEK

SEQ ID NO: 76572 - protein, 387 aa, Homo sapiens
RRLRKKYREVGFKHSCFKILTKSKTLRNFEQILFSMGDFDKIWREHCEDEETLCEYAVAMKNLADNHWAKTCEGEGRIEWCCSVCREYFQNGGKRKALEKDEKRAVLATKTTPALNMHESSQLEGHLTNLSFTNPEFITELLQASGKIRLLDVGSCFNPFLKFEEFLTVGIDIVPAVESVYKCDFLNLQLQQPLQLAQDAIDAFLKQLKNPIDSLPGELFHVVVFSLLLSYFPSPYQRWICCKKAHELLVLNGLLLIITPDSSHQNRHAMMMKSWKIAIESLGFKRFKYSKFSHMHLMAFRKISLKTTSDLVSRNYPGMLYIPQDFNSIEDEEYSNPSCYVRSDIEDEQLAYGFTELPDAPYDSDSGESQASSIPFYELEDPILLLS

SEQ ID NO: 76573 - protein, 272 aa, Homo sapiens
  MOD_RES (1)..(1): Any amino acid
XDFGVEAVSEGTDSGISAEAAGIDWGIFPESDSKDPGGDGIDWGDDAVALQITVLEAGTQAPEGVARGPDALTLLEYTETRNQFLDELMELEIFLAQRAVELSEEADVLSVSQFQLAPAILQGQTKEKMVTMVSVLEDLIGKLTSLQLQHLFMILASPRYVDRVTEFLQQKLKQSQLLALKKELMVQKQQEALEEQAALEPKLDLLLEKTKELQKLIEADISKRQKTRLTGRWKATGRKRHLMVILALSMFSTRSCGDWPCGLSGENHRFSF

SEQ ID NO: 76574 - protein, 865 aa, Homo sapiens
MPVRKQDTQRALHLLEEYRSKLSQTEDRQLRSSIERVINIFQSNLFQALIDIQEFYEVTLLDNPKCIDRSKPSEPIQPVNTWEISSLPSSTVTSETLPSSLSPSVEKYRYQDEDTPPQEHISPQITNEVIGPELVHVSEKNLSEIENVHGFVSHSHISPIKVNGTDADYEYEEITLERGNSGLGFSIAGGTDNPHIGDDSSIFITKIITGGAAAQDGRLRVNDCILRVNEVDVRDVTHSKAVEALKEAGSIVRLYVKRRKPVSEKIMEIKLIKGPKGLGFSIAGGVGNQHIPGDNSIYVTKIIEGGAAHKDGKLQIGDKLLAVNNVCLEEVTHEEAVTALKNTSDFVYLKVAKPTSMYMNDGYAPPDITNSSSQPVDNHVSPSSFLGQTPASPARYSPVSKAVLGDDEITREPRKVVLHRGSTGLGFNIVGGEDGEGIFISFILAGGPADLSGELRKGDRIISVNSVDLRAASHEQAAAALKNAGQAVTIVAQYRPEEYSRFEAKIHDLREQMMNSSISSGSGSLRTSQKRSLYVRALFDYDKTKDSGLPSQGLNFKFGDILHVINASDDEWWQARQVTPDGESDEVGVIPSKRRVEKKERARLKTVKFNSKTRDKGEIPDDMGSKGLKHVTSNASDSESSYLILITDEYGCSKGGQEEYVLSYEPVNQQEVNYTRPVIILGPMKDRINDDLISEFPDKFGSCVPHTTRPKRDYEVDGRDYHFVTSREQMEKDIQEHKFIEAGQYNNHLYGTSVQSVREVAEKGKHCILDVSGNAIKRLQIAQLYPISIFIKPKSMENIMEMNKRLTEEQARKTFERAMKLEQEFTEHFTAIVQGDTLEDIYNQVKQIIEEQSGSYIWVPAKEKL

SEQ ID NO: 76575 - protein, 229 aa, Homo sapiens
MPKKKTGARKKAENRREREKQLRASRSTIDLAKHPCNASMECDKCQRRQKNRAFCYFCNSVQKLPICAQCGKTKCMMKSSDCVIKHAGVYSTGLAMVGAICDFCEAWVCHGRKCLSTHACACPLTDAECVECERGVWDHGGRIFSCSFCHNFLCEDDQFEHQASCQVLEAETFKCVSCNRLGQHSCLRCKACFCDDHTRSKVFKQEKGKQPPCPKCGHETQETKDLSMS

SEQ ID NO: 76576 - protein, 76 aa, Homo sapiens
  MOD_RES (1)..(1): Any amino acid
XFRPISAEDEEQQPTEIESLCMNCYCNRNNSELLFLRALWLEQHGDPVGRQDPGPGSALHFVCQGSGGHEQRSGED

SEQ ID NO: 76577 - protein, 111 aa, Homo sapiens
MLAMDTCKHVGQLQLAQDHSSLNPQKWHCVDCNTTESIWACLSCSHVACGRYIEEHALKHFQESSHPVALEVNEMYVFCYLCDDYVLNDNTTGDLKLLRRTLSAIKSQNYH

SEQ ID NO: 76578 - protein, 228 aa, Homo sapiens
MEAARRSLCFRLEQASRWRSLFSSTASLAFPYSPVARLSPYSNGINTPSFSKTSNKAILTPEKTGYTSRGSPLSPQSSIDSELSTSELEDDSISMGYKLQDLTDVQIMARLQEESLRQDYASTSASVSRHSSSVSLSSGKKGTCSDQEYDQYSLEDEEEFDHLPPPQPRLPRCSPFQRGIPHSQTFSSIRECRRSPSSQYFPSNNYQQQQYYSPQAQTPDQQPNRTNG

SEQ ID NO: 76579 - protein, 816 aa, Homo sapiens
MDPSAHRSRAAPPNMDPDPQAGVQVGMRVVRGVDWKWGQQDGGEGGVGTVVELGRHGSPSTPDRTVVVQWDQGTRTNYRAGYQGAHDLLLYDNAQIGVRHPNIICDCCKKHGLRGMRWKCRVCLDYDLCTQCYMHNKHELAHAFDRYETAHSRPVTLSPRQGLPRIPLRGIFQGAKVVRGPDWEWGSQDGGEGKPGRVVDIRGWDVETGRSVASVTWADGTTNVYRVGHKGKVDLKCVGEAAGGFYYKDHLPRLGKPAELQRRVSADSQPFQHGDKVKCLLDTDVLREMQEGHGGWNPRMAEFIGQTGTVHRITDRGDVRVQFNHETRWTFHPGALTKHHSFWVGDVVRVIGDLDTVKRLQAGHGEWTDDMAPALGRVGKVVKVFGDGNLRVAVAGQRWTFSPSCLVAYRPEEDANLDVAERARENKSSLSVALDKLRAQKSDPEHPGRLVVEVALGNAARALDLLRRRPEQVDTKNQGRTALQVAAYLGQVELIRLLLQARAGVDLPDDEGNTALHYAALGNQPEATRVLLSAGCRADAINSTQSTALHVAVQRGFLEVVRALCERGCDVNLPDAHSDTPLHSAISAGTGASGIVEVLTEVPNIDVTATNSQGFTLLHHASLKGHALAVRKILARARQLVDAKKEDGFTALHLAALNNHREVAQILIREGRCDVNVRNRKLQSPLHLAVQQAHVGLVPLLVDAGCSVNAEDEEGDTALHVALQRHQLLPLVADGAGGDPGPLQLLSRLQASGLPGSAELTVGAAVACFLALEGADVSYTNHRGRSPLDLAAEGRVLKALQGCAQRFRERQAGGGR

SEQ ID NO: 76580 - protein, 1957 aa, Homo sapiens
MFRQFYLWTCLASGIILGSLFEICLGQYDDDCKLARGGPPATIVAIDEESRNGTILVDNMLIKGTAGGPDPTIELSLKDNVDYWVLMDPVKQMLFLNSTGRVLDRDPPMNIHSIVVQVQCINKKVGTIIYHEVRIVVRDRNDNSPTFKHESYYATVNELTPVGTTIFTGFSGDNGATDIDDGPNGQIEYVIQYNPDDPTSNDTFEIPLMLTGNIVLRKRLNYEDKTRYFVIIQANDRAQNLNERRTTTTTLTVDVLDGDDLGPMFLPCVLVPNTRDCRPLTYQAAIPELRTPEELNPIIVTPPIQAIDQDRNIQPPSDRPGILYSILVGTPEDYPRFFHMHPRTAELSLLEPVNRDFHQKFDLVIKAEQDNGHPLPAFAGLHIEILDENNQSPYFTMPSYQGYILESAPVGATISDSLNLTSPLRIVALDKDIEDTKDPELHLFLNDYTSVFTVTQTGITRYLTLLQPVDREEQQTYTFSITAFDGVQESEPVIVNIQVMDANDNTPTFPEISYDVYVYTDMRPGDSVIQLTAVDADEGSNGEITYEILVGAQGDFIINKTTGLITIAPGVEMIVGRTYALTVQAADNAPPAERRNSICTVYIEVLPPNNQSPPRFPQLMYSLEISEAMRVGAVLLNLQATDREGDSITYAIENGDPQRVFNLSETTGILTLGKALDRESTDRYILIITASDGRPDGTSTATVNIVVTDVNDNAPVFDPYLPRNLSVVEEEANAFVGQVKATDPDAGINGQVHYSLGNFNNLFRITSNGSIYTAVKLNREVRDYYELVVVATDGAVHPRHSTLTLAIKVLDIDDNSPVFTNSTYTVLVEENLPAGTTILQIEAKDVDLGANVSYRIRSPEVKHFFALHPFTGELSLLRSLDYEAFPDQEASITFLVEAFDIYGTMPPGIATVTVIVKDMNDYPPVFSKRIYKGMVAPDAVKGTPITTVYAEDADPPGLPASRVRYRVDDVQFPYPASIFEVEEDSGRVITRVNLNEEPTTIFKLVVVAFDDGEPVMSSSATVKILVLHPGEIPRFTQEEYRPPPVSELATKGTMVGVISAAAINQSIVYSIVSGNEEDTFGINNITGVIYVNGPLDYETRTSYVLRVQADSLEVVLANLRVPSKSNTAKVYIEIQDENNHPPVFQKKFYIGGVSEDARMFTSVLRVKATDKDTGNYSVMAYRLIIPPIKEGKEGFVVETYTGLIKTAMLFHNMRRSYFKFQVIATDDYGKGLSGKADVLVSVVNQLDMQVIVSNVPPTLVEKKIEDLTEILDRYVQEQIPGAKVVVESIGARRHGDAFSLEDYTKCDLTVYAIDPQTNRAIDRNELFKFLDGKLLDINKDFQPYYGEGGRILEIRTPEAVTSIKKRGESLGYTEGALLALAFIIILCCIPAILVVLVSYRQFKVRQAECTKTARIQAALPAAKPAVPAPAPVAAPPPPPPPPPGAHLYEELGDSSMHNLFLLYHFQQSRGNNSVSEDRKHQQVVMPFSSNTIEAHKSAHVDGSLKSNKLKSARKFTFLSDEDDLSAHNPLYKENISQVSTNSDISQRTDFVDPFSPKIQAKSKSLRGPREKIQRLWSQSVSLPRRLMRKVPNRPEIIDLQQWQGTRQKAENENTGICTNKRGSSNPLLTTEEANLTEKEEIRQGETLMIEGTEQLKSLSSDSSFCFPRPHFSFSTLPTVSRTVELKSEPNVISSPAECSLELSPSRPCVLHSSLSRRETPICMLPIETERNIFENFAHPPNISPSACPLPPPPPISPPSPPPAPAPLAPPPDISPFSLFCPPPSPPSIPLPLPPPTFFPLSVSTSGPPTPPLLPPFPTPLPPPPPSIPCPPPPSASFLSTECVCITGVKCTTNLMPAEKIKSSMTQLSTTTVCKTDPQREPKGILRHVKNLAELEKSVANMYSQIEKNYLRTNVSELQTMCPSEVTNMEITSEQNKGSLNNIVEGTEKQSHSQSTSL

SEQ ID NO: 76581 - protein, 418 aa, Homo sapiens
MDELFPLIFPAEPAQASGPYVEIIEQPKQRGMRFRYKCEGRSAGSIPGERSTDTTKTHPTIKVWMSGPLYFGQINGYTGPGTVRISLVTKDPPHRPHPHELVGKDCRDGFYEAELCPDRCIHSFQNLGIQCVKKRDLEQAISQRIQTNNNPFQVPIEEQRGDYDLNAVRLCFQVTVRDPSGRPLRLPPVLSHPIFDNRAPNTAELKICRVNRNSGSCLGGDEIFLLCDKVQKEDIEVYFTGPGWEARGSFSQADVHRQVAIVFRTPPYADPSLQAPVRVSMQLRRPSDRELSEPMEFQYLPDTDDRHRIEEKRKRTYETFKSIMKKSPFSGPTDPRPPPRRIAVPSRSSASVPKPAPQPYPFTSSLSTINYDEFPTMVFPSGQISQASALAPAPPQVLPQAPAPAPAPAMVSALAQAP

SEQ ID NO: 76582 - protein, 70 aa, Homo sapiens
  MOD_RES (1)..(1): Any amino acid
XGYGGGGPGYSGGSRGYGSGGQGYGNQGSGYGGSGSYDSYNNGGGGGFGGGSGGYGGSSSSSSYGSGRRF

SEQ ID NO: 76583 - protein, 184 aa, Homo sapiens
  MOD_RES (1)..(1): Any amino acid
XAKNLINQMLTINPAKRITAHEALKHPWVCQRSTVASMMHRQETVECLKKFNARRKLKGAILTTMLATRNFSVGRQTTAPATMSTAASGTTMGLVEQAKSLLNKKADGVKPQTNSTKNSAAATSPKGTLPPAALEPQTTVIHNPVDGIKESSDSANTTIEDEDAKGMDDIPGLLPPPPVGRHQT

SEQ ID NO: 76584 - protein, 153 aa, Homo sapiens
MGLTISSLFSRLFGKKQMRILMGFNVETVEYKNICFTVWDVGGQDRIRPLWKHYFQNTQGLIFVVDSNDRERIQEVADELQKMLLVDELRDAVLLLFANKQDLPNAMAISEMTDKLGLQSLRNRTWYVQATCATQGTGLYEGLDWLSNELSKR

SEQ ID NO: 76585 - protein, 50 aa, Homo sapiens
MGPSCPVFLSFTKLSLWWLLLTPAGGEEAKRPPPRAPGDPLSSPSPTALP

SEQ ID NO: 76586 - protein, 117 aa, Homo sapiens
MNALDGVPFKLPKGFVIGTEPLPGPELSVPACGEVLLGSMHDFSLERTALFWVEAAGQGPSPYQCGDPGTASAPPAWLLLLRPLECLSALSAAPAAPLTLPPSLPASGPVSQLPQCL

SEQ ID NO: 76587 - protein, 160 aa, Homo sapiens
MSFIPVAEDSDFPIHNLPYGVFSTRGDPRPRIGVAIGDQILDLSIIKHLFTGPVLSKHQDVFNQPTLNSFMGLGQAAWKEARVFLQNLLSVSQARLRDDTELRKCAFISQASATMHLPATIGDYTDFYSSRQHATNVGIMFRDKENALMPNWYELGQMSA

SEQ ID NO: 76588 - protein, 348 aa, Homo sapiens
MWRLPRALCVHAAKTSKLSGPWSRPAAFMSTLLINQPQYAWLKELGLREENEGVYNGSWGGRGEASVADYEETVKKAREAWKIWADIPAPKRGEIVRQIGDALREKIQVLGSLVSLEMGKILVEGVGEVQEYVDICDYAVGLSRMIGGPILPSERSGHALIEQWNPVGLVGIITAFNFPVAVYGWNNAIAMICGNVCLWKGAPTTSLISVAVTKIIAKVLEDNKLPGAICSLTCGGADIGTAMAKDERVNLLSFTGSTQVGKQVGLMVQERFGRSLLELGGNNAIIAFEDADLSLVVPSALFAAVGTAGQRCTTARRLFIHESIHDEVVNRLKKAYAQIRVGNPWDPN

SEQ ID NO: 76589 - protein, 1631 aa, Homo sapiens
MEGLEEAEANCSVAFAEAQRWVEAVTEKNFETKDFRASLENGVLLCDLINKLKPGVIKKINRLSTPIAGLDNINVFLKACEQIGLKEAQLFHPGDLQDLSNRVTVKQEETDRRVKNVLITLYWLGRKAQSNPYYNGPHLNLKAFENLLGQALTKALEDSSFLKRSGRDSGYGDIWCPERGEFLAPPRHHKREDSFESLDSLGSRSLTSCSSDITLRGGREGFESDTDSEFTFKMQDYNKDDMSYRRISAVEPKTALPFNRFLPNKSRQPSYVPAPLRKKKPDKHEDNRRSWASPVYTEADGTFSSNQRRIWGTNVENWPTVQGTSKSSCYLEEEKAKTRSIPNIVKDDLYVRKLSPVMPNPGNAFDQFLPKCWTPEDVNWKRIKRETYKPWYKEFQGFSQFLLLQALQTYSDDILSSETHTKIDPTSGPRLITRRKNLSYAPGYRRDDLEMAALDPDLENDDFFVRKTGAFHANPYVLRAFEDFRKFSEQDDSVERDIILQCREGELVLPDLEKDDMIVRRIPAQKKEVPLSGAPDRYHPVPFPEPWTLPPEIQAKFLCVLERTCPSKEKSNSCRILVPSYRQKKDDMLTRKIQSWKLGTTVPPISFTPGPCSEADLKRWEAIREASRLRHKKRLMVERLFQKIYGENGSKSMSDVSAEDVQNLRQLRYEEMQKIKSQLKEQDQKWQDDLAKWKDRRKSYTSDLQKKKEEREEIEKQALEKSKRSSKTFKEMLQDRESQNQKSTVPSRRRMYSFDDVLEEGKRPPTMTVSEASYQSERVEEKGATYPSEIPKEDSTTFAKREDRVTTEIQLPSQSPVEEQSPASLSSLRSRSTQMESTRVSASLPRSYRKTDTVRLTSVVTPRPFGSQTRGISSLPRSYTMDDAWKYNGDVEDIKRTPNNVVSTPAPSPDASQLASSLSSQKEVAATEEDVTRLPSPTSPFSSLSQDQAATSKATLSSTSGLDLMSESGEGEISPQREVSRSQDQFSDMRISINQTPGKSLDFGFTIKWDIPGIFVASVEAGSPAEFSQLQVDDEIIAINNTKFSYNDSKEWEEAMAKAQETGHLVMDVRRYGKAGSPETKWIDATSGIYNSEKSSNLSVTTDFSESLQSSNIESKEINGIHDESNAFESKASESISLKNLKRRSQFFEQGSSDSVVPDLPVPTISAPSRWVWDQEEERKRQERWQKEQDRLLQEKYQREQEKLREEWQRAKQEAERENSKYLDEELMVLSSNSMSLTTREPSLATWEATWSEGSKSSDREGTRAGEEERRQPQEEVVHEDQGKKPQDQLVIERERKWEQQLQEEQEQKRLQAEAEEQKRPAEEQKRQAEIERETSVRIYQYRRPVDSYDIPKTEEASSGFLPGDRNKSRSTTELDDYSTNKNGNNKYLDQIGNMTSSQRRSKKEQVPSGAELERQQILQEMRKRTPLHNDNSWIRQRSASVNKEPVSLPGIMRRGESLDNLDSPRSNSWRQPPWLNQPTGFYASSSVQDFSRPPPQLVSTSNRAYMRNPSSSVPPPSAGSVKTSTTGVATTQSPTPRSHSPSASQSGSQLRNRSVSGKRICSYCNNILGKGAAMIIESLGLCYHLHCFKCVACECDLGGSSSGAEVRIRNHQLYCNDCYLRFKSGRPTAM

SEQ ID NO: 76590 - protein, 384 aa, Homo sapiens
MAERQEEQRGSPPLRAEGKADAEVKLILYHWTHSFSSQKVRLVIAEKALKCEEHDVSLPLSEHNEPWFMRLNSTGEVPVLIHGENIICEATQIIDYLEQTFLDERTPRLMPDKESMYYPRVQHYRELLDSLPMDAYTHGCILHPELTVDSMIPAYATTRIRSQIGNTESELKKLAEENPDLQEAYIAKQKRLKSKLLDHDNVKYLKKILDELEKVLDQVETELQRRNEETPVFSLGRETASNLKCNKDQHVGICRLAEEGQQPWLCGESFTLADVSLAVTLHRLKFLGFARRNWGNGKRPNLETYYERVLKRKTFNKVLGHVNNILISAVLPTAFRVAKKRAPKVLGTTLVVGLLAGVGYFAFMLFRKRLGSMILAFRPRPNYF

SEQ ID NO: 76591 - protein, 178 aa, Homo sapiens
MPAEGGKTDMERIGLFSEMEYITVGDKYVSQFNRPFNEAASKNKQMLPGGSKEMSDLQAGYFDPHFVRIFEGEGYINLNQVRRRDMVEAAKKNLGKAFLPSNGEKKPCGLGSYYGTIGGPVPFFSAQSKPREKYKAPGKNLYTNPGKKGTGYGYANITIGKQFSHSADFYDAAKLKYK

SEQ ID NO: 76592 - protein, 357 aa, Homo sapiens
MWAVLRLALRPCARASPAGPRAYHGDSVASLGTQPDLGSALYQENYKQMKALVNQLHERVEHIKLGGGEKARALHISRGKLLPRERIDNLIDPGSPFLELSQFAGYQLYDNEEVPGGGIITGIGRVSGVECMIIANDATVKGGAYYPVTVKKQLRAQEIAMQNRLPCIYLVDSGGAYLPRQADVFPDRDHFGRTFYNQAIMSSKNIAQIAVVMGSCTAGGAYVPAMADENIIVRKQGTIFLAGPPLVKAATGEEVSAEDLGGADLHCRKSGVSDHWALDDHHALHLTRKVVRNLNYQKKLDVTIEPSEEPLFPADELYGIVGANLKRSFDVREKFFMKYFLRLDLNSYNSTWQHGHC

SEQ ID NO: 76593 - protein, 387 aa, Homo sapiens
MSGRPRTTSFAESCKPVQQPSAFGSMKVSRDKDGSKVTTVVATPGQGPDRPQEVSYTDTKVIGNGSFGVVYQAKLCDSGELVAIKKVLQDKRFKNRELQIMRKLDHCNIVRLRYFFYSSGEKKDEVYLNLVLDYVPETVYRVARHYSRAKQTLPVIYVKLYMYQLFRSLAYIHSFGICHRDIKPQNLLLDPDTAVLKLCDFGSAKQLVRGEPNVSYICSRYYRAPELIFGATDYTSSIDVWSAGCVLAELLLGQPIFPGDSGVDQLVEIIKVLGTPTREQIREMNPNYTEFKFPQIKAHPWTKVFRPRTPPEAIALCSRLLEYTPTARLTPLEACAHSFFDELRDPNVKLPNGRDTPALFNFTTQDANTGDRGQTNNAASASASNST

SEQ ID NO: 76594 - protein, 251 aa, Homo sapiens
  MOD_RES (1)..(1): Any amino acid
XEQVAAVTFVPVSKVSGQAEVDDILAAVRPTTRLVTIMLANNETGIVMPVPEISQRIKALNQERVAAGLPPILVHTDAAQALGKQRVDVEDLGVDFLTIVGHKFYGPRIGALYIRGLGEFTPLYPMLFGGGQERNFRPGTENTPMIAGLGKAEFGQKRIHLNSQFPGTQRLPNTCNFSIRGPRLQGHVVLAQCRVLMASVGAACHSDHGDQGFFSQNALAFGHTSHVDICIGVIFSGITFLMCGFTVQGTT

SEQ ID NO: 76595 - protein, 286 aa, Homo sapiens
MAGMKTASGDYIDSSWELRVFVGEEDPEAESVTLRVTGESHIGGVLLKIVEQINRKQDWSDHAIWWEQKRQWLLQTHWTLDKYGILADARLFFGPQHRPVILRLPNRRALRLRASFSQPLFQAVAAICRLLSIRHPEELSLLRAPEKKEKKKKEKEPEEELYDLSKVVLAGGVAPALFRGMPAHFSDSAQTEACYHMLSRPQPPPDPLLLQRLPRPSSLSDKTQLHSRWLDSSRCLMQQGIKAGDALWLRFKYYSFFDLDPKTDPVRLTQLYEQARWDLLLEEIDC

SEQ ID NO: 76596 - protein, 60 aa, Homo sapiens
DTFLRAAWGEETDYTPVWCMRQAGRYLPEFRETRAAQDFFSTCRSPEACCELTLQVPTQT

SEQ ID NO: 76597 - protein, 164 aa, Homo sapiens
PPEKSINKIGHALHAHDPVFKSITHSFKVQTLARSLGLQMPVVVQSMYIFKSPLIRTPPSCTRSPWAGCWACGSQWRMPRWRTAVSGSSLAPTPGPWSSSMEKWYTRASRTSLTARARPTLSTSWRPLAPPGARRTGSSQQLNCPFPNCTPKGSRRAGALAPPG

SEQ ID NO: 76598 - protein, 105 aa, Homo sapiens
MERLKKLSVPTSDEEDEVPAPKPRGGKKTKGGNVFAALIQDQSEEEEEEEKHPPKPAKPEKNRINKAVSEEQQPALKGKKGKEEKSKGKAKPQNKFAALDNEEED

SEQ ID NO: 76599 - protein, 1152 aa, Homo sapiens
MREGLGAACEAAGPRLCRLLCRILRPKPDCCPRRASPVTQDDLQYHNLSKQQNESPQPLVETGKKSPESLVKLDATPLSSPRHVRIKNWGSGMTFQDTLHHKAKGILTCRSKSCLGSIMTPKSLTRGPRDKPTPPDELLPQAIEFVNQYYGSFKEAKIEEHLARVEAVTKEIETTGTYQLTGDELIFATKQAWRNAPRCIGRIQWSNLQVFDARSCSTAREMFEHICRHVRYSTNNGNIRSAITVFPQRSDGKHDFRVWNAQLIRYAGYQMPDGSIRGDPANVEFTQLCIDLGWKPKYGRFDVVPLVLQANGRDPELFEIPPDLVLEVAMEHPKYEWFRELELKWYALPAVANMLLEVGGLEFPGCPFNGWYMGTEIGVRDFCDVQRYNILEEVGRRMGLETHKLASLWKDQAVVEINIAVLHSFQKQNVTIMDHHSAAESFMKYMQNEYRSRGGCPADWIWLVPPMSGSITPVFHQEMLNYVLSPFYYYQVEAWKTHVWQDEKRRPKRREIPLKVLVKAVLFACMLMRKTMASRVRVTILFATETGKSEALAWDLGALFSCAFNPKVVCMDKYRLSCLEEERLLLVVTSTFGNGDCPGNGEKLKKSLFMLKELNNKFRYAVFGLGSSMYPRFCAFAHDIDQKLSHLGASQLTPMGEGDELSGQEDAFRSWAVQTFKAACETFDVRGKQHIQIPKLYTSNVTWDPHHYRLVQDSQPLDLSKALSSMHAKNVFTMRLKSRQNLQSPTSSRATILVELSCEDGQGLNYLPGEHLGVCPGNQPALVQGILERVVDGPTPHQTVRLEALDESGSYWVSDKRLPPCSLSQALTYFLDITTPPTQLLLQKLAQVATEEPERQRLEALCQPSEYSKWKFTNSPTFLEVLEEFPSLRVSAGFLLSQLPILKPRFYSISSSRDHTPTEIHLTVAVVTYHTRDGQGPLHHGVCSTWLNSLKPQDPVPCFVRNASGFHLPEDPSHPCILIGPGTGIAPFRSFWQQRLHDSQHKGVRGGRMTLVFGCRRPDEDHIYQEEMLEMAQKGVLHAVHTAYSRLPGKPKVYVQDILRQQLASEVLRVLHKEPGHLYVCGDVRMARDVAHTLKQLVAAKLKLNEEQVEDYFFQLKSQKRYHEDIFGAVFPYEAKKDRVAVQPSSLEMSAL

SEQ ID NO: 76600 - protein, 1290 aa, Homo sapiens
  MOD_RES (1)..(1): Any amino acid
XSHIGKDEEIPDSSKISLSCKKTGSKKKSSQSEGIFLGSESDEDSVRTSSSQRSHDLKFSASIEKERDFKKSSAPLKSEDLGKPSRSKTDRDDKYFSYSKLERDTRYVSSRCRSERERRRSRSHSRSERGSRTNLSYSRSERSHYYDSDRRYHRSSPYRERTRYSRPYTDNRARESSDSEEEYKKTYSRRTSSHSSSYRDLRTSSYSKSDRDCKTETSYLEMERRGKYSSKLERESKRTSENEAIKRCCSPPNELGFRRGSSYSKHDSSASRYKSTLSKPIPKSDKFKNSFCCTELNEEIKQSHSFSLQTPCSKGSELRMINKNPEREKAGSPAPSNRLNDSPTLKKLDELPIFKSEFITHDSHDSIKELDSLSKVKNDQLRSFCPIELNINGSPGAESDLATFCTSKTDAVLMTSDDSVTGSELSPLVKACMLSSNGFQNISRCKEKDLDDTCMLHKKSESPFRETEPLVSPHQDKLMSMPVMTVDYSKTVVKEPVDTRVSCCKTKDSDIYCTLNDSNPSLCNSEAENIEPSVMKISSNSFMNVHLESKPVICDSRNLTDHSKFACEEYKQSIGSTSSASVNHFDDLYQPIGSSGIASSLQSLPPGIKVDSLTLLKCGENTSPVLDAVLKSKKSSEFLKHAGKETIVEVGSDLPDSGKGFASRENRRNNGLSGKCLQEAQEEGNSILPERRGRPEISLDERGEGGHVHTSDDSEVVFSSCDLNLTMEDSDGVTYALKCDSSGHAPEIVSTVHEDYSGSSESSNDESDSEDTDSDDSSIPRNRLQSVVVVPKNSTLPMEETSPCSSRSSQSYRHYSDHWEDERLESRRHLYEEKFESIASKACPQTDKFFLHKGTEKNPEISFTQSSRKQIDNRLPELSHPQSDGVDSTSHTDVKSDPLGHPNSEETVKAKIPSRQQEELPIYSSDFEDVPNKSWQQTTFQNRPDSRLGKTELSFSSSCEIPHVDGLHSSEELRNLGWDFSQEKPSTTYQQPDSSYGACGGHKYQQNAEQYGGTRDYWQGNGYWDPRSGRPPGTGVVYDRTQGQVPDSLTDDREEEENWDQQDGSHFSDQSDKFLLSLQKDKGSVQAPEISSNSIKDTLAVNEKKDFSKNLEKNDIKDRGPLKKRRQEIESDSESDGELQDRKKVRVEVEQGETSVPPGSALVGPSCVMDDFRDPQRWKECAKQGKMPCYFDLIEENVYLTERKKNKSHRDIKRMQCECTPLSKDERAQGEIACGEDCLNRLLMIECSSRCPNGDYCSNRRFQRKQHADVEVILTEKKGWGLRAAKDLPS

SEQ ID NO: 76601 - protein, 1815 aa, Homo sapiens
  MOD_RES (1)..(1): Any amino acid
XKRIQSRHPELKRVNRPQASAWKKLELSHEYKNRNQLREYQLEGVNWLLFNWYNRQNCILADEMGLGKTIQSIAFLQEVYNVGIHGPFLVIAPLSTITNWEREFNTWTEMNTIVYHGSLASRQMIQQYEMYCKDSRGRLIPGAYKFDALITTFEMILSDCPELREIEWRCVIIDEAHRLKNRNCKLLDSLKHMDLEHKVLLTGTPLQNTVEELFSLLHFLEPSQFPSESEFLKDFGDLKTEEQVQKLQAILKPMMLRRLKEDVEKNLAPKQETIIEVELTNIQKKYYRAILEKNFSFLSKGAGHTNMPNLLNTMMELRKCCNHPYLINGAEEKILTEFREACHIIPHDFHLQAMVRSAGKLVLIDKLLPKLKAGGHKVLIFSQMVRCLDILEDYLIQRRYLYERIDGRVRGNLRQAAIDRFSKPDSDRFVFLLCTRAGGLGINLTAADTCIIFDSDWNPQNDLQAQARCHRIGQSKAVKVYRLITRNSYEREMFDKASLKLGLDKAVLQSMSGRDGNITGIQQFSKKEIEDLLRKGAYAAIMEEDDEGSKFCEEDIDQILLRRTTTITIESEGKGSTFAKASFVASENRTDISLDDPNFWQKWAKKADLDMDLLNSKNNLVIDTPRVRKQTRHFSTLKDDDLVEFSDLESEDDERPRSRRHDRHHAYGRTDCFRVEKHLLVYGWGRWRDILSHGRFKRRMTERDVETICRAILVYCLLHYRGDENIKGFIWDLISPAENGKTKELQNHSVFDVSPFPGLSIPVPRGRKGKKVKSQSTFDIHKADWIRKYNPDTLFQDESYKKHLKHQCNKVLLRVRMLYYLRQEVIGDQAEKVLGGAIASEIDIWFPVVDQLEVPTTWWDSEADKSLLIGVFKHGYEKYNTMRADPALCFLEKAGRPDDKAIAAEHRVLDNFSDIVEGVDFDKDCEDPEYKPLQGPPKDQDDEGDPLMMMDEEISVIDGDEAQVTQQPGHLFWPPGSALTARLRRLVTAYQRSYKREQMKIEAAERGDRRRRRCEAAFKLKEIARREKQQRWTRREQTDFYRVVSTFGVEYDPDTMQFHWDRFRTFARLDKKTDESLTKYFHGFVAMCRQVCRLPPAAGDEPPDPNLFIEPITEERASRTLYRIELLRRLREQVLCHPLLEDRLALCQPPGPELPKWWEPVRHDGELLRGAARHGVSQTDCNIMQDPDFSFLAARMNYMQNHQAGAPAPSLSRCSTPLLHQQYTSRTASPLPLRPDAPVEKSPEETATQVPSLESLTLKLEHEVVARSRPTPQDYEMRVSPSDTTPLVSRSVPPVKLEDEDDSDSELDLSKLSPSSSSSSSSSSSSSSTDESEDEKEEKLTDQSRSKLYDEESLLSLTMSQDGFPNEDGEQMTPELLLLQERQRASEWPKDRVLINRIDLVCQAVLSGKWPSSRRSQEMVTGGILGPGNHLLDSPSLTPGEYGDSPVPTPRSSSAASMAEEEASAVSTAAAQFTKLRRGMDEKEFTVQIKDEEGLKLTFQKHKLMANGVMGDGHPLFHKKKGNRKKLVELEVECMEEPNHLDVDLETRIPVINKVDGTLLVGEDAPRRAELEMWLQGHPEFAVDPRFLAYMEDRRKQKWQRCKKNNKAELNCLGMEPVQTANSRNGKKGHHTETVFNRVLPGPIAPESSKKRARRMRPDLSKMMALMQGGSTGSLSLHNTFQHSSSGLQSVSSLGHSSATSASLPFMPFVMGGAPSSPHVDSSTMLHHHHHHPHPHHHHHHHPGLRAPGYPSSPVTTASGTTLRLPPLQPEEDDDEDEEDDDDLSQGYDSSERDFSLIDDPMMPANSDSSEDADD

SEQ ID NO: 76602 - protein, 209 aa, Homo sapiens
MAPAAASPPEVIRAAQKDEYYRGGLRSAAGGALHSLAGARKWLEWRKEVELLSDVAYFGLTTLAGYQTLGEEYVSIIQVDPSRIHVPSSLRRGVLVTLHAVLPYLLDKALLPLEQELQADPDSGRPLQGSLGPGGRGCSGARRWMRHHTATLTEQQRRALLRAVFVLRQGLACLQRLHVAWFYIHGVFYHLAKRLTGITSVSAACPERT

SEQ ID NO: 76603 - protein, 567 aa, Homo sapiens
MSDNQSWNSSGSEEDPETESGPPVERCGVLSKWTNYIHGWQDRWVVLKNNALSYYKSEDETEYGCRGSICLSKAVITPHDFDECRFDISVNDSVWYLRAQDPDHRQQWIDAIEQHKTESGYGSESSLRRHGSMVSLVSGASGYSATSTSSFKKGHSLREKLAEMETFRDILCRQVDTLQKYFDACADAVSKDELQRDKVVEDDEDDFPTTRSDGDFLHSTNGNKEKLFPHVTPKGINGIDFKGEAITFKATTAGILATLSHCIELMVKREDSWQKRLDKEGPNSLINEEEFFDAVEAALDRQDKIEEQSQSEKVRLHWPTSLPSGDAFSSVGTHRFVQKVEEMVQNHMTYSLQDVGGDANWQLVVEEGEMKVYRREVEENGIVLDPLKATHAVKGVTGHEVCNYFWNVDVRNDWETTIENFHVVETLADNAIIIYQTHKRVWPASQRDVLYLSVIRKIPALTENDPETWIVCNFSVDHDSAPLNNRCVRAKINVAMICQTLVSPPEGNQEISRDNILCKITYVANVNPGGWAPASVLRAVAKREYPKFLKRFTSYVQEKTAGKPILF

SEQ ID NO: 76604 - protein, 826 aa, Homo sapiens
MEQVAKKLGVAHEEIQRLTDELQVKEKEQCKLDSALKKAQLEIDKLKENLVKLKENDAADLQKAKEQNQRLDEEILALRNRVRSLDSEKKVLGEMVERLKGEVCESQENKQLGNHSPGKTVGGEQREQVLKLSQEFAQLNHFTLGGKTAPSNLITSENTCKDPESNEPILETEIQSRKEETEELCPKLGERKQKEIPEESVKEGSFPREGQKEEGSQQNRDMKDEEKEQQLTMKPEEIVRLREELSHINQSLLQSQSSGDSSDDSGAQHPSSGEKLKYNQQGEVQQLHQNLHRLQILCNSAENELRYERGQNLDLKQHNSLLQEENIKIKIELKHAQQKLLDSTKMCSSLTAEYKHCQQKIKELELEVLKHTQSIKSQNNLQEKLVQEKSKVADAEEKILDLQRKLEHAHKVCLTDTCISEKQQLEEKIKEATQNEAKVKQQYQEEQQKRKLLYQNVDELHRQVRTLQDKENLLEMTCSQQQSRIQQQEALLKQLENEKRKYDEHVKSNQELSEKLSKLQQEKEALREEYLRLLKLLNVHVRNYNEKHHQQKVKLQKVKYRLTNEVELRDKRINQFEDEIGILQHKIEKEKAIQDQITAQNDTLLLEKRKLQEQVIEQEQLIHSNKWTISSIQSRVLYMDKENKQLQENSLRLTQQIGFLERIIRSIHIRRGENLKEFPVPKWWHRGKLASLPPTKKQKEIYSTEVFTSNNAELQHEDESVPEATEKWKHSEQMETTISDILESEVVNEILPLSNSSFSGKGLVESFASLQETEEIKSKEAMASSKSPEKSPENLVCSQNSEAGYINVASLKETHGIQEQDQKSEL

SEQ ID NO: 76605 - protein, 104 aa, Homo sapiens
MAGPQMGGSAEDHPPRKRHAAEKQKKKTVIYTKCFEFESATQRPIDRQRYDENEDLSDVEEIVSVRGFSLEEKLRSQLYQGDFVHAMEGKGCLTLISQSETSNS

SEQ ID NO: 76606 - protein, 10 aa, Homo sapiens
MNVCDNLGDH

SEQ ID NO: 76607 - protein, 15 aa, Homo sapiens
MSRLGLPEEPVRQIH

SEQ ID NO: 76608 - protein, 190 aa, Homo sapiens
MPSPRPVLLRGARAALLLLLPPRLLARPSLLLRRSLSAASCPPISLPAAASRSSMDGAGAEEVLAPLRLAVRQQGDLVRKLKEDKAPQVDVDKAVAELKARKRVLEAKELALQPKDDIVDRAKMEDTLKRRFFYDQAFAIYGGVSGLYDFGPVGCALKNNIIQTWRQHFIQEEQILEIDCTMLTPEPVLK

SEQ ID NO: 76609 - protein, 71 aa, Homo sapiens
MEVPPPAPRSFLCRALCLFPRVFAAEAVTADSEVLEERQKRLPYVPEPYYPESGWDRLRELFGKDCHGKSF

SEQ ID NO: 76610 - protein, 70 aa, Homo sapiens
MMTSVSSDHCRGAREKPQISAAQSTQPQKQVVQATAEQMRLAQVIFDKNDSDFEAKVKQGGDRVSLCLLC

SEQ ID NO: 76611 - protein, 87 aa, Homo sapiens
GVKGQPGEKLLPFGSSLSRSSSPYLPAPRSLSPFLSPRRGPPETLGCPSLVPAAPLVNQELEVSLDFRVPLGWTANRATQDQRATWV

SEQ ID NO: 76612 - protein, 104 aa, Homo sapiens
MLLEHRKQQNESAEDEQELSEVFMKTLNYTARFSRFKNRETIASVRSLLLQKKLHKFELACLANLCPETAEESKALIPSLEGRFEDEELQQILDDIQTKRSFQY

SEQ ID NO: 76613 - protein, 477 aa, Homo sapiens
MLCSLLLCECLLLVAGYAHDDDWIDPTDMLNYDAASGTMRKSQAKYGISGEKDVSPDLSCADEISECYHKLDSLTYKIDECEKKKREDYESQSNPVFRRYLNKILIEAGKLGLVLLCLLCIVVLVATELWTYVRWYTQLRRVLIISFLFSLGWNWMYLYKLAFAQHQAEVAKMEPLNNVCAKKMDWTGSIWEWFRSSWTYKDDPCQKYYELLLVNPIWLVPPTKALAVTFTTFVTEPLKHIGKGTGEFIKALMKEIPALLHLPVLIIMALAILSFCYGAGKSVHVLRHIGGPESEPPQALRPRDRRRQEEIDYRPDGGAGDADFHYRGQMGPTEQGPYAKTYEGRREILRERDVDLRFQTGNKSPEVLRAFDVPDAEAREHPTVVPSHKSPVLDTKPKETGGILGEGTPKESSTESSQSAKPVSGQDTSGNTEGSPAAEKAQLKSEAAGSPDQGSTYSPARGVAGPRGQDPVSSPCG

SEQ ID NO: 76614 - protein, 7 aa, Homo sapiens
MPILSSS

SEQ ID NO: 76615 - protein, 84 aa, Homo sapiens
MEQKPSKVECGSDPEENSARSPDGKRKRKNGQCSLKTSMSGYIPSYLDKDEQCVVCGDKATGYHYRCITCEGCKGFFRRTIQKN

SEQ ID NO: 76616 - protein, 259 aa, Homo sapiens
MPWDARRPGGGADGGPEASGAARSRAQKQCRKSSFAFYQAVRDLLPVWLLEDMRASEAFHWDERGRAAAYSPSEALLYALVHDHQAYAHYLLATFPRRALAPPSAGFRCCAAPGPHVALAVRYNRVGILRRILRTLRDFPAEERARVLDRRGCSRVEGGGTSLHVACELARPECLFLLLGHGASPGLRDGGGLTPLELLLRQLGRDAGATPSAAGAPASAPGEPRQRRLLLLDLLALYTPVGAAGSARQELLGDRPRWQ

SEQ ID NO: 76617 - protein, 322 aa, Homo sapiens
GRLGKDLATGVLSQECTKFKVSSCRECIESGPGCTWCQKLNFTGPGDPDSIRCDTRPQLLMRGCAADDIMDPTSLAETQEDHNGGQKQLSPQKVTLYLRPGQAAAFNVTFRRAKGYPIDLYYLMDLSYSMLDDLRNVKKLGGDLLRALNEITESGRIGFGSFVDKTVLPFVNTHPDKLRNPCPNKEKECQPPFAFRHVLKLTNNSNQFQTEVGKQLISGNLDAPEGGLDAMMQVAACPEEIGWRNVTRLLVFATDDGFHFAGDGKLGAILTPNDGRCHLEDNLYKRSNEFDYPSVGQLAHKLAENNIQPIFAVTSRMVKTYE

SEQ ID NO: 76618 - protein, 30 aa, Homo sapiens
MRHHTATLTEQQRRALLRAVFVLRQGLACL

SEQ ID NO: 76619 - protein, 157 aa, Homo sapiens
MDGRTPRPQDAPARRKPKAKAPLPPAETKYTDVSSAADSVESTAFIMEQKENMIDKDVELSVVLPGDIIKSTTVHGSKPMMDLLIFLCAQYHLNPSSYTIDLLSAEQNHIKFKPNTPIGMLEVEKVILKPKMLDKKKPTPIIPEKTVRVVINFKKTQ

SEQ ID NO: 76620 - protein, 327 aa, Homo sapiens
MDSTLTASEIRQRFIDFFKRNEHTYVHSSATIPLDDPTLLFANAGMNQFKPIFLNTIDPSHPMAKLSRAANTQKCIRAGGKHNDLDDVGKDVYHHTFFEMLGSWSFGDYFKELACKMALELLTQEFGIPIERLYVTYFGGDEAAGLEADLECKQIWQNLGLDDTKILPGNMKDNFWEMGDTGPCGPCSEIHYDRIGGRDAAHLVNQDDPNVLEIWNLVFIQYNREADGILKPLPKKSIDTGMGLERLVSVLQNKMSNYDTDLFVPYFEAIQKGTGARPYTGKVGAEDADGIDMAYRVLADHARTITVALADGGRPDNTGRGPDEDPS

SEQ ID NO: 76621 - protein, 151 aa, Homo sapiens
GGKNGFMVSPMKPLEIKTQCSGPRMDPKICPADPAFFSFINNSDLWVANIETGEERRLTFCHQGLSNVLDDPKSAGVATFVIQEEFDRFTGYWWCPTASWEGSEGLKTLRILYEEVDESEVEVIHVPSPALEERKTDSYRYPRTARIPRLP

SEQ ID NO: 76622 - protein, 117 aa, Homo sapiens
MAPRAQIQGPLTFGDVAVAFTRIEWRHLDAAQRALYRDVMLENYGNLVSVGLLSSKPKLITQLEQGAEPWTEVREAPSGTHAVEDYWFETKMSALKQSTSEASVLGERTKSVMMEKG

SEQ ID NO: 76623 - protein, 154 aa, Homo sapiens
  MOD_RES (1)..(1): Any amino acid
XSQPHTKPSVFVMKNGTNVACLVKEFYPKDIRINLVSSKKITEFDPAIVISPSGKYNAVKLGKYEDSNSVTCSVQHDNKTVHSTDFEVKTDSTDHVKPKETENTKQPSKSCHKPKAIVHTEKVNMMSLTVLGLRMLFAKTVAVNFLLTAKLFFL

SEQ ID NO: 76624 - protein, 75 aa, Homo sapiens
MIFTPFLPPADLNVKGLQNDPEEWVAVSDATEDPSGGTGLPREPALLRGSWRSRFQRALACFTKCFRGGYRALGI

SEQ ID NO: 76625 - protein, 186 aa, Homo sapiens
  MOD_RES (1)..(1): Any amino acid
XQQPPLPPSQPAFSQVPASSTSTLPPSTHSKTSAVSSQANSQPPVQVSVKTQVSVTAAIPHLKTSTLPPLPLPPLLPGDDDMDRICCPRYGERRQTESDWGKRCVDKFDIIGIIGEGTYGQVYKAKDKDTGELVALKKVRLDNEKEGFPITAIREIKILRQLIHRSVVNMKEIVTDKQDALDFKKD

SEQ ID NO: 76626 - protein, 138 aa, Homo sapiens
MALDFLAGCAGGTASGPERGEASVPRDVALLQVHHQARERAGPVQGPGLAAHGAHLHQRAGVRGAGQHPPGPGPRLAPQPVPGRCGGGRHPVRHLLPHGAGQDAAAAAGRGPSAHLQGLAGLPRADLRARGSAWRQPG

SEQ ID NO: 76627 - protein, 164 aa, Homo sapiens
MGLPEPKPKPGDLIEIFRLGYEHWALYIGDGYVIHLAPPSEYPGAGSSSVFSVLSNSAEVKRERLEDVVGGCCYRVNNSLDHEYQPRPVEVIISSAKEMVGQKMKYSIVSRNCEHFVTQLRYGKSRCKQVEKAKVEVGVATALGILVVAGCSFAIRRYQKKATA

SEQ ID NO: 76628 - protein, 194 aa, Homo sapiens
  MOD_RES (1)..(1): Any amino acid
XTYLGGILNPIPDCQFELSGADGIVRSSQVEQEEKTKPGQAVDCIWTIKATPKAKIYLRFLDYQMEHSNECKRNFVAVYDGSSSIENLKAKFCSTVANDVMLKTGIGVIRMWADEGSRLSRFRMLFTSFVEQKKKAGVFEQITKTHGTIIGITSGIVLVLLIISILVQVKQPRKKVMACKTAFNKTGFQEVFDP

SEQ ID NO: 76629 - protein, 97 aa, Homo sapiens
  MOD_RES (1)..(1): Any amino acid
XATLQQLEPVTGQVCFCDSHFPRGDNEELHLPYVSVYFLPKVSVLVMCHTRELAFQISKEYERFSKYMPNVKVAVFFGGLSIKKDEEVLKKNCPHIV

SEQ ID NO: 76630 - protein, 610 aa, Homo sapiens
MKEQEKGEGSDSKESPKTKSDESGEEKNGDEDCQRGGQKKKGNKHKWVPLQIDMKPEVPREKLASRPTRPPEPRHIPANRGEIKGSESATYVPVAPPTPAWQPEIKPEPAWHDQDETSSVKSDGAGGARASFRGRGRGRGRGRGRGRGGTRTHFDYQFGYRKFDGVEGPRTPKYMNNITYYFDNVSSTELYSVDQELLKDYIKRQIEYYFSVDNLERDFFLRRKMDADGFLPITLIASFHRVQALTTDISLIFAALKDSKVVEIVDEKVRRREEPEKWPLPPIVDYSQTDFSQLLNCPEFVPRQHYQKETESAPGSPRAVTPVPTKTEEVSNLKTLPKGLSASLPDLDSENWIEVKKRPRPSPARPKKSEESRFSHLTSLPQQLPSQQLMSKDQDEQEELDFLFDEEMEQMDGRKNTFTAWSDEESDYEIDDRDVNKILIVTQTPHYMRRHPGGDRTGNHTSRAKMSAELAKVINDGLFYYEQDLWAEKFEPEYSQIKQEVENFKKVNMISREQFDTLTPEPPVDPNQEVPPGPPRFQQVPTDALANKLFGAPEPSTIARSLPTTVPESPNYRNTRTPRTPRTPQLKDSSQTSRFYPVVKEGRTLDAKMP

SEQ ID NO: 76631 - protein, 347 aa, Homo sapiens
VRARHLHAAALGAEPLPQANVRELMDRALELEARRWAEDVPPQRLDGHCHSELAIDIIQITSQAQAKAESITLDLGSQIKRVLLVELPAFLRSYQRAFNEFLERGKQLTNYRANVIANINNCLSFRMSMEQNWQVPQDTLSLLLGPLGELKSHGFDTLLQNLHEDLKPLFKRFTHTRWAAPVETLENIIATVDTRLPEFSELQGCFREELMEALHLHLVKEYIIQLSKGRLVLKTAEQQQQLAGYILANADTIQHFCTQHGSPATWLQPALPTLAEIIRLQDPSAIKIEVATYATCYPDFSKGHLSAILAIKGNLSNSEVKRIRSILDVSMGAQEPSRPLFSLIKVG

SEQ ID NO: 76632 - protein, 600 aa, Homo sapiens
MALRRALPALRPCIPRFVPLSTAPASREQPAAGPAAVPGGGSATAVRPPVPAVDFGNAQEAYRSRRTWELARSLLVLRLCAWPALLARHEQLLYVSRKLLGQRLFNKLMKMTFYGHFVAGEDQESIQPLLRHYRAFGVSAILDYGVEEDLSPEEAEHKEMESCTSAAERDGSGTNKRDKQYQAHWAFGDRRNGVISARTYFYANEAKCDSHMETFLRCIEASGRVSDDGFIAIKLTALGRPQFLLQFSEVLAKWRCFFHQMAVEQGQAGLAAMDTKLEVAVLQESVAKLGIASRAEIEDWFTAETLGVSGTMDLLDWSSLIDSRTKLSKHLVVPNAQTGQLEPLLSRFTEEEELQMTRMLQRMDVLAKKATEMGVRLMVDAEQTYFQPAISRLTLEMQRKFNVEKPLIFNTYQCYLKDAYDNVTLDVELARREGWCFGAKLVRGAYLAQERARAAEIGYEDPINPTYEATNAMYHRCLDYVLEELKHNAKAKVMVASHNEDTVRFALRRMEELGLHPADHRVYFGQLLGMCDQISFPLGQAGYPVYKYVPYGPVMEVLPYLSRRALENSSLMKGTHRERQLLWLELLRRLRTGNLFHRPA

SEQ ID NO: 76633 - protein, 117 aa, Homo sapiens
MCNTNMSVPTDGAVTTSQIPASEQETLVRPKPLLLKLLKSVGAQKDTYTMKEDLDAGVSEHSGDWLDQDSVSDQFSVEFEVESLDSEDYSLSEEGQELSDEDDEDYWKCTSCNEMNP

SEQ ID NO: 76634 - protein, 460 aa, Homo sapiens [sequence omitted]

SEQ ID NO: 76635 - protein, 80 aa, Homo sapiens
KAEMEMSLAEELNHGRQGENQEHLVIAEMMELGSRSRGASQKKQKLEQKAAGSASAKRVWNMTATRPKKMQPRDRCSGAD

SEQ ID NO: 76636 - protein, 289 aa, Homo sapiens
MVPLVAVVSGPRAQLFACLLRLGTQQVGPLQLHTGASHAARNHYEVLVLGGGSGGITMAARMKRKVGAENVAIVEPSERHFYQPIWTLVGAGAKQLSSSGRPTASVIPSGVEWIKARVTELNPDKNCIHTDDDEKISYRYLIIALGIQLDYEKIKGLPEGFAHPKIGSNYSVKTVEKTWKALQDFKEGNAIFTFPNTPVKCAGAPQKIMYLSEAYFRKTGKRSKANIIFNTSLGAIFGVKKYADALQEIIQERNLTVNYKKNLIEVRADKQEAVFENLDKPGETQVISV

SEQ ID NO: 76637 - protein, 226 aa, Homo sapiens
  MOD_RES (1)..(1): Any amino acid
XLRLLRTGAPAAACLRLGTSAGTGSRRAMALYHTEERGQPCSQNYRLFFKNVTGHYISPFHDIPLKVNSKEENGIPMKKARNDEYEIATKEPMNPIKQYVKDGKLRYVANIFPYKGYIWNYGTLPQTWEDPHEKDKSTNCFGDNDPIDVCEIGSKILSCGEVIHVKILGILALIDEGETDWKLIAINANDPEASKFHDIDDVKKFKPGYLEATLNWFRLYKVPDGK

SEQ ID NO: 76638 - protein, 170 aa, Homo sapiens
MSVDKAELCGSLLTWLQTFHVPSPCASPQDLSSGLAVAYVLNQIDPSWFNEAWLQGISEDPGPNWKLKVTSGLLIRGQTGQQSEDGLTEPSRVLPGCPGASCVRRASPRCEPHWRVLRPGRARQAASAGAGLCHQLREKAGPHPENHDAGRIGSACGDGSHPRAHDQRHS

SEQ ID NO: 76639 - protein, 54 aa, Homo sapiens
MAEGGFDPCECVCSHEHAMRRLINLLRQSQSYCTDTECLQEWTRSTSSSCGLTL

SEQ ID NO: 76640 - protein, 68 aa, Homo sapiens
MSVAFAAPRQRGKGEITPAAIQKMLDDNNHLIQCIMDSQNKGKTSECSHWRLPIHCLLYMLCPDRWVV

SEQ ID NO: 76641 - protein, 175 aa, Homo sapiens
  MOD_RES (1)..(1): Any amino acid
XRETPKGGVACDCRPGFDLAQNQKDCTLTCNYGNGGCQHSCEDTDTGPTCGCHQKYALHSDGRTCIEKDEAAIERSQFNATSVADVDKRVKRRLLMETCAVNNGGCDRTCKDTATGVRCSCPVGFTLQPDGKTCKDINECLVNNGGCDHFCRNTVGSFECGCRKGYKLLTDERTC

SEQ ID NO: 76642 - protein, 171 aa, Homo sapiens
MATNGSKVADGQISTEVSEAPVANDKPKTLVVKVQKKAADLPDRDTWKGRFDFLMSCVGYAIGLGNVWRFPYLCGKNGGGAFLIPYFLTLIFAGVPLFLLECSLGQYTSIGGLGVWKLAPMFKDTAVETVRQPLEHRPLLLQLQHGQHYQHDQRCGGVLGAQHASDDGRAG

SEQ ID NO: 76643 - protein, 397 aa, Homo sapiens
  MOD_RES (1)..(1): Any amino acid
XGIYLRAFCTGLDSVLQPYRQALLDLEQEFLGDPHLSISHVNYFLDQFQLLFPSVMVVVEQIKSQKIHGCQILETVYKHSCGGLPPVRSALEKILAVCHGVMYKQLSAWMLHGLLLDQHEEFFIKQGPSSGNVSAQPEEDEEDLGIGGLTGKQLRELQDLRLIEEENMLAPSLKQFSLRVEILPSYIPVRVAEKILFVGESVQMFENQNVNLTRKGSILKNQEDTFAAELHRLKQQPLFSLVDFEQVVDRIRSTVAEHLWKLMVEESDLLGQLKIIKDFYLLGRGELFQAFIDTAQHMLKTPPTAVTEHDVNVAFQQSAHKVLLDDDNLLPLLHLTIEYHGKEHKADATQAREGPSRETSPREAPASGWAALGLSYKVQWPLHILFTPAVLEKNRQF

SEQ ID NO: 76644 - protein, 137 aa, Homo sapiens
MSGFNFGGTGAPTGGFTFGTAKTATTTPATGFSFSTSGTGGFNFGAPFQPATSTPSTGLFSLATQTPATQTTGFTFGTATLASGGTGFSLGIGASKLNLSNTAATPAMANPSGFGLGSSNLTNAISSTVTSSQGTAP

SEQ ID NO: 76645 - protein, 99 aa, Homo sapiens
MADQDPAGISPLQQMVASGTGAVVTSLFMTPLDVVKVRLQSQRPSMASELMPSSRLWSLSYTKWKCLLYCNGVLEPLYLCPNGARCATWFQDPTRFTGT

SEQ ID NO: 76646 - protein, 170 aa, Homo sapiens
MASRKEGTGSTATSSSSTAGAAGKGKGKGGSGDSAVKQVQIDGLVVLKIIKHYQEEGQGTEVVQGVLLGLVVEDRLEITNCFPFPQHTEDDADFDEGSFIVQHTSELRSLLLLSSIPLNVFQYQMEMMRSLRHVNIDHLHVGWYQSTYYGSFVTRALLDSQFSYQHAIEE

SEQ ID NO: 76647 - protein, 661 aa, Homo sapiens
MNLAKVRYKQFSQILKNIGENEGGIDKFSRGYESFGVHRCADGGLYCKEWAPGAEGVFLTGDFNGWNPFSYPYKKLDYGKWELYIPPKQNKSVLVPHGSKLKVVITSKSGEILYRISPWAKYVVREGDNVNYDWIHWDPEHSYEFKHSRPKKPRSLRIYESHVGISSHEGKVASYKHFTCNVLPRIKGLGYNCIQLMAIMEHAYYASFGYQITSFFAASSRYGTPEELQELVDTAHSMGIIVLLDVVHSHASKNSADGLNMFDGTDSCYFHSGPRGTHDLWDSRLFAYSSWEILRFLLSNIRWWLEEYRFDGFRFDGVTSMLYHHHGVGQGFSGDYSEYFGLQVDEDALTYLMLANHLVHTLCPDSITIAEDVSGMPALCSPISQGGGGFDYRLAMAIPDKWIQLLKEFKDEDWNMGDIVYTLTNRRYLEKCIAYAESHDQALVGDKSLAFWLMDAEMYTNMSVLTPFTPVIDRGIQLHKMIRLITHGLGGEGYLNFMGNEFGHPEWLDFPRKGNNESYHYARRQFHLTDDDLLRYKFLNNFDRDMNRLEERYGWLAAPQAYVSEKHEGNKIIAFERAGLLFIFNFHPSKSYTDYRVGTALPGKFKIVLDSDAAEYGGHQRLDHSTDFFSEAFEHNGRPYSLLVYIPSRVALILQNVDLPN

SEQ ID NO: 76648 - protein, 66 aa, Homo sapiens
MTKLCNHRRKAVAMATLYRSMETTCSHSSPGEGASPQMFHTVSPGPPSARPPCRVPPTTPLNGGPG

SEQ ID NO: 76649 - protein, 142 aa, Homo sapiens
MSSYQKELEKYRDIDEDEILRTLSPEELEQLDCELQEMDPENMLLPAGLRQRDQTKKSPTGPLDREALLQYLEQQALEVKERDDLVPFTGEKKGKPYIQPKREIPAEEQITLEPELEEALAHATDAEMCDIAAILDMYTLMS

SEQ ID NO: 76650 - protein, 92 aa, Homo sapiens
MSENSSDSDSSCGWTVISHEGSDIEMLNSVTPTDSCEPAPECSSLEQEELQALQIEQGESSQNGTVLMEETAYPALEETSSTIEAEEQKIPE

SEQ ID NO: 76651 - protein, 108 aa, Homo sapiens
  MOD_RES (1)..(1): Any amino acid
XYLLPPQPVKQFLISPPASPPVGWKQSEDAMPVINYDLLCAVSKLGPGEKYELHAGTESTPSVVVHVCESETEEEEETKNPKQKIAQTRRPDPPTAALNEPQTFDCAL

SEQ ID NO: 76652 - protein, 69 aa, Homo sapiens
MSLEESIKWLGEVMAEIGPTHSQKSEDWNIFDVKQANAIIDYLKISLFQHYKLYEFMFYSAREEIVIGT

SEQ ID NO: 76653 - protein, 379 aa, Homo sapiens
MDRSLGWQGNSVPEDRTEAGDDKEYVGFATLPNQVHRKSVKKGFDFTLMVAGESGLGKSTLVNSLFLTDLYRDRKLLGAEERIMQTVEITKHAVDIEEKGVRLRLTIVDTPGFGDAVNNTECWKPVAEYIDQQFEQYFRDESGLNRKNIQDNRVHCCLYFISPFGHGLRPLDVEFMKALHQRVNIVPILAKADTLTPPEVDHKKRKIREEIEHFGIKIYQFPDCDSDEDEDFKLQDQALKESIPFAVIGSNTVVEARGRRVRGRLYPWGIVEVENPGHCDFVKLRTMLVRTHMQDLKDVTRETHYENYRAQCIQSMTRLVVKERNRNKLTRESGTDFPIPAVPPGTDPETEKLIREKDEELRRMQEMLHKIQKQMKENY

SEQ ID NO: 76654 - protein, 357 aa, Homo sapiens
MAERQEEQRGSPPLRAEGKADAEVKLILYHWTHSFSSQKVRLVIAEKALKCEEHDVSLPLSEHNEPWFMRLNSTGEVPVLIHGENIICEATQIIDYLEQTFLDERTPRLMPDKESMYYPRVQHYRELLDSLPMDAYTHGCILHPELTVDSMIPAYATTRIRSQIGNTESELKKLAEENPDLQEAYIAKQKRLKSKLLDHDNVKYLKKILDELEKVLDQVETELQRRNEETPEGQQPWLCGESFTLADVSLAVTLHRLKFLGFARRNWGNGKRPNLETYYERVLKRKTFNKVLGHVNNILISAVLPTAFRVAKKRAPKVLGTTLVVGLLAGVGYFAFMLFRKRLGSMILAFRPRPNYF

SEQ ID NO: 76655 - protein, 81 aa, Homo sapiens
MESYHKPDQQKLQALKDTANRLRISSIQATTAAGSGCSVFSHDREFIEIPPHVMLQRRRDHGCPLFPHHALQVPGPPESAQ

SEQ ID NO: 76656 - protein, 115 aa, Homo sapiens
MSSPTTSSLDTPLPGNGPPQPGAPSSSPTVKEEGPEPWPGGPDPDVPGTDEASSACSTDWVIPDPEEEPERKRKKGPAPKMLGHELCRVCGDKASGFHYNVLSCEGCKGFFRRSV

SEQ ID NO: 76657 - protein, 93 aa, Homo sapiens
  MOD_RES (1)..(1): Any amino acid
XEPATINYPFEKGPLSPRFRGEHALRRYPSGEERCIACKLCEAICPAQGETLRAAGATLNKAVNSPLVRGGSWQMTPAADKQARQAGHGGSRL

SEQ ID NO: 76658 - protein, 1051 aa, Homo sapiens
MLYKDFFKGKTVFNHWLPGMCYSNITFQLVSEATFNKSTLVEYSGVSHEPKQHRTAPYPPQNISVRIVNLNKNNWEEQSGNFPEESFMRSQDTIGKEKLFHFTEETPEIPSGNISSGWPDFNSSDYETTSQPYWWDSASAAPESEDEFVSVLPMEYENNSTLSETEKSTSGSFSFFPVQMILTWLPPKPPTAFDGFHIHIEREENFTEYLMVDEEAHEFVAELKEPGKYKLSVTTFSSSGSCETRKSQSAKSLSFYISPSGEWIEELTEKPQHVSVHVLSSTTALMSWTSSQENYNSTIVSVVSLTCQKQKESQRLEKQYCTQVNSSKPIIENLVPGAQYQVVIYLRKGPLIGPPSDPVTFAIVPTGIKDLMLYPLGPTAVVLSWTRPYLGVFRKYVVEMFYFNPATMTSEWTTYYEIAATVSLTASVRIANLLPAWYYNFRVTMVTWGDPELSCCDSSTISFITAPVAPEITSVEYFNSLLYISWTYGDDTTDLSHSRMLHWMVVAEGKKKIKKSVTRNVMTAILSLPPGDIYNLSVTACTERGSNTSMLRLVKLEPAPPKSLFAVNKTQTSVTLLWVEEGVADFFEVFCQQVGSSQKTKLQEPVAVSSHVVTISSLLPATAYNCSVTSFSHDSPSVPTFIAVSTMVTEMNPNVVVISVLAILSTLLIGLLLVTLIILRKKHLQMARECGAGTFVNFASLERDGKLPYNWRRSIFAFLTLLPSCLWTDYLLAFYINPWSKNGLKKRKLTNPVQLDDFDAYIKDMAKDSDYKFSLQFEELKLIGLDIPHFAADLPLNRCKNRYTNILPYDFSRVRLVSMNEEEGADYINANYIPGYNSPQEYIATQGPLPETRNDFWKMVLQQKSQIIVMLTQCNEKRRVKCDHYWPFTEEPIAYGDITVEMISEEEQDDWACRHFRINYADEMQDVMHFNYTAWPDHGVPTANAAESILQFVHMVRQQATKSKGPMIIHCSAGVGRTGTFIALDRLLQHIRDHEFVDILGLVSEMRSYRMSMVQTEEQYIFIHQCVQLMWMKKKQQFCISDVIYENVSKS

SEQ ID NO: 76659 - protein, 107 aa, Homo sapiens
MAAESGSDFQQRRRRRRDPEEPEKTELSERELAVAVAVSQENDEENEERWVGPLPVEATLAKKRKVLEFERVYLDNLPSASMYERSYMHRDVITHVVCTKFYYYCQS

SEQ ID NO: 76660 - protein, 1106 aa, Homo sapiens
MSDTPSTGFSIIHPTSSEGQVPPPRHLSLTHPVVAKRISFYKSGDPQFGGVRVVVNPRSFKSFDALLDNLSRKVPLPFGVRNISTPRGRHSITRLEELEDGESYLCSHGRKVQPVDLDKARRRPRPWLSSRAISAHSPPHPVAVAAPGMPRPPRSLVVFRNGDPKTRRAVLLSRRVTQSFEAFLQHLTEVMQRPVVKLYATDGRRVPSLQAVILSSGAVVAAGREPFKPGNYDIQKYLLPARLPGISQRVYPKGNAKSESRKSSNWKVFIITSDLPDAGTSSQIYIILYGQHRSSAPIYLYGTDGARFQVGHEDIFTITVGDIGALFKIRIGHTNSGSSPSWHCKEIQLHNMNSGKQFYVPVQRWLARDQEDGEICREFPLLSKGQPVLPVTIYEVNVATGELWNAGTVANVYISIHGEKGDTGSRQLFRSKSSFNFLRGQTDTFFLEAVHLGDLCKIVIGHDGLGPGNGWFLDDVVIKDPTTNYEYAFFCHRWLDQGEDDCKIVRELYARDNSIFSARQKLELKRKETWTAESWKFTKGNTLQFYNKLTGGFVRLHPDGTVDAIGEKTDKYGVFDVIFNKRNICIFQSHEMRHLSLALDNGIVTGMVSGEATTELRVLYQPNRCALLESALVPGHTVVFDRHGKIADASSAGYANLSKEFVIFVKGVFLNSAVVLLATSLCQALCLQPDGSCTGVGSQSEKSYWKVHKISSGICMFESVKNAQMYLRIKDGRCDGTGTGDVDCHFKIKKNLKNASISLESTKSPGLFVGLQSDGQAKPMIYTKDENVCFYPQVIQFGRENPMGMSATPSQEEEKIHESKKQKKIPPESEARSPLPSSTAKEIRHFQSSETLLSEDEWKVLVLTGNTGTQANVTLWVYGDKGVTGPISLRKDSSEQLFLPGHEDEFQVEIRNTGNIYKIRIGHDGTSEQPEWNLQRVTMQHMKSKKILDFAANVWLSRIQADGDVVCELPVVKGGQAIFPLVRYQVDVYTGQLKHAETESEVFLCLFGERGDSGLRQLYKSNMQVKFQRGQIDKFQVAAVSLGKLQKVLLRCEASDKSQYWYCEQVIVREPGTTSESIFTCQRWLPFMSQGIIHSEIELYLQGEDY

SEQ ID NO: 76661 - protein, 1046 aa, Homo sapiens
MALSDEPAAGGPEEEAEDETLAFGAALEAFGESAETRALLGRLREVHGGGAEREVALERFRVIMDKYQEQPHLLDPHLEWMMNLLLDIVQDQTSPASLVHLAFKFLYIITKVRGYKTFLRLFPHEVADVEPVLDLVTIQNPKDHEAWETRYMLLLWLSVTCLIPFDFSRLDGNLLTQPGQARMSIMDRILQIAESYLIVSDKARDAAAVLVSRFITRPDVKQSKMAEFLDWSLCNLARSSFQTMQGVITMDGTLQALAQIFKHGKREDCLPYAATVLRCLDGCRLPESNQTLLRKLGVKLVQRLGLTFLKPKVAAWRYQRGCRSLAANLQLLTQGQSEQKPLILTEDDDEDDDVPEGVERVIEQLLVGLKDKDTVVRWSAAKGIGRMAGRLPRALADDVVGSVLDCFSFQETDKAWHGGCLALAELGRRGLLLPSRLVDVVAVILKALTYDEKRGACSVGTNVRDAACYVCWAFARAYEPQELKPFVTAISSALVIAAVFDRDINCRRAASAAFQENVGRQGTFPHGIDILTTADYFAVGNRSNCFLVISVFIAGFPEYTQPMIDHLVTMKISHWDGVIRELAARALHNLAQQAPEFSATQVFPRLLSMTLSPDLHMRHGSILACAEVAYALYKLAAQENRPVTDHLDEQAVQGLKQIHQQLYDRQLYRGLGGQLMRQAVCVLIEKLSLSKMPFRGDTVIDGWQWLINDTLRHLHLISSHSRQQMKDAAVSALAALCSEYYMKEPGEADPAIQEELITQYLAELRNPEEMTRCGFSLALGALPGFLLKGRLQQVLTGLRAVTHTSPEDVSFAESRRDGLKAIARICQTVGVKAGAPDEAVCGENVSQIYCALLGCMDDYTTDSRGDVGTWVRKAAMTSLMDLTLLLARSQPELIEAHTCERIMCCVAQQASEKIDRFRAHAASVFLTLLHFDSPPIPHVPHRGELEKLFPRSDVASVNWSAPSQAFPRITQLLGLPTYRYHVLLGLVVSLGGLTESTGSRPSFSCLWGGSPEPWSVAELWNLKASLHLVTRGPCTLGHDLLYVATL

SEQ ID NO: 76662 - protein, 91 aa, Homo sapiens
MITISFRNFDVEESHQCSLDWLLLGPAAPPRQEAFRLCGSAIPPAFISARDHVWIFFHSDASSSGQAQGFRLSYIRGKLGQASCQADEFRC

SEQ ID NO: 76663 - protein, 78 aa, Homo sapiens
MFASIWYAKKLGRRFVHNARKAKSEKASPAPIIVNTDTLDTIPYVNGTEIEYEFEEITLERGNSGLGFSIAGGTDNPH

SEQ ID NO: 76664 - protein, 266 aa, Homo sapiens
MAAALFVLLGFALLGTHGASGAAGTVFTTVEDLGSKILLTCSLNDSATEVTGHRWLKGGVVLKEDALPGQKTEFKVDSDDQWGEYSCVFLPEPMGTANIQLHGPPRVKAVKSSEHINEGETAMLVCKSESVPPVTDWAWYKITDSEDKALMNGSESRFFVSSSQGRSELHIENLNMEADPGQYRCNGTSSKGSDQAIITLRVRSHLAALWPFLGIVAEVLVLVTIIFIYEKRRKPEDVLDDDDAGSAPLGQHQNDKGKNVRQRNSS

SEQ ID NO: 76665 - protein, 14 aa, Homo sapiens
MKNATIVMSVRREQ

SEQ ID NO: 76666 - protein, 152 aa, Homo sapiens
  MOD_RES (1)..(1): Any amino acid
XKEASCKTPKINHAPTSVSTPLSPGSVSSAASQYKDCLESITFQVKTEFASCWNSQEFIQTLSDDFISVRERAKKLDSLLTSSETPPSRLTGLKRLSSFIGAGSPSLVKACDSSPPHATQRRSLPKVEAFSQHHIDELPPPSQELLDDIVAV

SEQ ID NO: 76667 - protein, 19 aa, Homo sapiens
MASCLALRMALLLVSGVLA

SEQ ID NO: 76668 - protein, 58 aa, Homo sapiens
MPQLSQDNQECLQKHFSRPSIWTQFLPLFRAQRYNTDIHQITENEGDLRAVPDIKSHC

SEQ ID NO: 76669 - protein, 416 aa, Homo sapiens
AGRSRASPVSGREGGSSRPLEEGTGSSPACVRGAAPGSQDAFYPTRAKQARVSQELKKAAKRTVSISEGPDTLGDGMRERRETLALAPEPEPLEKEACEKWKRPFRSASATSLTLSHCVDVVKGLLDFKKRRGHSIGGAPEQRYQIIPVCVAARLPTRAQDVLDAHLSEVNAVRFGPNSSLLATGGADRLIHLWNVVGSRLEANQTLEGAGGSITSVDFDPSGYQVLAATYNQAAQLWKVGEAQSKETLSGHKDKVTAAKFKLTRHQAVTGSRDRTVKEWDLGRAYCSRTINVLSYCNDVVCGDHIIISGHNDQKIRFWDSRGPHCTQVIPVQGRVTSLSLSHDQLHLLSCSRDNTLKVIDLRVSNIRQVFRADGFKCGSDWTKAVFSAAVNAVAWCYSGSHMVSVDQGRKVVLWQ

SEQ ID NO: 76670 - protein, 250 aa, Homo sapiens
MATASPAADGGRGRPWEGGLVSWPPAPPLTLPWTWMGPSWGQHPGHWGFPALTEPSASPAAGLGIFEVRRDASGCSMLAPLQTGAARFSSYLLSRARKVLGSHLFSPCGVPEFCSISTRKLAAHGFGASMAAMVSFPPQRYHYFLVLDFEATCDKPQIHPQEIIEFPILKLNGRTMEIESTFHMYVQPVVHPQLTPFCTELTGIIQAMVDGQPSLQQVLERVDEWMAKEGLLDPNVKSIFVTCGDWDLKV

SEQ ID NO: 76671 - protein, 84 aa, Homo sapiens
MAAESGSDFQQRRRRRRDPEEPEKTELSERELAVAVAVSQENDEENEERWVGPLPVEATLAKKRKEQILLLLPVMMDMSSSGKK

SEQ ID NO: 76672 - protein, 71 aa, Homo sapiens
MLPPQKKPWESMAKGLVLGALFTSFLLLVYSYAVPPLHAGLASTTPEAAASCSPPALEPEAVIRANGSAGE

SEQ ID NO: 76673 - protein, 193 aa, Homo sapiens
MAVPPPGIMKQAGDSRDMSREMQDVDLAEVKPLVEKGETITGLLQEFDVQEQDIETLHGSVHVTLCGTPKGNRPVILTYHDIGMNHKTCYNPLFNYEDMQEITQHFAVCHVDAPGQQDGAASFPAGYMYPSMDQLAEMLPGVLQQFGLKSIIGMGTGAGAYILTRFALNNPEMVEGLVLINVNPCAEGWMDWA

SEQ ID NO: 76674 - protein, 65 aa, Homo sapiens
MNCYLLLRFMLGIPLLWPCLGATENSQTKKVKQPVRSHLRVKRGWVWNQFFVPEEMNTTSHHIGQ

SEQ ID NO: 76675 - protein, 44 aa, Homo sapiens
MQELLSCTNIIFHCAATVRFDDTLRHAVQLNVTATRQLLLMASQ

SEQ ID NO: 76676 - protein, 146 aa, Homo sapiens
  MOD_RES (1)..(1): Any amino acid
XTAPLTELLHSRNEGVATYAAAVLFRMSEDKPQDYKKRLSVELTSSLFRTEPMAWNETADLGLDIGAQGEPLGYRQDDPSYRSFHSGGYGQDALGMDPMMEHEMGGHHPGADYPVDGLPDLGHAQDLMDGLPPGDSNQLAWFDTDL

SEQ ID NO: 76677 - protein, 535 aa, Homo sapiens
MEEPPQEALAEPLKHESPAAPSSAGHTKGQEEDDQKNQAERKADNHTAHRIADQTALRVPSQAESSIFSQATNGVAEQNGHSTPGQAGRRASNPADVSDLRADDQVNQTPSEQTKGKASSQANNVQHEQSDGQVSGLTEERTAEQTERRLPTQAERRTSGQIDGRLAMPSDQRGSRQTDHRMAGQSERRASEQMDRRMSGEAERRTSEQITHRLSKLSERRPSVQIDSGSSVPSDQSPSVQIDSGSSVPSDQRPSVQIDRRMSGKVRRRSSEKTDYRLAGLADPGTSEQTDLRLYGLVDHKTSVKTHHQVYGQATELAEHQAIDQAHSNADQPPVDNAHYTESDQTDHLADRQANHKDQLSYYETRGQSEDRIFPQLGNSKEDKEADYRVQPCKFEDSQVDLNSKPSVEMETQNATTIPPYNPVDARFTSNFQAKDQALFPRLPSISSKLNYTSSQEKTQAIVTKSDEFSEIDQGKGYHIRNQTYRRFPSIVYEDPYQVSLQYMEKHHILQIFQITENLVYEKPEDPLNFMLCQV

SEQ ID NO: 76678 - protein, 187 aa, Homo sapiens
  MOD_RES (1)..(1): Any amino acid
XKSTLLLYQSPTTGLFPTKTCGGDQKAKIQDSLYCAAGAWALALAYRRIDDDKGRTHELEHSAIKCMRGILYCYMRQADKVQQFKQDPRPTTCLHSVFNVHTGDELLSYEEYGHLQINAVSLYLLYLVEMISSGLQIIYNTDEVSFIQNLVFCVERVYRVPDFGVWERGSKYNNGSTELHSRISCTW

SEQ ID NO: 76679 - protein, 285 aa, Homo sapiens
MAQPLAFILDVPETPGDQGQGPSPYDESEVHDSFQQLIQEQSQCTAQEGLELQQREREVTGSSQQTLWRPEGTQSTATLRILASMPSRTIGRSRGAIISQYYNRTVQLRCRSSRPLLGNFVRSAWPSLRLYDLELDPTALEEEEKQSLLVKELQSLAVAQRDHMLRGMPLSLAEKRSLREKSRTPRGKWRGQPGSGGVCSCCGRLRYACVLALHSLGLALLSALQALMPWRYALKRIGGQFGSSVLSYFLFLKTLLAFNALLLLLLVAFIMGPQVAFPPALPGPA

SEQ ID NO: 76680 - protein, 63 aa, Homo sapiens
MTELPAPLSYFQNAQMSEDNHLSNTNDNRERQEHNDRRSLGHPEPLSNGRPQGNSRQVVEQDE

SEQ ID NO: 76681 - protein, 331 aa, Homo sapiens
MVSKSRWKLLAMLALVLVVMVWYSISREDRYIELFYFPIPEKKEPCLQGEAESKASKLFGNYSRDQPIFLRLEDYFWVKTPSAYELPYGTKGSEDLLLRVLAITSSSIPKNIQSLRCRRCVVVGNGHRLRNSSLGDAINKYDVVIRLNNAPVAGYEGDVGSKTTMRLFYPESAHFDPKVENNPDTLLVLVAFKAMDFHWIETILSDKKRVRKGFWKQPPLIWDVNPKQIRILNPFFMEIAADKLLSLPMQQPRKIKQFLSCTGPICVLVSSWLVLLDSADGERFRDCRKFHCRALAEMMVGGAGLPLTPSCPCSSEAHHGPVGHHAGPPPL

SEQ ID NO: 76682 - protein, 880 aa, Homo sapiens
MDTEGFGELLQQAEQLAAETEGISELPHVERNLQEIQQAGERLRSRTLTRTSQETADVKASVLLGSRGLDISHISQRLESLSAATTFEPLEPVKDTDIQGFLKNEKDNALLSAIEESRKRTFGMAEEYHRESMLVEWEQVKQRILHTLLASGEDALDFTQESEPSYISDVGPPGRSSLDNIEMAYARQIYIYNEKIVNGHLQPNLVDLCASVAELDDKSISDMWTMVKQMTDVLLTPATDALKNRSSVEVRMEFVRQALAYLEQSYKNYTLVTVFGNLHQAQLGGVPGTYQLVRSFLNIKLPAPLPGLQDGEVEGHPVWALIYYCMRCGDLLAASQVVNRAQHQLGEFKTWFQEYMNSKDRRLSPATENKLRLHYRRALRNNTDPYKRAVYCIIGRCDVTDNQSEVADKTEDYLWLKLNQVCFDDDGTSSPQDRLTLSQFQKQLLEDYGESHFTVNQQPFLYFQVLFLTAQFEAAVAFLFRMERLRCHAVHVALVLFELKLLLKSSGQSAQLLSHEPGDPPCLRRLNFVRLLMLYTRKFESTDPREALQYFYFLRDEKDSQGENMFLRCVSELVIESREFDMILGKLENDGSRKPGVIDKFTSDTKPIINKVASVAENKGLFEEAAKLYDLAKNADKVLELMNKLLSPVVPQISAPQSNKERLKNMALSIAERYRAQGISANKFVDSTFYLLLDLITFFDEYHSGHIDRAFDIIERLKLVPLNQESVEERVAAFRNFSDEIRHNLSEVLLATMNILFTQFKRLKGTSPSSSSRPQRVIEDRDSGLALLPRLECNDTISAHCNLYLLGSSHPPTSPSQVAGTTATPKSSPHSDYLCWNDTIPNVWGHQCEAGADGGPHELSAMLCGSLGRHTVSTSGTWAH

SEQ ID NO: 76683 - protein, 210 aa, Homo sapiens
MSRFKFIDIGINLTDPMFRGIYRGVQKHQDDLQDVIGRAVEIGVKKFMITGGNLQDSKDALHLAQTNGMFFSTVGCHPTRCGEFEKNNPDLYLKELLNLAENNKGKVVAIGECGLDFDRLQFCPKDTQLKYFEKQFELSEQTKLPMFLHCRNSHAEFLDIMKRNRDRCVGGVVHSFDGTKEAAAALIDLDLYIGFNGWYVLRLLWFLTFI

SEQ ID NO: 76684 - protein, 203 aa, Homo sapiens
GKITDTETMVGIRFENESRRGYQLEPDLSEEVSARLRLGSGSNGLLRRKVSIIETKEKNCSGKERDRRTDDLLELTEVINFYMNLLVERNKKQGYPALHVFSTFFYPKLKSGGYQAVKRWTKGVNLFEQEIILVPIHRKVHWSLVVIDLRKKCLKYLDSMGQKGHRICEILLQYLQDESKTKRNSDLNLLEWTHHSMKPHEIP

SEQ ID NO: 76685 - protein, 159 aa, Homo sapiens
  MOD_RES (1)..(1): Any amino acid
XNQHNAVVKAIPVRRVEKGQLLEYILTDLRVPHSYEVRLTPYTTFGAGDMASRIIHYTEHNTCHFEDEKICGYTQDLTDNFDWTRQNALTQNPKRSPNTGPPTDISGTPEGYYMFIETSRPRELGDRARLVSPLYNASAKFYCVSFFYHMYGKHIGSLN

SEQ ID NO: 76686 - protein, 151 aa, Homo sapiens
AAAPMTPTSGGSTPPGITAPAVPSIPSPIGVNGFTGLPPQANGQPAAEAVFANGIHPYPAQSPTAADPLQQAYAGVQQYAGPAAYPAAYGQISQAFPQPPPMIPQQQREGFVSFDNPASAQTAIQAMNGFQIGMKRLKVQLKRPKDANRPY

SEQ ID NO: 76687 - protein, 65 aa, Homo sapiens
  MOD_RES (1)..(1): Any amino acid
XFGTDHIYGADTFNEMQPPSSEPSYLAAATTAVYEAMTAVLGARPDQGCAGSCAPWPPPGSGPVC

SEQ ID NO: 76688 - protein, 99 aa, Homo sapiens
MELAVAVLRDLLRYAAQLPALFRDISMNHLPGLLTSLLGLRPECEQSALEGMKACMTYFPRACGSLKGKLASFFLSRVDALSPQLQQLACECYSRLPSL

SEQ ID NO: 76689 - protein, 38 aa, Homo sapiens
MMLLENKASISGGGLPAPYQAKQLHLHWSDLPYKGSEH

SEQ ID NO: 76690 - protein, 30 aa, Homo sapiens
MAAGERSWCLCKLLSFEYVFISSVKMNLVP

SEQ ID NO: 76691 - protein, 519 aa, Homo sapiens
MSGVRGLSRLLSARRLALAKAWPTVLQTGTRGFHFTVDGNKRASAKVSDSISAQYPVVDHEFDAVVVGAGGAGLRAAFGLSEAGFNTACVTKLFPTRSHTVAAQGGINAALGNMEEDNWRWHFYDTVTGDGTAMITRAGLPCQDLEFVQFHPTGIYGAGCLITEGCRGEGGILINSQGERFMERYAPVAKDLASRDVVSRSMTLEIREGRGCGPEKDHVYLQLHHLPPEQLATRLPGISETAMIFAGVDVTKEPIPVLPTVHYNMGGIPTNYKGQVLRHVNGQDQIVPGLYACGEAACASVHGANRLGANSLLDLVVFGRACALSIEESCRPGDKVPPIKPNAGEESVMNLDKLRFADGSIRTSELRLSMQKSMQNHAAVFRVGSVLQEGCGKISKLYGDLKHLKTFDRGMVWNTDLVETLELQNLMLCALQTIYGAEARKESRGAHAREDYKVRIDEYDYSKPIQGQQKKPFEEHWRKHTLSYVDVGTGKVTLEYRPVIDKTLNEADCATVPPAIRSY

SEQ ID NO: 76692 - protein, 302 aa, Homo sapiens
MALIMEPVSKWSPSQVVDWMKGLDDCLQQYIKNFEREKISGDQLLRITHQELEDLGVSRIGHQELILEAVDLLCALNYGLETENLKTLSHKLNASAKNLQNFITGRRRSGHYDGRTSRKLPNDFLTSVVDLIGAAKSLLAWLDRSPFAAVTDYSVTRNNVIQLCLELTTIVQQDCTVYETENKILHVCKTLSGVCDHIISLSSDPLVSQSAHLEVIQLANIKPSEGLGMYIKSTYDGLHVITGTTENSPADRCKKIHAGDEVIQVNHQTVEYSKILKTTQNDLWENLVPALALKLTYGFNGF

SEQ ID NO: 76693 - protein, 295 aa, Homo sapiens
MASLSRPSLPSCLCSFLLLLLLQVSSSYAGQFRVIGPRHPIRALVGDEVELPCRISPGKNATGMEVGWYRPPFSRVVHLYRNGKDQDGDQAPEYRGRTELLKDAIGEGKVTLRIRNVRFSDEGGFTCFFRDHSYQEEAAMELKVEDPFYWVSPGVLVLLAVLPVLLLQITLGLVFLCLQYRLRGKLRAEIENLHRTFDPHFLRVPCWKITLFVIVPVLGPLVALIICYNWLHRRLAGQFLEELRKFSSLCYKQRIKSQERETEATRGRGGLLRDHIPRGKEELESLGGGKTPPGR

SEQ ID NO: 76694 - protein, 50 aa, Homo sapiens
MELSPRSPPEMLEESDCPSPLELKSAPSKKMWIKLRSLPHGVIFYGSYQF

SEQ ID NO: 76695 - protein, 11 aa, Homo sapiens
MDFMLRYMYNQ

SEQ ID NO: 76696 - protein, 152 aa, Homo sapiens
MAACGRVRRMFRLSAALHLLLLFAAGAEKLPGQGVHSQGQGPGANFVSFVGQPPFPAGGPPARRGGAGAGGGWKLAEEESCREDVTRVCPKHTWSNNLAVLECLQDVREPENEISSDCNHLLWNYKLNLTTDPKFESVAREVCKSTITEIKE

SEQ ID NO: 76697 - protein, 246 aa, Homo sapiens
  MOD_RES (1)..(1): Any amino acid
XDFGDGSAEVDAAGPAASHRYVLPGRYHVTAVLALGAGSALLGTDVQVEAAPAALELVCPSSVQSDESLDLSIQNRGGSGLEAAYSIVALGEEPARAVHPLCPSDTEIFPGNGHCYRLVVEKAAWLQAQEQCQAWAGAALAMVDSPAVQRFLVSRVTRHTGPGAGWERVLRPQPGGRRPDAAQFPLGLCGFDTEGGWRVCAELWAPREQHGHHSTGAAGGWRGVHLQPDRVEGRPQGGGHQPDGAD

SEQ ID NO: 76698 - protein, 377 aa, Homo sapiens
  MOD_RES (1)..(1): Any amino acid
XSEFNPLTFTSVIECEKPNNDLSRFRGCIIHDNGKKAGLYKENLLLRGCTLRNTDAVVGIVIYAGHETKALLNNSGPRYKRSKLERQMNCDVLWCVLLLVCMSLFSAVGHGLWIWRYQEKKSLFYVPKSDGSSLSPVTAAVYSFLTMIIVLQVLIPISLYVSIEIVKACQVYFINQDMQLYDEETDSQLQCRALNITEDLGQIQYIFSDKTGTLTENKMVFRRCTVSGVEYSHDANAQRLARYQEADSEEEEVVPRGGSVSQRGSIGSHQSVRVVHRTQSTKSHRRTGSRAEAKRASMLSKHTAFSSPMEKDITPDPKLLEKVSECDKSLAVARHQEHLLAHLSPELSDVFDFFIALTICNTVVVTSPDQPRTKGEV

SEQ ID NO: 76699 - protein, 101 aa, Homo sapiens
DSEITANALKILLNEAFSKRTDIKFDGFNINTCREMISLLDEETQDTMQVPDSSETFWNTEADILDTVRRWPSMNQEGGPHRHQICQCFDLGLLSLRNYEK

SEQ ID NO: 76700 - protein, 328 aa, Homo sapiens
MFANLKYVSLGILVFQTTSLVLTMRYSRTLKEEGPRYLSSTAVVVAELLKIMACILLVYKDSKCSLRALNRVLHDEILNKPMETLKLAIPSGIYTLQNNLLYVALSNLDAATYQVTYQLKILTTALFSVSMLSKKLGVYQWLSLVILMTGVAFVQWPSDSQLDSKELSAGSQFVGLMAVLTACFSSGFAGVYFEKILKETKQSVWIRNIQLGFFGSIFGLMGVYIYDGELVSKNGFFQGYNRLTWIVVVLQALGGLVIAAVIKYADNILKGFATSLSIILSTLISYFWLQDFVPTRVSLCRQAGVLWRDLGLLQPPTPWFKGFSCLSL

SEQ ID NO: 76701 - protein, 70 aa, Homo sapiens
MLGLRPPLLALVGLLSLGCVLSQECTKFKVSSCRECIESGPGCTWCQKLNFTGPGDPDSIRCDTRPQLLM

SEQ ID NO: 76702 - protein, 107 aa, Homo sapiens
MKPAMETAAEENTEQSQERKGCFECCIKCLGGVPYASLVATILCFSGVALFCGCGHVALAGTVAILEQHFSTNASDHALLSEVIQLMQYVIYGIASFFFLYGIILLA

SEQ ID NO: 76703 - protein, 116 aa, Homo sapiens
MDLTGDLAVLKDQVFVLKEGVDYRVKISFKVHREIVSGLKCLHHTYRRGLRVDKTVYMVGSYGPSAQEYEFVTPVEEAPRGALVRGPYLVVSLFTDDDRTHHLSWEWGLCICQDWK

SEQ ID NO: 76704 - protein, 24 aa, Homo sapiens
MDISTRSKDPGSAERTAQKRKFPS

SEQ ID NO: 76705 - protein, 1128 aa, Homo sapiens
MGLCGLGLLSDNFGKILGRAGGAAHWRPGHLRKPDLAPEPRGLQVPRTRSAERPALPPQRSHLMPRLKESRSHESLLSPSSAVEALDLSMEEEVVIKPVHSSILGQDYCFEVTTSSGSKCFSCRSAAERDKWMENLRRAVHPNKDNSRRVEHILKLWVIEAKDLPAKKKYLCELCLDDVLYARTTGKLKTDNVFWGEHFEFHNLPPLRTVTVHLYRETDKKKKKERNSYLGLVSLPAASVAGRQFVEKWYPVVTPNPKGGKGPGPMIRIKARYQTITILPMEMYKEFAEHITNHYLGLCAALEPILSAKTKEEMASALVHILQSTGKVKDFLTDLMMSEVDRCGDNEHLIFRENTLATKAIEEYLKLVGQKYLQDALGEFIKALYESDENCEVDPSKCSAADLPEHQGNLKMCCELAFCKIINSYCVFPRELKEVFASWRQECSSRGRPDISERLISASLFLRFLCPAIMSPSLFNLLQEYPDDRTARTLTLIAKVTQNLANFAKFGSKEEYMSFMNQFLEHEWTNMQRFLLEISNPETLSNTAGFEGYIDLGRELSSLHSLLWEAVSQLEQSIVSKLGPLPRILRDVHTALSTPGSGQLPGTNDLASTPGSGSSSISAGLQKMVIENDLSGLIDFTRLPSPTPENKDLFFVTRSSGVQPSPARSSSYSEANEPDLQMANGGKSLSMVDLQDARTLDGEAGSPAGPDVLPTDGQAAAAQLVAGWPARATPVNLAGLATVRRAGQTPTTPGTSEGAPGRPQLLAPLSFQNPVYQMAAGLPLSPRGLGDSGSEGHSSLSSHSNSEELAAAAKLGSFSTAAEELARRPGELARRQMSLTEKGGQPTVPRQNSAGPQRRIDQPPPPPPPPPPAPRGRTPPNLLSTLQYPRPSSGTLASASPDWVGPSTRLRQQSSSSKGDSPELKPRAVHKQGPSPVSPNALDRTAAWLLTMNAQLLEDEGLGPDPPHRDRLRSKDELSQAEKDLAVLQDKLRISTKKLEEYETLFKCQEETTQKLVLEYQARLEEGEERLRRQQEDKDIQMKGIISRLMSVEEELKKDHAEMQAAVDSKQKIIDAQEKRIASLDAANARLMSALTQLKERYSMQARNGISPTNPTKLQITENGEFRNSSNC

SEQ ID NO: 76706 - protein, 124 aa, Homo sapiens
  MOD_RES (1)..(1): Any amino acid
XSACIGNCSTALEELTDDMTEDFLPVLREYILYSDSMKSVLKKRDQVQAEYEAKLEAVALRKEDRPKVPADVEKCQDRMECFNADLKADMERWQNNKRQDFRQLLMGMADKNIQYYEKSIADLK

SEQ ID NO: 76707 - protein, 566 aa, Homo sapiens
MKMQKGNVLLMFGLLLHLEAATNSNETSTSANTGSSVISSGASTATNSGSSVTSSGVSTATISGSSVTSNGVSIVTNSEFHTTSSGISTATNSEFSTASSGISIATNSESSTTSSGASTATNSESSTPSSGASTATNSESSTLSSGASTATNSDSSTTSSGASTATNSESSTTSSGASTATNSESSTVSSRASTATNSESSTTSSGASTATNSESRTTSNGAGTATNSESSTTSSGASTATNSDSSTTSSGAGTATNSESSTTSSGASTATNSESSTTSSGASTATNSDSSTTSSGAGTATNSESSTVSSGISTVTNSESSTPSSGANTATNSESSTTSSGANTATNSESSTVSSGASTATNSESSTTSSGVSTATNSESSTTSSGASTATNSDSSTTSSEASTATNSESSTVSSGISTVTNSESSTTSSGANTATNSGSSVTSAGSGTAALTGMHTTSHSASTAVSEAKPGGSLVPWEIFLITLVSVVAAVGLFAGLFFCVRNSLSLRNTFNTAVYHPHGLNHGLGPGPGGNHGAPHRPRWSPNWFWRRPVSSIAMEMSGRNSGP

SEQ ID NO: 76708 - protein, 197 aa, Homo sapiens
  MOD_RES (1)..(1): Any amino acid
XKAEEERDEEEDKRRKGEEVTPISAIRHEGKTDSERTDTAADGETTATEELEKTQDDLMKHQTNISELKRTFLETSTDTAVTNEWEKRLSTSPVRLAARQEDAPMIEPLVPEEPSVIKKMQEGDSADSVVTSRQIIFQKTVPSTLETKQSSGEKLMDGSEIFSLLESARKPTEFIGGVTSTSQSWVQKMETKTESSG

SEQ ID NO: 76709 - protein, 44 aa, Homo sapiens
CAFQLLLMTSFSAGEIFILTAMSYDRYVAICCPLNYEVLELVHV

SEQ ID NO: 76710 - protein, 1127 aa, Homo sapiens
MSGGGGGGGSAPSRFADYFVICGLDTETGLEPDELSALCQYIQASKARDGASPFISSTTEGENFEQTPLRRTFKSKVLARYPENVEWNPFDQDAVGMLCMPKGLAFKTQADPREPQFHAFIITREDGSRTFGFALTFYEEVTSKQICSAMQTLYHMHNAEYDVLHAPPADDRDQSSMEDGEDTPVTKLQRFNSYDISRDTLYVSKCICLITPMSFMKACRSVLEQLHQAVTSPQPPPLPLESYIYNVLYEVPLPPPGRSLKFSGVYGPIICQRPSTNELPLFDFPVKEVFELLGVENVFQLFTCALLEFQILLYSQHYQRLMTVAETITALMFPFQWQHVYVPILPASLLHFLDAPVPYLMGLHSNGLDDRSKLELPQEANLCFVDIDNHFIELPEDLPQFPNKLEFVQEVSEILMAFGIPPEGNLHCSESASKLKRLRASELVSDKRNGNIAGSPLHSYELLKENETIARLQALVKRTGVSLEKLEVREDPSSNKDLKVQCDEEELRIYQLNIQIREVFANRFTQMFADYEVFVIQPSQDKESWFTNREQMQNFDKASFLSDQPEPYLPFLSRFLETQMFASFIDNKIMCHDDDDKDPVLRVFDSRVDKIRLLNVRTPTLRTSMYQKCTTVDEAEKAIELRLAKIDHTAIHPHLLDMKIGQGKYEPGFFPKLQSDVLSTGPASNKWTKRNAPAQWRRKDRQKQHTEHLRLDNDQREKYIQEARTMGSTIRQPKLSNLSPSVIAQTNWKFVEGLLKECRNKTKRMLVEKMGREAVELGHGEVNITGVEENTLIASLCDLLERIWSHGLQVKQGKSALWSHLLHYQDNRQRKLTSGSLSTSGILLDSERRKSDASSLMPPLRISLIQDMRHIQNIGEIKTDVGKARAWVRLSMEKKLLSRHLKQLLSDHELTKKLYKRYAFLRCDDEKEQFLYHLLSFNAVDYFCFTNVFTTILIPYHILIVPSKKLGGSMFTANPWICISGELGETQIMQIPRNVLEMTFECQNLGKLTTVQIGHDNSGLYAKWLVEYVMVRNEITGHTYKFPCGRWLGKGMDDGSLERILVGELLTSQPEVDERPCRTPPLQQSPSVIRRLVTISPNNKPTRQSDAVALWRVWPCLGLGTGFPAWI

SEQ ID NO: 76711 - protein, 105 aa, Homo sapiens
TQSTAKAMKRPLEATVDLAFPPGALHPLPKRQALEKSNGTSAVFNPSVLHYQQALTSAQLQQHAAFIPTVPMMHSATSATVSAATTPATSVPFAATATANQIILK

SEQ ID NO: 76712 - protein, 35 aa, Homo sapiens
MSQDLNPADRLRSSDFPLLVETPSLESKGLDVGRK

SEQ ID NO: 76713 - protein, 29 aa, Homo sapiens
MSLHFLYYCSEPTLDVKIAFCQGFDKQVD

SEQ ID NO: 76714 - protein, 379 aa, Homo sapiens
  MOD_RES (1)..(1): Any amino acid
XASYHLSRAPCPPKVVLVESSERLGGWIRSVRGPNGAIFELGPRGIRPAGALGARTLLLVASLAMDSLCRGVFAGNSRELSIRSCFPSLFQAEQTHRSILLGLLLGAGRTPQPDSALIRQALAERWSQWSLRGGLEMLPQALETHLTSRGVSVLRGQPVCGLSLQAEGRWKVSLRDSSLEADHVISAIPASVLSELLPAEAAPLARALSAITAVSVAVVNLQYQGAHLPVQGFGHLVPSSEDPGVLGIVYDSVAFPEQDGSPPGLRVTVMLGGSWLQTLEASGCVLSQELFQQRAQEAAATQLGLKEMPSHCLVHLHKNCIPQYTLGHWQKLESARQFLTAHRLPLTLAGASYEGVAVNDCIESGRQAAVSVLGTEPNS

SEQ ID NO: 76715 - protein, 836 aa, Homo sapiens
  MOD_RES (1)..(1): Any amino acid
XSDEEDEERPARKRRQVERATEDGEEDEEMIESIENLEDLKGHSVREWVSMAGPRLEIHHRFKNFLRTHVDSHGHNVFKERISDMCKENRESLVVNYEDLAAREHVLAYFLPEAPAELLQIFDEAALEVVLAMYPKYDRITNHIHVRISHLPLVEELRSLRQLHLNQLIRTSGVVTSCTGVLPQLSMVKYNCNKCNFVLGPFCQSQNQEVKPGSCPECQSAGPFEVNMEETIYQNYQRIRIQESPGKVAAGRLPRSKDAILLADLVDSCKPGDEIELTGIYHNNYDGSLNTANGFPVFATVILANHVAKKDNKVAVGELTDEDVKMITSLSKDQQIGEKESSRNASLAEAGIGAIPSQLLAIEPSLRRSGVPIGEVGVSQRQEARSFSSANTHWFLEDLLGPSCRDTMIFASIAPSIYGHEDIKRGLALALFGGEPKNPGGKHKVRGDINVLLCGDPGTAKSQFLKYIEKVSSRAIFTTGQGASAVGLTAYVQRHPVSREWTLEAGALVLADRGVCLIDEFDKMNDQDRTSIHEAMEQQSISISKAGIVTSLQARCTVIAAANPIGGRYDPSLTFSENVDLTEPIISRFDILCVVRDTVDPVQDEMLARFVVGSHVRHHPSNKEEEGLANGSAAEPAMPNTYGVEPLPQEVLKKYIIYAKERVHPKLNQMDQDKVAKMYSDLRKESMATGSIPITVRHIESMIRMAEAHARIHLRDYVIEDDVNMAIRVMLESFIDTQKFSVMRSMRKTFARYLSFRRDNNELLLFILKQLVAEQVTYQRNRFGAQQDTIEVPEKDLVDKARQINIHNLSAFYDSELFRMNKFSHDLKRKMILQQF

SEQ ID NO: 76716 - protein, 244 aa, Homo sapiens
MGDEKDSWKVKTLDEILQEKKRRKEQEEKAEIKRLKNSDDRDSKRDSLEEGELRDHRMEITIRNSPYRREDSMEDRGEEDDSLAIKPPQQMSRKEKAHHRKDEKRKEKRRHRSHSAEGGKHARVKEKEREHERRKRHREEQDKARREWERQKRREMAREHSRRESVCTSPNDERGLQRQSESQPLESQPASAAAGAVRVGRRPEASKRRENGRKGPAVRLTGHQRQREEDQLGRVLVSGIRLRF

SEQ ID NO: 76717 - protein, 68 aa, Homo sapiens
  MOD_RES (1)..(1): Any amino acid
XKIAMTTCEQIVRKDFALDSEESRMRIAAHHMMRNLTAGMAMITCREPLLMSISTNLKNSFASALREG

SEQ ID NO: 76718 - protein, 92 aa, Homo sapiens
MLNFNVPHIKNSTGEPVWKVLIYDRFGQDIISPLLSVKELRDMGITLHLLLHSDRDPIPDVPAVYFVMPTEENIDRMCQVESVTRVAAKVNI

SEQ ID NO: 76719 - protein, 554 aa, Homo sapiens
QSVEDDYCISPSTGKPVDSQTSRSESEIVPKVAKMTVSGKKQTMGFEVPGVSSEENGHSFHTPQKGPPIEDAIASSDVLETASKSANPPHTIQASEEQSSTPAPVKKSGKLRQQIDVKAELEKRQGGKQLLNLVVIGHVDAGKSTLMGHMLYLLGNINKRTMHKYEQESKKAGKASFAYAWVLDETGEERERGVTMDVGMTKFETTTKVITLMDAPGHKDFIPNMITGAAQADVAVLVVDASRGEFEAGFETGGQTREHGLLVRSLGVTQLAVAVNKMDQVNWQQERFQEITGKLGHFLKQAGFKESDVGFIPTSGLSGENLITRSQSSELTKWYKGLCLLEQIDSFKPPQRSIDKPFRLCVSDVFKDQGSGFCITGKIEAGYIQTGDRLLAMPPNETCTVKGITLHDEPVDWAAAGDHVSLTLVGMDIIKINVGCIFCGPKVPIKACTRFRARILIFNIEIPITKGFPVLLHYQTVSEPAVIKRLISVLNKSTGEVTKKKPKFLTKGQNALVELQTQRPIALELYKDFKELGRFMLRYGGSTIAAGVVTEIKE

SEQ ID NO: 76720 - protein, 812 aa, Homo sapiens
  MOD_RES (1)..(1): Any amino acid
XRMKEKYGVFCSGHNEAVSHYKLLLQQNKKFQNLIKKIGNFSIVRRLGVQECILLVTQRITKYPVLVERIIQNTEAGTEDYEDLTQALNLIKDIISQVDAKVSECEKGQRLREIAGKMDLKSSSKLKNGLTFRKEDMLQRQLHLEGMLCWKTTSGRLKDILAILLTDVLLLLQEKDQKYVFASVDSKPPVISLQKLIVREVANEEKAMFLISASLQGPEMYEIYTSSKEDRNAWMAHIQRAVESCPDEEEGPFSLPEEERKVVEARATRLRDFQERLSMKDQLIAQSLLEKQQIYLEMAEMGGLEDLPQPRGLFRGGDPSETLQGELILKSAMSEIEGIQSLICRQLGSANGQAEDGGSSTGPPRRAETFAGYDCTNSPTKNGSFKKKVSSTDPRPRDWRGPPNSPDLKLSDSDIPGSSEESPQVVEAPGTESDPRLPTVLESELVQRIQTLSQLLLNLQDSYVETQRAAIQEREKQFRLQSTRGNLLLEQERQRNFEKQREERAALEKLQSQLRHEQQRWERERQWQHQELERAGARLQEREGEARQLRERLEQERAELERQRQAYQHDLERLREAQRAVERERERLELLRRLKKQNTAPGALPPDTLAEAQPPSHPPSFNGEGLEGPRVSMLPSGVGPEYAERPEVARRDSAPTENRLAKSDVPIQLLSATNQFQRQAAVQQQIPTKLAASTKGGKDKGGKSRGSQRWESSASFDLKQQLLLNKLMGKDESTSRNRRSLSPILPGRHSPAPPPDPGFPAPSPPPADSPSEGFSLKAGGTALLPGPPAPSPLPATPLSAKEDASKEDVIFF

SEQ ID NO: 76721 - protein, 198 aa, Homo sapiens
MAVCGLGSRLGLGSRLGLRGCFGAARLLYPRFQSRGPQGVEDGDRFALELVTEKGHTFAEELQKIQCTLQDVGSALATPCSSAREAHLKYTTFKAGPILELEQWIDKYTSQLPPLTAFILPSGGKISSALHFCRAVCRRAERRVVPLVQMGETDANVAKFLNRLSDYLFTLARYAAMKEGNQEKIYMKNDPSAESEGL

SEQ ID NO: 76722 - protein, 51 aa, Homo sapiens
MATGANATPLAAAASTATVPRRLVPAAAAAPSAAALPARVAAAAAATPAAA

SEQ ID NO: 76723 - protein, 107 aa, Homo sapiens
MAAPVVAPPGVVVSRANKRSGAGPGGSGGGGARGAEEEPPPPLQAVLVADSFDRRFFPISKDQPRVLLPLANVALIDYTLEFLTATGVQETFVFCCWKAAQIKEHLL

SEQ ID NO: 76724 - protein, 352 aa, Homo sapiens
  MOD_RES (1)..(1): Any amino acid
XSIFPRVIEGKVDQIRARVERNAVEGLRTLCVAYKRLIQEEYEGICKLLQAAKVALQDREKKLAEAYEQIEKDLTLLGATAVEDRLQEKAADTIEALQKAGIKVWVLTGDKMETAAATCYACKLFRRNTQLLELTTKRIEEQSLHDVLFELSKTVLRHSGSLTRDNLSGLSADMQDYGLIIDGAALSLIMKPREDGSSGNYRELFLEICRSCSAVLCCRMAPLQKAQIVKLIKFSKEHPITLAIGDGANDVSMILEAHVGIGVIGKEGRQAARNSDYAIPKFKHLKKMLLVHGHFYYIRISELVQYFFYKNVCFIFPQFLYQFFCGFSQQGRRQECPAALARVHLLDAPGTV

SEQ ID NO: 76725 - protein, 167 aa, Homo sapiens
MESNLSGLVPAAGLVPALPPAVTLGLTAAYTTLYALLFFSVYAQLWLVLLYGHKRLSYQTVFLALCLLWAALRTTLFSFYFRDTPRANRLGPLPFWLLYCCPVCLQFFTLTLMNLYFAQVVFKAKVKRRPEMSRGLLAVRGAFVGASLLFLLVNVLCAVLSHRRRAQ

SEQ ID NO: 76726 - protein, 43 aa, Homo sapiens
MVGAMWKVIVSLVLLMPGPCDGLFRSLYRSVSMPPKGDSGQPL

SEQ ID NO: 76727 - protein, 31 aa, Homo sapiens
MARRSVLYFILLNALINKGQACFCDHYAWTQ

SEQ ID NO: 76728 - protein, 65 aa, Homo sapiens
MQSFRERCGFHGKQQNYQQTSQETSRLENYRQPSQAGLSCDRQRLLAKDYYNPQPYPSYEGGAGT

SEQ ID NO: 76729 - protein, 160 aa, Homo sapiens
MKPALFSVLCEIKEKTGLSIRGAQEEDPPDPQLMRLDNMLLAEGVSGPEKGGGSAAAAAAAAASGGSSDNSIEHSDYRAKLTQIRQIYHTELEKYEQACNEFTTHVMNLLREQSRTRPISPKEIERMVGIIHRKFSSIQMQLKQSTCEAVMILRSRFLDA

SEQ ID NO: 76730 - protein, 204 aa, Homo sapiens
MPRTLDGQITMEKTPSYFVTREAPARISAMSKDTKLIVVVRDPVTRAISDYTQTLSKRPDIPTFESLTFKNRTAGLIDTSWSAIQIGIYAKHLEHWLRHFPIRQMLFVSGERLISDPAGELGRVQDFLGLKRIITDKHFYFNKTKGFPCLKKAEGSSRPHCLGKTKGRTHPEIDREVVRRLREFYRPFNLKFYQMTGHDFGWDG

SEQ ID NO: 76731 - protein, 659 aa, Homo sapiens
MSRIEKMSILGVRSFGIEDKDKQIITFFSPLTILVGPNGAGKTTIIECLKYICTGDFPPGTKGNTFVHDPKVAQETDVRAQIRLQFRDVNGELIAVQRSMVCTQKSKKTEFKTLEGVITRTKHGEKVSLSSKCAEIDREMISSLGVSKAVLNNVIFCHQEDSNWPLSEGKALKQKFDEIFSATRYIKALETLRQVRQTQGQKVKEYQMELKYLKQYKEKACEIRDQITSKEAQLTSSKEIVKSYENELDPLKNRLKEIEHNLSKIMKLDNEIKALDSRKKQMEKDNSELEEKMEKVFQGTDEQLNDLYHNHQRTVREKERKLVDCHRELEKLNKESRLLNQEKSELLVEQGRLQLQADRHQEHIRARDSLIQSLATQLELDGFERGPFSERQIKNFHKLVRERQEGEAKTANQLMNDFAEKETLKQKQIDEIRDKKTGLGRIIELKSEILSKKQNELKNVKYELQQLEGSSDRILELDQELIKAERELSKAEKNSNVETLKMEVISLQNEKADLDRTLRKLDQEMEQLNHHTTTRTQMEMLTKDKADKDEQIRKIKSRHSDELTSLLGYFPNKKQLEDWLHSKSKEINQTRDRLAKLKIVLVKPHSITSCYNSLKKCFRNLIPLIEEVLLLSAADLEAVILGIHQVERLLNFNFSVRIV

SEQ ID NO: 76732 - protein, 48 aa, Homo sapiens
SPGPGDLSIYDNWIRYFNRSSPVYGLVPRLQQPSGCGPDSGECDSPAQ

SEQ ID NO: 76733 - protein, 118 aa, Homo sapiens
MNYLDRYLSCVPTRKAQLQLLGAVCMLLASKLRETTPLTIEKLCIYTDHAVSPRQLRDWEVLVLGKLKWDLAAVIAHDFLAFILHRLSLPRDRQALVKKHAQTFLALCATDYTFAMYP

SEQ ID NO: 76734 - protein, 84 aa, Homo sapiens
MREYKLVVLGSGGVGKSALTVQFVQGIFVEKYDPTIEDSYRKQVEVDAQQCMLEILDTAGTEQFTAMRDLYMKNGQGFALVYSI

SEQ ID NO: 76735 - protein, 266 aa, Homo sapiens
  MOD_RES (1)..(1): Any amino acid
XMSVPTDGAVTTSQIPASEQETLDLDAGVSEHSGDWLDQDSVSDQFSVEFEVESLDSEDYSLSEEGQELSDEDDEDYWKCTSCNEMNPPLPSHCNRCWALRENWLPEDKGKDKGEISEKAKLENSTQAEEGFDVPDCKKTIVNDSRESCVEENDDKITQASQSQESEDYSQPSTSSSIIYSSQEDVKEFEREETQDKEESVESSLPLNAIEPCVICQGRPKNGCIVHGKTGHLMACFTCAKKLKKRNKPCPVCRQPIQMIVLTYFP

SEQ ID NO: 76736 - protein, 122 aa, Homo sapiens
MVPFGPFAFMPGKLVHTNEVTVLLGDNWFAKCSAKQAVGLVEHRKEHVRKTIDDLKKVMKNFESRVEFTEDLQKMSDAAGDIVDIREEIKCDFEFKAKHRIAHKPHSKPKTSDIFEADIAND

SEQ ID NO: 76737 - protein, 271 aa, Homo sapiens
MKAGGNAKFREFLESQEDYDPCWSLQEKYNSRAAALFRDKVVALAEGREWSLESSPAQNWTPPQPRTLPSMVHRVSGQPQSVTASSDKAFEDWLNDDLGSYQGAQGNRYVGFGNTPPPQKKEDDFLNNAMSSLYSGWSSFTTGASRFASAAKEGATKFGSQASQKASELGHSLNENVLKPAQEKVKEGKIFDDVSSGVSQLASKVQGVGSKGWRDVTTFFSGKAEGPLDSPSEGHSYQNSGLDHFQNSNIDQSFWETFGSAEPTKTRKSPS

SEQ ID NO: 76738 - protein, 7461 aa, Homo sapiens
MAGYLSPAAYLYVEEQEYLQAYEDVLERYKDERDKVQKKTFTKWINQHLMKVRKHVNDLYEDLRDGHNLISLLEVLSGDTLPREKGRMRFHRLQNVQIALDYLKRRQVKLVNIRNDDITDGNPKLTLGLIWTIILHFQISDIHVTGESEDMSAKERLLLWTQQATEGYAGIRCENFTTCWRDGKLFNAIIHKYRPDLIDMNTVAVQSNLANLEHAFYVAEKIGVIRLLDPEDVDVSSPDEKSVITYVSSLYDAFPKVPEGGEGIGANDVEVKWIEYQNMVNYLIQWIRHHVTTMSERTFPNNPVELKALYNQYLQFKETEIPPKETEKSKIKRLYKLLEIWIEFGRIKLLQGYHPNDIEKEWGKLIIAMLEREKALRPEVERLEMLQQIANRVQRDSVICEDKLILAGNALQSDSKRLESGVQFQNEAEIAGYILECENLLRQHVIDVQILIDGKYYQADQLVQRVAKLRDEIMALRNECSSVYSKGRILTTEQTKLMISGITQSLNSGFAQTLHPSLTSGLTQSLTPSLTSSSMTSGLSSGMTSRLTPSVTPAYTPGFPSGLVPNFSSGVEPNSLQTLKLMQIRKPLLKSSLLDQNLTEEEINMKFVQDLLNWVDEMQVQLDRTEWGSDLPSVESHLENHKNVHRAIEEFESSLKEAKISEIQMTAPLKLTYAEKLHRLESQYAKLLNTSRNQERHLDTLHNFVSRATNELIWLNEKEEEEVAYDWSERNTNIARKKDYHAELMRELDQKEENIKSVQEIAEQLLLENHPARLTIEAYRAAMQTQWSWILQLCQCVEQHIKENTAYFEFFNDAKEATDYLRNLKDAIQRKYSCDRSSSIHKLEDLVQESMEEKEELLQYKSTIANLMGKAKTIIQLKPRNSDCPLKTSIPIKAICDYRQIEITIYKDDECVLANNSHRAKWKVISPTGNEAMVPSVCFTVPPPNKEAVDLANRIEQQYQNVLTLWHESHINMKSVVSWHYLINEIDRIRASNVASIKTMLPGEHQQVLSNLQSRFEDFLEDSQESQVFSGSDITQLEKEVNVCKQYYQELLKSAEREEQEESVYNLYISEVRNIRLRLENCEDRLIRQIRTPLERDDLHESVFRITEQEKLKKELERLKDDLGTITNKCEEFFSQAAASSSVPTLRSELNVVLQNMNQVYSMSSTYIDKLKTVNLVLKNTQAAEALVKLYETKLCEEEAVIADKNNIENLISTLKQWRSEVDEKRQVFHALEDELQKAKAISDEMFKTYKERDLDFDWHKEKADQLVERWQNVHVQIDNRLRDLEGIGKSLKYYRDTYHPLDDWIQQVETTQRKIQENQPENSKTLATQLNQQKMLVSEIEMKQSKMDECQKYAEQYSATVKDYELQTMTYRAMVDSQQKSPVKRRRMQSSADLIIQEFMDLRTRYTALVTLMTQYIKFAGDSLKRLEEEEKSLEEEKKEHVEKAKELQKWVSNISKTLKDAEKAGKPPFSKQKISSEEISTKKEQLSEALQTIQLFLAKHGDKMTDEERNELEKQVKTLQESYNLLFSESLKQLQESQTSGDVKVEEKLDKVIAGTIDQTTGEVLSVFQAVLRGLIDYDTGIRLLETQLMISGLISPELRKCFDLKDAKSHGLIDEQILCQLKELSKAKEIISAASPTTIPVLDALAQSMITESMAIKVLEILLSTGSLVIPATGEQLTLQKAFQQNLVSSALFSKVLERQNMCKDLIDPCTSEKVSLIDMVQRSTLQENTGMWLLPVRPQEGGRITLKCGRNISILRAAHEGLIDRETMFRLLSAQLLSGGLINSNSGQRMTVEEAVREGVIDRDTASSILTYQVQTGGIIQSNPAKRLTVDEAVQCDLITSSSALLVLEAQRGYVGLIWPHSGEIFPTSSSLQQELITNELAYKILNGRQKIAALYIPESSQVIGLDAAKQLGIIDNNTASILKNITLPDKMPDLGDLEACKNARRWLSFCKFQPSTVHDYRQEEDVFDGEEPVTTQTSEETKKLFLSYLMINSYMDANTGQRLLLYDGDLDEAVGMLLEGCHAEFDGNTAIKECLDVLSSSGVFLNNASGREKDECTATPSSFNKCHCGEPEHEETPENRKCAIDEEFNEMRNTVINSEFSQSGKLASTISIDPKVNSSPSVCVPSLISYLTQTELADISMLRSDSENILTNYENQSRVETNERANECSHSKNIQNFPSDLIENPIMKSKMSKFCGVNETENEDNTNRDSPIFDYSPRLSALLSHDKLMHSQGSFNDTHTPESNGNKCEAPALSFSDKTMLSGQRIGEKFQDQFLGIAAINISLPGEQYGQKSLNMISSNPQVQYHNDKYISNTSGEDEKTHPGFQQMPEDKEDESEIEEYSCAVTPGGDTDNAIVSLTCATPLLDETISASDYETSLLNDQQNNTGTDTDSDDDFYDTPLFEDDDHDSLLLDGDDRDCLHPEDYDTLQEENDETASPADVFYDVSKENENSMVPQGAPVGSLSVKNKAHCLQDFLMDVEKDELDSGEKIHLNPVGSDKVNGQSLETGSERECTNILEGDESDSLTDYDIVGGKESFTASLKFDDSGSWRGRKEEYVTGQEFHSDTDHLDSMQSEESYGDYIYDSNDQDDDDDDGIDEEGGGIRDENGKPRCQNVAEDMDIQLCASILNENSDENENINTMILLDKMHSCSSLEKQQRVNVVQLASPSENNLVTEKSNLPEYTTEIAGKSKENLLNHEMVLKDVLPPIIKDTESEKTFGPASISHDNNNISSTSELGTDLANTKVKLIQGSELPELTDSVKGKDEYFKNMTPKVDSSLDHIICTEPDLIGKPAEESHLSLIASVTDKDPQGNGSDLIKGRDGKSDILIEDETSIQKMYLGEGEVLVEGLVEEENRHLKLLPGKNTRDSFKLINSQFPFPQITNNEELNQKGSLKKATVTLKDEPNNLQIIVSKSPVQFENLEEIFDTSVSKEISDDITSDITSWEGNTHFEESFTDGPEKELDLFTYLKHCAKNIKAKDVAKPNEDVPSHVLITAPPMKEHLQLGVNNTKEKSTSTQKDSPLNDMIQSNDLCSKESISGGGTEISQFTPESIEATLSILSRKHVEDVGKNDFLQSERCANGLGNDNSSNTLNTDYSFLEINNKKERIEQQLPKEQALSPRSQEKEVQIPELSQVFVEDVKDILKSRLKEGHMNPQEVEEPSACADTKILIQNLIKRITTSQLVNEASTVPSDSQMSDSSGVSPMTNSSELKPESRDDPFCIGNLKSELLLNILKQDQHSQKITGVFELMRELTHMEYDLEKRGITSKVLPLQLENIFYKLLADGYSEKIEHVGDFNQKACSTSEMMEEKPHILGDIKSKEGNYYSPNLETVKEIGLESSTVWASTLPRDEKLKDLCNDFPSHLECTSGSKEMASGDSSTEQFSSELQQCLQHTEKMHEYLTLLQDMKPPLDNQESLDNNLEALKNQLRQLETFELGLAPIAVILRKDMKLAEEFLKSLPSDFPRGHVEELSISHQSLKTAFSSLSNVSSERTKQIMLAIDSEMSKLAVSHEEFLHKLKSFSDWVSEKSKSVKDIEIVNVQDSEYVKKRLEFLKNVLKDLGHTKMQLETTAFDVQFFISEYAQDLSPNQSKQLLRLLNTTQKCFLDVQESVTTQVERLETQLHLEQDLDDQKIVAERQQEYKEKLQGICDLLTQTENRLIGHQEAFMIGDGTVELKKYQSKQEELQKDMQGSAQALAEVVKNTENFLKENGEKLSQEDKALIEQKLNEAKIKCEQLNLKAEQSKKELDKVVTTAIKEETEKVAAVKQLEESKTKIENLLDWLSNVDKDSERAGTKHKQVIEQNGTHFQEGDGKSAIGEEDEVNGNLLETDVDGQVGTTQENLNQQYQKVKAQHEKIISQHQAVIIATQSAQVLLEKQGQYLSPEEKEKLQKNMKELKVHYETALAESEKKMKLTHSLQEELEKFDADYTEFEHWLQQSEQELENLEAGADDINGLMTKLKRQKSFSEDVISHKGDLRYITISGNRVLEAAKSCSKRDGGKVDTSATHREVQRKLDHATDRFRSLYSKCNVLGNNLKDLVDKYQHYEDASCGLLAGLQACEATASKHLSEPIAVDPKNLQRQLEETKALQGQISSQQVAVEKLKKTAEVLLDARGSLLPAKNDIQKTLDDIVGRYEDLSKSVNERNEKLQITLTRSLSVQDGLDEMLDWMGNVESSLKEQGQVPLNSTALQDIISKNIMLEQDIAGRQSSINAMNEKVKKFMETTDPSTASSLQAKMKDLSARFSEASHKHKETLAKMEELKTKVELFENLSEKLQTFLETKTQALTEVDVPGKDVTELSQYMQESTSEFLEHKKHLEVLHSLLKEISSHGLPSDKALVLEKTNNLSKKFKEMEDTIKEKKEAVTSCQEQLDAFQVLVKSLKSWIKETTKKVPIVQPSFGAEDLGKSLEDTKKLQEKWSLKTPEIQKVNNSGISLCNLISAVTTPAKAIAAVKSGGAVLNGEGTATNTEEFWANKGLTSIKKDMTDISHGYEDLGLLLKDKIAELNTKLSKLQKAQEESSAMMQWLQKMNKTATKWQQTPAPTDTEAVKTQVEQNKSFEAELKQNVNKVQELKDKLTELLEENPDTPEAPRWKQMLTEIDSKWQELNQLTIDRQQKLEESSNNLTQFQTVEAQLKQWLVEKELMVSVLGPLSIDPNMLNTQRQQVQILLQEFATRKPQYEQLTAAGQGILSRPGEDPSLRGIVKEQLAAVTQKWDSLTGQLSDRCDWIDQAIVKSTQYQSLLRSLSDKLSDLDNKLSSSLAVSTHPDAMNQQLETAQKMKQEIQQEKKQIKVAQALCEDLSALVKEEYLKAELSRQLEGILKSFKDVEQKAENHVQHLQSACASSHQFQQMSRDFQAWLDTKKEEQNKSHPISAKLDVLESLIKDHKDFSKTLTAQSHMYEKTIAEGENLLLKTQGSEKAALQLQLNTIKTNWDTFNKQVKERENKLKESLEKALKYKEQVETLWPWIDKCQNNLEEIKFCLDPAEGENSIAKLKSLQKEMDQHFGMVELLNNTANSLLSVCEIDKEVVTDENKSLIQKVDMVTEQLHSKKFCLENMTQKFKEFQEVSKESKRQLQCAKEQLDIHDSLGSQAYSNKYLTMLQTQQKSLQALKHQVDLAKRLAQDLVVEASDSKGTSDVLLQVETIAQEHSTLSQQVDEKCSFLETKLQGIGHFQNTIREMFSQFAEFDDELDSMAPVGRDAETLQKQKETIKAFLKKLEALMASNDNANKTCKMMLATEETSPDLVGIKRDLEALSKQCNKLLDRAQAREEQVEGTIKRLEEFYSKLKEFSILLQKAEEHEESQGPVGMETETINQQLNMFKVFQKEEIEPLQGKQQDVNWLGQGLIQSAAKSTSTQGLEHDLDDVNARWKTLNKKVAQRAAQLQEALLHCGRFQDALESLLSWMVDTEELVANQKPPSAEFKVVKAQIQEQKLLQRLLDDRKSTVEVIKREGEKIATTAEPADKVKILKQLSLLDSRWEALLNKAETRNRQLEGISVVAQQFHETLEPLNEWLTTIEKRLVNCEPIGTQASKLEEQIAQHKVLQEDILLRKQNVDQALLNGLELLKQTTGDEVLIIQDKLEAIKARYKDITKLSTDVAKTLEQALQLARRLHSTHEELCTWLDKVEVELLSYETQVLKGEEASQAQMRPKELKKEAKNNKALLDSLNEVSSALLELVPWRAREGLEKMVAEDNERYRLVSDTITQKVEEIDAAILRSQQFDQAADAELSWITETEKKLMSLGDIRLEQDQTSAQLQVQKTFTMEILRHKDIIDDLVKSGHKIMTACSEEEKQSMKKKLDKVLKNYDTICQINSERYLQLERAQSLVNQFWETYEELWPWLTETQSIISQLPAPALEYETLRQQQEEHRQLRELIAEHKPHIDKMNKTGPQLLELSPGEGFSIQEKYVAADTLYSQIKEDVKKRAVALDEAISQSTQFHDKIDQILESLERIVERLRQPPSISAEVEKIKEQISENKNVSVDMEKLQPLYETLKQRGEEMIARSGGTDKDISAKAVQDKLDQMVFIWENIHTLVEEREAKLLDVMELAEKFWCDHMSLIVTIKDTQDFIRDLEDPGIDPSVVKQQQEAAETIREEIDGLQEELDIVINLGSELIAACGEPDKPIVKKSIDELNSAWDSLNKAWKDRIDKLEEAMQAAVQYQDGLQAVFDWVDIAGGKLASMSPIGTDLETVKQQIEELKQFKSEAYQQQIEMERLNHQAELLLKKVTEESDKHTVQDPLMELKLIWDSLEERIINRQHKLEGALLALGQFQHALDELLAWLTHTEGLLSEQKPVGGDPKAIEIELAKHHVLQNDVLAHQSTVEAVNKAGNDLIESSAGEEASNLQNKLEVLNQRWQNVLEKTEQRKQQLDGALRQAKGFHGEIEDLQQWLTDTERHLLASKPLGGLPETAKEQLNVHMEVCAAFEAKEETYKSLMQKGQQMLARCPKSAETNIDQDINNLKEKWESVETKLNERKTKLEEALNLAMEFHNSLQDFINWLTQAEQTLNVASRPSLILDTVLFQIDEHKVFANEVNSHREQIIELDKTGTHLKYFSQKQDVVLIKNLLISVQSRWEKVVQRLVERGRSLDDARKRAKQFHEAWSKLMEWLEESEKSLDSELEIANDPDKIKTQLAQHKEFQKSLGAKHSVYDTTNRTGRSLKEKTSLADDNLKLDDMLSELRDKWDTICGKSVERQNKLEEALLFSGQFTDALQALIDWLYRVEPQLAEDQPVHGDIDLVMNLIDNHKAFQKELGKRTSSVQALKRSARELIEGSRDDSSWVKVQMQELSTRWETVCALSISKQTRLEAALRQAEEFHSVVHALLEWLAEAEQTLRFHGVLPDDEDALRTLIDQHKEFMKKLEEKRAELNKATTMGDTVLAICHPDSITTIKHWITIIRARFEEVLAWAKQHQQRLASALAGLIAKQELLEALLAWLQWAETTLTDKDKEVIPQEIEEVKALIAEHQTFMEEMTRKQPDVDKVTKTYKRRAADPSSLQSHIPVLDKGRAGRKRFPASSLYPSGSQTQIETKNPRVNLLVSKWQQVWLLALERRRKLNDALDRLEELREFANFDFDIWRKKYMRWMNHKKSRVMDFFRRIDKDQDGKITRQEFIDGILSSKFPTSRLEMSAVADIFDRDGDGYIDYYEFVAALHPNKDAYKPITDADKIEDEVTRQVAKCKCAKRFQVEQIGDNKYRFFLGNQFGDSQQLRLVRILRSTVMVRVGGGWMALDEFLVKNDPCRVHHHGSKMLRSESNSSITTTQPTIAKGRTNMELREKFILADGASQGMAAFRPRGRRSRPSSRGASPNRSTSVSSQAAQAASPQVPATTTPKGTPIQGSKLRLPGYLSGKGFHSGEDSGLITTAAARVRTQFADSKKTPSRPGSRAGSKAGSRASSRRGSDASDFDISEIQSVCSDVETVPQTHRPTPRAGSRPSTAKPSKIPTPQRKSPASKLDKSSKR

SEQ ID NO: 76739 - protein, 160 aa, Homo sapiens
MDTGVIEGGLNVTLTIRLLMHGKKGESVKKMREESGARINISEGNCPERIITLAGPTNAIFKAFAMIIDKLEEDISSSMTNSTAASRPPVTLRLVVPASQCGSLIGKGGCKIKEIRESTGAQVQVAGDMLPNSTERAITIAGIPQSIIECVKQICVVMLE

SEQ ID NO: 76740 - protein, 92 aa, Homo sapiens
MEVIHGRPYCCRELEGADILSNTFYSNELHNPLQTVTRPTASEDRYQELRESLQQCRLPWGAEREYGGIIPISLPEDHRPKYEPPRVMGKGH

SEQ ID NO: 76741 - protein, 128 aa, Homo sapiens
MASLAAANAEFCFNLFREMDDNQGNGNVFFSSLSLFAALALVRLGAQDDSLSQIDKLLHVNTASGYGNSSNSQSGLQSQLKRVFSDINASHKDYDLSIVNGLFAEKVYGFHKDYIECAEKLYDAKVER

SEQ ID NO: 76742 - protein, 50 aa, Homo sapiens
  MOD_RES (1)..(1): Any amino acid
XIQTQLEHSVLSQQYGVSLCHPGWSAVALSLLTASSASRVHAILLPQPPE

SEQ ID NO: 76743 - protein, 35 aa, Homo sapiens
MADKEKKKKESILDLSKYIDKTIRVKFQGGREVES

SEQ ID NO: 76744 - protein, 43 aa, Homo sapiens
MEGALAANWSAEAANASAAPPGAEGNRTAGPPRRNEALARVEV

SEQ ID NO: 76745 - protein, 138 aa, Homo sapiens
  MOD_RES (1)..(1): Any amino acid
XLQELVLSGCSWLSVSALGSAPLPALRLLDLRWIEDVKDSQLRELLLPPPDTKPGQTESRGRLQGVAELRLAGLELTDASLRLLLRHAPQLSALDLSHCAHVGDPSVHLLTAPTSPLRETLVHLNLAGFSSFPLTLTP

SEQ ID NO: 76746 - protein, 86 aa, Homo sapiens
MEVVTFGDVAVHFSREEWQCLDPGQRALYREVMLENHSSVAGLGFLVFKPELISRLEQGEEPWVLDLQGAEGTEAPRTSKTGETYK

SEQ ID NO: 76747 - protein, 158 aa, Homo sapiens
MLGLCGQRLPAAWVLLLLPFLPLLLLAAPAPHRASYKPVIVVHGLFDSSYSFRHLLEYINEMGQYGDTDYLKWLFPTSMRSNLYRICYSPWGQEFSICNYWHDPHHDDLYLNASSFLALINGERDHPNATVWRKNFLRVGHLVLIGGPDDGVITPWQS

SEQ ID NO: 76748 - protein, 56 aa, Homo sapiens
  MOD_RES (1)..(1): Any amino acid
XKSHVYFFRAESKYTFERWMEVIQGASSSAGRAPSIVQDGPQPSSGLEGMVRGKEE

SEQ ID NO: 76749 - protein, 90 aa, Homo sapiens
MACTQAGERTAIYCLTQNEWRLDEATDSFFQNPDSLHRESMRNAVDKKKLERLYGRYKDPQDENKIGVDGIQQFCDDLSLDPASISVLVI

SEQ ID NO: 76750 - protein, 99 aa, Homo sapiens
MGVPRPQPWALGLLLFLLPGSLGAESPAKSSVLVVGIVIGVLLLTAAAVGGALLWRRMRSGLPAPWISLRGDDTGVLLPTPGEAQDADLKDVNVIPATA

SEQ ID NO: 76751 - protein, 204 aa, Homo sapiens
MVSPGHGHLRERKELTPHSTNPAAARIWDATYSDGYVRPASGVAVSDGVIKVFNDMKVRKSSTPEEVKKRKKAVLFCLSEDKKNIILEEGKEILVGDVGQTVDDPYATFVKMLPDKDCRYALYDATYETKESKKEDLVFIFWAPESAPLKSKMIYASSKDAIKKKLTGIKHELQANCYEEVKDRCTLAEKLGGSAVISLEGKPL

SEQ ID NO: 76752 - protein, 150 aa, Homo sapiens
MMGEAAVAAGPCPLREDSFTRFSSQSNVYGLAGGAGGRGELLAATLKGKVLGFRYQDLRQKIRPVAKELQFNYIPVDAEIVSIDTFNKSPPKRGLVVGITFIKDSGDKGSPFLNIYCDYEPGSEYNLDSIAQSCLNLELQFTPFQLCHAE

SEQ ID NO: 76753 - protein, 423 aa, Homo sapiens
MKIPFLLLFFLWEAESHAASRPNIILVMADDLGIGDPGCYGNKTIRTPNIDRLASGGVKLTQHLAASPLCTPSRAAFMTGRYPVRSGMASWSRTGVFLFTASSGGLPTDEITFAKLLKDQGYSTALIGKWHLGMSCHSKTDFCHHPLHHGFNYFYGISLTNLRDCKPGEGSVFTTGFKRLVFLPLQIVGVTLLTLAALNCLGLLHVPLGVFFSLLFLAALILTLFLGFLHYFRPLNCFMMRNYEIIQQPMSYDNLTQRLTVEAAQFIQRNTETPFLLVLSYLHVHTALFSSKDFAGKSQHGVYGDAVEEMDWSVGGKANNWEGGIRVPGILRWPRVIQAGQKIDEPTSNMDIFPTVAKLAGAPLPEDRIIDGRDLMPLLEGKSQRSDHEFLFHYCNAYLNAVRWHPQNNSGSSRRTTNHCSMK

SEQ ID NO: 76754 - protein, 78 aa, Homo sapiens
  MOD_RES (1)..(1): Any amino acid
XPPVSNYPGYPKPEEGILDSLDVWVIAVIVIAIVVGVAVICVVPYRYLQRRKKKGKADGGAEYATYQTKSTTPAEQRG

SEQ ID NO: 76755 - protein, 95 aa, Homo sapiens
MEPEEEPGGAAVREVYEEAGVKGKLGRLLGIFENQDRKHRTYVYVLTVTEILEDWEDSVNIGRKREWFKVEDAIKVLQCHKPVHAEYLEKLKLGC

SEQ ID NO: 76756 - protein, 127 aa, Homo sapiens
  MOD_RES (1)..(1): Any amino acid
XHAVQHRHRDGVHWDQHAHRHLSHLLLTHVADAWGVELPKRGYPPGCGPGVNFVPGPLPPPIPGPNPHGQHWGPVVHRGMPRYVPNSPYHVRRMGGPCRQRLRHSERLIHTYKLDRRPPAHSGTWPG

SEQ ID NO: 76757 - protein, 134 aa, Homo sapiens
MDDIFSHIFGGGLFGFMGNQSRSRNGRRRGEDMMHPLKVSLEDLYNGKTTKLQLSKNVLCSACSGQGGKSGAVQKCSACRGRGVRIMIRQLAPGMVQQMQSVCSDCNGEGEVINEKDRCKKCEGKKVIKEVKIL

SEQ ID NO: 76758 - protein, 88 aa, Homo sapiens
MPEMTENETPTKKQHRKKNRETHNAVERHRKKKINAGINRIGELIPCSPALKQSKNMILDQAFKYITELKRQNDELLLNGGNNEQGFY

SEQ ID NO: 76759 - protein, 214 aa, Homo sapiens
MAEQVLPQALYLSNMRKAVKIRERTPEDIFKPTNGIIHHFKTMHRYTLEMFRTCQFCPQFREIIHKALIDRNIQATLESQKKLNWCREVRKLVALKTNGDGNCLMHATSQYMWGVQDTDLVLRKALFSTLKETDTRNFKFRWQLESLKSQEFVETGLCYDTRNWNDEWDNLIKWLPQTHPWPEVDFSTTHWKKYTYLSFATSSEGQSLSFQTKC

SEQ ID NO: 76760 - protein, 209 aa, Homo sapiens
  MOD_RES (1)..(1): Any amino acid
XEGCLSKLKAADPTFVMGHAMATGLVLIGTGSSVKLDKELDLAVKTMVEISRTQPLTRREQLHVSAVETFANGNFPKACELWEQILQDHPTDMLALKFSHDAYFYLGYQEQMRDSVARIYPFWTPDIPLSSYVKGIYSFGLMETNFYDQAEKLAKEALSINPTDAWSVHTVAHIHEMKAEIKDGLEFMQHSETFWKGLVRRSEQPLQST

SEQ ID NO: 76761 - protein, 214 aa, Homo sapiens
MCGIWALFGSDDCLSVQCLSAMKIAHRGPDAFRFENVNGYTNCCFGFHRLAVVDPLFGMQPIRVKKYPYLWLCYNGEIYNHKKMQQHFEFEYQTKVDGEIILHLYDKGGIEQTICMLDGVFAFVLLDTANKKVFLGRDTYGVRPLFKAMTEDGFLAVCSEAKGLVTLKHSATPFLKVEPFLPGHYEVLDLKPNGKVASVEMVKYHHCRDVPLHA

SEQ ID NO: 76762 - protein, 221 aa, Homo sapiens
MAAAASPAFLLRLPLLLLLSSWCRTGLADPHSLCYDITVIPKFRPGPRWCAVQGQVDEKTFLHYDCGSKTVTPVSPLGKKLNVTTAWKAQNPVLREVVDILTEQLLDIQLENYIPKEPLTLQARMSCEQKAEGHGSGSWQLSFDGQIFLLFDSENRMWTTVHPGARKMKEKWENDKDMTMSFHYISMGDCTGWLEDFLMGMDSTLEPSAGGNRRKRNGDLQ

SEQ ID NO: 76763 - protein, 394 aa, Homo sapiens
MDAPRASAAKPPTGRKMKARAPPPPGKAATLHVHSDQKPPHDGALGSQQNLVRMKEALRASTMDVTVVLPSGLEKRSVLNGSHAMMDLLVELCLQNHLNPSHHALEIRSSETQQPLSFKPNTLIGTLNVHTVFLKEKVPEEKVKPGPPKVPEKSVRLVVNYLRTQKAVVRVSPEVPLQNILPVICAKCEVSPEHVVLLRDNIAGEELELSKSLNELGIKELYAWDNRRVRLSKTQSEPSLSCQETFRKSSLGNDETDKEKKKFLGFFKVNKRSNSKGCLTTPNSPSMHSRSLTLGPSLSLGSISGVSVKSEMKKRRAPPPPGSGPPVQDKASEKVSLGSQIDLQKKKRRAPAPPPPQPPPPSPLIPNRTEDKEENRKSTMVYCCASFPTQAKRF

SEQ ID NO: 76764 - protein, 414 aa, Homo sapiens
MAAVGSGGYARNDAGEKLPSVMAGVPARRGQSSPPPAPPICLRRRTRLSTASEETVQNRVSLEKVLGITAQNSSGLTCDPGTGHVAYLAGCVVVILDPKENKQQHIFNTARKSLSALAFSPDGKYIVTGENGHRPAVRIWDVEEKNQVAEMLGHKYGVACVAFSPNMKHIVSMGYQHDMVLNVWDWKKDIVVASNKVSCRVIALSFSEDSSYFVTVGNRHVRFWFLEVSTETKVTSTVPLVGRSGILGELHNNIFCGVACGRGRMAGSTFCVSYSGLLCQFNEKRVLEKWINLKVSLSSCLCVSQELIFCGCTDGIVRIFQAHSLHYLANLPKPHYLGVDVAQGLEPSFLFHRKAEAVYPDTVALTFDPIHQWLSCVYKDHSIYIWDVKDINRVGKVWSELFHSSYVWNVEFSR

SEQ ID NO: 76765 - protein, 251 aa, Homo sapiens
MGLGSSCHLSLPKRAEALLCSRKATVVRDLVAVRMAEEQEFTQLCKLPAQPSHPHCVNNTYRSAQHSQALLRGLLALRDSGILFDVVLVVEGRHIEAHRILLAASCDYFRGMFAGGLKEMEQEEVLIHGVSYNAMCQILHFIYTSELELSLSNVQETLVAACQLQIPEIIHFCCDFLMSWVDEENILDVYRLAELFDLSRLTEQLDTYILKNFVAFSRTDKYRQLPLEKVYSLLSSNRLEVSCETEVYEGA

SEQ ID NO: 76766 - protein, 77 aa, Homo sapiens
MVHSPFKTKMVACYDRDSTSGGEGGGTPARSRRKWFAFSRWRLPMLLTRPAGWEPPNLSLLFDFTLGYHQGQRMEPR

SEQ ID NO: 76767 - protein, 65 aa, Homo sapiens
MLKLLNQKKGPSQCPLCKNDITKRSLQESTRFSQLVEELLKIICAFQLDTGLEYANSYNFAKKEN

SEQ ID NO: 76768 - protein, 67 aa, Homo sapiens
MDSPCQPQPLSQALPQLPGSSSEPLEPEPGRARMGVESYLPCPLLPSYHCPGVPSEASAGSGTPRAT

SEQ ID NO: 76769 - protein, 67 aa, Homo sapiens
MPLKTRTALSDDPDSSTSTLGNMLELPGTSSSSTSQELPFRLALSCCPGWRRDSWAHSILLHQLELQ

SEQ ID NO: 76770 - protein, 148 aa, Homo sapiens
MAGPFSRLLSARPGLRLLALAGAGSLAAGFLLRPEPVRAASERRRLYPPSAEYPDLRKHNNCMASHLTPAVYARLCDKTTPTGWTLDQCIQTGVDNPGHPFIKTVGMVAGDEETYEVFADLFDPVIQERHNGYDPRTMKHTTDLDASK

SEQ ID NO: 76771 - protein, 234 aa, Homo sapiens
MSKPHFPPALPAPAAIPGIKGEENGCLLLPTYSVPGSMLCVIYHLDNPVGKMSSSPLSKKRRVSGPDPKPGSNCSPAQSVLSEVPSVPTNGMAKNGSEADIDEGLYSRQLYVLGHEAMKRLQTSSVLVSGLRGLGVEIAKNIILGGVKAVTLHDQGTAQWADLSSQFYLREEDIGKNRAEVSQPRLAELNSYVPVTAYTGPLVEDFLSGFQVVVLTNTPLEDQLRVGEFCHNRG

SEQ ID NO: 76772 - protein, 427 aa, Homo sapiens
MDSTKEKCDSYKDDLLLRMGLNDNKAGMEGLDKEKINKIIMEATKGSRFYGNELKKEKQVNQRIENMMQQKAQITSQQLRKAQLQVDRFAMELEQSRNLSNTIVHIDMDAFYAAVEMRDNPELKDKPIAVGSMSMLSTSNYHARRFGVRAAMPGFIAKRLCPQLIIVPPNFDKYRAVSKEVKEILADYDPNFMAMSLDEAYLNITKHLEERQNWPEDKRRYFIKMGSSVENDNPGKEVNKLSEHERSISPLLFEESPSDVQPPGDPFQVNFEEQNNPQILQNSVVFGTSAQEVVKEIRFRIEQKTTLTASAGIAPNTMLAKVCSDKNKPNGQYQILPNRQAVMDFIKDLPIRKVSGIGKVTEKMLKALGIITCTELYQQRALLSLLFSETSWHYFLHISLGLGSTHLTRDGERKSMSVERVELLPLS

SEQ ID NO: 76773 - protein, 69 aa, Homo sapiens
MAGPFSRLLSARPGLRLLALAGAGSLAAGFLLRPEPVRAASERRRLYPPRLFPSSIRSVVSWEERTEQI

SEQ ID NO: 76774 - protein, 517 aa, Homo sapiens
MPGVANSGPSTSSRETANPCSRKKVHFGSIHDAVRAGDVKQLSEIVVRGASINELDVLHKFTPLHWAAHSGSLECLHWLLWHGADITHVTTRGWTASHIAAIRGQDACVQALIMNGANLTAQDDRGCTPLHLAATHGHSFTLQIMLRSGDPSVTDKREWRPVHYAAFHGRLGCLQLLVKWGCSIEDVDYNGNLPVHLAAMEGHLHCFKFLVSRMSSATQVLKAFNDNGENVLDLAQRFFKQNILQFIQGAEYEGKDLEDQETLAFPGHVAAFKGDLGMLKKLVEDGVININERADNGSTPMHKAAGQGHIECLQWLIKMGADSNITNKAGERPSDVAKRFAHLAAVKLLEELQKYDIDDENEIDENDVKYFIRHGVEGSTDAKDDLCLSDLDKTDARMRAYKKIVELRHLLEIAESNYKHLGGITEEDLKQKKEQLESEKTIKELQGQLEYERLRREKLECQLDEYRAEVDQLRETLEKIQVPNFVAMEDSASCESNKEKRRVKKKVSSGGVFVRRY

SEQ ID NO: 76775 - protein, 55 aa, Homo sapiens
MKILLVFDFDNTIIDDNSDTWIVQCAPNKKLPIELRDSYRKGFWTEFMGRVFKYL

SEQ ID NO: 76776 - protein, 145 aa, Homo sapiens
MLFRNRFLLLLALAALLAFVSLSLQFFHLIPVSTPKNGMSSKSRKRIMPDPVTEPPVTDPVYEALLYCNIPSVAERSMEGHAPHHFKLVSVHVFIRHGDRYPLYVIPKTKRPEIDCTLVANRKPYHPKLEAFISHMSKGSGASFE

SEQ ID NO: 76777 - protein, 82 aa, Homo sapiens
MEGLVVAAGGDVSLHNFSARLWEQLVHFHVMRLTDSLFLWVGATPHLRNLAVAMCSRYPGRPTNRCLSAITFRTQTVTSHYL

SEQ ID NO: 76778 - protein, 145 aa, Homo sapiens; identical to SEQ ID NO: 20030

SEQ ID NO: 76779 - protein, 38 aa, Homo sapiens
MAVISAPRALLWPSEAADLAFTFQLPADYPSTPVLGLS

SEQ ID NO: 76780 - protein, 140 aa, Homo sapiens
GGAIQLANNGTDGVQGLQTLTMTNAAATQPGTTILQYAQTTDGQQILVPSNQVVVQAASGDVQTYQIRTAPTSTIAPGVVMASSPALPTQPAEEAARKREVRLMKNRYKYCIYLDCYVLSVSSHSAGCVSLHLLVIGSLH

SEQ ID NO: 76781 - protein, 94 aa, Homo sapiens
  MOD_RES (1)..(1): Any amino acid
XLGRANRRKPKPPAPEDLAVICFTSGTTGNPKGAMVTHRNIVSDCSAFVKATECVMLCHGAKIGFFQGDIRLLMDDLKVLQPTVFPVVPRLLNR

SEQ ID NO: 76782 - protein, 305 aa, Homo sapiens
MFAEGEEMYLQGSSIWHPACRQAARTEDRNKETRTSSESIISVPASSTSGSPSRVIYAKLGGEILDYRDLAALPKSKAIYDIDRPDMISYSPYISHSAGDRQSYGESPQLLSPTPTEGDQDDRSYKQCRTSSPSSTGSVSLGRYTPTSRSPQHYSRPAGTVSVGTSSCLSLSQHPSPTSVFRHHYIPYFRGSESGRSTPSLSVLSDSKPPPSTYQQAPRHFHVPDTGVKDNIYRKPPIYRQHAARRSDGEDGSLDQDNRKKSSWLMLKGDADTRTNSPDLDTQSLSHSSGTDRDPLQRMAGDSFH

SEQ ID NO: 76783 - protein, 854 aa, Homo sapiens
MIPDLSEYKWIVPDIVWEIDEYIDFEKIRKALPSSEDLVKLAPDFDKIVESLSLLKDFFTSGHKLVSEVIGASDLLLLLGSPEETAFRATDRGSESDKHFRKVSDKEKIDQLQEELLHTQLKYQRILERLEKENKELRKLVLQKDDKGIHHRKLKKSLIDMYSEVLDVLSDYDASYNTQDHLPRVVVVGDQSAGKTSVLEMIAQARIFPRGSGEMMTRSPVKVTLSEGPHHVALFKDSSREFDLTKEEDLAALRHEIELRMRKNVKEGCTVSPETISLNVKGPGLQRMVLVDLPGVINTVTSGMAPDTKETIFSISKAYMQNPNAIILCIQDGSVDAERSIVTDLVSQMDPHGRRTIFVLTKVDLAEKNVASPSRIQQIIEGKLFPMKALGYFAVVTGKGNSSESIEAIREYEEEFFQNSKLLKTSMLKAHQVTTRNLSLAVSDCFWKMVRESVEQQADSFKATRFNLETEWKNNYPRLRELDRNELFEKAKNEILDEVISLSQVTPKHWEEILQQSLWERVSTHVIENIYLPAAQTMNSGTFNTTVDIKLKQWTDKQLPNKAVEVAWETLQEEFSRFMTEPKGKEHDDIFDKLKEAVKEESIKRHKWNDFAEDSLRVIQHNALEDRSISDKQQWDAAIYFMEEALQARLKDTENAIENMVGPDWKKRWLYWKNRTQEQCVHNETKNELEKMLKCNEEHPAYLASDEITTVRKNLESRGVEVDPSLIKDTWHQVYRRHFLKTALNHCNLCRRGFYYYQRHFVDSELECNDVVLFWRIQRMLAITANTLRQQLTNTEVRRLEKNVKEVLEDFAEDGEKKIKLLTGKRVQLAEDLKKVREIQEKLDAFIEALHQEK

SEQ ID NO: 76784 - protein, 1163 aa, Homo sapiens
MDAKARNCLLQHREALEKDIKTSYIMDHMISDGFLTISEEEKVRNEPTQQQRAAMLIKMILKKDNDSYVSFYNALLHEGYKDLAALLHDGIPVVSSSSGKDSVSGITSYVRTVLCEGGVPQRPVVFVTRKKLVNAIQQKLSKLKGEPGWVTIHGMAGCGKSVLAAEAVRDHSLLEGCFPGGVHWVSVGKQDKSGLLMKLQNLCTRLDQDESFSQRLPLNIEEAKDRLRILMLRKHPRSLLILDDVWDSWVLKAFDSQCQILLTTRDKSVTDSVMGPKYVVPVESSLGKEKGLEILSLFVNMKKADLPEQAHSIIKECKGSPLVVSLIGALLRDFPNRWEYYLKQLQNKQFKRIRKSSSYDYEALDEAMSISVEMLREDIKDYYTDLSILQKDVKVPTKVLCILWDMETEEVEDILQEFVNKSLLFCDRNGKSFRYYLHDLQVDFLTEKNCSQLQDLHKKIITQFQRYHQPHTLSPDQEDCMYWYNFLAYHMASAKMHKELCALMFSLDWIKAKTELVGPAHLIHEFVEYRHILDEKDCAVSENFQEFLSLNGHLLGRQPFPNIVQLGLCEPETSEVYQQAKLQAKQEVDNGMLYLEWINKKNITNLSRLVVRPHTDAVYHACFSEDGQRIASCGADKTLQVFKAETGEKLLEIKAHEDEVLCCAFSTDDRFIATCSVDKKVKIWNSMTGELVHTYDEHSEQVNCCHFTNSSHHLLLATGSSDCFLKLWDLNQKECRNTMFGHTNSVNHCRFSPDDKLLASCSADGTLKLWDATSANERKSINVKQFFLNLEDPQEDMEVIVKCCSWSADGARIMVAAKNKIFLWNTDSRSKVADCRGHLSWVHGVMFSPDGSSFLTSSDDQTIRLWETKKVCKNSAVMLKQEVDVVFQENEVMVLAVDHIRRLQLINGRTGQIDYLTEAQVSCCCLSPHLQYIAFGDENGAIEILELVNNRIFQSRFQHKKTVWHIQFTADEKTLISSSDDAEIQVWNWQLDKCIFLRGHQETVKDFRLLKNSRLLSWSFDGTVKVWNIITGNKEKDFVCHQGTVLSCDISHDATKFSSTSADKTAKIWNVSNGELLHLCAPLSEEGAATHGGWVTDLCFSPDGKMLISAGGYIKWWNVVTGESSQTFYTNGTNLKKIHVSPDFKTYVTVDNLGILYILQTLE

SEQ ID NO: 76785 - protein, 233 aa, Homo sapiens
MTDDKDVLRDVWFGRIPTCFTLYQDEITEREAEPYYLLLPRVSYLTLVTDKVKKHFQKVMRQEDISEIWFEYEGTPLKWHYPIGLLFDLLASSSALPWNITVHFKSFPEKDLLHCPSKDAIEAHFMSCMKEADALKHKSQVINEMQKKDHKQLWMGLQNDRFDQFWAINRKLMEYPAEENGFRYIPFRIYQVTAVWVGIQRFQASEEESEDEEFLATLTGGERSGKARKQWTQ

SEQ ID NO: 76786 - protein, 102 aa, Homo sapiens
  MOD_RES (1)..(1): Any amino acid
XTTGEPATPKRRKAEPEALQSLRRSTRHSANCDRLSESSASPQPKRRQQDTSASMPKLFLHLEKTQCWWHSSRCVKVFADSLKIGKAQKGRVEEGIPLREAL

SEQ ID NO: 76787 - protein, 94 aa, Homo sapiens
MSSEPPPPPQPPTHQASVGLLDTPRSRERSPSPLRGNVVPSPLPTRRTRTFSATVRASQGPVYKGVCKCFCRSKGHGFITPADGGPDIFLHISE

SEQ ID NO: 76788 - protein, 101 aa, Homo sapiens
MKDEAGERDREVSSLNSKLLSLQLDIKNLHDVCKRQRKTLQDNQLCMEEAMNSSHLIALKISDHSDTRGAASAMDLRQTSKSTMKIKTITPALRTRSKHRH

SEQ ID NO: 76789 - protein, 172 aa, Homo sapiens
  MOD_RES (1)..(1): Any amino acid
XSVQGDEVTLYTPEERDPVPLSIHHMPICVSFAFFQQGTYLLVDPNEREERVMDGLLVIAMNKHREICTIQSSGGIMLLKDQVLRCSKIAGVKVAEITELILKALENDQKVSVSTPVLWTPGTAQIGEGVENSWGDLEDSEKEDDEGGGDQAIILDGIKMDTGVEVSDIGSQ

SEQ ID NO: 76790 - protein, 15 aa, Homo sapiens
MEMDGDPYNLPAQGQ

SEQ ID NO: 76791 - protein, 65 aa, Homo sapiens
MRLWKAVVVTLAFMSVDICVTTAIYVFSHLDRSLLEDIRHFNIFDSVLDLWAACLYRSCLLLGAT

SEQ ID NO: 76792 - protein, 139 aa, Homo sapiens
MKGLGTDEDSLIEIICSRTNQELQEINRVYKEMYKTDLEKDIISDTSGDFRKLMVALAKGRRAEDGSVIDYELIDQDARDLYDAGVKRKGTDVPKWISIMTERSVPHLQKVFDRYKSYSPYDMLESIRKEVKGDLENAF

SEQ ID NO: 76793 - protein, 108 aa, Homo sapiens
MEASWGSFNAERGWYVSVQQPEEAEAEELSPLLSNELHRQRSPGVSFGLSVFNLMNAIMGSGILGLAYVLANTGVFGFSFLLLTVALLASYSVHLLLSMCIQTAYLGP

SEQ ID NO: 76794 - protein, 106 aa, Homo sapiens
  MOD_RES (1)..(1): Any amino acid
XPIKYKERHPLEYLRQYPHFRCRTNVLGSILRIRSEATAAIHSFFKDSGFVHIHTPIITSNDSEGAGELFQLEPSGKLKVPEENFFNVPAFLTVSGQLHLEVMSGL

SEQ ID NO: 76795 - protein, 101 aa, Homo sapiens
MAWMTYISNWFEQDDWYEGLQRANMSQVRQVGLLAAGCQPWNKDVCAASGDRFAYCATLAIYIYQGSLLLLVGAGMQRMWWHLFPTEAHCSFGPSQDQIVE

SEQ ID NO: 76796 - protein, 377 aa, Homo sapiens
MEMFREDEGYIKEEERPLPENEFQRQVWLLFEYPESSGPARIIAIVSVMVILISIVSFCLETLPIFRDENEDMHGSGVTFHTYSNSTIGYQQSTSFTDPFFIVETLCIIWFSFEFLVRFFACPSKAGFFTNIMNIIDIVAIIPYFITLGTELAEKPEDAQQGQQAMSLAILRVIRLVRVFRIFKLSRHSKGLQILGQTLKASMRELGLLIFFLFIGVILFSSAVYFAEADERESQFPSIPDAFWWAVVSMTTVGYGDMVPTTIGGKIVGSLCAIAGVLTIALPVPVIVSNFNYFYHRETEGEEQAQYLQVTSCPKIPSSPDLKKSRSASTISKSDYMEIQEGVNNSNEDFREENLKTANCTLANTNYVNITKMLTDV

SEQ ID NO: 76797 - protein, 275 aa, Homo sapiens
MSGVFCFFFFFLGVPEAEVTWFRNKSKLGSPHHLHEGSLLLTNVSSSDQGLYSCRAANLHGELTESTQLLILDPPQVPTQLEDIRALLAATGPNLPSVLTSPLGTQLVLDPGNSALLGCPIKGHPVPNITWFHGGQPIVTATGLTHHILAAGQILQVANLSGGSQGEFSCLAQNEAGVLMQKASLVIQVQWALHRASPSCATQTSLLPDTGWHHLTIRAVQCSSEACEHPELLVRGLQCTLESQPVDPVHSYLWQLRLPVPACGVCACPHQQGSA

SEQ ID NO: 76798 - protein, 194 aa, Homo sapiens
MKSRIPVVLLACGSFNPITNMHLRMFEVARDHLHQTGMYQVIQGIISPVNDTYGKKDLAASHHRVAMARLALQTSDWIRVDPWESEQAQWMETVKVLRHHHSKLLRSPPQMEGPDHGKALFSTPAGILKRILQTLFEHLTGTDSGLRLRTETASPSPHLKLETGYEWRWPNRNSSSLQLPARAIQKTGDFCISN

SEQ ID NO: 76799 - protein, 52 aa, Homo sapiens
MGTTGLESLSLGDRGAAPTVTSSERLVPDPPNDLRQNGNTCALEVSGEVSFS

SEQ ID NO: 76800 - protein, 147 aa, Homo sapiens
MEDTKESNVKTFCSKNILAILGFSSIIAVIALLAVGLTQNKALPENVKYGIVLDAGSSHTSLYIYKWPAEKENDTGVVHQVEECRVKGWKVKSWQTGFWMWWRGASATTPLTSRVPGSLLAKRKVPMAGLLSTICWANSVRKQGGSA

SEQ ID NO: 76801 - protein, 667 aa, Homo sapiens
MRACAGSTREAGSGAQDLSTLLCLEESMEEQDEKPPEPPKVCAQEGVNFKIVTVDFTREEQGTCNPAQRTLDRDVILENHRDLVSWDLATAVGKKDSTSKQRIFDEEPANGVKIERFTRDDPWLSSCEEVDDCKDQLEKQQEKQEILLQEVAFTQRKAVIHERVCKSDETGEKSGLNSSLFSSPVIPIRNHFHKHVSHAKKWHLNAAVNSHQKINENETLYENNECGKPPQSIHLIQFTRTQTKDKSYGFSDRIQSFCHGTPLHIHEKIHGGGKTFDFKECGQVLNPKISHNEQQRIPFEESQYKCSETSHSSSLTQNMRNNSEEKPFECNQCGKSFSWSSHLVAHQRTHTGEKPYECSECGKSFSRSSHLVSHQRTHTGEKPYRCNQCGKSFSQSYVLVVHQRTHTGEKPYECNQCGKSFRQSYKLIAHQRTHTGEKPYECNQCGKSFIQSYKLIAHQRIHTGEKPYECNQCGKSFSQSYKLVAHQRTHTGEKPFECNQCGKSFSWSSQLVAHQRTHTGEKPYECSECGKSFNRSSHLVMHQRIHTGEKPYECNQCGKSFSQSYVLVVHQRTHTGEKPYECSQCGKSFRQSSCLTQHQRTHTGEKPFECNQCGKTFSLSARLIVHQRTHTGEKPFTCIQCGKAFINSYKLIRHQATHTEEKLYECN

SEQ ID NO: 76802 - protein, 258 aa, Homo sapiens
MVVVTGREPDSRRQDGAMSSSDAEDDFLEPATPTATQAGHALPLLPQEFPEVVPLNIGGAHFTTRLSTLRCYEDTMLAAMFSGRHYIPTDSEGRYFIDRDGTHFGDVLNFLRSGDLPPRERVRAVYKEAQYYAIGPLLEQLENMQPLKGEKTTWSGLWRSPGCVRSSGRPALPSSRSVSSRRRCPSPPMSVRSSTPCDLSGVRVTGSFLSTTVKWMCLLGPGRLWLMFMTCCTAWSRTSRPRVSPWTTSASGCVTSTS

SEQ ID NO: 76803 - protein, 433 aa, Homo sapiens
MEGPLSVFGDRSTGETIRSQNVMAAASIANIVKSSLGPVGLDKMLVDDIGDVTITNDGATILKLLEVEHPAAKVLCELADLQDKEVGDGTTSVVIIAAELLKNADELVKQKIHPTSVISGYRLACKEAVRYINENLIVNTDELGRDCLINAAKTSMSSKIIGINGDFFANMVVDAVLAIKYTDIRGQPRYPVNSVNILKAHGRSQMESMLISGYALNCVVGSQGMPKRIVNAKIACLDFSLQKTKMKLGVQVVITDPEKLDQIRQRESDITKERIQKILATGANVILTTGGIDDMCLKYFVEAGAMAVRRVLKRDLKRIAKASGATILSTLANLEGEETFEAAMLGQAEEVVQERICDDELILIKNTKARTSASIILRGANDFMCDEMERSLHDALCVVKRVLESKSVVPGGGAVEAALSIYLENYATSMDWS

SEQ ID NO: 76804 - protein, 172 aa, Homo sapiens
MAAPWASLRLVAPMWNGRIRGIHRLGAAVAPEGNQKKKRTILQFLTNYFYDVEALRDYLLQREMYKVHEKNRFRDKEWIRPDKYGHFSQEFWNFCEVPVEAVDAGDCDINYEGLDNLLRLKELQSLSLQRCCHVDDWCLSRLYPLADSLQELSLAGCPRISERGLACLHHLQ

SEQ ID NO: 76805 - protein, 93 aa, Homo sapiens
MLENFALVSSLGLAPSRSPVFTQLEDDEQSWVPSWVDVTPVSRAEARRGFGLVCHLYHDFQAPHVPASLACVSSLPFSVSVQSCLLLATQCVS

SEQ ID NO: 76806 - protein, 61 aa, Homo sapiens
  MOD_RES (1)..(1): Any amino acid
XADGPLKRLLVPILLPEKCYDQLFVQWDLLHVPCLKILLSKGLGLGIVAGSLLALGVKPYS

SEQ ID NO: 76807 - protein, 95 aa, Homo sapiens
MKQYASPMPTQTDVKLKFKPLSKKVVSAALQFSLSCIFLREGKATDEDMQSLASLMSMKQADIGNLDDFEEDNEDDDENRVNQEEKAAKITEIVN

SEQ ID NO: 76808 - protein, 101 aa, Homo sapiens
ARMEVEAVCGGAGEVEAQDSDPAPAFSKAPGSAGHYELPWVEKYRPVKLNEIVGNEDTVSRLEVFAREGNVPNIIIAGSEVTEMQTAVNITQELPEVLLVV

SEQ ID NO: 76809 - protein, 296 aa, Homo sapiens
  MOD_RES (1)..(1): Any amino acid
XHLFLHEKAVLFCKKREENGEGYEKAPSYSYKQSLNMAAVGITENVKGDAKKFEIWYNAREEVYIVQAPTPEIKAAWVNEIRKVLTSQLQACREASQHRALEQSQSLPLPAPTSTSPSRGNSRNIKKLEERKTDPLSLEGYVSSAPLTKPPEKGKGWSKTSHSLEAPEDDGGWSSAEEQINSSDAEEDGGLGPKKLVPGKYTVVADHEKGGPDALRVRSGDVVELVQEGDEGLWYVRDPTTGKEGWVPASSLSVRLGPSGSAQCLSSSESSPGSAVLSNSSSCSEGGQAPFSDLQG

SEQ ID NO: 76810 - protein, 37 aa, Homo sapiens
MAGKKNVLSSLAVYAEDSEPESDGEAGIEAVGSAAGR

SEQ ID NO: 76811 - protein, 696 aa, Homo sapiens
MIDSVKLRRDSAADFFSHYEYLCALQNSVPLPAVRACLREGVLDFNADRLRGVDWAPLLSTLKINKDLPLVSIKSFFQPWLGDTGSDMNKFCRSRVPAIRYKDVTFQLCKALKGCLSISSVLKNLELNGLILRERDLTILAKGLNKSASLVHLSLANCPIGDGGLEIICQGIKSSITLKTVNFTGCNLTWQGADHMAKILKYQTMRRHEETWAESLRYRRPDLDCMAGLRRITLNCNTLIGDLGACAFADSLSEDLWLRALDLQQCGLTNEGAKALLEALETNTTLVVLDIRKNPLIDHSMMKAVIKKVLQNGRSAKSEYQWITSPSVKEPSKTAKQKRRTIILGSGHKGKATIRIVIWRHRVGLATKKPVSSGRKHSLGKEYYAPAPLPPGVSGFLPWRTAERAKRHRGFPLIKTRDICNQLQQPGFPVTVTVESPSSSEVEEVDDSSESVHEVPEKTSIEQEALQEKLEECLKQLKEERVIRLKVDKRVSELEHENAQLRNINFSLSEALHAQSLTNMILDDEGVLGSIENSFQKFHAFLDLLKDAGLGQLATMAGIDQSDFQLLGHPQMTSTVSNPPKEEKKALEDEKPEPKQNALGQMQNIQFQKITGDARIPLPLDSFPVPVSTPEGLGTSSNNLGVPATEQRQESFEGFIARMCSPSPDATSGTGSQRKEEELSRNSRSSSEKKTKTESH

SEQ ID NO: 76812 - protein, 60 aa, Homo sapiens
MPLTGVEPARMNRKKGDKGFESPRPYKLTHQVVCINNINFQRKSVVEKPQLFFQCLCSCS

SEQ ID NO: 76813 - protein, 123 aa, Homo sapiens
  MOD_RES (1)..(1): Any amino acid
XFPPVSLHYSYDLRSLVSQLFKRNPRDRPSVNSILEKGFIAKRIEKFLSPQLIAEEFCLKTFSKFGSQPIPAKRPASGQNSISVMPAQKITKPAAKYGIPLAYKKYGDKKLHEKKPLQKHKQV

SEQ ID NO: 76814 - protein, 23 aa, Homo sapiens
MADQRMDISSTISDFMSPGPTDL

SEQ ID NO: 76815 - protein, 1296 aa, Homo sapiens
MLCLEKLVGLLLKNQRKSDACKKGPWKSQRYTVTGNRVAYGRLNPDGIWTRKRSRRLPMVPQDIYSSMPEAQPVETNSPKALLVLGELSNTDNDINESVFIWGISDKAAQRKTISVDEGLFHLQQEKQQQQQQQQRLEPVHRLGRGKGRLRLPHRLLFKDRHFTCSKIIGRRFACFAQRLSHRRKQSQCDLLNESTGQLPTTCSSAASNSINWNCRVKMTQQMQNLHLCQSKKHSAPSSPNAAKRLYRNLSEKLKGSHSSFDEAYFRTRTDRLSLRKTSVNFQGNEAMFEAVEQQDMDAVQILLYQYTPEELDLNTPNSEGLTPLDIAIMTNNVPIARILLRTGARESPHFVSLESRAMHLNTLVQEAQERVSELSAQVENEGFTLDNTEKEKQLKAWEWRYRLYRRMKTGFEHARAPEMPTNVCLMVTSSTSLTVSFQEPLSVNAAVVTRYKVEWSMSEDFSPLAGEIIMDNLQTLRCTITGLTMGQQYFVQVSAYNMKGWGPAQTTTPACASPSNWKDYDDREPRHKGQSEVLEGLLQQVRALHQHYSCRESTKLQTTGRKQSVSRSLKHLFHSSNKFVKTLKRGLYIAVIFYYKDNILVTNEDQVPIVEIDDSHTSSITQDFLWFTKLSCMWEDIRWLRQSIPISSSSSTVLQTRQKMLAATAQLQNLLGTHNLGRVYYEPIKDRHGNILIVTIREVEMLYSFFNGKWMQISKLQSQRKSLSTPEEPTALDILLITIQDILSYHKRSHQRLFPGLYLGYLKLCSSVDQIKVLVTQKLPNILCHVKIRENNNISREEWEWIQKLSGSESMESVDHTSDCPMQLFFYELQMAVKALLQQINIPLHQARNFRLYTQEVLEMGHNVSFLLLLPASDDVCTAPGQNNPYTPHSGFLNLPLQMFELVHFCSYREKFISLYCRLSAVVELDSLNTQQSLREAISDSEVAAAKQRHQQVLDFIQQIDEVWREMRWIMDALQYARYKQPVSGLPITKLIDPSDEQSLKKINSTSSSHIDCLPSPPPSPEMHRRKTVSDSQPCSDEEACSEVFLPTNSDYDSSDALSPRDLDLVYLSSHDIAQQTLSGLSGSAPDVLQVHDVKTPLGPGQDPQGEGPNPDHSCAEFLHSLTLTGFTPKNHAKTVSGGRPPLGFLGKRKPGKHPHYGGFSRHHRWLRIHSETQSLSLSEGIYTQHLSQACGLAQEPKEAKRAGPALDDPRGLTLAHAASLPEERNSSLQDARPSVRRLYVEPYAAAVVAQDEKPWASLSPPSGGRITLPSPTGPDVSQEGPTASPMSEILSSML

SEQ ID NO: 76816 - protein, 143 aa, Homo sapiens
AIKPQVQPWINSFFSVSHNIEEASLSPVIYDSLTGLMTSLVAVELEKVVLKSTFNRLGGLQFDKELRSLIAYLTTVTTWTIRDKFARLSQMATILNLERVTEILDYWGPNSGPLTWRLTPAEVRQVLALRIDFRSEDIKRLRL

SEQ ID NO: 76817 - protein, 148 aa, Homo sapiens
  MOD_RES (1)..(1): Any amino acid
XSFVNNTQGDEENGFSDRTSKSHGERRPSKYKYKSKTLFSKAKSYYRRTHSDASDDEAFTTSKTKRKGRHRGSEEDPLLSPVETWKGGIDNPAITSDQELDDKKMKKKTHKVKEDKKGYVPKDSTVSAGIKLTKTIFKSSLIKIIISI

SEQ ID NO: 76818 - protein, 150 aa, Homo sapiens
MNRSQEVTRDEESTRSEEVTREEMAAAGLTVTVTHSECRAPGNEKHDLHVTSQQGSSEPVVQDLAQVVEEVIGVPQSFQKLIFKGKSLKEMETPLSALGIQDGCRVMLIGKKNSPQEEVELKKLKHLEKSVEKIADQLEELNKELTGIQQ

SEQ ID NO: 76819 - protein, 116 aa, Homo sapiens
MESAIAEGGASRFSASSGGGGSRGAPQHYPKTAGNSEFLGKTPGQNAQKWIPARSTRRDDNSAANNSANEKERHDAIFRKVRGILNKLTPEKFDKLCLELLNVGVESKLILKGVIL

SEQ ID NO: 76820 - protein, 345 aa, Homo sapiens
MAAAFEASGALAAVATAMPAEHVAVQVPAPEPTPGPVRILRTAQDLSSPRTRTGDVLLAEPADFESLLLSRPVLEGLRAAGFERPSPVQLKAIPLGRCGLDLIVQAKSGTGKTCVFSTIALDSLVLENLSTQILILAPTREIAVQIHSVITAIGIKMEGLECHVFIGGTPLSQDKTRLKKCHIAVGSPGRIKQLIELDYLNPGSIRLFILDEADKLLEEGSFQEQINWIYSSLPASKQMLAVSATYPEFLANALTKYMRDPTFVRLNSSDPSLIGLKQYYKVVNSYPLAHKVFEEKTQHLQELFSRIPFNQALVFSNLHSRAQHLADILSSKGFPAECISDFSWD

SEQ ID NO: 76821 - protein, 147 aa, Homo sapiens
MAEGNHRKKPLKVLESLGKDFLTGVLDNLVEQNVLNWKEEEKKKYYDAKTEDKVRVMADSMQEKQRMAGQMLLQTFFNIDQISPNKKAHPNMEAGPPESGESTDALKLCPHEEFLRLCKERAEEIYPIKERNNRTRLALIICNTEFD

SEQ ID NO: 76822 - protein, 275 aa, Homo sapiens
MGCGLNKLEKRDEKRPGNIYSTLKRPQVETKIDVSYEYRFLEFTTLSAAELPGSSAVRLASLRDLPAQLLELYQQGFSLAALHPFVQPTHEREKTPLEHIFRAILIKKTDRSQKTDLHNEGYILELDCCSSLDHPTDQKLIPEFIKKIQEAASQGLKFVGVIPQYHSSVNSAGSSAPVSTANSTEDARDAKNARGDHASLENEKPGTGDVCSAPAGRNQSPEPSSGPRGEVPLAKQPSSPSGEGDGGELSPQGVSKTLDGPESNPLEVHEEPLSG

SEQ ID NO: 76823 - protein, 154 aa, Homo sapiens
MNPQTVLLLRVIAAFCFLGILCSLSAFLLDVFGPKHPALKITRRYAFAHILTVLQCATVIGFSYWASELILAQQQQHKKYHGSQVYVTFAVSFYLVAGAGGASILATAANLLRHYPTEEEEQALELLSEMEENEPYPAEYEVINQFQPPPAYTP

SEQ ID NO: 76824 - protein, 175 aa, Homo sapiens
MERLVARGTFPVLVRTSACRSLFGPVDHEELSRELQARLAELNAEDQNRWDYDFQQDMPLRGPGRLQWTEVDSDSVPAFYRETVQISSPSARDQRLRSRRAMSPRRVPLQAPPLAWARWSRPRARGCGEPKPKEPRGNLPGQRTLEGRWASAGTVHVAATGGGCRRAAFGFVFKF

SEQ ID NO: 76825 - protein, 63 aa, Homo sapiens
MGCIGSRTVGNEVIAVDWKGLKDVDQINMDSTSSLHGSSLHRPSTEQTRTDFSWDGINGSHGA

SEQ ID NO: 76826 - protein, 435 aa, Homo sapiens
MTQKGSMKPVKKKKTEEPELEPLCCCEYIDRNGEKNHVATCLCDCQDLDEGCDRWITCKSLQPETCERIMDTISDRLRIPWLRGAKKVNISIIPPLVLLPVFLHVASWHFLLGVVVLTSLPVLALWYYYLTHRRKEQTLFFLSLGLFSLGYMYYVFLQEVVPKGRVGPVQLAVLTCGLFLILLALHRAKKNPGYLSNPASGDRSLSSSQLECLSRKGQEKTKGFPGADMSGSLNNRTTKDDPKGSSKMPAGSPTKAKEDWCAKCQLVRPARAWHCRICGICVRRMDHHCVWINSCVGESNHQAFILALLIFLLTSVYGITLTLDTICRDRSVFTALFYCPGVYANYSSALSFTCVWYSVIITAGMAYIFLIQLINISYNVTEREVQQALRQKTGRRLLCGLIVDTGQYNRGFLRNWHQFSTLGTRAFHHPAEDIV

SEQ ID NO: 76827 - protein, 143 aa, Homo sapiens
  MOD_RES (1)..(1): Any amino acid
XDHFPLEKRSEVVILFSAHSLPMSVVNRGDPYPQEVSATVQKVMERLEYCNPYRLVWQSKVGPMPWLGPQTDESIKGLCERGRKNILLVPIAFTSDHIETLYELDIEYSQVLAKECGVENIRRAESLNGNPLFSKVSTVLQSF

SEQ ID NO: 76828 - protein, 194 aa, Homo sapiens
VFTGIFAAEMVLKLIAMDPYEYFQVGWNIFDSLIVTLSLVELFLADVEGLSVLRSFRLLRVFKLAKSWPTLNMLIKIIGNSVGALGNLTLVLAIIVFIFAVVGMQLFGKSYKECVCKINDDCTLPRWHMNDFFHSFLIVFRVLCGEWIETMWDCMEVAGQAMCLIVYMMVMVIGNLVVCNQMFMHFNFSVEIIL

SEQ ID NO: 76829 - protein, 156 aa, Homo sapiens
MSVNMDELKHQVMINQFVLTAGCAADQAKQLLQAAHWQFEMCTPANTPATPPNFPDALTMFSRLKASESFHSGGSGSPMAATATSPPPHFPHAATSSSAASSWPTAASPPGGPQHHQPQPPLWTPTPPSPASDWPPLAPQQATSEPRAHPAMEAER

SEQ ID NO: 76830 - protein, 1336 aa, Homo sapiens
MELMFAEWEDGERFSFEDSDRFEEDSLCSFISEAESLCQNWRGWRKQSAGPNSPTGGGGGGGSGGTRMRDGLVIPLVELSAKQVAFHIPFEVVEKVYPPVPEQLQLRIAFWSFPENEEDIRLYSCLANGSADEFQRGDQLFRMRAVKDPLQIGFHLSATVVPPQMVPPKGAYNVAVMFDRCRVTSCSCTCGAGAKWCTHVVALCLFRIHNASAVCLRAPVSESLSRLQRDQLQKFAQYLISELPQQILPTAQRLLDELLSSQSTAINTVCGAPDPTAGPSASDQSTWYLDESTLTDNIKKTLHKFCGPSPVVFSDVNSMYLSSTEPPAAAEWACLLRPLRGREPEGVWNLLSIVREMFKRRDSNAAPLLEILTDQCLTYEQITGWWYSVRTSASHSSASGHTGRSNGQSEVAAHACASMCDEMVTLWRLAVLDPALSPQRRRELCTQLRQWQLKVIENVKRGQHKKTLERLFPGFRPAVEACYFNWEEAYPLPGVTYSGTDRKLALCWARALPSRPGASRSGGLEESRDRPRPLPTEPAVRPKEPGTKRKGLGEGVPSSQRGPRRLSAEGGDKALHKMGPGGGKAKALGGAGSGSKGSAGGGSKRRLSSEDSSLEPDLAEMSLDDSSLALGAEASTFGGFPESPPPCPLHGGSRGPSTFLPEPPDTYEEDGGVYFSEGPEPPTASVGPPGLLPGDVCTQDDLPSTDESGNGLPKTKEAAPAVGEEDDDYQAYYLNAQDGAGGEEEKAEGGAGEEHDLFAGLKPLEQESRMEVLFACAEALHAHGYSSEASRLTVELAQDLLANPPDLKGKKNKVSTSRQTWVATNTLSKAAFLLTVLSERPEHHNLAFRVGMFALELQRPPASTKALEVKLAYQESEVAALLKKIPLGPSEMSTMRCRAEELREGTLCDYRPVLPLMLASFIFDVLCAPVVSPTGSRPPSRNWNSETPGDEELGFEAAVAALGMKTTVSEAEHPLLCEGTRREKGDLALALMITYKDDQAKLKKILDKLLDRESQTHKPQTLSSFYSSSRPTTASQRSPSKHGGPSAPGALQPLTSGSAGPAQPGSVAGAGPGPTEGFTEKNVPESSPHSPCEGLPSEAALTPRPEGKVPSRLALGSRGGYNGRGWGSPGRPKKKHTGMASIDSSAPETTSDSSPTLSRRPLRGGWAPTSWGRGQDSDSISSSSSDSLGSSSSSGSRRASASGGARAKTVEVGRSVQGPPPRESCPSCTQSAIRGSCTLLLRAGEDSADQGRGQQQHFHFHTSIFLRGPPGSSPQPAPLRLRDWALCPWPAQLCFSQLALTYLFFPRFLDYRPGHGDRQRSPDYTGRMLGWAPDTP

SEQ ID NO: 76831 - protein, 7 aa, Homo sapiens
MENTGEQ

SEQ ID NO: 76832 - protein, 153 aa, Homo sapiens
MPKKKTGARKKAENRREREKQLRASRSTIDLAKHPCNASMECDKCQRRQKNRAFCYFCNSVQKLPICAQCGKTKCMMKSSDCVIKHAGVYSTGLAMVGAICDFCEAWVCHGRKCLSTHACACPLTDAECVECERGVWDHGGRIFSCSFCHNFL

SEQ ID NO: 76833 - protein, 194 aa, Homo sapiens
MLSSTLRVAVVCVSNVNRSMEAHSILRRKGLSVRSFGTESHVRLPGPRPNRPVVYDFATTYKEMYNDLLRKDRERYTRNGILHILGRNERIKPGPERFQECTDFFDVIFTCEESVYDTVVEDLCSREQQTFQPVHVINMEIQDTLEDATLGAFLICEICQCLQQSDDMEDNLEELLLQMEEKAGKSFLHTVCFY

SEQ ID NO: 76834 - protein, 2284 aa, Homo sapiens
MAAEEGVASAASAGGSWGTAAMGRVLPMLLVPVPAEAMGQLGSRAQLRTQPEALGSLTAAGSLQVLSLTPGSRGGGRCCLEGPFWHFLWEDSRNSSTPTEKPKLLALGENYELLIYEFNLKDGRCDATILYSCSREALQKLIDDQDISISLLSLRILSFHNNTSLLFINKCVILHIIFPERDAAIRVLNCFTLPLPAQAVDMIIDTQLCRGILFVLSSLGWIYIFDVVDGTYVAHVDLALHKEDMCNEQQQEPAKISSFTSLKVSQDLDVAVIVSSSNSAVALNLNLYFRQHPGHLLCERILEDLPIQGPKGVDEDDPVNSAYNMKLAKFSFQIDRSWKAQLSSLNETIKNSKLEVSCCAPWFQDILHLESPESGNHSTSVQSWAFIPQDIMHGQYNVLQKDHAKTSDPGRSWKIMHISEQEEPIELKCVSVTGFTALFTWEVERMGYTITLWDLETQGMQCFSLGTKCIPVDSSGDQQLCFVLTENGLSLILFGLTQEEFLNRLMIHGSASTVDTLCHLNGWGRCSIPIHALEAGIENRQLDTVNFFLKSKENLFNPSSKSSVSDQFDHLSSHLYLRNVEELIPALDLLCSAIRESYSEPQSKHFSEQLLNLTLSFLNNQIKELFIHTEELDEHLQKGVNILTSYINELRTFMIKFPWKLTDAIDEYDVHENVPKVKESNIWKKLSFEEVIASAILNNKIPEAQTFFRIDSHSAQKLEELIGIGLNLVFDNLKKNNIKEASELLKNMGFDVKGQLLKICFYTTNKNIRDFLVEILKEKNYFSEKEKRTIDFVHQVEKLYLGHFQENMQIQSFPRYWIKEQDFFKHKSVLDSFLKYDCKDEFNKQDHRIVLNWALWWDQLTQESILLPRISPEEYKSYSPEALWRYLTARHDWLNIILWIGEFQTQHSYASLQQNKWPLLTVDVINQNTSCNNYMRNEILDKLARNGVFLASELEDFECFLLRLSRIGGVIQDTLPVQNYKTKEGWDFHSQFILYCLEHSLQHLLYVYLDCYKLSPENCPFLEKKELHEAHPWFEFLVQCRQVASNLTDPKLIFQASLANAQILIPTNQASVSSMLLEGHTLLALATTMYSPGGVSQVVQNEENENCLKKVDPQLLKMALTPYPKLKTALFPQCTPPSVLPSDITIYHLIQSLSPFDPSRLFGWQSANTLAIGDAWSHLPHFSSPDLVNKYAIVERLNFAYYLHNGRPSFAFGTFLVQELIKSKTPKQLIQQVGNEAYVIGLSSFHIPSIGAACVCFLELLGLDSLKLRVDMKVANIILSYKCRNEDAQYSFIRESVAEKLSKLADGEKTTTEELLVLLEEGTWNSIQQQEIKRLSSESSSQWALVVQFCRLHNMKLSISYLRECAKANDWLQFIIHSQLHNYHPAEVKSLIQYFSPVIQDHLRLAFENLPSVPTSKMDSDQVCNKCPQELQGSKQEMTDLFEILLQCSEEPDSWHWLLVEAVKQQAPILSVLASCLQGASAISCLCVWIITSVEDNVATEAMGHIQDSTEDHTWNLEDLSVIWRTLLTRQKSKTLIRGFQLFFKDSPLLLVMEMYELCMFFRNYKEAEAKLLEFQKSLETLNTAATKVHPVIPAMWLEDQVCFLLKLMLQQCKTQYELGKLLQLFVEREHLFSDGPDVKKLCILCQILKDTSIAINHTIITSYSIENLQHECRSILERLQTDGQFALARRVAELAELPVDNLVIKEITQEMQTLKHIEQWSLKQARIDFWKKCHENFKKNSISSKAASSFFSTQAHVACEHPTGWSSMEERHLLLTLAGHWLAQEDVVPLDKLEELEKQIWLCRITQHTLGRNQEETEPRFSRQISTSGELSFDSLASEFSFSKLAALNTSKYLELNSLPSKETCENRLDWKEQESLNFLIGRLLDDGCVHEASRVCRYFHFYNPDVALVLHCRALASGEASMEDLHPEIHALLQSAELLEEEAPDIPLRRVHSTTELLILAHHCFTLTCHMEGIIRVLQAAHMLTDNHLAPSEEYGLVVRLLTGIGRYNEMTYIFDLLHKKHYFEVLMRKKLDPSGTLKTALLDYIKRCRPGDSEKHNMIALCFSMCREIGENHEAAARIQLKLIESQPWEDSLKDGHQLKQLLLKALTLMLDAAESYAKDSCVRQAQHCQRLTKLITLQIHFLNTGQNTMLINLGRHKLMDCILALPRFYQASIVAEAYDFVPDWAEILYQQVILKGDFNYLEEFKQQRLLKSSIFEEISKKYKQHQPTDMVMENLKKLLTYCEDVYLYYKLAYEHKFYEIVNVLLKDPQTGCCLKDMLAG

SEQ ID NO: 76835 - protein, 88 aa, Homo sapiens
GCYLAPKRYRILLVTVLWTLLVYSMLSHKEFRFIYPVLPFCMVFCGYSLTHLKTWKKPALSFLFLSNLFLALYTGLVHQRAMFTAHFP

SEQ ID NO: 76836 - protein, 13 aa, Homo sapiens
MAEAALVITPQLD

SEQ ID NO: 76837 - protein, 122 aa, Homo sapiens
MGLLECCARCLVGAPFASLVATGLCFFGVALFCGCGHEALTGTEKLIETYFSKNYQDYEYLINVIHAFQYVIYGTASFFFLYGALLLAEGFYTTGAVRQIFGDYKTTICGKGLSATVTGGQK

SEQ ID NO: 76838 - protein, 414 aa, Homo sapiens
LLDASEKLKLTYEEKCEIEESQLKFLRNDLAEYQRTCEDLKEQLKHKEFLLAANTCNRVGGLCLKCAQHEAVLSQTHTNVHMQTIERLVKERDDLMSALVSVRSSLADTQQREASAYEQVKQVLQISEEANFEKTKALIQCDQLRKELERQAERLEKELASQQEKRAIEKDMMKKEITKEREYMGSKMLILSQNIAQLEAQVEKVTKEKISAINQLEEIQSQLASREMDVTKVCGEMRYQLNKTNMEKDEAEKEHREFRAKTNRDLEIKDQEIEKLRIELDESKQHLEQEQQKAALAREECLRLTELLGESEHQLHLTRSEIAQLSQEKRYTYDKLGKLQRRNEELEEQCVQHGRVHETMKQRLRQLDKHSQATAQQLVQLLSKQNQLLLERQSLSEEVDRLRTQLPSMPQSDC

SEQ ID NO: 76839 - protein, 237 aa, Homo sapiens
  MOD_RES (1)..(1): Any amino acid
XQRTHTGEKPYECTECDKAFRWKSQLNAHQKAHTGEKSYICRDCGKGFIQKGNLIVHQRIHTGEKPYICNECGKGFIQKGNLLIHRRTHTGEKPYVCNECGKGFSQKTCLISHQRFHTGKTPFVCTECGKSCSHKSGLINHQRIHTGEKPYTCSDCGKAFRDKSCLNRHRRTHTGERPYGCSDCGKAFSHLSCLVYHKGMLHAREKCVTTHCMQLHVGIGPHRDRSRIWPQDNSRLD

SEQ ID NO: 76840 - protein, 39 aa, Homo sapiens
MHRSEPFLKMSLLILLFLGLAEACTPREDDDLQKGDKVS

SEQ ID NO: 76841 - protein, 136 aa, Homo sapiens
MTLTERLREKISRAFYNHGLLCASYPIPIILFTGFCILACCYPLLKLPLPGTGPVEFTTPVKDYSPPPVDSDRKQGEPTEQPEWYVGAPVAYVQQIFVKSSVFPWHKNLLAVDVFRSPLSRAFQLVEEIRNHVLRD

SEQ ID NO: 76842 - protein, 140 aa, Homo sapiens
MASDSIFESFPSYPQCFMRDASTSRRFTPPSTALSPGKMSEALPLGAPDAGAALAGKLRSGDRSMVEVLADHPGELVRTDSPNFLCSVLPTHWRCNKTLPIAFKVVALGDVPDGTLVTVMAGNDENYSAELRNATAAMKN

SEQ ID NO: 76843 - protein, 532 aa, Homo sapiens
MRSERPMVWCCLFVRSQRKRKQSTQDEDAVSLCSLDISEPSNKRVKPLSRVTSLANLIPPVKATPLKRFSQTLQRSISFRSESRPDILAPRPWSRNAAPSSTKRRDSKLWSETFDVCVNQMLTSKEIKRQEAIFELSQGEEDLIEDLKLAKKAYHDPMLKLSIMTEQELNQIFGTLDSLIPLHEELLSQLRDVRKPDGSTEHVGPILVGWLPCLSSYDSYCSNQVAAKALLDHKKQDHRVQDFLQRCLESPFSRKLDLWNFLDIPRSRLVKYPLLLREILRHTPNDNPDQQHLEEAINIIQGIVAEINTKTGESECRYYKERLLYLEEGQKDSLIDSSRVLCCHGELKNNRGVKLHVFLFQEVLVITRAVTHNEQLCYQLYRQPIPVKDLLLEDLQDGEVRLGGSLRGAFSNNERIKNFFRVSFKNGSQSQTHSLQANDTFNKQQWLNCIRQAKETVLCAAGQAGVLDSEGSFLNPTTGSRELQGETKLEQMDQSDSESDCSMDTSEVSLDCERMEQTDSSCGNSRHGESNV

SEQ ID NO: 76844 - protein, 412 aa, Homo sapiens
  MOD_RES (1)..(1): Any amino acid
XHSLSGPEVHGVIDEMDRRAKSEAPAISSAIDRGDTETTMPSISSDRAALCAGCGGKISDRYYLLAVDKQWHMRCLKCCECKLNLESELTCFSKDGSIYCKEDYYSPSLHGPYRRFSVQRCARCHLGISASEMVMRARDLVYHLNCFTCTTCNKMLTTGDHFGMKDSLVYCRLHFEALLQGEYPAHFNHADVAAAAAAAAAAKSAGLGAAGANPLGLPYYNGVGTVQKGRPRKRKSPGPGADLAAYNAALSCNENDAEHLDRDQPYPSSQKTKRMRTSFKHHQLRTMKSYFAINHNPDAKDLKQLAQKTGLTKRVLQVWFQNARAKFRRNLLRQENTGVDKSTDAALQTGTPSGPASELSNASLSPSSTPTTLTDLTSPTLPTVTSVLTSVPGNLEGHEPHSPSQTTLTNLF

SEQ ID NO: 76845 - protein, 82 aa, Homo sapiens
MVQKKPAELQGFHRSFKGQNPFELAFSLDQPDHGDSDFGLQCSARPDMPASQPIDIPDAKKRGKKKKRGRATDSFSGRFEDH

SEQ ID NO: 76846 - protein, 1256 aa, Homo sapiens
MDREERKTINQGQEDEMEIYGYNLSRWKLAIVSLGVICSGGFLLLLLYWMPEWRVKATCVRAAIKDCEVVLLRTTDEFKMWFCAKIRVLSLETYPVSSPKSMSNKLSNGHAVCLIENPTEENRHRISKYSQTESQQIRYFTHHSVKYFWNDTIHNFDFLKGLDEGVSCTSIYEKHSAGLTKGMHAYRKLLYGVNEIAVKVPSVFKLLIKEVLNPFYIFQLFSVILWSTDEYYYYALAIVVMSIVSIVSSLYSIRKQYVMLHDMVATHSTVRVSVCRVNEEIEEIFSTDLVPGDVMVIPLNGTIMPCDAVLINGTCIVNESMLTGESVPVTKTNLPNPSVDVKGIGDELYNPETHKRHTLFCGTTVIQTRFYTGELVKAIVVRTGFSTSKGQLVRSILYPKPTDFKLYRDAYLFLLCLVAVAGIGFIYTIINSILNEVQVGVIIIESLDIITITVPPALPAAMTAGIVYAQRRLKKIGIFCISPQRINICGQLNLVCFDKTGTLTEDGLDLWGIQRVENARFLSPEENVCNEMLVKSQFVACMATCHSLTKIEGVLSGDPLDLKMFEAIGWILEEATEEETALHNRIMPTVVRPPKQLLPESTPAGNQEMELFELPATYEIGIVRQFPFSSALQRMSVVARVLGDRKMDAYMKGAPEAIAGLCKPETVPVDFQNVLEDFTKQGFRVIALAHRKLESKLTWHKVQNISRDAIENNMDFMGLIIMQNKLKQETPAVLEDLHKANIRTVMVTGDSMLTAVSVARDCGMILPQDKVIIAEALPPKDGKVAKINWHYADSLTQCSHPSAIDPEAIPVKLVHDSLEDLQMTRYHFAMNGKSFSVILEHFQDLVPKLMLHGTVFARMAPDQKTQLIEALQNVDYFVGMCGDGANDCGALKRAHGGISLSELEASVASPFTSKTPSISCVPNLIREGRAALITSFCVFKFMALYSIIQYFSVTLLYSILSNLGDFQFLFIDLAIILVVVFTMSLNPAWKELVAQRPPSGLISGALLFSVLSQIIICIGFQSLGFFWVKQQPWYEVWHPKSDACNTTGSGFWNSSHVDNETELDEHNIQNYENTTVFFISSFQYLIVAIAFSKGKPFRQPCYKNYFFVFSVIFLYIFILFIMLYPVASVDQVLQIVCVPYQWRVTMLIIVLVNAFVSITVENFFLDMVLWKVVFNRDKQGEYRFSTTQPPQESVDRWGKCCLPWALGCRKKTPKAKYMYLAQELLVDPEWPPKPQTTTEAKALVKENGSCQIITIT

SEQ ID NO: 76847 - protein, 203 aa, Homo sapiens
MGEIEQRPTPGSRLGAPENSGISTLERGQKPPPTPSGKLVSIKIQMLDDTQEAFEVPQRAPGKVLLDAVCNHLNLVEGDYFGLEFPDHKKITVWLDLLKPIVKQIRRPKHVVVKFVVKFFPPDHTQLQEELTRYLFALQVKQDLAQGRLTCNDTSAALLISHIVQSEIGDFDEALDREHLAKNKYIPQQDALEDKIVEFHHNH

SEQ ID NO: 76848 - protein, 71 aa, Homo sapiens
MATAGGGSGADPGSRGLLRLLSFCVLLAGLFLDFEPDPLPLCPDVSFFPQPQPPTPQSKGTGVKVSFLPRV

SEQ ID NO: 76849 - protein, 131 aa, Homo sapiens
  MOD_RES (1)..(1): Any amino acid
XGWKCARCDLRENLWLNLTDGSVLCGKWFFDSSGGNGHALEHYRDMGYPLAVKLGTITPDGAGCPTGKSSGTITCMDLSSPMITMPCSGMPSEGPARGCYVYSFQEEEPVLDPHLAKHLAHFGIDMLHMHG

SEQ ID NO: 76850 - protein, 326 aa, Homo sapiens
MQGARAPRDQGRSPGRMSALGRSSVILLTYVLAATELTCLFMQFSIVPYLSRKLGLDSIAFGYLQTTFGVLQLLGGPVFGRIQCPAILAALATLLGAVLSFTCIPASTKGAKTDAQAPLPGGPRASVFDLKAIASLLRLPDVPRIFLVKVASNCPTGLFMVMFSIISMDFFQLEAAQAGYLMSFFGLLQMVTQGLVIGQLSSHFSEEVLLRASVLVFIVVGLAMAWMSSVFHFCLLVPGLVFSLCTLNVVTDSMLIKAVSTSDTGTMLGLCASVQPLLRTLGPTVGGLLYRSFGVPVFGHVQVAINTLVLLVLWRKPMPQRKDKVR

SEQ ID NO: 76851 - protein, 175 aa, Homo sapiens
GQTFGSGKLHASTGWSSMSPGLVVLRWAPAPPKAEAKAKALKAKKAVLKGVHSHKKKKIRTSPTFRRPKTLRLRRQPKYPRKSAPRRNKLDHYAIIKFPLTTESAMKKIEDNNTLVFIVDVKANKHQIKQAVKKLYDIDVAKVNTLIRPDGEKKAYVRLAPDYDALDVANKIGII

SEQ ID NO: 76852 - protein, 132 aa, Homo sapiens
MERPHPPSTLWGHENPFSDLPSGTLNFHPVWTSRTCSRPPFCLSQIVQLKAINVDLQSDAALQVDISDALSERDKVKFTVHTKSSLPNFKQNEFSVVRQHEEFIWLHDSFVENEDYAGYIIPPAPPRPDFDA

SEQ ID NO: 76853 - protein, 286 aa, Homo sapiens
MKLLENSSFEAINSQLTVETGDAHIIGRIESYSCKMAGDDKHMFKQFCQEGQPHVLEALSPPQTSGLSPSRLSKSQGGEEEGPLSDKCSRKTLFYLIATLNESFRPDYDFSTARSHEFSREPSLSWVVNAVNCSLFSAVREDFKDLKPQLWNAVDEEICLAECDIYRWAGIPADGLQASRFVGHLAPHTTCHPILPSYNPDLDSDPFGEDGSLWSFNYFFYNKRLKRIVFFSCRSISGSTYTPSEAGNELDMELGEEEVEEESRSGGSGAEETSTMEEDRVPVICI

SEQ ID NO: 76854 - protein, 14 aa, Homo sapiens
MADSVKTFLQDLAR

SEQ ID NO: 76855 - protein, 537 aa, Homo sapiens
  MOD_RES (1)..(1): Any amino acid
XAREQINQQTAYIDGSNVYGSSERESQALRDPSVPRGLLKTGFPWPPSGKPLLPFSTGPPTECARQEQESPCFLAGDHRANEHLALAAMHTLWFREHNRMATELSALNPHWEGNTVYQEARKIVGAELQHITYSHWLPKVLGDPGTRMLRGYRGYNPNVNAGIINSFATAAFRFGHTLINPILYRLNATLGEISEGHLPFHKALFSPSRIIKEGGIDPVLRGLFGVAAKWRAPSYLLSPELTQRLFSAAYSAAVDSAATIIQRGRDHGIPPYVDFRVFCNLTSVKNFEDLQNEIKDSEIRQKLRKFWYENPGVFTPAQLTQLKQASLSRVLCDNGDSIQQVQADVFVKAEYPQDYLNCSEIPKVDLRVWQDCCADCRSRGQFRAVTQESQKKRSAQYSYPVDKDMELSHLRSRQQDKIYVGEDARNVTVLAKTKFSQDFSTFAAEIQETITALREQINKLEARLRQAGCTDVRGVPRKAEERWMKEDCTHCICESGQVTCVVEICPPAPCPSPELVKGTCCPVCRDRGMPSDSPEKR

SEQ ID NO: 76856 - protein, 65 aa, Homo sapiens
MSVAGLKKQFHKASQLFSEKISGAEGTKLDDEFLDMERKIDVTNKVVAEILSKTTEYLQPNPELS

SEQ ID NO: 76857 - protein, 72 aa, Homo sapiens
  MOD_RES (1)..(1): Any amino acid
XKSEVRAKFKFSILNAKGEETKAMESQRAYRFVQGKDWGFKKFIRRDFLLDEANGLLPDDKLTLFCEILIKS

SEQ ID NO: 76858 - protein, 100 aa, Homo sapiens
MDSSTAMNQCSCRGMEENKERPKRQRQNNFPMFPSPKAWNFRGRKRKQSTQDEDAVSLCSLDISEPSNKRVKPLSRVTSLANLIPPVKATPLKRFSQTLQ

SEQ ID NO: 76859 - protein, 175 aa, Homo sapiens
MMLQHPGQVSASEVSASAIVPCLSPPGSLVFEDFANLTPFVKEELRFAIQNKHLCHRMSSALESVTVSDRPLGVSITKAEVAPEEDERKKRRRERNKIAAAKCRNKKKEKTECLQKESEKLESVNAELKAQIEELKNEKQHLIYMLNLHRPTCIVRAQNGRTPEDERNLFIQQIK

SEQ ID NO: 76860 - protein, 84 aa, Homo sapiens
MADTDLFMECEEEELEPWQKISDVIEDSVVEDYNSVDKTTTAGNPLVQQGGQPLILTQNPAPGLGTMVTQPVLRPVQVMQNANH

SEQ ID NO: 76861 - protein, 551 aa, Homo sapiens
FQVPLTFSDVAIDFSQEEWEYLNSDQRDLYRDVMLENYTNLVSLDFNFTTESNKLSSEKRNYEVNAYHQETWKRNKTFNLMRFIFRTDPQYTIEFGRQQRPKVGCFSQMIFKKHKSLPLHKRNNTREKSYECKEYKKGFRKYLHLTEHLRDHTGVIPYECNECGKAFVVFQHFIRHRKIHTDLKPYECNGCEKAFRFYSQLIQHQIIHTGMKPYECKQCGKAFRRHSHLTEHQKIHVGLKPFECKECGETFRLYRHMCLHQKIHHGVKPYKCKECGKAFGHRSSLYQHKKIHSGEKPYKCEQCEKAFVRSYLLVEHQRSHTGEKPHECMECGKAFGKGSSLLKHKRIHSSEKLYDCKDCGKAFCRGSQLTQHQRIHTGEKPHECKECGKTFKLHSYLIQHQIIHTDLKPYECKQCGKAFSRVGDLKTHQSIHAGEKPYECKECGKTFRLNSQLIYHQTIHTGLKPYVCKECKKAFRSISGLSQHKRIHTGEKPYECKECDKAFNRSDRLTQHETIHTGVKPQKCKECGKAFSHCYQLSQHQRFHHGERLLM

SEQ ID NO: 76862 - protein, 122 aa, Homo sapiens
MATKARVMYDFAAEPGNNELTVNEGEIITITNPDVGGGWLEGRNIKGERGLVPTDYVEILPSDGKDQFSCGNSVADQAFLDSLSASTAQASSSAASNNHQPGTVAHACNPTSTLGGRGGRIT

SEQ ID NO: 76863 - protein, 197 aa, Homo sapiens
MFGLKRNAVIGLNLYCGGAGLGAGSGGATRPGGRLLATGAKDTKPMGRSGATSRKALETLRRVGDGVQRNHETAFQGMLRKLDIKNEDDVKSLSRVMIHVFSDGVTNWGRIVTLISFGAFVAKHLKTINQESCIEPLAESITDVLVRTKRDWLVKQRGWDGFVEFFHVEDLEGGIRNVLLAFAGVAGVGAGLAYLIR

SEQ ID NO: 76864 - protein, 784 aa, Homo sapiens
MKIPNIGNVMNKFEILGVVGEGAYGVVLKCRHKETHEIVAIKKFKDSEENEEVKETTLRELKMLRTLKQENIVELKEAFRRRGKLYLVFEYVEKNMLELLEEMPNGVPPEKVKSYIYQLIKAIHWCHKNDIVHRDIKPENLLISHNDVLKLCDFGFARNLSEGNNANYTEYVATRWYRSPELLLGAPYGKSVDMWSVGCILGELSDGQPLFPGESEIDQLFTIQKVLGPLPSEQMKLFYSNPRFHGLRFPAVNHPQSLERRYLGILNSVLLDLMKNLLKLDPADRYLTEQCLNHPTFQTQRLLDRSPSRSAKRKPYHVESSTLSNRNQAGKSTALQSHHRSNSKDIQNLSVGLPRADEGLPANESFLNGNLAGASLSPLHTKTYQASSQPGSTSKDLTNNNIPHLLSPKEAKSKTEFDFNIDPKPSEGPGTKYLKSNSRSQQNRHSFMESSQSKAGTLQPNEKQSRHSYIDTIPQSSRSPSYRTKAKSHGALSDSKSVSNLSEARAQIAEPSTSRYFPSSCLDLNSPTSPTPTRHSDTRTLLSPSGRNNRNEGTLDSRRTTTRHSKTMEELKLPEHMDSSHSHSLSAPHESFSYGLGYTSPFSSQQRPHRHSMYVTRDKVRAKGLDGSLSIGQGMAARANSLQLLSPQPGEQLPPEMTVARSSVKETSREGTSSFHTRQKSEGGVYHDPHSDDGTAPKENRHLYNDPVPRRVGSFYRVPSPRPDNSFHENNVSTRVSSLPSESSSGTNHSKRQPAFDPWKSPENISHSEQLKEKEKQGFFRSMK

SEQ ID NO: 76865 - protein, 370 aa, Homo sapiens
MNVTPEVKSRGMKFAEEQLLKHGWTQGKGLGRKENGITQALRVTLKQDTHGVGHDPAKEFTNHWWNELFNKTAANLVVETGQDGVQIRSLSKETTRYNHPKPNLLYQKFVKMATLTSGGEKPNKDLESCSDDDNQGSKSPKILTDEMLLQACEGRTAHKAARLGITMKAKLARLEAQEQAFLARLKGQDPGAPQLQSESKPPKKKKKKRRQKEEEEATASERNDADEKHPEHAEQNIRKSKKKKRRHQEGKVSDEREGTTKGNEKEDAAGTSGLGELNSREQTNQSLRKGKKKKRWHHEEEKMGVLEEGGKGKEAAGSVRTEEVESRAYADPCSRRKKRQQQEEEDLNLEDRGEETFRWWNQGSREQSMQ

SEQ ID NO: 76866 - protein, 64 aa, Homo sapiens
MAQETNHSQVPMLCSTGCGFYGNPRTNGMCSVCYKEHLQRQNSSNGRISPPATSVSSLSESLPV

SEQ ID NO: 76867 - protein, 299 aa, Homo sapiens
  MOD_RES (1)..(1): Any amino acid
XTGVSHRADGERGTVGINLPTGECSIFGYFVDIEQCEFIPWSDLVPNDQTLIQRGTSLLTNLQRSGGNFLKITECGECINYTATRDTTCLSFLMSLLLKNSCPVLLTGESGVGKTAAINQMLEKLEGPGAFDIKHGSILGDTLLYSEIKKSSSLKQNITILIPETHKTATGSSDNPTKKPEVRTNKKLLKNNDHKGVVVSTINFSTNVTAAKTKEMILKKLIRRTKDTLGAPKNNRILIFIDDMNMPVSDMYGAQPPLELIRQLLDLGGVYDTEKNTWKNIQDLSIVAACVPVVNDISP

SEQ ID NO: 76868 - protein, 105 aa, Homo sapiens
MSKQQPTQFINPETPGYVGFANLPNQVHRKSVKKGFEFTLMVVGESGLGKSTLINSLFLTDLYPERVIPGAAEKIERTVQIEASTVEIEERGVKLRLTVVDTPGY

SEQ ID NO: 76869 - protein, 195 aa, Homo sapiens
MRWRTILLQYCFLLITCLLTALEAVPIDIDKTKVQNIHPVESAKIEPPDTGLYYDEYLKQVIDVLETDKHFREKLQKADIEEIKSGRLSKELDLVSHHVRTKLDELKRQEVGRLRMLIKAKLDSLQDIGMDHQALLKQFDHLNHLNPDKFESTDLDMLIKAATSDLEHYDKTRHEEFKKYEMMKEHERREYLKTL

SEQ ID NO: 76870 - protein, 71 aa, Homo sapiens
  MOD_RES (1)..(1): Any amino acid
XDNCITMHENGAVKATQREDDEDEDLYDDPLPLNLLLDMVGSPDQDLQEAAAGCISNIRRLALATEKARYT

SEQ ID NO: 76871 - protein, 215 aa, Homo sapiens
MELEEGKAGSGLRQYYLSKIEELQLIVNDKSQNLRRLQAQRNELNAKVRLLREELQLLQEQGSYVGEVVRAMDKKKVLVKVHPEGKFVVDVDKNIDINDVTPNCRVALRNDSYTLHKILPNKVDPLVSLMMVEKVPDSTYEMIGGLDKQIKEIKEVIELPVKHPELFEALGIAQPKGVLLYGPPGTGKTLLARAVAHHTDCTFIRVSGSELVQKF

SEQ ID NO: 76872 - protein, 128 aa, Homo sapiens
MASSSTVPLGFHYETKYVVLSYLGLLSQEKLQEQHLSSPQGVQLDIASQSLDQEILLKVKTEIEEELKSLDKEISEDFGASGFATTNAFGIDKTWSRTFERTAAVWRDIPGGLFGRVHHSARWLGHCV

SEQ ID NO: 76873 - protein, 467 aa, Homo sapiens
  MOD_RES (1)..(1): Any amino acid
XPALEEEEAPRALSLLSLPPKKRSILGLGQARPLEFLRTCYGGSFLVHESFLYKREKAVGDKVYWTCRDHALHGCRSRAITQGQRVTVMRGHCHQPDMEGLEARRQQEKAVETLQAGQDGPGSQVDTLLRGVDSLLYRRGPGPLTLTRPRPRKRAKVEDQELPTQPEAPDEHQDMDADPGGPEFLKTPLGGSFLVYESFLYRREKAAGEKVYWTCRDQARMGCRSRAITQGRRVTVMRGHCHPPDLGGLEALRQREKRPNTAQRGSPGGPEFLKTPLGGSFLVYESFLYRREKAAGEKVYWTCRDQARMGCRSRAITQGRRVMVMRRHCHPPDLGGLEALRQREHFPNLAQWDSPDPLRPLEFLRTSLGGRFLVHESFLYRKEKAAGEKVYWMCRDQARLGCRSRAITQGHRIMVMRSHCHQPDLAGLEALRQRERLPTTAQQEDPEKIQVQLCFKTCSPESQQIYG

SEQ ID NO: 76874 - protein, 74 aa, Homo sapiens
MIPGKYRSVSGRAANNVNCGLHLVIQTSSLPEKNKVEFKLNKDTSSFPGRLLQHDLERNYSSRQDFTKNIKNVK

SEQ ID NO: 76875 - protein, 72 aa, Homo sapiens
MAPPPPPLAASTPLLHGEFGSYPARGPRFALTLTSQALHIQRLRPKPEARPRGGLVPLAEVSGCCTLRSRSP

SEQ ID NO: 76876 - protein, 43 aa, Homo sapiens
  MOD_RES (1)..(1): Any amino acid
XVEILRKFIQRVQAMKSPDHNGEDNFARDFMMELCRPGWSAVV

SEQ ID NO: 76877 - protein, 105 aa, Homo sapiens
MQKSEGSGGTQLKNRATGNYDQRTSSSTQLKHRNAVQGSKSSLSTSSPESARKLHPRPSDKLNPKTINPVHSDDEVFERGLNALVQLSVVVGPSLNDHLKHLLTS

SEQ ID NO: 76878 - protein, 24 aa, Homo sapiens
MEWRTEALASLGSLSSEDHDFDPT

SEQ ID NO: 76879 - protein, 398 aa, Homo sapiens
MAWRRREASVGARGVLALALLALALCVPGARGRALEWFSAVVNIEYVDPQTNLTVWSVSESGRFGDSSPKEGAHGLVGVPWAPGGDLEGCAPDTRFFVPEPGGRGAAPWVALVARGGCTFKDKVLVAARRNASAVVLYNEERYGNITLPMSHAGTGNIVVIMISYPKGREILELVQKGIPVTMTIGVGTRHVQEFISGQSVVFVAIAFITMMIISLAWLIFYYIQRFLYTGSQIGSQSHRKETKKVIGQLLLHTVKHGEKGIDVDAENCAVCIENFKVKDIIRILPCKHIFHRICIDPWLLDHRTCPMCKLDVIKALGYWGEPGDVQEMPAPESPPGRDPAANLSLALPDDDGSDDSSPPSASPAESEPQCDPSFKGDAGENTALLGAMCSHVMWTSI

SEQ ID NO: 76880 - protein, 551 aa, Homo sapiens
MSRSLLLWFLLFLLLLPPLPVLLADPGAPTPVNPCCYYPCQHQGICVRFGLDRYQCDCTRTGYSGPNCTIPGLWTWLRNSLRPSPSFTHFLLTHGRWFWEFVNATFIREMLMRLVLTGKKQLPDAQLLARRFLLRRKFIPDPQGTNLMFAFFAQHFTHQFFKTSGKMGPGFTKALGHGVDLGHIYGDNLERQYQLRLFKDGKLKYQVLDGEMYPPSVEEAPVLMHYPRGIPPQSQMAVGQEVFGLLPGLMLYATLWLREHNRVCDLLKAEHPTWGDEQLFQTTRLILIGETIKIVIEEYVQQLSGYFLQLKFDPELLFGVQFQYRNRIAMEFNHLYHWHPLMPDSFKVGSQEYSYEQFLFNTSMLVDYGVEALVDAFSRQIAGRIGGGRNMDHHILHVAVDVIRESREMRLQPFNEYRKRFGMKPYTSFQELVGEKEMAAELEELYGDIDALEFYPGLLLEKCHPNSIFGESMIEIGAPFSLKGLLGNPICSPEYWKPSTFGGEVGFNIVKTATLKKLVCLNTKTCPYVSFRVPDASQDDGPAVERPSTEL

SEQ ID NO: 76881 - protein, 661 aa, Homo sapiens
MSHVAVENALGLDQQFAGLDLNSSDNQSGGSTASKGRYIPPHLRNREATKGFYDKDSSGWSSSKDKDAYSSFGSRSDSRGKSSFFSDRGSGSRGRFDDRGRSDYDGIGSRGDRSGFGKFERGGNSRWCDKSDEDDWSKPLPPSERLEQELFSGGNTGINFEKYDDIPVEATGNNCPPHIESFSDVEMGEIIMGNIELTRYTRPTPVQKHAIPIIKEKRDLMACAQTGSGKTAAFLLPILSQIYSDGPGEALRAMKENGRYGRRKQYPISLVLAPTRELAVQIYEEARKFSYRSRVRPCVVYGGADIGQQIRDLERGCHLLVATPGRLVDMMERGKIGLDFCKYLVLDEADRMLDMGFEPQIRRIVEQDTMPPKGVRHTMMFSATFPKEIQMLARDFLDEYIFLAVGRVGSTSENITQKVVWVEESDKRSFLLDLLNATGKDSLTLVFVETKKGADSLEDFLYHEGYACTSIHGDRSQRDREEALHQFRSGKSPILVATAVAARGLDISNVKHVINFDLPSDIEEYVHRIGRTGRVGNLGLATSFFNERNINITKDLLDLLVEAKQEVPSWLENMAYEHHYKGSSRGRSKSRFSGGFGARDYRQSSGASSSSFSSSRASSSRSGGGGHGSSRGFGGGGYGGFYNSDGYGGNYNSQGVDWWGN

SEQ ID NO: 76882 - protein, 287 aa, Homo sapiens
MQMPSTPGFVGYNPYSHLAYNNYRLGGNPGTNSRVTASSGITIPKPPKPPDKPLMPYMRYSRKVWDQVKASNPDLKLWEIGKIIGGMWRDLTDEEKQEYLNEYEAEKIEYNESMKAYHNSPAYLAYINAKSRAEAALEEESRQRQSRMEKGEPYMSIQPAEDPDDYDDGFSMKHTATARFQRNHRLISEILSESVVPDVRSVVTTARMQVLKRQVQSLMVHQRKLEAELLQIEERHQEKKRKFLESTDSFNNELKRLCGLKVEVDMEKIAAEIAQAEEQARKRQEER

SEQ ID NO: 76883 - protein, 124 aa, Homo sapiens
MKNNIINTQQSFVTMPNVIVPDIEKEIRRMENGACSSFSEDDDSASTSEESENENPHARGSFSYKSLRKGGPSQREQYLPGAIALFNVNNSSNKDQEPEEKKKKKKEKKSKSDDKNENKNDPEK

SEQ ID NO: 76884 - protein, 153 aa, Homo sapiens
MNSLLIGELSPEQPSFEPTKNKELTDEFRELRATVERMGLMKANHVFFLLYLLHILLLDGAAWLTLWVFGTSFLPFLLCAVLLSAVQAQAGWLQHDFGHLSVFSTSKWNHLLHHFVIGHLKGAPASWWNHMHFQHHAKPNCFRKDPDINMHPF

SEQ ID NO: 76885 - protein, 43 aa, Homo sapiens
  MOD_RES (1)..(1): Any amino acid
XQLPRWWELGDPCAWTGQGRGTRRMSPATTGTFLLTVEYERDK

SEQ ID NO: 76886 - protein, 242 aa, Homo sapiens
MSKSESPKEPEQLRKLFIGGLSFETTDESLRSHFEQWGTLTDCVVMRDPNTKRSRGFGFVTYATVEEVDAAMNARPHKVDGRVVEPKRAVSREDSQRPGAHLTVKKIFVGGIKEDTEEHHLRDYFEQYGKIEVIEIMTDRGSGKKRGFAFVTFDDHDSVDKIVIQKYHTVNGHNCEVRKALSKQEMASASSSQRGRSGSGNFGGGRGGGFGGNDNFGRGGNFSGRGMYGLSTCSSDFSPSLL

SEQ ID NO: 76887 - protein, 124 aa, Homo sapiens
  MOD_RES (1)..(1): Any amino acid
XECLINISKYKFSLVISGLTTILKNVNNMRIFGEAAEKNLYLSQLIILDTLEKCLAGQPKDTMRLDETMLVKQLLPEICHFLHTCREGNQHAAELRNSASGVLFSLSCNNFNAVFSRISTRNSI

SEQ ID NO: 76888 - protein, 84 aa, Homo sapiens
MGTANIQLHGPPRVKAVKSSEHINEGETAMLVCKSESVPPVTDWAWYKITDSEDKALMNGSESRFFVSSSQGRSELHIENLNME

SEQ ID NO: 76889 - protein, 169 aa, Homo sapiens
MAPSGLKAVVGEKILSGVIRSVKKDGEWKVLIMDHPSMRILSSCCKMSDILAEGITTCPEPLFSELGRSRLAKVVKTLKEIHLAFLPYEAQVFSLDAPHSTYNLYCPFRAEERTRQLEVLAQQIATLCATLQEYPAIRYRKGPEDTAQLAHAVLAKLNAFKADTPSLGE

SEQ ID NO: 76890 - protein, 113 aa, Homo sapiens
MSSNECFKCGRSGHWARECPTGGGRGRGMRSRGRGGFQFVSSSLPDICYRCGESGHLAKDCDLQEDVLACFFSLLLKPAITAVEVATLPRTARSPRESESNAATTVANQAIWL

SEQ ID NO: 76891 - protein, 399 aa, Homo sapiens
  MOD_RES (1)..(1): Any amino acid
XFQDLLDQVGGLGRFQILQMVFLIMFNVIVYHQTQLENFAAFILDHRCWVHILDNDTIPDNDPGTLSQDALLRISIPFDSNLRPEKCRRFVHPQWKLIHLNGTFPNTSEPDTEPCVDGWVYDQSSFPSTIVTKWDLVCESQPLNSVAKFLFMAGMMVGGNLYGHLSDRFGRKFVLRWSYLQLAIVGTCAAFAPTILVYCSLRFLAGAATFSIIVNTVLLIVEWITHQFCAMALTLTLCAASIGHITLGSLAFVIRDQCILQLVMSAPCFVFFLFSRWLAESARWLIINNKPEEGLKELRKAAHRNGMKNAEDILTMEVLKSTMKQELEAAQKKHSLCELLRIPNICKRICFLSFVRSAGVCWRSTPDPVCLGITSGGCRTAKIPACSFLWKLHFRGAPA

SEQ ID NO: 76892 - protein, 84 aa, Homo sapiens
MGLPQPGLWLKRLWVLLEVAVHVVVGKVLLILFPDRVKRNILAMGEKTGPLAATRGHDARGSGPKLPGGPPLRTEVQHLGVYAR

SEQ ID NO: 76893 - protein, 40 aa, Homo sapiens
MGSSIFMLFSPLVLYDCYLYEALVITKHFFCPFLPELCKL

SEQ ID NO: 76894 - protein, 144 aa, Homo sapiens
MDPKDRKKIQFSVPAPPSQLDPRQIRRRRPTPAMLFRLSEHSSPEEEASPHQRASGEGHHLKSKRPNPCAYTPPSLKAVQRIAESHLQSISNLNENQASEEEDELGELRELGYPREEDEEEEEDDEEEEEEEDSQAEVLKVIRQ

SEQ ID NO: 76895 - protein, 214 aa, Homo sapiens
  MOD_RES (1)..(1): Any amino acid
XLDSGSTKEFFRRSKIAVFDKMWTYMRSAEPSVFVRTTAEGVARVRKSKGKYAYLLESTMNEYIEQRKPCDTMKVGGNLDSKGYGIATPKGSSLRTPVNLAVLKLSEQGVLDKLKNKWWYDKGECGAKDSGSKEKTSALSLSNVAGVFYILVGGLGLAMLVALIEFCYKSRAEAKRMKVAKNAQNINPSSSQNSQNFATYKEGYNVYGIESVKI

SEQ ID NO: 76896 - protein, 164 aa, Homo sapiens
MDFSGKDVSGVLFQYPDTEGKVEDFTELVERAHQSGSLACCATDLLALCILRPPGEFGVDIALGSSQRFGVPLGYGGPHAAFFAVRESLVRMMPGRMVGVTRDATGKEVYRLALQTREQHIRRDKATSNICTAQALLANMAAMFAIYHGSHGLEHIARRVHNAT

SEQ ID NO: 76897 - protein, 25 aa, Homo sapiens
MVIMGQCYYNETIGFFYNNSGKELS

SEQ ID NO: 76898 - protein, 1425 aa, Homo sapiens
MASGLGSPSPCSAGSEEEDMDALLNNSLPPPHPENEEDPEEDLSETETPKLKKKKKPKKPRDPKIPKSKRQKKELGDSSGEGPEFVEEEEEVALRSDSEGSDYTPGKKKKKKLGPKKEKKSKSKRKEEEEEEDDDDDSKEPKSSAQLLEDWGMEDIDHVFSEEDYRTLTNYKAFSQFVRPLIAAKNPKIAVSKMMMVLGAKWREFSTNNPFKGSSGASVAAAAAAAVAVVESMVTATEVAPPPPPVEVPIRKAKTKEGKGPNARRKPKGSPRVPDAKKPKPKKVAPLKIKLGGFGSKRKRSSSEDDDLDVESDFDDASINSYSVSDGSTSRSSRSRKKLRTTKKKKKDHQDYCEVCQQGGEIILCDTCPRAYHMVCLDPDMEKAPEGKWSCPHCEKEGIQWEAKEDNSEGEEILEEVGGDLEEEDDHHMEFCRVCKDGGELLCCDTCPSSYHIHCLNPPLPEIPNGEWLCPRCTCPALKGKVQKILIWKWGQPPSPTPVPRPPDADPNTPSPKPLEGRPERQFFVKWQGMSYWHCSWVSELQLELHCQVMFRNYQRKNDMDEPPSGDFGGDEEKSRKRKNKDPKFAEMEERFYRYGIKPEWMMIHRILNHSVDKKGHVHYLIKWRDLPYDQASWESEDVEIQDYDLFKQSYWNHRELMRGEEGRPGKKLKKVKLRKLERPPETPTVDPTVKYERQPEYLDATGGTLHPYQMEGLNWLRFSWAQGTDTILADEMGLGKTVQTAVFLYSLYKEGHSKGPFLVSAPLSTIINWEREFEMWAPDMYVVTYVGDKDSRAIIRENEFSFEDNAIRGGKKASRMKKEASVKFHVLLTSYELITIDMAILGSIDWACLIVDEAHRLKNNQSKFFRVLNGYSLQHKLLLTGTPLQNNLEELFHLLNFLTPERFHNLEGFLEEFADIAKEDQIKKLHDMLGPHMLRRLKADVFKNMPSKTELIVRVELSPMQKKYYKYILTRNFEALNARGGGNQVSLLNVVMDLKKCCNHPYLFPVAAMEAPKMPNGMYDGSALIRASGKLLLLQKMLKNLKEGGHRVLIFSQMTKMLDLLEDFLEHEGYKYERIDGGITGNMRQEAIDRFNAPGAQQFCFLLSTRAGGLGINLATADTVIIYDSDWNPHNDIQAFSRAHRIGQNKKVMIYRFVTRASVEERITQVAKKKMMLTHLVVRPGLGSKTGSMSKQELDDILKFGTEELFKDEATDGGGDNKEGEDSSVIHYDDKAIERLLDRNQDETEDTELQGMNEYLSSFKVAQYVVREEEMGEEEEVEREIIKQEESVDPDYWEKLLRHHYEQQQEDLARNLGKGKRIRKQVNYNDGSQEDRGIGRTTSPTTSPITQWLQRKVMKTLMNVQKLPVGPVVRACGMIKISHCLLCWPVLVGILKYLVLMLVSEKPFLMQLCDMVCHLRMLLLPSGL

SEQ ID NO: 76899 - protein, 120 aa, Homo sapiens
MEESPLSRAPSRGGVNFLNVARTYIPNTKVECHYTLPPGTMPSASDWIGIFKVEAACVRDYHTFVWSSVPESTTDGSPIHTSVQFQASYLPKPGAQLYQFRYVNRQGQVCGQSPPFQFRE

SEQ ID NO: 76900 - protein, 130 aa, Homo sapiens
MSSTAAFYLLSTLGGYLVTSFLLLKYPTLLHQRKKQRFLSKHISHRGGAGENLENTMAAFQHAVKIGTDMLELDCHITKDEQVVVSHDENLKRATGVNVNISDLKYCELPPYLGKLDVSFQRGFRVGEAV

SEQ ID NO: 76901 - protein, 100 aa, Homo sapiens
MSPEKSQEESPEEDTERTERKPMVKDAFKDISIYFTKEEWAEMGDWEKTRYRNVKRNYNALITIGLRATRPAFMCHRRQAIKLQVDDTEDSDEEWTPRQQ

SEQ ID NO: 76902 - protein, 174 aa, Homo sapiens; identical to SEQ ID NO: 47355

SEQ ID NO: 76903 - protein, 191 aa, Homo sapiens
VIGHYSLLLQVSGRKQLLLGQFTLLFNPWNREDAVFLKNEAQRMEYLLNQNGLIYLGTADCIQAESWDFGQLHFLKEQRVLPTPQTQATQEGALLNKRRGSVPILRQWLTGRGRPVYDGQAWVLAAVACTVLRCLGIPARVVTTFASAQGTGGRLLIDEYYNEEGLQNGEGQRGRIWIFQTSTECWMTRPA

SEQ ID NO: 76904 - protein, 40 aa, Homo sapiens
  MOD_RES (1)..(1): Any amino acid
XSISCEEATCSDTSESILEEEPQENQKKLLPLSVTPELNI

SEQ ID NO: 76905 - protein, 252 aa, Homo sapiens
MSYFKEAELKDLLLQVGRGLRYIHSMSLVHMDIKPSNIFISRTSIPNAASEEGDEDDWASNKVMFKIGDLGHVTRISSPQVEEGDSRFLANEVLQENYTHLPKADIFALALTVVCAAGAEPLPRNGDQWHEIRQGRLPRIPQVLSQEFTELLKVMIHPDPERRPSAMALVKHSVLLSASRKSAEQLRIELNAEKFKNSLLQKELKKAQMAKAAAEERALFTDRMATRSTTQSNRTSRLIGKKMNRSVSLTIY

SEQ ID NO: 76906 - protein, 105 aa, Homo sapiens
  MOD_RES (1)..(1): Any amino acid
XFQCDLTKDDLLDHVPPESVDVVMLIFVLSAVHPDKMHLVLQNIYKVLKPGKSVLFRDYGLYDHAMLRFKASSKLGENFYVRQDGTRSYFFTDGLKQKSGTWDSL

SEQ ID NO: 76907 - protein, 214 aa, Homo sapiens
MPWRNKEASSPSSANPPLEALQSPSFRGNMADKLKDPSTLGFLEAAVKISHTSPDIPAEVQMSVKEHIMRHTRLQRQTTEPASSTRHTSFKRHLPRQMHVSSVDYGNELPPAAEQPTSIGRIKPELYKQKSVDGEDAKSEATKSCGKINFSLRYDYETETLIVRILKAFDLPAKDFCGSSDPYVKIYLLPDRKCKLQTRVHRKTLNPTFDENFH

SEQ ID NO: 76908 - protein, 344 aa, Homo sapiens
MDLQTQLKEVLRENDLLRKDVEVKESKLSSSMNSIKTFWSPELKKERALRKDEASKITIWKEQYRVVQEENQHMQMTIQALQDELRIQRDLNQLFQQDSSSRTGEPCVAELTEENFQRLHAEHERQAKELFLLRKTLEEMELRIETQKQTLNARDESIKKLLEMLQSKGLSAKATEEDHERTRRLAEAEMHVHHLESLLEQKEKENSMLREEMHRRFENAPDSAKTKALQTVIEMKDSKISSMERGLRDLEEEIQMLKSNGALSTEEREEEMKQMEVYRSHSKFMKNKIGQVKQELSRKDTELLALQTKLETLTNQFSDSKQHIEVLKESLTAKEQRAAILQTE

SEQ ID NO: 76909 - protein, 148 aa, Homo sapiens
  MOD_RES (1)..(1): Any amino acid
XENRLGTDESKFNAVLCSRSRAHLVAVFNEYQRMTGRDIEKSICREMSGDLEEGMLAVVKCLKNTPAFFAERLNKAMRGAGTKDRTLIRIMVSRSETDLLDIRSEYKRMYGKSLYHDISSISCMPASYGHLEEATCLALKLLRVEGND

SEQ ID NO: 76910 - protein, 482 aa, Homo sapiens
MYKMNICNKPSNKTAPEKSVWTAPAQPSGPSPELQGQRSRRNGWSWPPHPLQIVAWLLYLFFAVIGFGILVPLLPHHWVPAGYACMGAIFAGHLVVHLTAVSIDPADANVRDKSYAGPLPIFNRSQHAHVIEDLHCNLCNVDVSARSKHCSACNKCVCGFDHHCKWLNNCVGERNYRLFLHSVASALLGVLLLVLVATYVFVEFFVNPMRLRTNRHFEVLKNHTDVWFVFLPAAPVETQAPAILALAALLILLGLLSTALLGHLLCFHIYLMWHKLTTYEYIVQHRPPQEAKGVHRELESCPPKMRPIQEMEFYMRTFRHMRPEPPGQAGPAAVNANPSQFLATRGQAEPPPPSSPDTLALPPRIRPQKKRKRRVYKVRTSETSDPASGPRAPSRRSSSSTDSADASPVHAAGPAGAYHSASAESVDEIPVAQTRLGSAALAAPRGRGRQPTLARQARAPAVFVSPSSGEPRAPGGREAGLA

SEQ ID NO: 76911 - protein, 138 aa, Homo sapiens
MHSMISSVDVKSEVPVGLEPISPLDLRTDLRMMMPVVDPVVREKQLQQELLLIQQQQQIQKQLLIAEFQKQHENLTRQHQAQLQEHIKLQQELLAIKQQQELLEKEQKLEQQRQEQEVERHRREQQLPPLRGKDRGRE

SEQ ID NO: 76912 - protein, 804 aa, Homo sapiens
MGTSALWALWLLLALCWAPRESGATGTGRKAKCEPSQFQCTNGRCITLLWKCDGDEDCVDGSDEKNCVKKTCAESDFVCNNGQCVPSRWKCDGDPDCEDGSDESPEQCRNITCSPDEFTCSSGRCISRNFVCNGQDDCSDGSDELDCAPPTCGAHEFQCSTSSCIPISWVCDDDADCSDQSDESLEQCGRQPVIHTKCPASEIQCGSGECIHKKWRCDGDPDCKDGSDEVNCPSRTCRPDQFECEDGSCIHGSRQCNGIRDCVDGSDEVNCKNVNQCLGPGKFKCRSGECIDISKVCNQEQDCRDWSDEPLKECHINECLVNNGGCSHICKDLVIGYECDCAAGFELIDRKTCGDIDECQNPGICSQICINLKGGYKCECSRGYQMDLATGVCKAVGKEPSLIFTNRRDIRKIGLERKEYIQLVEQLRNTVALDADIAAQKLFWADLSQKAIFSASIDDKVGRHVKMIDNVYNPAAIAVDWVYKTIYWTDAASKTISVATLDGTKRKFLFNSDLREPASIAVDPLSGFVYWSDWGEPAKIEKAGMNGFDRRPLVTADIQWPNGITLDLIKSRLYWLDSKLHMLSSVDLNGQDRRIVLKSLEFLAHPLALTIFEDRVYWIDGENEAVYGANKFTGSELATLVNNLNDAQDIIVYHELVQPSGKNWCEEDMENGGCEYLCLPAPQINDHSPKYTCSCPSGYNVEENGRDCQRINVTTAVSEVSVPPKGTSAAWAILPLLLLVMAAVGGYLMWRNWQHKNMKSMNFDNPVYLKTTEEDLSIDIGRHSASVGHTYPAISVVSTDDDLA

SEQ ID NO: 76913 - protein, 177 aa, Homo sapiens
MNVEKAEFCNKSKQPGLARSQHNRWAGSKETCNDRRTPSTEKKVDLNADPLCERKEWNKQKLPCSENPRDTEDVPWITLNSSIQKVNEWFSRSDELLGSDDSHDGESESNAKVADVLDVLNEVDEYSGSSEKIDLLASDPHEALICKSERVHSKSVESNIEDKIFGKTYRKKASLPN

SEQ ID NO: 76914 - protein, 198 aa, Homo sapiens
MAAAMPLALLVLLLLGPGGWCLAEPPRDSLREELVITPLPSGDVAATFQFRTRWDSELQREGVSHYRLFPKALGQLISKYSLRELHLSFTQGFWRTRYWGPPFLQAPSGAELWVWFQDTVTDVDKSWKELSNVLSGIFCASLNFIDSTNTVTPTASFKPLGLANGRPLCAAEGRSLVPHQLPLPGSAYPPCLQKCTLY

SEQ ID NO: 76915 - protein, 144 aa, Homo sapiens
PERKEAAGTGKKVKVRPPPLKKTFDSVDNRVLSEVDFEERFAELPEFRPEEVLPSPTLQSLATSPRAILGSYRKKRKNSTDLDSAPEDPTSPKRKMRRRSSCSSEPNTPKSAKCEGDIFTFDRTALPCCLCPAQVQKPRTCLGS

SEQ ID NO: 76916 - protein, 741 aa, Homo sapiens
MCLFRVISFLFSHNTKTTSWLDPRLAKKAKPPEECKENELPYGWEKIDDPIYGTYYVDHINRRTQFENPVLEAKRKLQQHNMPHTELGTKPLQAPGFREKPLFTRDASQLKGTFLSTTLKKSNMGFGFTIIGGDEPDEFLQVKSVIPDGPAAQDGKMETGDVIVYINEVCVLGHTHADVVKLFQSVPIGQSVNLVLCRGYPLPFDPEDPANSMVPPLAIMERPPPVMVNGRHNYETYLEYISRTSQSVPDITDRPPHSLHSMPTDGQLDGTYPPPVHDDNVSMASSGATQAELMTLTIVKGAQGFGFTIADSPTGQRVKQILDIQGCPGLCEGDLIVEINQQNVQNLSHTEVVDILKDCPIGSETSLIIHRGGFFSPWKTPKPIMDRWENQGSPQTSLSAPAIPQNLPFPPALHRSSFPDSTEAFDPRKPDPYELYEKSRAIYESRQQVPPRTSFRMDSSGPDYKELDVHLRRMESGFGFRILGGDEPGQPILIGAVIAMGSADRDGRLHPGDELVYVDGIPVAGKTHRYVIDLMHHAARNGQVNLTVRRKVLCGGEPCPENGRSPGSVSTHHSSPRSDYATYTNSNHAAPSSNASPPEGFASHSLQTSDVVIHRKENEGFGFVIISSLNRPESGSTITVPHKIGRIIDGSPADRCAKLKVGDRILAVNGQSIINMPHADIVKLIKDAGLSVTLRIIPQEELNSPTSAPSSEKQSPMAQQSPLAQQSPLAQPSPATPNSPI

SEQ ID NO: 76917 - protein, 64 aa, Homo sapiens
MADHNPDSDSTPRTLLRRVLDTADPRTPRRPRSARAGARRALLETASPRKLSGQTRTIARGRSH

SEQ ID NO: 76918 - protein, 131 aa, Homo sapiens
MQHRGFLLLTLLALLALTSAVAKKKDKVKKGGPGSECAEWAWGPCTPSSKDCGVGFREGTCGAQTQRIRCRVPCNWKKEFGADCKYKFENWGACDGGTGTKVRQGTLKKARYNAQCQETIRVTKPCTPKTK

SEQ ID NO: 76919 - protein, 214 aa, Homo sapiens
MAVLSAPGLRGFRILGLRSSVGPAVQARGVHQSVATDGPSSTQPALPKARAVAPKPSSRGEYVVAKLDDLVNWARRSSLWPMTFGLACCAVEMMHMAAPRYDMDRFGVVFRASPRQSDVMIVAGTLTNKMAPALRKPPSRPQNAGAALRGLHGELRQRRRLLPLFLLGGEGLRPHRARGHLHPRLPTAEALLYGILQLQRKIKRERRLQIWYRR

SEQ ID NO: 76920 - protein, 184 aa, Homo sapiens
SLFLFRALGKILYCKRASLTELDSPRLPSHLSEYERDTLLVEPEEVVEMSHMPGDLFNLYLHQNYIDFFMEIDDIVRASEFLSFADILSGDWNTRSLLREYSTSIATRGVMHSNKARGYAHCQGGGSSFRPLHKPQWFLINKKYRENCLAAKALFPDFCLPALCRQTQLLPYLALLTIPMRNQD

SEQ ID NO: 76921 - protein, 79 aa, Homo sapiens
MNFADEFAKLQDYRQAEVERLEAKVVEPLKTYGTIVKMKRDDLKATLTARNREAKQLTQLERTRQRNPSDRHVISQAET

SEQ ID NO: 76922 - protein, 251 aa, Homo sapiens
MDIKGQFWNDDDSEGDNESEEFLYGVQGSCAADLYRHPQLDADIEAVKEIYSENSVSIREYGTIDDVDIDLHINISFLDEEVSTAWKVLRTEPIVLRLRFSLSQYLDGPEPSIEVFQPSNKEGFGLGLQLKKILGMFTSQQWKHLSNDFLKTQQEKRHSWFKASGTIKKFRAGLSIFSPIPKSPSFPIIQDSMLKGKLGVPELRVGRLMNRSISCTMKNPKVEVFGYPPSPQAVVTARTFPLWSMDSSFRS

SEQ ID NO: 76923 - protein, 317 aa, Homo sapiens
MSWLFPLTKSASSSAAGSPGGLTSLQQQKQRLIESLRNSHSSIAEIQKDVEYRLPFTINNLTININILLPPQFPQEKPVISVYPPIRHHLMDKQGVYVTSPLVNNFTMHSDLGKIIQSLLDEFWKNPPVLAPTSTAFPYLYSNPSGMSPYASQGFPFLPPYPPQEANRSITSLSVADTVSSSTTSHTTAKPAAPSFGVLSNLPLPIPTVDASIPTSQNGFGYKMPDVPDAFPELSELRSLYNCEHFPTVVIFKESRYIDISIGPKFTFTDSVKNILQTALCSIVVDVLFDFKVKTGSLRCICKNYLEPYQLTKAEKL

SEQ ID NO: 76924 - protein, 168 aa, Homo sapiens
MAGAPMAAAVQPAEVTVEVGEDLHMHHVRDREMPEALEFNLSANPESSTIFQRNSQTEALEFNPSANPEASTIFQRNSQTDVVEIRRSNCTNHVSAVRFSQQYSLCSTIFLDDSTAIQHYLTMTIISVTLEIPHHITQRDADRTLSIPDEQLHSFAGFTMLARMVLNS

SEQ ID NO: 76925 - protein, 139 aa, Homo sapiens
MDSKKRSSTEAEGSKERGLVHIWQAGSFPITPERLPGWGGKTVLQAALGVKHGVLLTEDGEVYSFGTLPWRSGPVEICPSSPILENALVGQYVITVATGSFHSGAVTDNGVAYMWGENSAGQCAVANQQYVPEPNPVSI

SEQ ID NO: 76926 - protein, 210 aa, Homo sapiens
MDPLFQQTHKQVHEIQSCMGRLETADKQSVHIVENEIQASIDQIFSRLERLEILSSKEPPNKRQNARLRVDQLKYDVQHLQTALRNFQHRRHAREQQERQREELLSRTFTTNDSDTTIPMDESLQFNSSLQKVHNGMDDLILDGHNILDGLRTQRLTLKGTQKKILDIANMLGLSNTVMRLIEKRAFQDKYFMIENSILLCCPGWSAIAQ

SEQ ID NO: 76927 - protein, 60 aa, Homo sapiens
  MOD_RES (1)..(1): Any amino acid
XRKLSRECEIKYTGFRDRPHEERQARFQNACRDGRSEIARRQQDPSPGSNLGGGDDLKLR

SEQ ID NO: 76928 - protein, 153 aa, Homo sapiens
HYCKEGYYRDMGKPITHRKACKACDCHPVGAAGKTCNQTTGQCPCKDGVTGITCNRCAKGYQQSRSPIAPCIKIPVAPPTTAASSVEEPEAARQPNTFQAEGLSLLPGAAEKEGARCWGYRRRLGHRVAQAECRGPRSWAWGRITSSFSFASN

SEQ ID NO: 76929 - protein, 63 aa, Homo sapiens
MSRIPLGKVLLRNVIRHTDAHNKVGDSGGIRYVENKRTGKTDGRCLPGDQKENATQQFKPDAQ

SEQ ID NO: 76930 - protein, 1515 aa, Homo sapiens
MSPADAKRGAKRRKNKRGGGGGSGGGNGGASSGKAGPAAALRGSQAAGLAAPGSAAGLVGGAAAANGPLGAGASAGGAAPGGYFETPFSFGMNHRTPPYPAGDYCLLCRSERKDSSFLESGIKTASKLALSMAPKGNSVLHLPLWVCPDCRRTVEKEERHGGLDQPVSQDFLLHSSLGGSQPEAGSGGRLALGAQTLPSDTACSCEACSERREISAEADREPQQLQNYWSEVRYTVRCIYRQAGTPLADDQDQSLVPDKEGVKELVDRLCERDPYQLYQRLEQQAREYVLEMKVRLLRQLSAAAKVKAPSGLQGPPQAHQFISLLLEEYGALCQAARSISTFLGTLENEHLKKFQVTWELHNKHLFENLVFSEPLLQSNLPALVSQIRLGTTTHDTCSEDTYSTLLQRYQRSEEELRRVAEEWLECQKRIDAYVDEQMTMKTKQRMLTEDWELFKQRRFIEEQLTNKKAVTGENNFTDTMRHMLSSRLSMPDCPNCNYRRRCACDDCSLSHILTCGIMDPPVTDDIHIHQLPLQVDPAPDYLAERSPPSVSSASSGSGSSSPITIQQHPRLILTDSGSAPTFCSDDEDVAPLSAKFADIYPLSNYDDTEVVANMNGIHSELNGGGENMALKDESPQISSTSSSSSEADDEEADGESSGEPPGAPKEDGVLGSRSPRTEESKADSPPPSYPTQQAEQAPNTCECHVCKQEASGLTPSAMTAGALPPGHQFLSPEKPTHPALHLYPHIHGHVPLHTVPHLPRPLIHPTLYATPPFTHSKALPPAPVQNHTNKHQVFNASLQDHIYPSCFGNTPEWNSSKFISLWGSEVMNDKNWNPGTFLPDTISGSEILGPTLSETRPEALPPPSSNETPAVSDSKEKKNAAKKKCLYNFQDAFMEANKVVMATSSATSSVSCTATTVQSSNSQFRVSSKRPPSVGDVFHGISKEDHRHSAPAAPRNSPTGLAPLPALSPAALSPAALSPASTPHLANLAAPSFPKTATTTPGFVDTRKSFCPAPLPPATDGSISAPPSVCSDPDCEGHRCENGVYDPQQDDGDESADEDSCSEHSSSTSTSTNQKEGKYCDCCYCEFFGHGGPPAAPTSRNYAEMREKLRLRLTKRKEEQPKKMDQISERESVVDHRRVEDLLQFINSSETKPVSSTRAAKRARHKQRKLEEKARLEAEARAREHLHLQEEQRRREEEEDEEEEEDRFKEEFQRLQELQKLRAVKKKKKERPSKDCPKLDMLTRNFQAATESVPNSGNIHNGSLEQTEEPETSSHSPSRHMNHSEPRPGLGADGDAADPVDTRDSKFLLPKEVNGKQHEPLSFFFDIMQHHKEGNGKQKLRQTSKASSEPARRPTEPPKATEGQSKPRAQTESKAKVVDLMSITEQKREERKVNSNNNNKKQLNHIKDEKSNPTPMEPTSPGEHQQNSKLVLAESPQPKGKNKKNKKKKGDRVNNSIDDVFLPKDIDLDSVDMDETEREVEYFKRFCLDSARQTRQRLSINWSNFSLKKATFAAH

SEQ ID NO: 76931 - protein, 47 aa, Homo sapiens
MNLWLLACLVAGFLGAWAPAVHTQEQALEDFSRQRTIPGPGVSPREP

SEQ ID NO: 76932 - protein, 58 aa, Homo sapiens
MLRLPTVFRQMRPVSRVLAPHLTRAYAKDVKFGADARALMLQGVDLLADAVAVTMGPK

SEQ ID NO: 76933 - protein, 131 aa, Homo sapiens
  MOD_RES (1)..(1): Any amino acid
XWLVESLRLYQDFYAFDLSGATRVLEWIDDKGVFVAGYESLKKNEILHLKLPLRLSVKENKGLFPERDFKVRHGGFSDRSIFDLKHVPHTRLLVTSGLPGCYLQVWQVAEDSATQEAEAEEFLEPERRRLQ

SEQ ID NO: 76934 - protein, 173 aa, Homo sapiens
WELGDPCAWTGQGRGTRRMSPATTGTFLLTVYSIFSKVHSDRNVYPSAGVLFVHVLEREYFKGEFPPYPKPGEISNDPITFNTNLMGYPDRPGWLRYIQRTPYSDGVLYGSPTAENVGKPTIIEITAYNRRTFETARHNLIINIMSAEAFMSWLVQMSRFLLVYEKLKIHRIN

SEQ ID NO: 76935 - protein, 111 aa, Homo sapiens
KFWPQFCEFRKNLTDENIMSVLERRQEYNKQKKKLAVLEDEKSGKDGIKQYANTSVPAIKTALLSDSFLGLQPYGRQPTWCYSKYIEALEQERILLKIQEELEKKLFAGIL

SEQ ID NO: 76936 - protein, 227 aa, Homo sapiens
MDFSVKVDIEKEVTCPICLELLTEPLSLDCGHSFCQACITAKIKESVIISRGESSCPVCQTRFQPGNLRPNRHLANIVERVKEVKMSPQEGQKRDVCEHHGKKLQIFCKEDGKVICWVCELSQEHQGHQTFRINEVVKECQEKLQVALQRLIKEDQEAEKLEDDIRQERTAWKNYIQIERQKILKGFNEMRVILDNEEQRELQKLEEGEVNVLDNLAAATDQLVQQR

SEQ ID NO: 76937 - protein, 217 aa, Homo sapiens
MTKLDSSDIYNELKETYPNYLPLYVARLHQLDAEKERMKRLNEIVDAANAVISHIDQTALAVYIAMKTDPRPDAATIKNDMDKQKSTLVDALCRKGCALADHLLHTQAQDGAISTDAEGKEEEGESPLDSLAETFWETTKWTDLFDNKVLTFAYKHALVNKMYGRGLKFATKLVEEKPTKENWKNCIQLMKLLGWTHCASFTENWLPIMYPPDYCVF

SEQ ID NO: 76938 - protein, 1066 aa, Homo sapiens
MSYNYVVTAQKPTAVNGCVTGHFTSAEDLNLLIAKNTRLEIYVVTAEGLRPVKEVGMYGKIAVMELFRPKGESKDLLFILTAKYNACILEYKQSGESIDIITRAHGNVQDPQGRHVKTYEVSLREKEFNKGPWKQENVEAEASMVIAVPEPFGGAIIIGQESITYHNGDKYLAIAPPIIKQSTIVCHNRVDPNGSRYLLGDMEGRLFMLLLEKEEQMDGTVTLKDLRVELLGETSIAECLTYLDNGVVFVGSRLGDSQLVKLNVDSNEQGSYVVAMETFTNLGPIVDMCVVDLERQGQGQLVTCSGAFKEGSLRIIRNGIGIHEHASIDLPGIKGLWPLRSDPNRETDDTLVLSFVGQTRVLMLNGEEVEETELMGFVDDQQTFFCGNVAHQQLIQITSASVRLVSQEPKALVSEWKEPQAKNISVASCNSSQVVVAVGRALYYLQIHPQELRQISHTEMEHEVACLDITPLGDSNGLSPLCAIGLWTDISARILKLPSFELLHKEMLGGEIIPRSILMTTFESSHYLLCALGDGALFYFGLNIETGLLSDRKKVTLGTQPTVLRTFRSLSTTNVFACSDRPTVIYSSNHKLVFSNVNLKEVNYMCPLNSDGYPDSLALANNSTLTIGTIDEIQKLHIRTVPLYESPRKICYQEVSQCFGVLSSRIEVQDTSGGTTALRPSASTQALSSSVSSSKLFSSSTAPHETSFGEEVEVHNLLIIDQHTFEVLHAHQFLQNEYALSLVSCKLGKDPNTYFIVGTAMVYPEEAEPKQGRIVVFQYSDGKLQTVAEKEVKGAVYSMVEFNGKLLASINSTVRLYEWTTEKELRTECNHYNNIMALYLKTKGDFILVGDLMRSVLLLAYKPMEGNFEEIARDFNPNWMSAVEILDDDNFLGAENAFNLFVCQKDSAATTDEERQHLQEVGLFHLGEFVNVFCHGSLVMQNLGETSTPTQGSVLFGTVNGMIGLVTSLSESWYNLLLDMQNRLNKVIKSVGKIEHSFWRSFHTERKTEPATGFIDGDLIESFLDISRPKMQEVVANLQYDDGSGMKREATADDLIKVVEELTRIH

SEQ ID NO: 76939 - protein, 105 aa, Homo sapiens
MESKALLVLTLAVWLQSLTASRGGVAAADQRRDFIDIESKFALRTPEDTAEDTCHLIPGVAESVATCHFNHSSKTFMVIHGWTVTGMYESWVPKLVAALYKREPD

SEQ ID NO: 76940 - protein, 93 aa, Homo sapiens
MSEGVDLIDIYADEEFNQDPEFNNTDQIDLYDDVLTATSQPSDDRSSSTEPPPPVRQEPSPKPNNKTPAILYTYSGLRNRRAAVYVGSFSWVC

SEQ ID NO: 76941 - protein, 101 aa, Homo sapiens
MAQGWAGFSEEELRRLKQTKGYKCPGLWSDSSRLMRRQTTKLCDSRYCKNLLQRQEEPHSAGDWMELGKISQSLCVSRGAFSRTKEKSTKDMNRYFLEKEI

SEQ ID NO: 76942 - protein, 186 aa, Homo sapiens
MASERLPNRPACLLVASGAAEGVSAQSFLHCFTMASTAFNLQVATPGGKAMEFVDVTESNARWVQDFRLKAYASPAKLESIDGARYHALLIPSCPGALTDLASSGSLARILQHFHSESKPICAVGHGVAALCCATNEDRSWVFDSYSLTGGLGLSQEPPPRSRSPLCVSSSGPPASPACRSWWRTS

SEQ ID NO: 76943 - protein, 183 aa, Homo sapiens
  MOD_RES (1)..(1): Any amino acid
XPPPADVTEEELLQMLEEDQAGFRIPMSLGEPHAELDAKGQGCTAYDVAVNSDFYRRMQNSDFLRELVITIAREGLEDKYNLQLNPEWRMMKNRPFMGSISQQNIRSEQRPRIQELGDLYTPAPGRAESGPEKPHLNLWLEAPDLLLAEVDLPKLINSHESKAAFHRKRKQLMVAMPLLPVPS

SEQ ID NO: 76944 - protein, 58 aa, Homo sapiens
MQRSPLEKASVVSKLFFSWTRPILRKGYRQRLELSDIYQIPSVDSADNLSEKLERKAN

SEQ ID NO: 76945 - protein, 1163 aa, Homo sapiens
MFSRKKRELMKTPSISKKNRAGSPSPQPSGPHFISGETEAVSRPENPFNELPSDLPKELPRKDGADAVFPGPSLEPPAGSSGVKATGTLKRPTSLSRHASAAGFPLSGAASWTLGRSHRSPLTAASPGELPTEGAGPDVVEDISHLLADVARFAEGLEKLKECVLRDDLLEARRPRAHECLGEALRVMHQIISKYPLLNTVETLTAAGTLIAKVKAFHYESNNDLEKQEFEKALETIAVAFSSTVSEFLMGEVDSSTLLAVPPGDSSQSMESLYGPGSEGTPPSLEDCDAGCLPAEEVDVLLQRCEGGVDAALLYAKNMAKYMKDLISYLEKRTTLEMEFAKGLQKIAHNCRQSVMQEPHMPLLSIYSLALEQDLEFGHSMVQAVGTLQTQTFMQPLTLRRLEHEKRRKEIKEAWHRAQRKLQEAESNLRKAKQGYVQRCEDHDKARFLVAKAEEEQAGSAPGAGSTATKTLDKRRRLEEEAKNKAEEAMATYRTCVADAKTQKQELEDTKVTALRQIQEVIRQSDQTIKSATISYYQMMHMQTAPLPVHFQMLCESSKLYDPGQQYASHVRQLQRDQEPDVHYDFEPHVSANAWSPVMRARKSSFNVSDVARPEAAGSPPEEGGCTEGTPAKDHRAGRGHQVHKSWPLSISDSDSGLDPGPGAGDFKKFERTSSSGTMSSTEELVDPDGGAGASAFEQADLNGMTPELPVAVPSGPFRHEGLSKAARTHRLRKLRTPAKCRECNSYVYFQGAECEECCLACHKKCLETLAIQCGHKKLQGRLQLFGQDFSHAARSAPDGVPFIVKKCVCEIERRALRTKGIYRVNGVKTRVEKLCQAFENGKELVELSQASPHDISNVLKLYLRQLPEPLISFRLYHELVGLAKDSLKAEAEAKAASRGRQDGSESEAVAVALAGRLRELLRDLPPENRASLQYLLRHLRRIVEVEQDNKMTPGNLGIVFGPTLLRPRPTEATVSLSSLVDYPHQARVIETLIVHYGLVFEEEPEETPGGQDESSNQRAEVVVQVPYLEAGEAVVYPLQEAAADGCRESRVVSNDSDSDLEEASELLSSSEASALGHLSFLEQQQSEASLEVASGSHSGSEEQLEATAREDGDGDEDGPAQQLSGFNTNQSNNVLQAPLPPMRLRGGRMTLGSCRERQPEFV

SEQ ID NO: 76946 - protein, 139 aa, Homo sapiens
MEVLRPQLIRIDGRNYRKNPVQEQTYQHEEDEEDFYQVITGQHRNGVISARTRIDVLLDTFRRKQPFTHFLAFFLNEVEVQEGFLRFQEEVLAKCSMDHGVDSSIFQNPKKLHLTIGMLVLLSEEEIQQTCEMLQQCKE

SEQ ID NO: 76947 - protein, 73 aa, Homo sapiens
MACSPDAVVSPSSAFLRSGSVYEPLKSINLPRPDNETLWDKLDHYYRIVKSTLLLYQSPTTGLFPTKTCGGDQ

SEQ ID NO: 76948 - protein, 233 aa, Homo sapiens
  MOD_RES (1)..(1): Any amino acid
XVSKQDIREQIWGYMESQNLADFPRPVHHRIPNFKGSYLACQNIKDLDVFARTQEVKVDPDKPLEGVRLLVLQSKKTLLVPTPRLRTGLFNKITPPPGATKDILRKCATSQGVRNYSVPIGLDSRVLVDLVVVGSVAVSEKGWRIGKGEGYADLEYAMMVSMGAVSKETPVVTIVHDCQVVDIPEELVEEHDITVDYILTPTRVIATGCKRPKPMGITWFKVGHGSGQLWPVA

SEQ ID NO: 76949 - protein, 4458 aa, Homo sapiens
MKGARWRRVPWVSLSCLCLCLLPHVVPGTTEDTLITGSKTAAPVTSTGSTTATLEGQSTAASSRTSNQDISASSQNHQTKSTETTSKAQTDTLTQMMTSTLFSSPSVHNVMETAPPDEMTTSFPSSVTNTLMMTSKTITMTTSTDSTLGNTEETSTAGTESSTPVTSAVSITAGQEGQSRTTSWRTSIQDTSASSQNHWTRSTQTTRESQTSTLTHRTTSTPSFSPSVHNVTGTVSQKTSPSGETATSSLCSVTNTSMMTSEKITVTTSTGSTLGNPGETSSVPVTGSLMPVTSAALVTFDPEGQSPATFSRTSTQDTTAFSKNHQTQSVETTRVSQINTLNTLTPVTTSTVLSSPSGFNPSGTVSQETFPSGETTTSSPSSVSNTFLVTSKVFRMPTSRDSTLGNTEETSLSVSGTISAITSKVSTIWWSDTLSTALSPSSLPPKISTAFHTQQSEGAETTGRPHERSSFSPGVSQEIFTLHETTTWPSSFSSKGHTTWSQTELPSTSTGAATRLVTGNPSTGTAGTIPRVPSKVSAIGEPGEPTTYSSHSTTLPKTTGAGAQTQWTQETGTTGEALLSSPSYSVTQMIKTATSPSSSPMLDRHTSQQITTAPSTNHSTIHSTSTSPQESPAVSQRGHTQAPQTTQESQTTRSVSPMTDTKTVTTPGSSFTASGHSPSEIVPQDAPTISAATTFAPAPTGDGHTTQAPTTALQAAPSSHDATLGPSGGTSLSKTGALTLANSVVSTPGGPEGQWTSASASTSPDTAAAMTHTHQAESTEASGQTQTSEPASSGSRTTSAGTATPSSSGASGTTPSGSEGISTSGETTRFSSNPSRDSHTTQSTTELLSASASHGAIPVSTGMASSIVPGTFHPTLSEASTAGRPTGQSSPTSPSASPQETAAISRMAQTQRTRTSRGSDTISLASQATDTFSTVPPTPPSITSTGLTSPQTETHTLSPSGSGKTFTTALISNATPLPVTYASSASTGHTTPLHVTDASSVSTGHATPLPVTSPSSVSTGHTTPLPVTDTSSESTGHVTPLPVTSFSSASTGDSTPLPVTDTSSASTGHVTPLPVTSLSSASTGDTTPLPVTDTSSASTGHATSLPVTDTSSVSTGHTTPLPVTDTSSASTGHATSLPVTDTSSVSTGHTTPLHVTDASSASTGQATPLPVTSLSSVSTGDTTPLPVTSPSSASTGHATPLLVTDTSSASTGHATPLPVTDASSVSTDHATSLPVTIPSAASTGHTTPLPVTDTSSASTGQATSLLVTDTSSVSTGDTTPLPVTSTSSASTGHVTPLHVTSPSSASTGHATPLPVTSLSSASTGDTMPLPVTSPSSASTGDTTPLPVTDASSVSTGHTTPLHVTDASSASTGQATPLPVTSLSSVSTGDTTPLPVTSPSSASTGHATPLLVTDTSSASTGHATPLPVTDASSVSTDHATSLPVTIPSAASTGHTTPLPVTDTSSASTGQATSLLVTDTSSVSTGDTTPLPVTSTSSASTGHVTPLHVTSPSSASTGHATPLPVTSLSSASTGDTMPLPVTSPSSASTGDTTPLPVTDASSVSTGHTTPLPVTSPSSASTGHTTPLPVTDTSSASKGDTTPLPVTSPSSASTGHTTPLPVTDTSSASTGDTTPLPVTNASSLSTGHATPLHVTSPSSASTGHATPLPVTSTSSASTGHATPLPVTGLSSATTDDTTRLPVTDVSSASTGQATPLPVTSLSSVSTGDTTPLPVTSPSSASTGHASPLLVTDASSASTGQATPLPVTDTSSVSTAHATPLPVTGLSSASTDDTTRLPVTDVSSASTGQAIPLPVTSPSSASTGDTTPLPVTDASSASTGDTTSLPVTIPSSASSGHTTSLPVTDASSVSTGHATSLLVTDASSVSTGDTTPLPVTDTNSASTGDTTPLHVTDASSVSTGHATSLPVTSLSSASTGDTTPLPVTSPSSASSGHTTPLPVTDASSVPTGHATSLPVTDASSVSTGHATPLPVTDASSVSTGHATPLPVTDTSSVSTGQATPLPVTSLSSASTGDTTPLPVTDTSSASTGQDTPLPVTSLSSVSTGDTTPLPVTNPSSASTGHATPLLVTDASSISTGHATSLLVTDASSVSTGHATALHDTDASSLSTGDTTPLPVTSPSSTSTGDTTPLPVTETSSVSTGHATSLPVTDTSSASTGHATSLPVTDTSSASTGHATPLPVTDTSSASTGQATPLPVTSPSSASTGHAIPLLVTDTSSASTGQATPLPVTSLSSASTGDTTPLPVTDASSVSTGHATSLPVTSLSSVSTGDTTPLPVTSPSSASTGHATPLHVTDASSASTGHATPLPVTSLSSASTGDTTPLPVTSPSSASTGHATPLHVTDASSVSTGDTTPLPVTSSSSASSGHTTPLPVTDASSASTGDTTPLPVTDTSSASTGHATHLPVTGLSSASTGDTTRLPVTNVSSASTGHATPLPVTSTSSASTGDTTPLPGTDTSSVSTGHTTPLLVTDASSVSTGDTTRLPVTSPSSASTGHTTPLPVTDTPSASTGDTTPLPVTNASSLSTRHATSLHVTSPSSASTGHATSLPVTDTSAASTGHATPLPVTSTSSASTGDTTPLPVTDTYSASTGQATPLPVTSLSSVSTGDTTPLPVTSPSSASTGHATPLLVTDASSASTGQATPLPVTSLSSVSTGDTTPLPVTSPSSASTGHATSLPVTDTSSASTGDTTSLPVTDTSSAYTGDTTSLPVTDTSSSSTGDTTPLLVTETSSVSTGDTTPLPVTDTSSASTGHATPLPVTNTSSVSTGHATPLHVTSPSSASTGHTTPLPVTDASSVSTGHATSLPVTDASSVFTGHATSLPVTIPSSASSGHTTPLPVTDASSVSTGHATSLPVTDASSVSTGHATPLPVTDASSVSTGHATPLPLTSLSSVSTGDTTPLPVTDTSSASTGQATPLPVTSLSSVSTGDTTPLPVTDTSSASTGHATSLPVTDTSSASTGHATPLPDTDTSSASTGHATLLPVTDTSSASIGHATSLPVTDTSSISTGHATPLHVTSPSSASTGHATPLPVTDTSSASTGHANPLHVTSPSSASTGHATPLPVTDTSSASTGHATPLPVTSLSSVSTGDTTPLPVTSPSSASTGHTTPLPVTDTSSASTGQATALPVTSTSSASTGDTTPLPVTDTSSASTGQATPLPVTSLSSVSTGDTTPLPVTSPSSASTGHATPLLVTDASSASTGQATPLPVTSLSSVSTGDTTPLPVTSPSSASTGHATSLPVTDTSSASTGDTTSLPVTDTSSAYTGDTTSLPVTDTSSSSTGDTTPLLVTETSSVSTGHATPLLVTDASSASTGHATPLHVTSPSSASTGDTTPVPVTDTSSVSTGHATPLPVTGLSSASTGDTTRLPVTDISSASTGQATPLPVTNTSSVSTGDTMPLPVTSPSSASTGHATPLPVTSTSSASTGHATPVPVTSTSSASTGHTTPLPVTDTSSASTGDTTPLPVTSPSSASTGHTTPLHVTIPSSASTGDTSTLPVTGASSASTGHATPLPVTDTSSVSTGHATPLPVTSLSSVSTGDTTPLPVTDASSASTGQATPLPVTSLSSVSTGDTTPLLVTDASSVSTGHATPLPVTDTSSASTGDTTRLPVTDTSSASTGQATPLPVTSLSSVSTGDTTPLLVTDASSVSTGHATPLPVTDTSSASTGDTTRLPVTDTSSASTGQATPLPVTIPSSSSSGHTTPLPVTSTSSVSTGHVTPLHVTSPSSASTGHVTPLPVTSTSSASTGHATPLLVTDASSVSTGHATPLPVTDASSASTGDTTPLPVTDTSSASTGQATPLPVTSLSSVSTGDTTPLPVTDASSASTGHATPLPVTIPSSVSTGDTMPLPVTSPSSASTGHATPLPVTGLSSASTGDTTPLPVTDTSSASTRHATPLPVTDTSSASTDDTTRLPVTDVSSASTGHATPLPVTSTSSASTGDTTPLPVTDTSSVSTGHATSLPVTSRSSASTGHATPLPVTDTSSVSTGHATPLPVTSTSSVSTGHATPLPVTSPSSASTGHATPVPVTSTSSASTGDTTPLPVTNASSLSTGHATPLHVTSPSSASRGDTSTLPVTDASSASTGHATPLPLTSLSSVSTGDTTPLPVTDTSSASTGQATPLPVTSLSSVSTGDTTPLPVTIPSSASSGHTTSLPVTDASSVSTGHGTPLPVTSTSSASTGDTTPLPVTDTSSASTGHATPLPVTDTSSASTGHATPLPVTSLSSVSTGHATPLAVSSATSASTVSSDSPLKMETPGMTTPSLKTDGGRRTATSPPPTTSQTIISTIPSTAMHTRSTAAPIPILPERGVSLFPYGAGAGDLEFVRRTVDFTSPLFKPATGFPLGSSLRDSLYFTDNGQIIFPESDYQIFSYPNPLPTGFTGRDPVALVAPFWDDADFSTGRGTTFYQSNTYQAILSTDGSRSYALFLYQSGGMQWDVAQRSVEMAISKTAH

SEQ ID NO: 76950 - protein, 167 aa, Homo sapiens
GIMSTAWDLYDSYNAMELVSLSVKQSVVESSSKANVLPKDQDQRLPGSTTEKKPEPEEPEDVLESAKHEEVEEESKKEEEEEIHAEESTIPANLERLWSFSCDLTKGLNVSSLAWNKTNPDLLAVGYGHFGFKEQKRGLACCWSIKNPMVTQTRIRSIFIWLLTKFS

SEQ ID NO: 76951 - protein, 121 aa, Homo sapiens
MSAIQNLHSFDPFADASKGDDLLPAGTEDYIHIRIQQRNGRKTLTTVQGIADDYDKKKLVKAFKKKFACNGTVIEHPEYGEVIQLQGDQRKNICQFLVEIGLAKDDQLKVHGFKNLTACIM

SEQ ID NO: 76952 - protein, 174 aa, Homo sapiens
MGKNNQSALLYGTLSSEAPQDGESTRSGYCAMISRIPRGAFERKMSYDWSQFNTLYLRVRGDGRPWMVNIKEDTDFFQRTNQMYSYFMFTRGGPYWQEVKIPFSKFFFSNRGRIRDVQHELPLDKISSIGFTLADKVDGPFFLEIDFIGVFTDPAHTEEFAYENSPELNPRLFK

SEQ ID NO: 76953 - protein, 56 aa, Homo sapiens
PLVCKKIAQERLTVLLFLEDCIITACQEGLICTWARPGKAPQIQGFPKCGSRTTCI

SEQ ID NO: 76954 - protein, 54 aa, Homo sapiens
MATSGANGPGSATASASNPRKFSEKIALQKQRQAEETAAFEEVMMDIGSTRDKL

SEQ ID NO: 76955 - protein, 197 aa, Homo sapiens
  MOD_RES (1)..(1): Any amino acid
XYKPPALKKSNSPGTASSGSSRLPQPSGAGKTVVGVPSGKVSSSSSSLGNKLQTLSPSHKGIAAPHAGNMDKLGPPLRTGRLVQRLYDSDTKSDSAIKRHELLPIYKANVKPRNSTPPSLARNPAPGVLTNKRKTYTESYIARPDGDCASSLNGGNIKGIEGHSPGNLPKFCHECGTKYPVEWAKFCCECGIRRMIL

SEQ ID NO: 76956 - protein, 118 aa, Homo sapiens
MPLSSPNAAATASDMDKNSGSNSSSASSGSSKGQQPPRSASAGPAGESKPKSELLISAGFNLLSVDSVVRPYVAPLEEKVALEQQLAEEKHTPESCFIEAAIQELKTREEALSGLAGS

SEQ ID NO: 76957 - protein, 41 aa, Homo sapiens
  MOD_RES (1)..(1): Any amino acid
XSLSGNQAVRLPLMECVQVTKDVTKAMDEKKFDEALKLRGR

SEQ ID NO: 76958 - protein, 260 aa, Homo sapiens
MPSPRPVLLRGARAALLLLLPPRLLARPSLLLRRSLSAASCPPISLPAAASRSSMDGAGAEEVLAPLRLAVRQQGDLVRKLKEDKAPQVDVDKAVAELKARKRVLEAKELALQPKDDIVDRAKMEDTLKRRFFYDQAFAIYGGVSGLYDFGPVGCALKNNIIQTWRQHFIQEEQILEIDCTMLTPEPVLKTSGHVDKFADFMVKDVKNGECFRADHLLKAHLQKLMSDKKCSVEKKSEMESVLAQLDYFYMKKLSINYLI

SEQ ID NO: 76959 - protein, 38 aa, Homo sapiens
MQFRLFSFALIILNCMDYSHCQGNRWRRSKRAWRSLIV

SEQ ID NO: 76960 - protein, 43 aa, Homo sapiens
MDSFDLALLQEWDLESLCVYEPDRNALRRKERERRNQETQQDD

SEQ ID NO: 76961 - protein, 166 aa, Homo sapiens
MVLEMLNPIHYNITSIVPEAMPAATMPVLLLTGLFLLVWNYEGTSSIPGPGYCMGIGPLISHGRFLWMGIGSACNYYNRVYGEFMRVWISGEETLIISKSSSMFHIMKHNHYSSRFGSKLGLQCIGMHEKGIIFNNNPELWKTTRPFFMKALSGPGLVRMVTVCAE

SEQ ID NO: 76962 - protein, 55 aa, Homo sapiens
MKKCRFSLPSSALSRDDDASREDDNLGSWERWLGHYSHPCLDHLSQCHHLTPCSR

SEQ ID NO: 76963 - protein, 67 aa, Homo sapiens
  MOD_RES (1)..(1): Any amino acid
XAKLDRQRRVFQPSPLASQFELPGDFFNLTAEEIKREQRLRHFLRSGAAGGGVRVRPGGPAERLAAF

SEQ ID NO: 76964 - protein, 316 aa, Homo sapiens
MMAFAPPKNTDGPKMQTKMSTWTPLNHQLLNDRFDKWTDSQRRRILTGLLERCSLSQQKFCCRKLQEKIPAEALDFTTKLPRVLSLYIFSFLDPRSLCRCAQVCWHWKNLAELDQLWMLKCLRFNWYINFSPTPFEQGIWKKHYIQMVKELHITKPKTPPKDGFVIADVQLVTSNSPEEKQSPLSAFRSSSSLRKKNNSGEKALPPWRSSDKHPTDIIRFNYLDNRDPMETVQQGRRKRNQMTPDFSRQSHDKKNKLQDRTRLRKAQSMMSLSASSPLKVPAHLAWPPPESVGLPDTATTAEILMQHPHRHPGPQA

SEQ ID NO: 76965 - protein, 147 aa, Homo sapiens
  MOD_RES (1)..(1): Any amino acid
XGGSRVSNPAVMAQEEEDVRDYNLTEEQKAIKAKYPPVNRKYEYLDHTADVQLHAWGDTLEEAFEQCAMAMFGYMTDTGTVEPLQTVEVETQGDDLQSLLFHFLDEWLYKFSADEFFIPRVGRRIFIVQAPSGNRSQSNNIFSNAGL

SEQ ID NO: 76966 - protein, 106 aa, Homo sapiens
  MOD_RES (1)..(1): Any amino acid
XGNVITTNTIFENLWFSCATDSLGVYNCWEFPSMLALSGYIQACRALMITAILLGFLGLLLGIAGLRCTNIGGLELSRKAKLAATAGALHILADLLAANQPIGSVS

SEQ ID NO: 76967 - protein, 198 aa, Homo sapiens
MAEVQVLVLDGRGHLLGRLAAIVAKQAGRWWSYAVKASTFLAISTETSYLAFLRKRMNTNPSRGPYHFRAPSRIFWRTVRGMLPHKTKRGQAALDRLKVFDGIPPPYDKKKRMVVPAALKVVRLKPTRKFAYLGRLAHEVGWKYQAVTATLEEKRKEKAKIHYRKKKQLMRLRKQAEKNVEKKIDKYTEVLKTHGLLV

SEQ ID NO: 76968 - protein, 382 aa, Homo sapiens
MDYSDTDSDATLGYSDDEDSSDEVQRISEEDVRTANVIAAEAVTCLVIDRDSFKHLIGGLDDVSNKAYEDAEAKAKYEAEAAFFANLKLSDFNIIDTLGVGGFGRVELVQLKSEESKTFAMKILKKRHIVDTRQQEHIRSEKQIMQGAHSDFIVRLYRTFKDSKYLYMLMEACLGGELWTILRDRGSFEDSTTRFYTACVVEAFAYLHSKGIIYRDLKPENLILDHRGYAKLVDFGFAKKIGFGKKTWTFCGTPEYVAPEIILNKGHDISADYWSLGILMYELLTGSPPFSGPDPMKTYNIILRGIDMIEFPKKIAKNAANLIKKLCRWFEGFNWEGLRKGTLTPPIIPSVASPTDTSNFDSFPEDNDEPPPDDNSGWDIDF

SEQ ID NO: 76969 - protein, 62 aa, Homo sapiens
MLLLLSLLPLLPPLLLPPPPPPLVLLLLLLLLHDSCFLHLSRHQLQMLEVRNMPFSLGYWFT

SEQ ID NO: 76970 - protein, 176 aa, Homo sapiens
  MOD_RES (1)..(1): Any amino acid
XRRHESKDKSSKKHKSEEHNDKEHSSDKGRERLNSSENGEDRHKRKERKSSRGRSHSRSRSRERRHRSRSRERKKSRSRSRERKKSRSRSRERKKSRSRSRERKRRIRSRSRSRSRHRHRTRSRSRTRSRSRDRKKRIEKPRRFSRSLSRTPSPPPFRGRNTAMDAQEALARRQNT

SEQ ID NO: 76971 - protein, 36 aa, Homo sapiens
MGGLSTVGACPGILGAQQGKEGTDTLTSCTLGSFQN

SEQ ID NO: 76972 - protein, 641 aa, Homo sapiens
  MOD_RES (1)..(1): Any amino acid
XFLPPEASQLKPDRQQFQSRKRPYEENRGRGYFEHREDRRGRSPQPPAEEDEDDFDDTLVAIDTYNCDLHFKVARDRSSGYPLTIEGFAYLWSGARASYGVRRGRVCFEMKINEEISVKHLPSTEPDPHVVRIGWSLDSCSTQLGEEPFSYGYGGTGKKSTNSRFENYGDKFAENDVIGCFADFECGNDVELSFTKNGKWMGIAFRIQKEALGGQALYPHVLVKNCAVEFNFGQRAEPYCSVLPGFTFIQHLPLSERIRGTVGPKSKAECEILMMVGLPAAGKTTWAIKHAASNPSKKYNILGTNAIMDKMRVMGLRRQRNYAGRWDVLIQQATQCLNRLIQIAARKKRNYILDQTNVYGSAQRRKMRPFEGFQRKAIVICPTDEDLKDRTIKRTDEEGKDVPDHAVLEMKANFTLPDVGDFLDEVLFIELQREEADKLVRQYNEEGRKAGPPPEKRFDNRGGGGFRGRGGGGGFQRYENRGPPGGNRGGFQNRGGGSGGGGNYRGGFNRSGGGGYSQNRWGNNNRDNNNSNNRGSYNRAPQQQPPPQQPPPPQPPPQQPPPPPSYSPARNPPGASTYNKNSNIPGSSANTSTPTVSSYSPPQYAQQWNQYYQNQGQWPPYYGNYDYGSYSGNTQGGTSTQ

SEQ ID NO: 76973 - protein, 70 aa, Homo sapiens
MTAKNVGLTSTNAEVRGFIDQNLSPTKGNISFVAFPVSNTNSPTKILPKTLGPINVNVGPQMDATRRHHL

SEQ ID NO: 76974 - protein, 129 aa, Homo sapiens
MMVQGQEYEAGGSVIHPLNLHMKRFVKDLGLSAVQASGGLLGIYNGETLVFEESNWFIINVIKLVWRYGFQSLRMHMWVEDVLDKFMRIYRYQSHDYAFSSVEKLLHALGGDDFLGMLNRTLLETLQKA

SEQ ID NO: 76975 - protein, 1583 aa, Homo sapiens
MEAEFYMVILTCLIFRNSGFQIVHVQKQQCLFKNEKVVVGSCNRTIQNQQWMWTEDEKLLHVKSALCLAISNSSRGPSRSAILDRCSQAPRWTCYDQEGFLEVENASLFLQKQGSRVVVKKARKYLHSWMKIDVNKEGKLVNESLCLQKAGLGAEVSVRSTRNTAPPQILTTFNAVPDGLVFLIRNTTEAFIRNAAENYSQNSSERQHPNLHMTGITDTSWVLSTTQPFSSTTEETGLAEPERCNFTLAESKASSHSVSIQWRILGSPCNFSLIYSSDTLGAALCPTFRIDNTTYGCNLQDLQAGTIYNFRIISLDEERTVVLQTDPLPPARFGVSKEKTTSTSLHVWWTPSSGKVTSYEVQLFDENNQKIQGVQIQESTSWNEYTFFNLTAGSKYNIAITAVSGGKRSFSVYTNGSTVPSPVKDIGISTKANSLLISWSHGSGNVERYRLMLMDKGILVHGGVVDKHATSYAFHGLTPGYLYNLTVMTEAAGLQNYRWKLVRTAPMEVSNLKVTNDGSLTSLKVKWQRPPGNVDSYNITLSHKGTIKESRVLAPWITETHFKELVPGRLYQVTVSCVSGELSAQKMAVGRTFPDKVANLEANNNGRMRSLVVSWSPPAGDWEQYRILLFNDSVVLLNITVGKEETQYVMDDTGLVPGRQYEVEVIVESGNLKNSERCQGRTVPLAVLQLRVKHANETSLSIMWQTPVAEWEKYIISLADRDLLLIHKSLSKDAKEFTFTDLVPGRKYMATVTSISGDLKNSSSVKGRTVPAQVTDLHVANQGMTSSLFTNWTQAQGDVEFYQVLLIHENVVIKNESISSETSRYSFHSLKSGSLYSVVVTTVSGGISSRQVVVEGRTVPSSVSGVTVNNSGRNDYLSVSWLLAPGDVDNYEVTLSHDGKVVQSLVIAKSVRECSFSSLTPGRLYTVTITTRSGKYENHSFSQERTVPDKVQGVSVSNSARSDYLRVSWVHATGDFDHYEVTIKNKNNFIQTKSIPKSENECVFVQLVPGRLYSVTVTTKSGQYEANEQGNGRTIPEPVKDLTLRNRSTEDLHVTWSGANGDVDQYEIQLLFNDMKVFPPFHLVNTATEYRFTSLTPGRQYKILVLTISGDVQQSAFIEGFTVPSAVKNIHISPNGATDSLTVNWTPGGGDVDSYTVSAFRHSQKVDSQTIPKHVFEHTFHRLEAGEQYQIMIASVSGSLKNQINVVGRTVPASVQGVIADNAYSSYSLIVSWQKAAGVAERYDILLLTENGILLRNTSEPATTKQHKFEDLTPGKKYKIQILTVSGGLFSKEAQTEGRTVPAAVTDLRITENSTRHLSFRWTASEGELSWYNIFLYNPDGNLQERAQVDPLVQSFSFQNLLQGRMYKMVIVTHSGELSNESFIFGRTVPASVSHLRGSNRNTTDSLWFNWSPASGDFDFYELILYNPNGTKKENWKDKDLTEWRFQGLVPGRKYVLWVVTHSGDLSNKVTAESRTAPSPPSLMSFADIANTSLAITWKGPPDWTDYNDFELQWLPRDALTVFNPYNNRKSEGRIVYGLRPGRSYQFNVKTVSGDSWKTYSKPIFGSVRTSMTCFATLISQME

SEQ ID NO: 76976 - protein, 150 aa, Homo sapiens
MEHLRHSPGPGGQRLLLPSMLLALLLLLAPSPGHATRVVYKVPEEQPPNTLIGSLAADYGFPDVGHLYKLEVGAPYLRVDGKTGDIFTTETSIDREGLRECQNQLPGDPCILEFEVSITDLVQNGSPRLLEGQIEVQDINDNTPNFASPV

SEQ ID NO: 76977 - protein, 708 aa, Homo sapiens
  MOD_RES (1)..(1): Any amino acid
XDAGIRRVVPSDLYPLVLGFLRDNQLSEVANKFAKATGATQQDANASSLLDIYSFWLKSAKVPERKLQANGPVAKKAKKKASSSDSEDSSEEEEEVQGPPAKKAAVPAKRVGLPPGKAAAKASESSSSEESSDDDDEEDQKKQPVQKGVKPQAKAAKAPPKKAKSSDSDSDSSSEDEPPKNQKPKITPVTVKAQTKAPPKPARAAPKIANGKAASSSSSSSSSSSSDDSEEEKAAATPKKVWTITSVRAETVPKKQVVAKAPVKAATTPTRKSSSSEDSSSDEEEEQKKPMKNKPGPYSSVPPPSAPPPKKSLGTQPPKKAVEKQQPVESSEDSSDESDSSSEEEKKPPTKAVVSKATTKPPPAKKAAESSSDSSDSDSSEDDEAPSKPAGTTKNSSNKPAVTTKSPAVKPAAAPKQPVGGGQKLLTRKADSSSSEEESSSSEEEKTKKMVATTKPKATAKAALSLPAKQAPQGSRDSSSDSDSSSSEEEEEKTSKSAVKKKPQKVAGGAAPSKPASAKKGKAESSNSSSSDDSSEEEEEKLKGKGSPRPQAPKANGTSALTAQNGKAAKNSEEEEEEKKKAAVVVSKSGSLKKRKQNEAAKEAETPQAKKIKLQTPNTFPKRKKGEKRASSPFRRVREEEIEVDSRVADNSFDAKRGAAGDWGERANQVLKFTKGKSFRHEKTKKKRGSYRGGSISVQVNSIKFDSE

SEQ ID NO: 76978 - protein, 453 aa, Homo sapiens [sequence omitted]

SEQ ID NO: 76979 - protein, 182 aa, Homo sapiens
  MOD_RES (1)..(1): Any amino acid
XFESLTQLQHLCVAHNKLSNAGLPPDAFRGSEAIATLSLSNNQLSYLPPSLPPSLERLHLQNNLISKVPRGALSRQTQLRELYLQHNQLTDSGLDATTFSKLHSLEYLDLSHNQLTTVPAGLPRTLAILHLGRNRIRQVEAARLHGARGLRYLLLQHNQLGSSGLPAGALRPLRGLHTLHLY

SEQ ID NO: 76980 - protein, 166 aa, Homo sapiens
  MOD_RES (1)..(1): Any amino acid
XSGPAPTTHKGTPKTNRTNKPSTPTTATRKKKDLKNFRNVDSNLANLIMNEIVDNGTAVKFDDIAGQDLAKQALQEIVILPSLRPELFTGLRAPARGLLLFGPPGNGKTMLAKAVAAESNATFFNISAASLTSKYVGEGEKLVRALFAVARELQPSIIFIGTVCWR

SEQ ID NO: 76981 - protein, 154 aa, Homo sapiens
MVQVNHGTYTVKFYDGVVQTVKHIHVKAFSKDQNIVGNARPKETDHKSLSSSPDKREKFKEQRKATVNVKKDKEDKPLKTEKRPKQPDKEGKLICSEKGKVSEKSLPKNEKEDKENISENDREYSGDAQVDKKPENDIVKSPQENLREPKRKRG

SEQ ID NO: 76982 - protein, 643 aa, Homo sapiens
MREFEVLKKLNHKNIVKLFAIEEETTTRHKVLIMEFCPCGSLYTVLEEPSNAYGLPESEFLIVLRDVVGGMNHLRENGIVHRDIKPGNIMRVIGEDGQSVYKLTDFGAARELEDDEQFVSLYGTEEYLHPDMYERAVLRKDHQKKYGATVDLWSIGVTFYHAATGSLPFRPFEGPRRNKEVMYKIITGKPSGAISGVQKAENGPIDWSGDMPVSCSLSRGLQVLLTPVLANILEADQEKCWGFDQFFAETSDILHRMVIHVFSLQQMTAHKIYIHSYNTATIFHELVYKQTKIISSNQELIYEGRRLVLEPGRLAQHFPKTTEENPIFVVSREPLNTIGLIYEKISLPKVHPRYDLDGDASMAKAITGVVCYACRIASTLLLYQELMRKGIRWLIYEKLMKINLEAAELGEISDIHTKLLRLSSSQGTIETSLQDIDSRLSPGGSLADAWAHQEGTHPKDRNVEKLQVLLNCMTEIYYQFKKDKAERRLAYNEEQIHKFDKQKLYYHATKAMTHFTDECVKKYEAFLNKSEEWIRKMLHLRKQLLSLTNQCFDIEEEVSKYQEYTNELQETLPQKMFTASSGIKHTMTPIYPSSNTLVEMTLGMKKLKEEMEGVVKELAENNHILERFGSLTMDGGLRNVDCL

SEQ ID NO: 76983 - protein, 967 aa, Homo sapiens
MESGHLLWALLFMQSLWPQLTDGATRVYYLGIRDVQWNYAPKGRNVITNQPLDSDIVASSFLKSDKNRIGGTYKKTIYKEYKDDSYTDEVAQPAWLGFLGPVLQAEVGDVILIHLKNFATRPYTIHPHGVFYEKDSEGSLYPDGSSGPLKADDSVPPGGSHIYNWTIPEGHAPTDADPACLTWIYHSHVDAPRDIATGLIGPLITCKRGALDGNSPPQRQDVDHDFFLLFSVVDENLSWHLNENIATYCSDPASVDKEDETFQESNRMHAINGFVFGNLPELNMCAQKRVAWHLFGMGNEIDVHTAFFHGQMLTTRGHHTDVANIFPATFVTAEMVPWEPGTWLISCQVNSHFRDGMQALYKVKSCSMAPPVDLLTGKVRQYFIEAHEIQWDYGPMGHDGSTGKNLREPGSISDKFFQKSSSRIGGTYWKVRYEAFQDETFQEKMHLEEDRHLGILGPVIRAEVGDTIQVVFYNRASQPFSMQPHGVFYEKDYEGTVYNDGSSYPGLVAKPFEKVTYRWTVPPHAGPTAQDPACLTWMYFSAADPIRDTNSGLVGPLLVCRAGALGADGKQKGVDKEFFLLFTVLDENKSWYSNANQAAAMLDFRLLSEDIEGFQDSNRMHAINGFLFSNLPRLDMCKGDTVAWHLLGLGTETDVHGVMFQGNTVQLQGMRKGAAMLFPHTFVMAIMQPDNLGTFEIYCQAGSHREAGMRAIYNVSQCPGHQATPRQRYQAARIYYIMAEEVEWDYCPDRSWEREWHNQSEKDSYGYIFLSNKDGLLGSRYKKAVFREYTDGTFRIPRPRTGPEEHLGILGPLIKGEVGDILTVVFKNNASRPYSVHAHGVLESTTVWPLAAEPGEVVTYQWNIPERSGPGPNDSACVSWIYYSAVDPIKDMYSGLVGPLAICQKGILEPHGGRSDMDREFALLFLIFDENKSWYLEENVATHGSQDPGSINLQDETFLESNKMHGS

SEQ ID NO: 76984 - protein, 63 aa, Homo sapiens
  MOD_RES (1)..(1): Any amino acid
XAGLVKLGVHCITGQKVAIKIVNREKLSESVLMKVEREIAILKLIEHPHVLKLHDVYENKKYL

SEQ ID NO: 76985 - protein, 12 aa, Homo sapiens
MIASQFLSALTL

SEQ ID NO: 76986 - protein, 153 aa, Homo sapiens
MDRMKKIKRQLSMTLRGGRGIDKTNGAPEQIGLDESGGGGGSDPGEAPTRAAPGELRSARGPLSSAPEIVHEDLKMGSDGESDQASATSSDEVQSPVRVRMRNHPPRKISTEDINKRLSLPADIRLPEGYLEKLTLNSPIFDKPLSRRLRRVS

SEQ ID NO: 76987 - protein, 252 aa, Homo sapiens
  MOD_RES (1)..(1): Any amino acid
XSILSRGNKARGLQEHSISVDLDSSLSSTLSNTSKEPSVCEKEALPISESSFKLLGSSEDLSSDSESHLPEEPAPLSPQQAFRRRANTLSHFPIECQEPPQPARGSPGVSQRKLMRYHSVSTETPHERNVDPSPVGESKHRPGQSSAPAPPPRLNPSASSPNFFKYLKHNSSGEQSGNAVPKRDFESKANHLGDSGGTPVKTRRHSWRQQIFLRVATPQKACDSSSRYEDYSELGELPPRSPLEPVCEDGPF

SEQ ID NO: 76988 - protein, 150 aa, Homo sapiens
  MOD_RES (1)..(1): Any amino acid
XPGRGSPKDRLPPAPRKRALVSVGVAERAVHETPTLTHETFKALKPGLSAYADDVEKVKKVFKASPFLVGDDCVSIMNGTDEGVSAWITINFLTGSLKTPGGSSVGMLDLGGGSTQIAFLPRVEGTLQASPPGYLTALRMFNRTYKLYSY

SEQ ID NO: 76989 - protein, 46 aa, Homo sapiens
MLETYNHLVSLEIPSSKPKLIAQLERGEAPWREERKCPLDLCPDTE

SEQ ID NO: 76990 - protein, 679 aa, Homo sapiens
MVQGGDFSEGNGRGGESIYGGFFEDESFAVKHNKEFLLSMANRGKDTNGSQFFITTKPTPHLDGHHVVFGQVISGQEVVREIENQKTDAASKPFAEVRILSCGELIPKSKVKKEEKKRHKSSSSSSSSSSDSDSSSDSQSSSDSSDSESATEEKSKKRKKKHRKNSRKHKKEKKKRKKSKKSESEAENLEAQPQSTVRPEEIPPIPENRFLMRKSPPKADEKERKNRERERERECNPPNSQPASYQRRLLVTRSGRKIKGRGPRRYRTPSRSRSRDRFRRSETPPHWRQEMQRAQRMRVSSGERWIKGDKSELNEIKENQRSPVRVKERKITDHRNVSESPNRKNEKEKKVKDHKSNSKERDIRRNSEKDDKYKNKVKKRAKSKSRSKSKEKSKSKERDSKHNRNEEKRMRSRSKGRDHENVKEKEKQSDSKGKDQERSRSKEKSKQLESKSNEHDHSKSKEKDRRAQSRSRECDITKGKHSYNSRTRERSRSRDRSRRVRSRTHDRDRSRSKEYHRYREQEYRRRGRSRSRERRTPPGRSRSKDRRRRRRDSRSSEREESQSRNKDKYRNQESKSSHRKENSESEKRMYSKSRDHNSSNNSREKKADRDQSPFSKIKQSSQDNELKSSMLKNKEDEKIRSSVEKENQKSKGQENDHVHEKNKKFDHESSPGTDEDKSG

SEQ ID NO: 76991 - protein, 179 aa, Homo sapiens
MSDEEARQSGGSSQAGVVTVSDVQELMRRKEEIEAQIKANYDVLESQKGIGMNEPLVDCEGYPRSDVDLYQVRTARHNIICLQNDHKAVMKQVEEALHQLHARDKEKQARDMAEAHKEAMSRKLGQSESQGPPRAFAKVNSISPGSPASIAVIQGLATQVHAQGTRVCKWMMRLWSSAL

SEQ ID NO: 76992 - protein, 113 aa, Homo sapiens
MSAYVKKIQFKLHESYGNPLRVVTKPPYEITETGWGEFEIIIKIFFIDPNERPVTLYHLLKLFQSDTNAMLGKKTVVSEFYDEMIFQDPTAMMQQLLTTSRQLTLGAYKHETE

SEQ ID NO: 76993 - protein, 54 aa, Homo sapiens
MVPRLLLRAWPRGPAVGPGAPSRPLSAGSGPGQYLQRSIVPTMHYQDSLPRTLV

SEQ ID NO: 76994 - protein, 43 aa, Homo sapiens
  MOD_RES (1)..(1): Any amino acid
XRIGVELEDYNVSVPILGFKKFMLTHLVNIDQDTYRNPQQMPL

SEQ ID NO: 76995 - protein, 178 aa, Homo sapiens
  MOD_RES (1)..(1): Any amino acid
XQLDFSTSGALCVALNKAAAGSAYRCFKERRVTKAYLALLRGHIQESRVTISHAIGRNSTEGRAHTMCIEGSQGCENPKPSLTDLVVLEHGLYAGDPVSKVLLKPLTGVSGVGGVLVVTEGKLRHRATKLMLGHPEHQGRAGNKHSCVLNSTPCSLSASHLTQGPCWLLTDSLGVWLA

SEQ ID NO: 76996 - protein, 570 aa, Homo sapiens
MDVVVDDRLPVREGKLMFVRSEQRNEFWAPLLEKAYAKLHGSYEVMRGGHMNEAFVDFTGGVGEVLYLRQNSMGLFSALRHALAKESLVGATALSDRGEYRTEEGLVKGHAYSITGTHKVFLGFTKVRLLRLRNPWGCVEWTGAWSDSCPRWDTLPTECRDALLVKKEDGEFWMELRDFLLHFDTVQICSLSPEVLGPSPEGGGWHVHTFQGRWVRGFNSGGSQPNAETFWTNPQFRLTLLEPDEEDDEDEEGPWGGWGAAGARGPARGGRTPKCTVLLSLIQRNRRRLRAKGLTYLTVGFHVFQIPEELLGLWDSPRSHALLPRLLRADRSPLSARRDVTRRCCLRPGHYLVVPSTAHAGDEADFTLRVFSERRHTAVEIDDVISADLQSLQGPYLPLELGLEQLFQELAGEEEELNASQLQALLSIALEPARAHTSTPREIGLRTCEQLLQCFGHGQSLALHHFQQLWGYLLEWQAIFNKFDEDTSGTMNSYELRLALNAAGFHLNNQLTQTLTSRYRDSRLRVDFERFVSCVAHLTCIFCHCSQHLDGGEGVICLTHRQWMEVATFS

SEQ ID NO: 76997 - protein, 93 aa, Homo sapiens
MKDEVALLAAVTLLGVLLQGAAALCGLVYLFARLRYFQGYARSAQLRLAPLYASARALWLLVALAALGLLAHFLPAALRAALLGRLRTLLPWA

SEQ ID NO: 76998 - protein, 60 aa, Homo sapiens
  MOD_RES (1)..(1): Any amino acid
XDGEEIEPEHEGRKVVVFFTRNGKIIGKKDAVVPSGGFFPTIGMLSCGEKVKVDLHPLSG

SEQ ID NO: 76999 - protein, 163 aa, Homo sapiens
  MOD_RES (1)..(1): Any amino acid
XHNGYPVTPGIMSHVPLYPNSQPQVHLVPGNPPSLVSNVNGQPVQKALKEGKTLGAIQIIIGLAHIGLGSIMATVLVGEYLSISFYGGFPFWGGLWFIISGSLSVAAENQPYSYCLLSGSLGLNIVSAICSAVGVILFITDLSIPHPYAYPDYYPYAWGVFCQ

SEQ ID NO: 77000 - protein, 258 aa, Homo sapiens
MKSHRGDGEGQGPGPPPSRSQQLLGVLSAGLLKVVFVVFASLCAWYSGYLLAELIPDAPLSSAAYSIRSIGERPVLKAPVPKRQKCDHWTPCPSDTYAYRLLSGGGRSKYAKICFEDNLLMGEQLGNVARGINIAIVNYVTGNVTATRCFDMYEGDNSGPMTKFIQSAAPKSLLFMVTYDDGSTRLNNDAKNAIEALGSKEIRNMKFRSSWVFIAAKGLELPSEIQREKINHSDAKNNRYSGWPAEIQIEGCIPKERS

SEQ ID NO: 77001 - protein, 314 aa, Homo sapiens
MKNKNNVTEFILLGLTQNPEGQKVLFVTFLLIYMVTIMGNLLIIVTIMASQSLGSPMYFFLASLSFIDTVYSTAFAPKMIVDLLSEKKTISFQGCMAQLFMDHLFAGAEVILLVVMAYDRYMAICKPLHELITMNRRVCVLMLLAAWIGGFLHSLVQFLFIYQLPFCGPNVIDNFLCDLYPLLKLACTNTYVTGLSMIANGGAICAVTFFTILLSYGVILHSLKTQSLEGKRKAFYTCASHVTVVILFFVPCIFLYARPNSTFPIDKSMTVVLTFITPMLNPLIYTLKNAEMKSAMRKLWSKKVSLAGKWLYHS

SEQ ID NO: 77002 - protein, 273 aa, Homo sapiens
  MOD_RES (1)..(1): Any amino acid
XLALFQVSDTAWASAIAEPSSLTSRPVETTLENNEGGQEQGPSVEGLNVPTKATLEVSSIIKKKPNQAKKGLGAKKGSLGAQKLANTCFNEIEKQAQAADKMKEQEDLAKVVSKEESIVSSLRLAYKDLEIQMKKDEKMNISGKKNVDSDRLGMGFGNCRSVISHSVTSDMQTIEQESPIMAKPRKKYNDDSDDSYFTSSSRPTARRKPDYEPVENTDEAQKKFGNVKAISSDMYFGRQSQADYETRARLERLSASSSISSADLFEEPRKQPA

SEQ ID NO: 77003 - protein, 70 aa, Homo sapiens
  MOD_RES (1)..(1): Any amino acid
XIRAVGGRAVGGESPVVVSAPLICVGTQKAVSVYRTSNQAYGSRAPTVHEMPRVECSGTILSMFTWRKAS

SEQ ID NO: 77004 - protein, 73 aa, Homo sapiens
MSLRCGDAARTLGPRVFGRYFCSPVRPLSSLPDKKKELLQNGPDLQDFVSGDLADRSTWDEYKGNLKRQKGES

SEQ ID NO: 77005 - protein, 588 aa, Homo sapiens [sequence omitted]

SEQ ID NO: 77006 - protein, 533 aa, Homo sapiens
MSQDTEVDMKEVELNELEPEKQPMNAASGAAMSLAGAEKNGLVKIKVAEDEAEAAAAAKFTGLSKEELLKVAGSPGWVRTRWALLLLFWLGWLGMLAGAVVIIVRAPRCRELPAQKWWHTGALYRIGDLQAFQGHGAGNLAAPISGLKGRLDYLSSLKVKGLVLGPIHKNQKDDVAQTDLLQIDPNFGSKEDFDSLLQSAKKKSIRVILDLTPNYRGENSWFSTQVDTVATKVKDALEFWLQAGVDGFQVRDIENLKDASSFLAEWQNITKGFSEDRLLIAGTNSSDLQQILSLLESNKDLLLTSSYLSDSGSTGEHTKSLVTQYLNATGNRWCSWSLSQARLLTSFLPAQLLRLYQLMLFTLPGTPVFSYGDEIGLDAAALPGQPMEAPVMLWDESSFPDIPGAVSANMTVKGQSEDPGSLLSLFRRLSDQRSKERSLLHGDFHAFSAGPGLFSYIRHWDQNERFLVVLNFGDVGLSAGLQASDLPASASLPAKADLLLSTQPGREEGSPLELERLKLEPHEGLLLRFPYAA

SEQ ID NO: 77007 - protein, 322 aa, Homo sapiens
MATATIALVNGQQGGGSEPAAAAAVVAAGDKWKPPQGTDSIKMENGQSTAAKLGLPPLTPEQQEALQKAKKYAMEQSIKSVLVKQTIAHQQQQLTNLQMAAQRQRALAIMCRVYVGSIYYELGEDTIRQAFAPFGPIKSIDMSWDSVTMKHKGFAFVEYEVPEAAQLALEQMNSVMLGGRNIKVGRPSNIGQAQPIIDQLAEEARAFNRIYVASVHQDLSDDDIKSVFEAFGKIKSCTLARDPTTGKHKGYGFIEYEKAQSSQDAVSSMNLFDLGGQYLRVGKAVTPPMPLLTPATPGGLPPAAAVAAAAATAKITAQVRAH

SEQ ID NO: 77008 - protein, 511 aa, Homo sapiens
MKTKLNIYNMQFLLFVFLVWDPARLVLANIQEDEAKNNITIFTRILDRLLDGYDNRLRPGLGDSITEVFTNIYVTSFGPVSDTDMEYTIDVFFRQKWKDERLKFKGPMNILRLNNLMASKIWTPDTFFHNGKKSVAHNMTMPNKLLRIQDDGTLLYTMRLTVQAECPMHLEDFPMDAHSCPLKFGSYAYTTSEVTYIWTYNASDSVQVAPDGSRLNQYDLLGQSIGKETIKSSTGEYTVMTAHFHLKRKIGYFVIQTYLPCIMTVILSQVSFWLNRESVPARTVFGVTTVLTMTTLSISARNSLPKVAYATAMDWFIAVCYAFVFSALIEFATVNYFTKRGWAWDGKSVVNDKSPSIKAEGITLTYNSVKAILQGAKLIWSKYIAFSWPSLFQEKTLEYLEKWMDCLTFKQSSKKEKASVMIQNNAYAVAVANYAPNLSKDPVLSTISKSATTPEPNKKPENKPAEAKKTFNSVSKIDRMSRIVFPVLFGTFNLVYWATYLNREPVLGVSP

SEQ ID NO: 77009 - protein, 472 aa, Homo sapiens
MWRLPGARAALRVIRTAVEKLSRAEAGSQTAAGAMERAVVRCVPSEPKLSLSFALADGSHKNMQRDQSEPLGRVLSRIATNALKGHAKAAAAKKSRKSRPNASGGAACSGPGPEPAVFCEPVVKLYYREEAVAEDVLNVDAWQDGAVLQIGDVKYKVERNPPAFTELQLPRYIMAGFPVCPKLSLEFGDPASSLFRWYKEAKPGAAEPEVGVPSSLSPSSPSSSWTETDVEERVYTPSNADIGLRLKLHCTPGDGQRFGHSRELESVCVVEAGPGTCTFDHRHLYTKKVTEDALIRTVSYNILADTYAQTEFSRTVLYPYCAPYALELDYRQNLIQKELTGYNADVICLQEVDRAVFSDSLVPALEAFGLEGVFRIKQHEGLATFYRKSKFSLLSQHDISFYEALESDPLHKELLEKLVLYPSAQEKVLQRSSVLQVSVLQSTKDSSKRICVANTHLYWHPKGRFYLVSQVT

SEQ ID NO: 77010 - protein, 66 aa, Homo sapiens
MELRCGGLLFSSRFDSGNLAHVEKVESLSSDGEGVGGGASALTSGIASSPDYEFNVWTRPDCAETE

SEQ ID NO: 77011 - protein, 36 aa, Homo sapiens
  MOD_RES (1)..(1): Any amino acid
XTKRVLWTGRGSGRQSSSCCVHSFWRHHRYSDSSGL

SEQ ID NO: 77012 - protein, 228 aa, Homo sapiens
MKLFWLLFTIGFCWAQYSSNTQQGRTSIVHLFEWRWVDIALECERYLAPKGFGGVQVSPPNENVAIHNPFRPWWERYQPVSYKLCTRSGNEDEFRNMVTRCNNVGVRIYVDAVINHMCGNAVSAGTSSTCGSYFNPGSRDFPAVPYSGWDFNDGKCKTGSGDIENYNDATQVRDCRLSGLLDLALGKDYVRSKIAEYMNHLIDIGVAGFRIDASKHMWPGDIKAILDK

SEQ ID NO: 77013 - protein, 628 aa, Homo sapiens
MASYPSGSGKPKAKYPFKKRASLQASTAAPEARGGLGAPPLQSARSLPGPAPCLKHFPLDLRTSMDGKCKEIAEELFTRSLAESELRSAPYEFPEESPIEQLEERRQRLERQISQDVKLEPDILLRAKQDFLKTDSDSDLQLYKEQGEGQGDRSLRERDVLEREFQRVTISGEEKCGVPFTDLLDAAKSVVRALFIREKYMALSLQSFCPTTRRYLQQLAEKPLETRTYEQGPDTPVSADAPVHPPALEQHPYEHCEPSTMPGDLGLGLRMVRGVVHVYTRREPDEHCSEVELPYPDLQEFVADVNVLMALIINGPIKSFCYRRLQYLSSKFQMHVLLNEMKELAAQKKVPHRDFYNIRKVDTHIHASSCMNQKHLLRFIKRAMKRHLEEIVHVEQGREQTLREVFESMNLTAYDLSVDTLDVHADRNTFHRFDKFNAKYNPIGESVLREIFIKTDNRVSGKYFAHIIKEVMSDLEESKYQNAELRLSIYGRSRDEWDKLARWAVMHRVHSPNVRWLVQVPRLFDVYRTKGQLANFQEMLENIFLPLFEATVHPASHPELHLFLEHVDGFDSVDDESKPENHVFNLESPLPEAWVEEDNPPYAYYLYYTFANMAMLNHLRRGASTRLC

SEQ ID NO: 77014 - protein, 179 aa, Homo sapiens
MVVATLIVMNCVIVLNVSQRTPTTHAMSPRLRHVLLELLPRLLGSPPPPEAPRAASPPRRASSVGLLLRAEELILKKPRSELVFEGQRHRQGTWTAAFCQSLGAAAPEVRCCVDAVNFVAESTRDQEATGEVGQEPEAGGARQRPTTVSHAAGSCSCLFTDCADPSPGSVRLGAHGECP

SEQ ID NO: 77015 - protein, 36 aa, Homo sapiens
MANYFRDYANLCFEAFGDRVKHWITFSDPRVWWEFH

SEQ ID NO: 77016 - protein, 686 aa, Homo sapiens
  MOD_RES (1)..(1): Any amino acid
XKPKLPENYTDETWQKLKEAVEAIQNSTSIKYNLEELYQAVENLCSYKISANLYKQLRQICEDHIKAQIHQFREDSLDSVLFLKKIDRCWQNHCRQMIMIRSIFLFLDRTYVLQNSMLPSIWDMGLELFRAHIISDQKVQNKTIDGILLLIERERNGEAIDRSLLRSLLSMLSDLQIYQDSFEQRFLEETNRLYAAEGQKLMQEREVPEYLHHVNKRLEEEADRLITYLDQTTQKSLIATVEKQLLGEHLTAILQKGLNNLLDENRIQDLSLLYQLFSRVRGGVQVLLQQWIEYIKAFGSTIVINPEKDKTMVQELLDFKDKVDHIIDICFLKNEKFINAMKEAFETFINKRPNKPAELIAKYVDSKLRAGNKEATDEELEKMLDKIMIIFRFIYGKDVFEAFYKKDLAKRLLVGKSASVDAEKSMLSKLKHECGAAFTSKLEGMFKDMELSKDIMIQFKQYMQNQNVPGNIELTVNILTMGYWPTYVPMEVHLPPEMVKLQEIFKTFYLGKHSGRKLQWQSTLGHCVLKAEFKEGKKELQVSLFQTLVLLMFNEGEEFSLEEIKQATGIEDGELRRTLQSLACGKARVLAKNPKGKDIEDGDKFICNDDFKHKLFRIKINQIQMKETVEEQASTTERVFQDRQYQIDAAIVRIMKMRKTLSHNLLVSEVYNQLKFPVKDAEIQVT

SEQ ID NO: 77017 - protein, 139 aa, Homo sapiens
MSSKQATSPFACAADGEDAMTQDLTSREKEEGSDQHVASHLPLHPIMHNKPHSEELPTLVSTIQQDADWDSVLSSQQRMESENNKLCSLYSFRNTSTSPHKPDEGSRDREIMTSVTFGTPERRKGSLADVVDTLKQKKL

SEQ ID NO: 77018 - protein, 247 aa, Homo sapiens
MFETEADEKREMALEEGKGPGAEDSPPSKEPSPGQELPPGQDLPPNKDSPSGQEPAPSQEPLSSKDSATSEGSPPGPDAPPSKDVPPCQGAEGGLSLRVQNSLRRRTHSEGSLLQEPRGPCFASDTTLHCSDGEGAASTWGMPSPSTLKKELGRNGGSMHHLSLFFTGHRKMSGADTVGDDDEASRKRKSKNLAKDMKNKLGIFRRRNESPGAPPAGKADKMMKSFKPTSEEALKWGESLEKLLVHK

SEQ ID NO: 77019 - protein, 62 aa, Homo sapiens
MNDDPSMEENGVERVCPESLLQSREYSSLPLPRHTSSTDGTITSSETRSVRKRRIQDQLLPR

SEQ ID NO: 77020 - protein, 348 aa, Homo sapiens
MVQLAPAAAMDEVTFRSDTVLSDVHLYTPNHRHLMVRLNSVGQPVFLSQFKLLWSQDSWTDSGAKGGSHRDVHTKEPPSAETGSTGSPPGSGHAQEEDDVLGEEAQGSPHDIIRIEHTMATPLEDVGKQVWRGALLLADYILFRQDLFRGCTALELGAGTGLASIIAATMARTVYCTDVGADLLSMCQRNIALNSHLAATGGGIVRVKELDWLKDDLCTDPKVPFSWSQEEISDLYDHTTILFAAEVFYDDDLTDAVFKTLSRLAHRLKNACTAILSVEKRLNFTLRHLDVTCEAYDHFRSCLHALEQLADGKLRFVVEPVEASFPQLLVYERLQQLELWKIIAEPVT

SEQ ID NO: 77021 - protein, 43 aa, Homo sapiens
MEDSASASLSSAAATGTSTSTPAAPTARKQLDKEQVKRQWTLS

SEQ ID NO: 77022 - protein, 180 aa, Homo sapiens
  MOD_RES (1)..(1): Any amino acid
XAAVLNTALPAPVQAAAPVQASSTAQPRPPAQPQTLFQTQPLLQTTPAILPQPTAATAAAPTPKPVDTPPQITVQPAGFAFSPGIVIGTLPWVVNSASVAAPAPAQSLQVQAVTPQLLLNAQGQVIATLASSPLPPPVAVRKPSTPESPAKSEVQPIQPTPTVPQPAVVIASPAPAAKPS

SEQ ID NO: 77023 - protein, 481 aa, Homo sapiens
MSIGTCCFPGTNREAETFKEQGNAYYAKKDYNEAYNYYTKAIDMCPKNASYYGNRAATLMMLGRFREALGDAQQSVRLDDSFVRGHLREGKCHLSLGNAMAACRSFQRALELDHKNAQAQQEFKNANAVMEYEKIAETDFEKRDFRKVVFCMDRALEFAPACHRFKILKAECLAMLGRYPEAQSVASDILRMDSTNADALYVRGLCLYYEDCIEKAVQFFVQALRMAPDHEKACIACRNAKALKAKKEDGNKAFKEGNYKLAYELYTEALGIDPNNIKTNAKLYCNRGTVNSKLRKLDDAIEDCTNAVKLDDTYIKAYLRRAQCYMDTEQYEEAVRDYEKVYQTEKTKEHKQLLKNAQLELKKSKRKDYYKILGVDKNASEDEIKKAYRKRALMHHPDRHSGASAEVQKEEEKKFKEVGEAFTILSDPKKKTRYDSGQDLDEEGMNMGDFDPNNIFKAFFGGPGGFSFEASGPGNFFFQFG

SEQ ID NO: 77024 - protein, 56 aa, Homo sapiens
MNGTLDHPDQPDLDAIKMFVGQVPRTWSEKDLRELFEQYGAVYEINVLRDRSQNPP

SEQ ID NO: 77025 - protein, 120 aa, Homo sapiens
VLRPHTGNAVTAQRVRAHLEAAGHVCVLKDAFDFESRSEIANLILAENCEAALALHLYRGGRLLQGHRIPFGVIFGGTDVNEDANQAEKNTVMGRVLEEARFAVAFTESMKEMAQAQWVC

SEQ ID NO: 77026 - protein, 104 aa, Homo sapiens
MEAPLQTEMVELVPNGKHSEGLLPVITPMAGNQRVEDPARSCMEGKSFLQKSPSKEPHFTDFEGKTSFGMSVFNLSNAIMGSGILGLAYAMANTGIILFLHPCL

SEQ ID NO: 77027 - protein, 17 aa, Homo sapiens
MKSCGKRFHDEVGKFRF

SEQ ID NO: 77028 - protein, 2193 aa, Homo sapiens
MARGARPSAAGGGGGGAEPPERAGPGRPRGSPPGRARPSLAPRPGPEPSRPRAAPETSGGDTAGAGRCGGRRAAKLGPGRRGWWALLALQLHLLRALAQDDVAPYFKTEPGLPQIHLEGNRLVLTCLAEGSWPLEFKWMRDDSELTTYSSEYKYIIPSLQKLDAGFYRCVVRNRMGALLQRKSEVQVAYMGSFMDTDQRKTVSQGRAAILNLLPITSYPRPQVTWFREGHKIIPSNRIAITLENQLVILATTTSDAGAYYVQAVNEKNGENKTSPFIHLSIARDVGTPETMAPTIVVPPGNRSVVAGSSETTLECIASARPVEDLSVTWKRNGVRITSGLHSFGRRLTISNPTSADTGPYVCEAALPGSAFEPARATAFLFIIEPPYFTAEPESRISAEVEETVDIGCQAMGVPLPTLQWYKDAISISRLQNPRYKVLASGGLRIQKLRPEDSGIFQCFASNEGGEIQTHTYLDVTNIAPVFTQRPVDTTVTDGMTAILRCEVSGAPKPAITWKRENHILASGSVRIPRFMLLESGGLQIAPVFIQDAGNYTCYAANTEGSLNASATLTVWNRTSIVHPPEDHVVIKGTTATLHCGATHDPRVSLRYVWKKDNVALTPSSTSRIVVEKDGSLLISQTWSGDIGDYSCEIVSEGGNDSRMARLEVIELPHSPQNLLVSPNSSHSHAVVLSWVRPFDGNSPILYYIVELSENNSPWKVHLSNVGPEMTGVTVSGLTPARTYQFRVCAVNEVGRGQYSAETSRLMLPEEPPSAPPKNIVASGRTNQSIMVQWQPPPETEHNGVLRGYILRYRLAGLPGEYQQRNITSPEVNYCLVTDLIIWTQYEIQVAAYNGAGLGVFSRAVTEYTLQGVPTAPPQNVQTEAVNSTTIQFLWNPPPQQFINGINQGYKLLAWPADAPEAVTVVTIAPDFHGVHHGHITNLKKFTAYFTSVLCFTTPGDGPPSTPQLVWTQEDKPGAVGHLSFTEILDTSLKVSWQEPLEKNGIITGYQISWEVYGRNDSRLTHTLNSTTHEYKIQGLSSLTTYTIDVAAVTAVGTGLVTSSTISSGVPPDLPGAPSNLVISNISPRSATLQFRPGYDGKTSISRWIVEGQVGAIGDEEEWVTLYEEENEPDAQMLEIPNLTPYTHYRFRMKQVNIVGPSPYSPSSRVIQTLQAPPDVAPTSVTVRTASETSLRLRWVPLPDSQYNGNPESVGYRIKYWRSDLQSSAVAQVVSDRLEREFTIEELEEWMEYELQMQAFNAVGAGPWSEVVRGRTRESVPSAAPENVSAEAVSSTQILLTWTSVPEQDQNGLILGYKILFRAKDLDPEPRSHIVRGNHTQSALLAGLRKFVLYELQVLAFTRIGNGVPSTPLILERTKDDAPGPPVRLVFPEVRLTSVRIVWQPPEEPNGIILGYQIAYRLASSSPHTFTTVEVGATVRQFTATDLAPESAYIFRLSAKTRQGWGEPLEATVITTEKRERPAPPRELLVPQAEVTARSLRLQWVPGSDGASPIRYFTMQVRELPRGEWQTYSSSISHEATACVVDRLRPFTSYKLRLKATNDIGDSDFSSETEAVTTLQDVPGEPPGSVSATPHTTSSVLIQWQPPRDESLNGLLQGYRIYYRELEYEAGSGTEAKTLKNPIALHAELTDLKKYRRYEVIMTAYNIIGESPASAPVEVFVGEAAPAMAPQNVQVTPLTASQLEVTWDPPPPESQNGNIQGYKIYYWEADSQNETEKMKVLFLPEPVVRLKNLTSHTKYLVSISAFNAAGDGPKSDPQQGRTHQAAPGAPSFLAFSEITSTTLNVSWGEPAAANGILQGYRVVYEPLAPVQGVSKVVTVEVRGNWQRWLKVRDLTKGVTYFFRVQARTITYGPELQANITAGPAEGSPGSPRDVLVTKSASELTLQWTEGHSGDTPTTGYVIEARPSDEGLWDMFVKDIPRSATSYTLSLDKLRQGVTYEFRVVAVNEAGYGEPSNPSTAVSAQVEAPFYEEWWFLLVMALSSLIVILLVVFALVLHGQNKKYKNCSTGKGISTMEESVTLDNGGFAALELSSRHLNVKSTFSKKNGTRSPPRPSPGGLHYSDEDICNKYNGAVLTESVSLKEKSADASESEATDSDYEDALPKHSFVNHYMSDPTYYNSWKRRAQGRAPAPHRYEAVAGSEAGAQLHPVITTQSAGGVYTPAGPGARTPLTGFSSFV

SEQ ID NO: 77029 - protein, 130 aa, Homo sapiens
MMCSRVPSEQSSGTSLLPKDGAPFSWDSLDEDGLDDSLLELSEGEEDDGDVNYTEEEIDALLKEDDPSYEQSSGEDDGGHVEKGERGSQILLDTPREKNSSYSLGPVAETPDLFKLPQLSTSSGHGPAHT

SEQ ID NO: 77030 - protein, 165 aa, Homo sapiens
  MOD_RES (1)..(1): Any amino acid
XEGTVFFFGTYFLFQTASLEENGKVYGNWTFGTIVFTVLVFTVTLKLALDTRFWTWINHFVIWGSLAFYVFFSFFWGGIIWPFLKQQRMYFVFAQMLSSVSTWLAIILLIFISLFPEILLIVLKNVRRRSARRNLSCRRASDSLSARPSVRPLLLRTFSDESNVL

SEQ ID NO: 77031 - protein, 140 aa, Homo sapiens
MLRILFLLDVGGAQVLATGKTPGAEIDFKYALIGTAVGVAISAGFLALKICMIRRHLFDDDSSDLKSTPGGLSDTIPLKKRAPRKLQASTLFSFKSLLQCHHCIMEGLFKAKPQFLQKHLARSVQIHQLQKVKSFPKYAY

SEQ ID NO: 77032 - protein, 175 aa, Homo sapiens
AAAGAGAGGGTRRSGTDGTERATDAPPADASAAWGPHGPSTSVIVVWVGTNNHENTAEEVAGGIEAIVQLINTRQPQAKIIVLGLLPRGEKPNPLRQKNAKVNQLLKVSLPKLANVQLLDTDGGFVHSDGAISCHDMFDFLHLTGGGYAKICKPLHELIMQLLEETPEEKQTTIA

SEQ ID NO: 77033 - protein, 353 aa, Homo sapiens
MEFRKTMDIDHILDWQPPEVIQKYMPGGLCGYDRDGCPVWYDIIGPLDPKGLLFSVTKQDLLKTKMRDCERILHECDLQTERLGKKIETIVMIFDCEGLGLKHFWKPLVEVYQEFFGLLEENYPETLKFMLIVKATKLFPVGYNLMKPFLSEDTRRKIIVLGNNWKEGLLKLISPEELPAQFGGTLTDPDGNPKCLTKINYGGEIPKSMYVRDQVKTQYEHSVQINRGSSHQVEYEILFPGCVLRWQFSSDGADIGFGVFLKTKMGERQRAGEMTDVLPSQRYNAHMVPEDGNLTCSEAGVYVESESGKSCCHLPVIICSHELQNSHSNSQVMAYQMVRKCKLSRPLPLPASN

SEQ ID NO: 77034 - protein, 214 aa, Homo sapiens
MIESQEPVTFEDVAVDFTQEEWQQLNPAQKTLHRDVMLETYNHLVSVGCSGIKPDVIFKLEHGKDPWIIESELSRWIYPDRVKGLESSQQIISGELLFQREILERAPKDNSLYSVLKIWHIDNQMDRYQGNQDRVLRQVTVISRETLTDEMGSKYSAFGKMFNRCTDLAPLSQKFHKFDSCENSLKSNSDLLNYNRSYARKNPTKRFRCGRPPK

SEQ ID NO: 77035 - protein, 241 aa, Homo sapiens
MWYEDALASSHPIILYLHGNAGTRGGDHRVELYKVLSSLGYHVVTFDYRGWGDSVGTPSERGMTYDALHVFDWIKARSGDNPVYIWGHSLGTGVATNLVRRLCERETPPDALILESPFTNIREEAKSHPFSVIYRYFPGFDWFFLDPITSSGIKFANDENVKHISCPLLILHAEDDPVVPFQLGRKLYSIAAPARSFRDFKVQFVPFHSDLGYRHKYIYKSPELPRILREFLGKSEPEHQH

SEQ ID NO: 77036 - protein, 683 aa, Homo sapiens
MPSVSKAAAAALSGSPPQTEKPTHYRYLKEFRTEQCPLFSQHKCAQHRPFTCFHWHFLNQRRRRPLRRRDGTFNYSPDVYCSKYNEATGVCPDGDECPYLHRTTGDTERKYHLRYYKTGTCIHETDARGHCVKNGLHCAFAHGPLDLRPPVCDVRELQAQEALQNGQLGGGEGVPDLQPGVLASQAMIEKILSEDPRWQDANFVLGSYKTEQCPKPPRLCRQGYACPHYHNSRDRRRNPRRFQYRSTPCPSVKHGDEWGEPSRCDGGDGCQYCHSRTEQQFHPEIYKSTKCNDMRQTGYCPRGPFCAFAHVEKSLGMVNEWGCHDLHLTSPSSTGSGQPGNAKRRDSPAEGGPRGSEQDSKQNHLAVFAAVHPPAPSVSSSVASSLASSAGSGSSSPTALPAPPARALPLGPASSTVEAVLGSALDLHLSNVNIASLEKDLEEQDGHDLGAAGPRSLAGSAPVAIPGSLPRAPSLHSPSSASTSPLGSLSQPLPGPVGSSAMTPPQQPPPLRSEPGTLGSAASSYSPLGLNGVPGSIWDFVSGSFSPSPSPILSAGPPSSSSASPNGAELARVRRQLDEAKRKIRQWEESWQQVKQVCDAWQREAQEAKERARVADSDRQLALQKKEEVEAQVIFQLRAKQCVACRERAHGAVLRPCQHHILCEPCAATAPECPYCKGQPLQW

SEQ ID NO: 77037 - protein, 156 aa, Homo sapiens
MELRSYQWEVIMPALEGKNIIIWLPTGAGKTRAAAYVAKRHLETVDGAKVVVLVNRVHLVTQHGEEFRRMLDGRWTVTTLSGDMGPRAGFGHLARCHDLLICTAELLQMALTSPEEEEHVELTVFSLIVVDECHHTHKDTVYNVIMSQYLELKLQR

SEQ ID NO: 77038 - protein, 54 aa, Homo sapiens
MPNPRPGKPSAPSLALGPSPGASPSWRAAPKASDLLGARGPGGTFQGRDLRGGA

SEQ ID NO: 77039 - protein, 177 aa, Homo sapiens
GSSRLLVASWVMQIVLGILSAVLGGFFYIRDYTLLVTSGAAIWTGAVAVLAGAAAFIYEKRGGTYWALLRTLLTLAAFSTAIAALKLWNEDFRYGYSYYNSACRISSSSDWNTPAPTQSPEEVRRLHLCTSFMDMLKALFRTLQAMLLGVWILLLLASLTPLWLYCWRMFPTKGVSP

SEQ ID NO: 77040 - protein, 175 aa, Homo sapiens
MAEGDEAARGQQPHQGLWRRRRTSDPSAAVNHVSSTTSLEYGRLAMEEIYQKPFQTLMFLIRDWSYPYEHSYGLEGGKQFLEKRLQVKQNQHEELQNVRKHIHNCFSNLGCFLLPHPGLKVATNPSFDGRLKDIDEDFKRELRNLVPLLLAPENLVEKEISGSKVTCRDLVEYFK

SEQ ID NO: 77041 - protein, 142 aa, Homo sapiens
MGCTVSAEDKAAAERSKMIDKNLREDGEKAAREVKLLLLGSSTRMATPRRNAGSTGRLSTATPSSPSWPLSKPWATCRSTLPTPPERTTPGSYLHCPAPPRSKACSLMTCPASSGGSGLTMVCRPALAAQGNTSSTTQLPTT

SEQ ID NO: 77042 - protein, 122 aa, Homo sapiens
MVSSFRVSELQVLLGFAGRNKSGRKHDLLMRALHLLKSGCSPAVQIKIRELYRRRYPRTLEGLSDLSTIKSSVFSLDGGSSPVEPDLAVAGIHSLPSTSVTPHSPSSPVGSVLLQDTKPTFE

SEQ ID NO: 77043 - protein, 126 aa, Homo sapiens
MASVAVDPQPSVVTRVVNLPLVSSTYDLMSSAYLSTKDQYPYLKSVCEMAENGVKTITSVAMTSALPIIQKLEPQIAVANTYACKGLDRIEERLPILNQPSTQANTCFPNLDLDVCLKNNGHFLTS

SEQ ID NO: 77044 - protein, 178 aa, Homo sapiens
MGQTSVSTLSPQPGSVDGLDKASIANSDGPTAGSQTPPFKRKGKLSTIGKIFKPWKWRKKKTSDKFRETSAVLERKISTRQSREELIRRGVLKELPDQAGSSHSKKTTGSKASASPSTSSTSSRPKASKETVSSKAGTVGTTKGKRKTDKQPITSHLSSDTTTSGTSDLKGEPAETRV

SEQ ID NO: 77045 - protein, 571 aa, Homo sapiens
MPPDDVTSLLHLGGGDDSDGADMIAIGLQEVNSMLNKRLKDALFTDQWSELFMDALGPFNFVLVSSVRMQGVILLLFAKYYHLPFLRDVQTDCTRTGLGGYWGNKGGVSVRLAAFGHMLCFLNCHLPAHMDKAEQRKDNFQTILSLQQFQGPGAQGILDHDLVFWFGDLNFRIESYDLHFVKFAIDSDQLHQLWEKDQLNMAKNTWPILKGFQEGPLNFAPTFKFDVGTNKYDTSAKKRKPAWTDRILWKVKAPGGGPSPSGRKSHRLQVTQHSYRSHMEYTVSDHKPVAAQFLLQFAFRDDMPLVRLEVADEWVRPEQAVVRYRMETVFARSSWDWIGLYRVGFRHCKDYVAYVWAKHEDVDGNTYQVTFSEESLPKGHGDFILGYYSHNHSILIGITEPFQISLPSSELASSSTDSSGTSSEGEDDSTLELLAPKSRSPSPGKSKRHRSRSPGLARFPGLALRPSSRERRGASRSPSPQSRRLSRVAPDRSSNGSSRGSSEEGPSGLPGPWAFPPAVPRSLGLLPALRLETVDPGGGGSWGPDREALAPNSLSPSPQGHRGLEEGGLGP

SEQ ID NO: 77046 - protein, 138 aa, Homo sapiens
MAFNFGAPSGTSGTAAATAAPAGFGGLETANSTASGFNFGGFGLTANPAVNFNIGNFGVSTTSATPFNFGNSLASAETHSCCLEVGLEDLGQHLQLQVLHSAFLPQLTQALLDSLVVLRTKVLDLVLVLAQQRELVLV

SEQ ID NO: 77047 - protein, 137 aa, Homo sapiens
MERGDQPKRTRQATPCATRLFLHPRGSDTLPLNENIFNCLYKNPEATFKLICFPWMGGGSTHFAKWGQDTHDLLEVHSLRLPGRESRVEEPLENDISQLVDEVVCALQPVIQDKPFAFFGHRYLISVLKDFRGVSSI

SEQ ID NO: 77048 - protein, 79 aa, Homo sapiens
MVLNVEREKNMILEQQAQLQREKEQDQMKLYAKLEKLDVLEKECFRLTTTQKTAEDKIKHLEEKLKEEEHQRKLFQDKA

SEQ ID NO: 77049 - protein, 558 aa, Homo sapiens
MQILLSGVHSAAISCGFESILEGLFGPALLKDLSLFKDCEPESISDWTFDENCLFCCLRRDKVKGHLVGLDEPASGAGQEALLKQEQAKIIRFERQAEEFLNAVFYRKDSPWVSDPNIPLVAREIMQRMIQQFAAEYTSKNSSTQDPSQPNSTKNQSLPKASPVTTSPTAATTQNPVLSKLLMADQDSPLDLTVRKSQSEPSEQDGVLDLSTKKSPCAGSTSLSHSPGCSSTQGNGRPGRPSQYRPDGLRSGDGVPPRSLQDGTREGFGHSTSLKVPLARSLQISEELLSRNQLSTAASLGPSGLQNHGQHLILSREASWAKPHYEFNLSRMKFRGNGALSNISDLPFLAENSAFPKMALQAKQDGKKDVSHSSPVDLKIPQVRGMDLSWESRTGDQYSYSSLVMGSQTESALSKKLRAILPKQSRKSMLDAGPDSWGSDAEQSTSGQPYPTSDQEGDPGSKQPRKKRGRYRQYNSEILEEAISVVMSGKMSVSKAQSIYGIPHSTLEYKVKERLGTLKNPPKKKMKLMRSEGPDVSVKIELDPQGEAAQSANESKNE

SEQ ID NO: 77050 - protein, 242 aa, Homo sapiens
MGWGGGGGCTPRPPIHQQPPERRVVTVVFLGLLLDLLAFTLLLPLLPGLLESHGRAHDPLYGSWQGGVDWFATAIGMPVEKRYNSVLFGGLIGSAFSVLQFLCAPLTGATSDCLGRRPVMLLCLMGVATSYAVWATSRSFAAFLASRLIGGISKGNVSLSTAIVADLGSPLARSQGMPPTCCSSSASCQRRCPWRNGRPLSPWGSVMRLICSAPWPCCASRLSLVARTHPLETGSAACAAWA

SEQ ID NO: 77051 - protein, 129 aa, Homo sapiens
VDSPDEREEWMRAIQMVANSLKQRAPGEDPMDYKCGSPSDSSTTEEMEVAVSKARAKVTMNDFDYLKLLGKGTFGKVILVREKATGRYYAMKILRKEVIIAKSVCRMKSLTQSPRAGSSRTPGTRSSLR

SEQ ID NO: 77052 - protein, 96 aa, Homo sapiens
MPAMLPTGSHSAVLPPSHCSTAPPSTSQEPSSSADPKLCLSPPTSDSRQERNVQFGLAYQEGRLQKLLKMNGPEDLPKSYDYDLIIIGGGSGGLAA

SEQ ID NO: 77053 - protein, 84 aa, Homo sapiens
  MOD_RES (1)..(1): Any amino acid
XGQASTRQKKRHREDIEDYISLFPLDDVQPSKLMRLLSSNEDDANILSSPTDRSMSSSLSASQLHTVNMRDPLNRVLVPPSPRV

SEQ ID NO: 77054 - protein, 2517 aa, Homo sapiens
MPPLLAPLLCLALLPALAARGPRCSQPGETCLNGGKCEAANGTEACVCGGAFVGPRCQDPNPCLSTPCKNAGTCHVVDRRGVADYACSCALGFSGPLCLTPLDNACLTNPCRNGGTCDLLTLTEYKCRCPPGWSGKSCQQADPCASNPCANGGQCLPFEASYICHCPPSFHGPTCRQDVNECGQKPGLCRHGGTCHNEVGSYRCVCRATHTGPNCERPYVPCSPSPCQNGGTCRPTGDVTHECACLPGFTGQNCEENIDDCPGNNCKNGGACVDGVNTYNCRCPPEWTGQYCTEDVDECQLMPNACQNGGTCHNTHGGYNCVCVNGWTGEDCSENIDDCASAACFHGATCHDRVASFYCECPHGRTGLLCHLNDACISNPCNEGSNCDTNPVNGKAICTCPSGYTGPACSQDVDECSLGANPCEHAGKCINTLGSFECQCLQGYTGPRCEIDVNECVSNPCQNDATCLDQIGEFQCICMPGYEGVHCEVNTDECASSPCLHNGRCLDKINEFQCECPTGYTGTHCEVDIDECDPDPCHYGSCKDGVATFTCLCRPGYTGHHCETNINECSSQPCRHGGTCQDRDNAYLCFCLKGTTGPNCEINLDDCASSPCDSGTCLDKIDGYECACEPGYTGSMCNINIDECAGNPCHNGGTCEDGINGFTCRCPEGYHDPTCLSEVNECNSNPCVHGACRDSLNGYKCDCDPGWSGTNCDINNNECESNPCVNGGTCKDMTSGYVCTCREGFSGPNCQTNINECASNPCLNQGTCIDDVAGYKCNCLLPYTGATCEVVLAPCAPSPCRNGGECRQSEDYESFSCVCPTGWQGQTCEVDINECVLSPCRHGASCQNTHGGYRCHCQAGYSGRNCETDIDDCRPNPCHNGGSCTDGINTAFCDCLPGFRGTFCEEDINECASDPCRNGANCTDCVDSYTCTCPAGFSGIHCENNTPDCTESSCFNGGTCVDGINSFTCLCPPGFTGSYCQHDVNECDSQPCLHGGTCQDGCGSYRCTCPQGYTGPNCQNLVHWCDSSPCKNGGKCWQTHTQYRCECPSGWTGLYCDVPSVSCEVAAQRQGVDVARLCQHGGLCVDAGNTHHCRCQAGYTGSYCEDLVDECSPSPCQNGATCTDYLGGYSCKCVAGYHGVNCSEEIDECLSHPCQNGGTCLDLPNTYKCSCPRGTQGVHCEINVDDCNPPVDPVSRSPKCFNNGTCVDQVGGYSCTCPPGFVGERCEGDVNECLSNPCDARGTQNCVQRVNDFHCECRAGHTGRRCESVINGCKGKPCKNGGTCAVASNTARGFICKCPAGFEGATCENDARTCGSLRCLNGGTCISGPRSPTCLCLGPFTGPECQFPASSPCLGGNPCYNQGTCEPTSESPFYRCLCPAKFNGLLCHILDYSFGGGAGRDIPPPLIEEACELPECQEDAGNKVCSLQCNNHACGWDGGDCSLNFNDPWKNCTQSLQCWKYFSDGHCDSQCNSAGCLFDGFDCQRAEGQCNPLYDQYCKDHFSDGHCDQGCNSAECEWDGLDCAEHVPERLAAGTLVVVVLMPPEQLRNSSFHFLRELSRVLHTNVVFKRDAHGQQMIFPYYGREEELRKHPIKRAAEGWAAPDALLGQVKASLLPGGSEGGRRRRELDPMDVRGSIVYLEIDNRQCVQASSQCFQSATDVAAFLGALASLGSLNIPYKIEAVQSETVEPPPPAQLHFMYVAAAAFVLLFFVGCGVLLSRKRRRQHGQLWFPEGFKVSEASKKKRREPLGEDSVGLKPLKNASDGALMDDNQNEWGDEDLETKKFRFEEPVVLPDLDDQTDHRQWTQQHLDAADLRMSAMAPTPPQGEVDADCMDVNVRGPDGFTPLMIASCSGGGLETGNSEEEEDAPAVISDFIYQGASLHNQTDRTGETALHLAARYSRSDAAKRLLEASADANIQDNMGRTPLHAAVSADAQGVFQILIRNRATDLDARMHDGTTPLILAARLAVEGMLEDLINSHADVNAVDDLGKSALHWAAAVNNVDAAVVLLKNGANKDMQNNREETPLFLAAREGSYETAKVLLDHFANRDITDHMDRLPRDIAQERMHHDIVRLLDEYNLVRSPQLHGAPLGGTPTLSPPLCSPNGYLGSLKPGVQGKKVRKPSSKGLACGSKEAKDLKARRKKSQDGKGCLLDSSGMLSPVDSLESPHGYLSDVASPPLLPSPFQQSPSVPLNHLPGMPDTHLGIGHLNVAAKPEMAALGGGGRLAFETGPPRLSHLPVASGTSTVLGSSSGGALNFTVGGSTSLNGQCEWLSRLQSGMVPNQYNPLRGSVAPGPLSTQAPSLQHGMVGPLHSSLAASALSQMMSYQGLPSTRLATQPHLVQTQQVQPQNLQMQQQNLQPANIQQQQSLQPPPPPPQPHLGVSSAASGHLGRSFLSGEPSQADVQPLGPSSLAVHTILPQESPALPTSLPSSLVPPVTAAQFLTPPSQHSYSSPVDNTPSHQLQVPEHPFLTPSPESPDQWSSSSPHSNVSDWSEGVSSPPTSMQSQIARIPEAFK

SEQ ID NO: 77055 - protein, 175 aa, Homo sapiens
  MOD_RES (1)..(1): Any amino acid
XFINKLQPGSVKKINESTQNWHQLENIGNFIKAITKYGVKPHDIFEANDLFENTNHTQVQSTLLALASMAKTKGNKVNVGVKYAEKQERKFEPGKLREGRNIIGLQAGMTAPGTKRQIFEPGLGMEHCDTLNVSLQMGSNKGASQRGMTVYGLPRQVYDPKYCLTPEYPELGEPA

SEQ ID NO: 77056 - protein, 132 aa, Homo sapiens
MDSLEEPQKKVFKARKTMRVSDRQQLEAVYKVKEELLKTDVKLLNGNHENGDLDPTSPLENMDYIKDKEEVNGIEEICFDPEGSKAEWKETPCILSVNVKNKQDDDLNCEPLSPHNITPEPVSKLPAEPVSG

SEQ ID NO: 77057 - protein, 178 aa, Homo sapiens
MASKQTKKKEVHRINSAHGSDKSKDNVQSGSTEQKKGKFPLWPEWSEADINSEKWDAGKGAKEKDKTGKSPVFHFFEDPEGKIELPPSLKIYSWKRPQDILFSQTPVVVKNEITFDLFSANEHLLCSELMRWIISEIYAVWKIFNGGILSNYFKGTSGEPPLLPWKPWEHIYSLCKAV

SEQ ID NO: 77058 - protein, 353 aa, Homo sapiens
MALIPDLAMETWLLLAVSLVLLYLVFGAYSMDVITSTSFGVNIDSLNNPQDPFVENTKKLLRFDFLDPFFLSITVFPFLIPILEVLNICVFPREVTNFLRKSVKRMKESRLEDTQKHRVDFLQLMIDSQNSKETESHKALSDLELVAQSIIFIFAGYETTSSVLSFIMYELATHPDVQQKLQEEIDAVLPNKAPPTYDTVLQMEYLDMVVNETLRLFPIAMRLERVCKKDVEINGMFIPKGVVVMIPSYALHRDPKYWTEPEKFLPERFSKKNKDNIDPYIYTPFGSGPRNCIGMRFALMNMKLALIRVLQNFSFKPCKETQIPLKLSLGGLLQPEKPVVLKVESRDGTVSGA

SEQ ID NO: 77059 - protein, 529 aa, Homo sapiens
MVRTQTESSTPPGIPGGSRQGPAMDGTAAEPRPGAGSLQHAQPPPQPRKKRPEDFKFGKILGEGSFSTVVLARELATSREYAIKILEKRHIIKENKVPYVTRERDVMSRLDHPFFVKLYFTFQDDEKLYFGLSYAKNGELLKYIRKIGSFDETCTRFYTAEIVSALEYLHGKGIIHRDLKPENILLNEDMHIQITDFGTAKVLSPESKQARANSFVGTAQYVSPELLTEKSACKSSDLWALGCIIYQLVAGLPPFRAGNEYLIFQKIIKLEYDFPEKFFPKARDLVEKLLVLDATKRLGCEEMEGYGPLKAHPFFESVTWENLHQQTPPKLTAYLPAMSEDDEDCYGNYDNLLSQFGCMQVSSSSSSHSLSASDTGLPQRSGSNIEQYIHDLDSNSFELDLQFSEDEKRLLLEKQAGGNPWHQFVENNLILKMGPVDKRKGLFARRRQLLLTEGPHLYYVDPVNKVLKGEIPWSQELRPEAKNFKTFFVHTPNRTYYLMDPSGNAHKWCRKIQEVWRQRYQSHPDAAVQ

SEQ ID NO: 77060 - protein, 80 aa, Homo sapiens
MSWKRNYFSGGRGSVQGMFAPRSSTSIAPSKGLSNEPGQNSCFLNSALQVLWHLDIFRRSFRQLTTHKCMGDSCIFCALK

SEQ ID NO: 77061 - protein, 1968 aa, Homo sapiens
MKQRKGQGSGGSRGRKKRGLSDISPSTSLPPLVEGQLRCFLKLTVNRVIWKIAKPPTCVLVRVRWWGETSDGTLFCPRDALQTEPKAVRTTTRYAIRCGPKQFTSYLTDMAVLVLEVITKLDGLPIGRVQINGLAQLSPTHQINGFFTIVSSTSKKLGELQVSLALEPLSETYDSYHPLPTTDMTENVLLSKQGFRENTEPSSTQFQVPSRPRDIHTIKIDGKELAANSSRSTTPRGKDHVCFAENPDTIKDSSFGLQHSLNSGQSLESVTLKGRAPRKQMSLLNSSEFQPQIRTVAKSHSDSCILSSNNLPTKDLLSALLEQGNKLRNAMVISAMKSSPETSMLLDQVHPPINEDSLRASTQIRAFSRNRFKDHIEDHLLPSTENTFWRHDTKADTRAIQLLLGSAELSQGNFWDGLGSPPDSPSPGSDVYCISELNDPQYDQSLLENLFYTAPKSDTSISDFLSEEDDIVPSKKISQSTALARSSKVLESSDHKLKKRSAGKRNRNLVEQQMLSETPEDAQTMTLSVDRLALLGRTHSVRIIIETMGVPPDSPQMTPGKKSYAGPPPKVTTAKKRTFFVEYHFPVGFSESGLGKTALITEVVRLASSKITDGKVKFQQRFVFPVQFGGPMIEHWWNSNLTFQIYVKKTPQKKPEVIGSVSLSLRAVIQSELLSFSDQLPVQQENGQSPFGPLKVTMELITDNKDFTGINTKLSGNTHYTPLCAPTSPNKALPELNQDMTCTKNPQNLNQIHEETAKKAQNLVLPNRKSPSPVAPHPSTFVATPASHNLVNQTNGTTKESALLLHVLLMVPDGKDFISGESEKQSPCNVYLNCKLFSTEEVTRSVIAWGTTQPVFNFSQVIPVSLSSKYLERLKNNVMVIETWNKVRSPGQDKLLGLVKLPLHQFYMSFKDAKISRLLLDAQYPVVAVDSYMPVIDVFSGHQNGSLRVFLAMGSSNQIMALQRLKNEEGTLPPFSPRPAHFLDQPTAASVAMAEDRGNGLMEHCFEIHIEMVKGLAPLQATVWGEADCYVQYYFPVQHSQSSVLKGPEFLENGITLKPFRTATTLCVPDPIFNSEHHHSLLLPAEVPVQRLLLSAFSAQGLVPGGGVQFEIWCRYYYPNVRDQKVAKGTLPLSRICAMVTTQHREDVGIQTFNLPLTPRIENRKELRNQSSGLLDVGLRYRRSPRTAEGVLAARTVSISVQIIRACGLQAAAKALAEREPALQFSATVGVNASVTTHLSFLPQGEQRRTHPVACSFCPEFSHHVEFTCNLVTQHCSGEACFLAELLEFAEVIFAVYHENTKSASDIISIESCKEYLLGVVKVPTKELLIKRSGITGWYPIILPEDGGLPHGLELMQKIVGGLELSISFTHRGDRERVLEAAEHLGWSFENSLKDFVRMDEGEPATVTISTPRLWLPIHCVLLAGHNHIHKNTYCYLRYKFYDHEAFWTPLKKPKESVNKKQIMVTFKASKRAEVTRGPSLLWYFREERLEIQVWRAYGNDSVERPHQTDSWIGSAYVDLARLGERSARTLTVSGVYPLFGRNASNLSGAALRVHVVLSSLSSHLEPTHELDSMDCSSHSESEQLPRRNDEVQLSPPEVISCHQKSPASTQVPCSSTTAEVRLTQEGPADLDGTFAVSILVERAMHLSLKGSPLTERKVSIPSCCVSFATADESSPVYTQVVENTDSPIWNFQQQSRLSKELLLDPQQTLVFKVWHKGDEERVIGFASVDLSPLLSGFQFVCGWYNITDFSGECQGQIKVAVSPLESLIHFKEERQARRGVETSKSLIPIYSPFSFPASDTYAAFSSHMARQTLDQLAHASSKELDFSSPGRSDTTRSQASRHEEHVQNIRRFHESLHLQGEAPLPCDDKLTTSPLSSQTSILTSLRKNLSELDQIQRYFRQKLTKPFLPLSPQTQTAISQHQESCRDHLGPGASSLDPGSQCILEKSSNLVLQVSSLITGLPAPNDS

SEQ ID NO: 77062 - protein, 270 aa, Homo sapiens
MSSSCSGLSRVLVAVATALVSASSPCPQAWGPPGVQYGQPGRSVKLCCPGVTAGDPVSWFRDGEPKLLQGPDSGLGHELVLAQADSTDEGTYICQTLDGALGGTVTLQLGYPPARPVVSCQAADYENFSCTWSPSQISGLPTRYLTSYRKKTVLGADSQRRSPSTGPWPCPQDPLGAARCVVHGAEFWSQYRINVTEVNPLGASTRLLDVSLQSILRPDPPQGLRVESVPGYPRRLRASWTYPASWPCQPHFLLKFRLQYRPAQHPAWST

SEQ ID NO: 77063 - protein, 178 aa, Homo sapiens
MASRCWRWWGWSAWPRTRLPPAGSTPSFCHHFSTQEKTPQICVVGSGPAGFYTAQHLLKRVEALCSQPRVLNSPALSGEGEDLGASQPLSLGPTSCHPVPQQHPQAHVDIYEKQPVPFGLVRFGVAPDHPEVKTAHSGRCAFWGNVEVGRDVTVPELQEAYHAVVLSYGAEDHRALEI

SEQ ID NO: 77064 - protein, 179 aa, Homo sapiens
  MOD_RES (1)..(1): Any amino acid
XKVAQWMIQQPHKAATFFGCIGIDKFGEILKRKAAEAHVDAHYYEQNEQPTGTCAACITGDNRSLIANLAAANCYKKEKHLDLEKNWMLVEKARVCYIAGFFLTVSPESVLKVAHHASENNRIFTLNLSAPFISQFYKESLMKVMPYVDILFGNETEAATFAREQGFEVFCLNWSLTSL

SEQ ID NO: 77065 - protein, 93 aa, Homo sapiens
MEKFDKKRFRYIILKQKFLEALCVNNAMSAEDEPQHLEFTMQEAVQCLHALEEYCPSKDDYSKLCLLLTLPRLTNHAEFKDWNPSTARVHCFE

SEQ ID NO: 77066 - protein, 136 aa, Homo sapiens
MQAEDRSQFGSAAEMLSEQTAALGTGWESMNVQLDGAEPQVERGSQEERPWRTVPGPLEHLCCDLEEEPQSLQEKAQSAPWVPAIPQEGNTGDWEMAAALLAAGSQGLVTIKDVSLCFSQEEWRSLDPSQTDFYGE

SEQ ID NO: 77067 - protein, 75 aa, Homo sapiens
MLHARCCLNQKGTILGLDLQNCSLEDPGPNFHQAHTTVIIDLQANPLKGDLANTFRGFTQLQTLILPQHVNCPGG

SEQ ID NO: 77068 - protein, 161 aa, Homo sapiens
MSLLLLVVSALHILILILLFVATLDKSWWTLPGKESLNLWLAEGGAGPHGALPHSLLSLLHPVHVPALHHATRRSLLCHRPLPALHQRGGVYWRLDLCHSRRGDPGEAPARGQLRILLRPGLGGLPPRPGQRHHLHPPTEAGVSAPPRSAAPAPSRPPSPR

SEQ ID NO: 77069 - protein, 132 aa, Homo sapiens
MDLSANQDEETDQETFQLEIDRDTKKCAFRTHTGKYWTLTATGGVQSTASSKNASCYFDIEWRDRRITLRASNGKFVTSKKNGQLAASVETAGDSELFLMKLINRPIIVFRGEHGFIGCRKVTGTLDANRSS

SEQ ID NO: 77070 - protein, 124 aa, Homo sapiens
MALRRPPRLRLCARLPDFFLLLLFRGDLAGRAEILGKTSLKIWNVTRRDSALYRCEVVARNDRKEIDEIVIELTVQVKPVTPVCRVPKAVPVGKMATLHCQESEGHPRPHYSWYRNDVPLPTDS

SEQ ID NO: 77071 - protein, 81 aa, Homo sapiens
MVPRLLLRAWPRGPAVGPGAPSRPLSAGSGPGQYLQRSIVPTMHYQDSLPRLPIPKLEDTIRRYLSAQKPLLNDGQFRTLV

SEQ ID NO: 77072 - protein, 155 aa, Homo sapiens
VSRCGEMLHIRYRLLRQALAECLGTLILVMFGCGSVAQVVLSRGTHGGFLTINLAFGFAVTLGILIAGQVSGAHLNPAVTFAMCFLAREPWIKLPIYTLAQTLGAFLGAGIVFGLYYGKHSPPCPPPLPPSLCSGPAGTRPFDDRRLGPAQAPGS

SEQ ID NO: 77073 - protein, 43 aa, Homo sapiens
MRQMIRSFSEPFGRDLLSISDGRGRAHNRRGHNDGEDSLTILL

SEQ ID NO: 77074 - protein, 188 aa, Homo sapiens
MALLAMHSWRWAAAAAAFEKRRHSAILIRPLVSVSGSGPQWRPHQLGALGTARAYQLKDVDTRKIIKAMLSYVWPKDRPDLRARVAISLGFLGGAKAMNIVVPFMFKYAVDSLNQMSGNMLNLSDAPNTVATMATAVLIGYGVSRAGAAFFNEVRNAVFGKVAQNSIRRIAKNVFLHLHNLDLGFHLS

SEQ ID NO: 77075 - protein, 96 aa, Homo sapiens
MANMNSDSRHLGTSEVDHERDPGPMNIQFEPSDLRSKRPFCIEPTNIVNVNHVIQRVSDHASAMNKRIHYYSRLTTPADKALIAPDHVVPAPEECY

SEQ ID NO: 77076 - protein, 362 aa, Homo sapiens
MSGGSADYNREHGGPEGMDPDGVIESNWNEIVDNFDDMNLKESLLRGIYAYGFEKPSAIQQRAIIPCIKGYDVIAQAQSGTGKTATFAISILQQLEIEFKETQALVLAPTRELAQQIQKVILALGDYMGATCHACIGGTNVRNEMQKLQAEAPHIVVGTPGRVFDMLNRRYLSPKWIKMFVLDEADEMLSRGFKDQIYEIFQKLNTSIQVVLLSATMPTDVLEVTKKFMRDPIRILVKKEELTLEGIKQFYINVEREEWKLDTLCDLYETLTITQAVIFLNTRRKVDWLTEKMHARDFTVSALHGDMDQKERDVIMREFRSGSSRVLITTDLLARGIDVQQVSLVINYDLPTNRENYIHRSR

SEQ ID NO: 77077 - protein, 167 aa, Homo sapiens
MGRGSGTFERLLDKATSQLLLETDWESILQICDLIRQGDTQAKYAVNSIKKKVNDKNPHVALYALEVMESVVKNCGQTVHDEVANKQTMEELKDLLKRQVEVNVRNKILYLIQAWAHAFRNEPKYKVVQDTYQIMKVEGHVFPEFKESDAMFAAERRPPPAACTLHL

SEQ ID NO: 77078 - protein, 223 aa, Homo sapiens
MDMLQDLESLQFEYGVPEEDRIWLYLQGRSRGLMIEACAHATFFCKLLYNLRASLNKNQSSRHLSIGSLNSATPEEFKVGIIGGGHLGKQLAGTLLQLGPIPAESLRISTRRPETLGELQKLGIKCFYHNADLVSWADVIFLCCLPSQLPNICVEIYTSLEKASIVYSFVAAIPLPRLKLLLNHTNILRPQYQYDEDSVSVWGANKGVIAALQDPTILQATCP

SEQ ID NO: 77079 - protein, 26 aa, Homo sapiens
MAPKKLSCLRSLLLPLSLTLLLPQAD

SEQ ID NO: 77080 - protein, 3176 aa, Homo sapiens
MANKMEMKETAKQDTLWQMSSTSKPVLNTREVNPLKKFTIPKIRRTAEKVYLSPCYTNSREYSFIHDTLNQCRLDVNCDLQSLWQFGDTKLVHNEELEKNFTAKRSEMRESGRHCRELEEQFCFLALPQSDVAQIYQNGISTRASTLKILGNPLLGIYMFRHVDIALNYSHSQSITVESILIFKVLFGKVKKIQPSVDKNKVSLDPSPNFDCHMSRNAPSLKDTIELQAYSSAVYFYEYSVLSKPVDKPRQCLPYAVVTVKFLGSKVDNGRLMTSLRFLSTGFPKRAERTCSLNNCTVAKRFGKGKDATVTFVHFKKPVDPFVQENCLCNALNSEINPFISNISNSYGNVQNGNISIPETYSGQTEHSLAEIRDTSQVLAHDSDISLMPSDAKDSVNGDLLLNWTSLKNILSGLNASFPLHNNTGSSTVTTSKSIKDPRLMRREESMGEQSSTAGLNEVLQFEKSSDNVNSEIKSTPSNSASSSEVVPGDCAVLTNGLDTPCFKTSVNDSQSWAHNMGSEDYDCIPPNKVTMAGQCKDQGNFSFPISVSNVVSEVENQNHSEEKAQRAQQESGNAYTKEYSSHIFQDSQSSDLKTIYQTGCQTSTVFPLKKKVSIDEYLQNTGKMKNFADLEDSSKHEEKQTSWKEIDNDFTNETKISPIDNYIVLHQEYKESESHNSFGKSCDKILITQELEITKSSTSTIKDKDELDHLALEWQITPSFESLSQKHPQHSVEYEGNIHTSLAIAQKLMELKLGKINQNYASIITEAFPKPKDIPQAKEMFIDTVISSYNIETAHDSSNCSITREHICVHRKNENEPVSLENIQRDYKETAYVEDRGQDHNLFCNSQLSNDIWLNVNFKKQTDRENQNEAKENSASCVENNIENIYGDKKQDSHTNENFSNIDEKEDKNYHNIEILSSEEFSTKFNLICREDNAVSAATALLESEEDTISAVKQKDTENTGRSVEHLASTTFPKTASSSVCVASNAAIQIASATMPALSLNNDDHQIYQFKETCSSESPDFGLLVKHRVSDCEIDTDKNKSQESFHQSINENLVLQSIELESEIEIELEDCDDAFIFQQDTHSHENMLCEEFVTSYKALKSRISWEGLLALDNGEMEVLESTTGRENSDQHYSKESNYFYSSTQNNETELTSPILLPDLQIKITNIFRPGFSPTADSLALKDSFCTHVTEATKPEINKEDGEILGFDIYSQPFGENADYPCEDKVDNIRQESGPVSNSEISLSFDLSRNTDVNHTSENQNSESLFTEPSNVTTIDDGSRCFFTKSKTDYNDTKNKKEVESRISKRKLHISSRDQNIPHKDLRRHKIYGRKRRLTSQDSSECFSSLSQGRIKTFSQSEKHIKSVLNILSDEASLCKSKCLSRKLDKAVVHLKKAHRRVHTSLQLITKVGEERKGPLPKSYAIICNNFWESCDLQGYSSVSQRKYYSTKHFSSKRKYDKRRKKRAPKADISKSLTHVSKHKSYKTSGEKKCLSRKSMASSVSKSHPTTSHMGEFCNQEHPESQLPVSSTSQSTSQSVYYNSSVSNPSLSEEHQPFSGKTAYLFSPDHSDEKLIEKENQIDTAFLSSTSKYEKLEKHSANHNVKDATKENSCDANEVINESNSVSLSCIKENINSSTGNDCDATCIGHTKAKTDVLISVLDSNVKHFLNDLYQQGNLILSDCKRNLEVKWTDPIERPKQNIITGNFLMGPLNLTLIASKKYSIPQLSAAAVTDSEGESSKSYLDKQRILTVDSFAASSTVPHCEQSCREKELLKTEQCSSGNCLHTDGNETNVTENYELDVASGTEEDKSYGENIVELSSSDSSLLLKDNVKGSSSETCIVKKDTEDRITWKVKQAEKAKDSVYKRSMTEGSTVNTEYKNQKNQISEESCLNEKIITTNLIDSHLSTKNTTTESVPLKNTVSNPLNKREKKGEIKVSKDSQSDLTLHSEIAYISKPGILGVNHTPILPAHSETCKVPTLLKKPASYVSDFKEKHCSANHTALIANLSQILQRADEASSLQILQEETKVCLNILPLFVEAFERKQECSVEQILISRELLVDQNLWNNCKHTLKPCAVDTLVELQMMMETIQFIENKKRHLEGEPTLRSLLWYDETLYAELLGKPRGFQQQSNFYPGFQGRLKYNAFCELQTYHDQLVELLEETKREKNSYYVFLKYKRQVNECEAIMEHCSDCFDFSLSVPFTCGVNFGDSLEDLEILRKSTLKLINVCGDSPKVHSYPGKQDHLWIIIEMISSKVNFIKNNEAVRVKISLYGLEHIFFDAAKNLVWKERTQSFSKKYSQKKDEERLLRVNKCAFSKLQKIYDTLSKDLNNEPISPIGLEEDTIIASRKSDHPINEATISIENSKFNSNLLAHPDICCISEILDQAEFADLKKLQDLTLRCTDHLEILKKYFQMLQDNNMDNIFITEENVLDVVINHSHEAIILKPEAIEMYIEIVMVSETIHFLKNSIAKKLDKQRFRGMLWFDLSLLPELVQCQEKMASFSFLKDNSTDVCLWKVIETAVSELKKDLDIICKYNEAVNCSYAIHLLSRELQELSEIKKLLKKSKYFISTYIDFVPYIASINYGSTVTELEYNYNQFSTLLKNVMSAPRKDLGKMAHIRKVMKTIEHMKMICTKNAELTISFFLCQMLYNRRKILQLKRKEKMNIHIVKPGENNNKFSISTMLPPVSECINKNISNSSKKRPSTVDKCEDSQEQQQDTTVSSCKKLKVDMKDVTKINREKATFKHPRTTGSHPKSENKIVPSSCDSLKRNHLTPKKVEMQRSLPGSLLPLENPKDTCASKSESKIDLTVSSDHFSGQQENLNSMKKRNVNFSAAETKSDKKDCAAFAICDQKSVHGTFSPDHGTLLQKFLKNSPDPTQKSCLSDINPETDVSLVPDASVLSKPIFCFVKDVHPDLEMNDTVFELQDNDIVNSSIKNSSCMTSPEPICIQNKIPTLQINKLQPTETESEDKYMKDTLNPNTVHTFGASGHITLNVNQGAEYSLSEQQNDKNSKVLMQNAATYWNELPQSACNPTYNSSEHLFGTSYPYSAWCVYQYSNSNGNAITQTYQGITSYEVQPSPSGLLTTVASTAQGTHSNLLYSQYFTYFAGEPQANGFVPVNGYFQSQIPASNFRQPIFSQYASHQPLPQATYPYLPNRFVPPEVPWVYAPWHQESFHPGH

SEQ ID NO: 77081 - protein, 347 aa, Homo sapiens
MGAAAVRWHLCVLLALGTRGRLAGGSGLPGSVDVDECSEGTDDCHIDAICQNTPKSYKCLCKPGYKGEGKQCEDIDECENDYYNGGCVHECINIPGNYRCTCFDGFMLAHDGHNCLDVDECQDNNGGCQQICVNAMGSYECQCHSGFFLSDNQHTCIHRSNEGMNCMNKDHGCAHICRETPKGGVACDCRPGFDLAQNQKDCTLTCNYGNGGCQHSCEDTDTGPTCGCHQKYALHSDGRTCIEKDEAAIERSQFNATSVADVDKRVKRRLLMETCAVNNGGCDRTCKDTATGVRCSCPVGFTLQPDGKTCKGQHVELCGCPCLYWPGQEPPCACIAGPRAGLNGGHV

SEQ ID NO: 77082 - protein, 517 aa, Homo sapiens
MRGAVSRSWSLESLRSATAAMPDGALDTAVCADEVGSEEDLYDDLHSSSHHYSHPGGGGEQLAINELISDGSVVCAEALWDHVTMDDQELGFKAGDVIEVMDATNREWWWGRVADGEGWFPASFVRLRVNQDEPADDDAPLAGNSGAEDGGAEAQSSKDQMRTNVINEILSTERDYIKHLRDICEGYVRQCRKRADMFSEEQLRTIFGNIEDIYRCQKAFVKALEQRFNRERPHLSELGACFLEHQADFQIYSEYCNNHPNACVELSRLTKLSKYVYFFEACRLLQKMIDISLDGFLLTPVQKICKYPLQLAELLKYTHPQHRDFKDVEAALHAMKNVAQLINERKRRLENIDKIAQWQSSIEDWEGEDLLVRSSELIYSGELTRVTQPQAKSQQRMFFLFDHQLIYCKKDLLRRDVLYYKGRLDMDGLEVVDLEDGKDRDLHVSIKNAFRLHRGATGDSHLLCTRKPEQKQRWLKAFAREREQVQLDQETGFSITELQRKQAMLNASKQQVTGKPK

SEQ ID NO: 77083 - protein, 135 aa, Homo sapiens
MLTPLGRLDKYAASENIFNRQMVARSLLDTLREVCDDERDCIAVLERISRLADDSEPTVRAELMEQVPHIALFCQENRPSIPYAFSKFLLPIVVRYLADQNNQVRKTSQAALLALLEQELIERFDVETKVCPVLI

SEQ ID NO: 77084 - protein, 143 aa, Homo sapiens
MKVLLLTGLGALFFAYYWDDNFDPASLQGARVLLTGANAGVGEELAYHYARLGSHLVLTAHTEALLQKVVGNCRKLGAPKVFYIAADMASPEAPESVVQFALDKLGGLDYLVLNHIGGAPAGTRARSPQATRWLMQVNFVSYV

SEQ ID NO: 77085 - protein, 228 aa, Homo sapiens
MELRPWLLWVVAATGTLVLLAADAQGQKVFTNTWAVRIPGGPAVANSVARKHGFLNLGQIFGDYYHFWHRGVTKRSLSPHRPRHSRLQREPQVQWLEQQVAKRRTKRDVYQEPTDPKFPQQWYLSGVTQRDLNVKAAWAQGYTGHGIVVSILDDGIEKNHPDLAGNYDPGASFDVNDQDPDPQPRYTQMNDNRGAHAGWRGDRCSGGTLAGPEPQPHPHLQCQLGPRG

SEQ ID NO: 77086 - protein, 243 aa, Homo sapiens
  MOD_RES (1)..(1): Any amino acid
XAEGPSPPARWHRRLPGLWAAALLLLGLPRLSVRADGKFFVLESQNGSQGLQLEAARLSCKSRGAHLASADELRRVVQDCSFAVCTTGWLADGTLGTTVCSKGSGEQQIMRAVDVRIESNPVPGGTYSALCIKDEDEAEAHIDYEDNFPDDRSVSFRELMEDSRTEADEDRGQGDSSEEAPKQDRLVSISVGRENIARDKVFVPTTGLPGAGSSVPADSPGSRLLQKHLFWFPAEAFHKPGLE

SEQ ID NO: 77087 - protein, 153 aa, Homo sapiens
MVIMSEFSADPAGQGQGQQKPLRVGFYDIERTLGKGNFAVVKLARHRVTKTQVAIKIIDKTRLDSSNLEKIYREVQLMKLLNHPHIIKLYQVMETKDMLYIVTEFAKNGEMFDYLTSNGHLSENEARKKFWQILSAVEYCHDHHIVHRDLKTE

SEQ ID NO: 77088 - protein, 59 aa, Homo sapiens
MDSLTEQRLTSPNLPAPHLEHYSVLHCTMTLDVQTVVVFAVIVVLLLVNVILMFFLGTR

SEQ ID NO: 77089 - protein, 172 aa, Homo sapiens
  MOD_RES (1)..(1): Any amino acid
XLHPAEEGDFWAESSMLGLKITYFALMDGKVYDITEWAGCQRVGISPDTHRVPYHISFGSRIPGTRGRQRATPDAPPADLQDFLSRIFQVPPGQMPNGNFFAAPQPAPGAAAASKPNSTVPKGEAKPKRRKKSSVSVPSPCPWSCPKTHPSVFVDAKDTNPMELGQLRQQYT

SEQ ID NO: 77090 - protein, 74 aa, Homo sapiens
MIMRPPHPCGTNTSVMEDQNEDESPKKNTLWQISNGTSSVIVSRKRPSEGNYQKEKDLCIKYFDQWSESDQVEF

SEQ ID NO: 77091 - protein, 135 aa, Homo sapiens
MGELASESQGSKELGDVLFQMAEVHRQIQNQLEEMLKSFHNELLTQLEQKVELDSRYLSAALKKYQTEQRSKGDALDKCQAELKKLRKKSQGSKNPQKYSDKELQYIDAISNKQGELENYVSDGYKTALTEERRR

SEQ ID NO: 77092 - protein, 68 aa, Homo sapiens
MVKAPQSEERLARGGKENNSVLDRVSHCHPGWSAVVQPHLPGSSNSHASASQVAGITEIPSRRLLHWV

SEQ ID NO: 77093 - protein, 62 aa, Homo sapiens
MGKSASKQFHNEVLKAHNEYRQKHGVPPLKLCKNLNREAQQTLHGHGMEEHQEDGRGEGVRK

SEQ ID NO: 77094 - protein, 140 aa, Homo sapiens
MLITQGLISKGILSSHPKYGSIPKLILACIMGYFAGKLSYVKTCQEKFKKLENSPLGEALRSGQARRSSPPGHYYQKSKYDSSVSGQSSFVTSPAADNIEMLPHYEPIPFSSSMNESAPTGITDHIVQVKVNKYGDTWDE

SEQ ID NO: 77095 - protein, 123 aa, Homo sapiens
MGSRASTLLRDEELEEIKKETGFSHSQITRLYSRFTSLDKGENGTLSREDFQRIPELAINPLGDRIINAFFPEGEDQVNFRGFMRTLAHFRPIEDNEKSKDVNGPEPLNSRSNKLHLEEERYI

SEQ ID NO: 77096 - protein, 103 aa, Homo sapiens
MAETSALPTGFGELEVLAVGMVLLVEDPGAADSLPPTGAELGSCGQWDQPECPRCSHIQPSPALALRLGRLPGSRLPGLCDSVGQHLQQCSHRMGALSPLLHP

SEQ ID NO: 77097 - protein, 65 aa, Homo sapiens
  MOD_RES (1)..(1): Any amino acid
XTFQWLIPDSADTTATPTHCAYDRIVVAGMLLRGAVVPDSALPFNFQAAYGLSDQLVCVLPCTAT

SEQ ID NO: 77098 - protein, 137 aa, Homo sapiens
MPDSLIHPRWCERAMSDFHVHPQATVGEEGGVARFQCQIHGLPKPLITWEKNRVPIDTDNERYTLLPKGVLQITGLRAEDGGIFHCVASNIASIRISHGARLTVSGSGSGAYKEPAILVGPENLTLTVHQTAVLECV

SEQ ID NO: 77099 - protein, 212 aa, Homo sapiens
MDAQCSAKVNARKRRKEAPGPNGATEEDGVPSKVQRCAVGLRQPAPFSDEIEVDFSKPYVRVTMEEASRGTPCERPVRVYADGIFDLFHSGHARALMQAKNLFPNTYLIVGVCSDELTHNFKGFTVMNENERYDAVQHCRYVDEVVRNAPWTLTPEFLAEHRGMNSIAFVCRKPEARPLFTLGLITRPRPLPRRGSSHLESQHFGRPKRTDH

SEQ ID NO: 77100 - protein, 830 aa, Homo sapiens
METKENRWVPVTVLPGCVGCRTVAALASWTVRDVKERIFAETGFPVSEQRLWRGGRELSDWIKIGDLTSKNCHLFVNLQSKGLKGGGRFGQTTPPLVDFLKDILRRYPEGGQILKELIQNAEDAGATEVKFLYDETQYGTETLWSKDMAPYQGPALYVYNNAVFTPEDWHGIQEIARSRKKDDPLKVGRFGIGFNSVYHITDVPCIFSGDQIGMLDPHQTLFGPHESGQCWNLKDDSKEISELSDQFAPFVGIFGSTKETFINGNFPGTFFRFPLRLQPSQLSSNLYNKQKVLELFESFRADADTVLLFLKSVQDVSLYVREADGTEKLVFRVTSSESKALKHERPNSIKILGTAISNYCKKTPSNNITCVTYHVNIVLEEESTKDAQKTSWLVCNSVGGRGISSKLDSLADELKFVPIIGIAMPLSSRDDEAKGATSDFSGKAFCFLPLPPGEESSTGLPVHISGFFGLTDNRRSIKWRELDQWRDPAALWNEFLVMNVVPKAYATLILDSIKRLEMEKSSDFPLSVDVIYKLWPEASKVKVHWQPVLEPLFSELLQNAVIYSISCDWVRLEQVYFSELDENLEYTKTVLNYLQSSGKQIAKVPGNVDAAVQLTAASGTTPVRKVTPAWVRQVLRKCAHLGCAEEKLHLLEFVLSDQAYSELLGLELLPLQNGNFVPFSSSVSDQDVIYITSAEYPRSLFPSLEGRFILDNLKPHLVAALKEAAQTRGIIHNNNSGDIQASCLMKIATENSKWWQFLLPVVSIVSGNCLPRQHLLTVRTLALCLCVHIFHKCYNLYSVVEQDAIFCCLKVLQLKKKQPFLSIWHVVEFF

SEQ ID NO: 77101 - protein, 398 aa, Homo sapiens
VEKTACPSGKKAREIDESLIFYKKWELEACVDAALLATQMDRVNAIPFTYEQLDVLKHKLDELYPQGYPESVIQHLGYLFLKMSPEDIRKWNVTSLETLKALLEVNKGHEMSPQVATLIDRFVKGRGQLDKDTLDTLTAFYPGYLCSLSPEELSSVPPSSIWAVRPQDLDTCDPRQLDVLYPKARLAFQNMNGSEYFVKIQSFLGGAPTEDLKALSQQNVSMDLATFMKLRTDAVLPLTVAEVQKLLGPHVEGLKAEERHRPVRDWILRQRQDDLDTLGLGLQGGIPNGYLVLDLSMQGGRGGQARAGGRAGGVEVGALSHPSLCRGPLGDALPPRTWTCSHRPGTAPSLHPGLRAPLPCWPQPCWGSPPGQEQARVVPVPPQENSRSVNGNMPPADT

SEQ ID NO: 77102 - protein, 75 aa, Homo sapiens
MAESEAETPSTPGEFESKYFEFHGVRLPPFCRGKMEEIANFPVRPSDVWIVTYPKSGTDLSPPHQEPPALPLSAL

SEQ ID NO: 77103 - protein, 251 aa, Homo sapiens
MILRPPRPCGTISALQKGYSKVLCQTLSERNSEITSLKNEGENLKRDNAITSGMVSSLQKDILAKDEQVQQLKEEVSHLKSQNKDKDHQLEALGSRLEHFRSQVIKATYGRAKPFRDKPVTDQQLIEKITQVTEDNINFQQKKWTLQKETQLSNSKQEETTENIEKLRTSLDSCQACMKISCCSHDLKKEVDLLQHLQVSPPVSGLQKVVLDVLRHALSWLEEVEQLLRDLGILPSSPNKGYWDFFSHMVA

SEQ ID NO: 77104 - protein, 108 aa, Homo sapiens
MQEINQNLAEEAGLNITHICLPPDSSEAEIIDEILKINEDTRVHGLALQISENLFSNKVLNALKPEKDVDGVTDINLGKLVRGDAHECFVSPVAKAVIELLEKSASRG

SEQ ID NO: 77105 - protein, 474 aa, Homo sapiens
MSISSDEVNFLVYRYLQESGFSHSAFTFGIESHISQSNINGALVPPAALISIIQKGLQYVEAEVSINEDGTLFDGRPIESLSLIDAVMPDVVQTRQQAYRDKLAQQQAAAAAAAAAAASQQGSAKNGENTANGEENGAHTIANNHTDMMEVDGDVEIPPNKAVVLRGHESEVFICAWNPVSDLLASGSGDSTARIWNLSENSTSGSTQLVLRHCIREGGQDVPSNKDVTSLDWNSEGTLLATGSYDGFARIWTKDGNLASTLGQHKGPIFALKWNKKGNFILSAGVDKTTIIWDAHTGEAKQQFPFHSAPALDVDWQSNNTFASCSTDMCIHVCKLGQDRPIKTFQGHTNEVNAIKWDPTGNLLASCSDDMTLKIWSMKQDNCVHDLQAHNKEIYTIKWSPTGPGTNNPNANLMLASASFDSTVRLWDVDRGICIHTLTKHQEPVYSVAFSPDGRYLASGSFDKCVHIWNTQVL

SEQ ID NO: 77106 - protein, 32 aa, Homo sapiens
MKVLLLTGLGALFFAYYWDDNFDPASRERECC

SEQ ID NO: 77107 - protein, 240 aa, Homo sapiens
MKRLVCVLLVCSSAVAQLHKDPTLDHHWHLWKKTYGKQYKEKGSCGACWAFSAVGALEAQLKLKTGKLVSLSAQNLVDCSTEKYGNKGCNGGFMTTAFQYIIDNKGIDSDASYPYKAMDQKCQYDSKYRAATCSKYTELPYGREDVLKEAVANKGPVSVGVDARHPSFFLYRSGVYYEPSCTQNVNHGVLVVGYGDLNGKEYWLVKNSWGHNFGEEGYIRMARNKGNHCGIASFPSYPEI

SEQ ID NO: 77108 - protein, 1388 aa, Homo sapiens
DLELKLKDKNTLFTRILNGQEQRMKIDREFALWLKDCHEKYDKQIKFTLFKGVITRPDLPSKKQGPWATYAAIEWDGKIYKAGQLVKTIKTLPLFYGSIVRFFLYGDHDGEVYATGGEVQIAMEPQALYDEVRTVPIAKLDRTVAEKAVKKYVEDEMARLPDRLSVTWPEGDELLPNEVRPAGTPIGALRIEILNKKGEAMQKLPGTSHGGSKKLLVELKVILHSSSGNKEIISHISQHGGKWPYWFKKMENIQKLGNYTLKLQVVLNESNADTYAGRPLPSKAIKFSVKEGKPEKFSFGLLDLPFRVGVPFNIPLEFQDEFGHTSQLVTDIQPVLEASGLSLHYEEITKGPNCVIRGVTAKGPVNSCQGKNYNLKVTLPGLKEDSQILKIRLLPGHPRRLKVKPDSEILVIENGTAFPFQVEVLDESDNITAQPKLIVHCKFSGAPNLPVYVVDCSSSGTSILTGSAIQVQNIKKDQTLKARIEIPSCKDVAPVEKTIKLLPSSHVARLQIFSVEGQKAIQIKHQDEVNWIAGDIMHNLIFQMYDEGEREINITSALAEKIKVNWTPEINKEHLLQGLLPDVQVPTSVKDMRYCQVSFQDDHVSLESAFTVRPLPDEPKHLKCEMKGGKTVQMGQELQGEVVIIITDQYGNQIQAFSPSSLSSLSIAGVGLDSSNLKTTFQENTQSISVRGIKFIPGPPGNKDLCFTWREFSDFIRVQLISGPPAKLLLIDWPELKESIPVINGRDLQNPIIVQLCDQWDNPAPVQHVKISLTKASNLKLMPSNQQHKTDEKGRANLGVFSVFAPRGEHTLQVKAIYNKSIIEGPIIKLMILPDPEKPVRLNVKYDKDASFLAGGLFTDFMISVISEDDSIIKNINPARISMKMWKLSTSGNRPPANAETFSCNKIKDNDKEDGCFYFRDKVIPNKVGTYCIQFGFMMDKTNILNSEQVIVEVLPNQPVKLVPKIKPPTPAVSNVRSVASRTLVRDLHLSITDDYDNHTGIDLVGTIIATIKGSNEEDTDTPLFIGKVRTLEFPFVNGSAEIMSLVLAESSPGRDSTEYFIVFEPRLPLLSRTLEPYILPFMFYNDVKKQQQMAALTKEKDQLSQSIVMYKSLFEASQQLLNEMKCQVEEARLKEAQLRNELKIHNIDIPTTQQVPHIEALLKRKLSEQEELKKKPRRSCTLPNYTKGSGDVLGKIAHLAQIEDDRAAMVISWHLASDMDCVVTLTTDAARRIYDETQGRQQVLPLDSIYKKTLPDWKRSLPHFRNGKLYFKPIGDPVFARDLLTFPDNVEHCETVFGMLLGDTIILDNLDAANHYRKEVVKITHCPTLLTRDGDRIRSNGKFGGLQNKAPPMDKLRGMVFGAPVPKQCLILGEQIVHACVPSYSGG

SEQ ID NO: 77109 - protein, 333 aa, Homo sapiens
MGTARIAPGLALLLCCPVLSSAYALVDADDVMTKEEQIFLLHRAQAQCEKRLKEVLQRPASIMESDKGWTSASTSGKPRKDKASGKLYPESEEDKEAPTGSRYRGRPCLPEWDHILCWPLGAPGEVVAVPCPDYIYDFNHKGHAYRRCDRNGSWELVPGHNRTWANYSECVKFLTNETREREVFDRLGMIYTVGYSVSLASLTVAVLILAYFRRLHCTRNYIHMHLFLSFMLRAVSIFVKDAVLYSGATLDEAERLTEEELRAIAQAPPPPATAAAGYAGCRVAVTFFLYFLATNYYWILVEGLYLHSLIFMAFFSEKKYLWGFTVFGWGAGT

SEQ ID NO: 77110 - protein, 127 aa, Homo sapiens
METPLDVLSRAASLVHADDEKREAALRGEPRIQTLPVASALSSHRTGPPPISPSKRKFSMEPGDEDLDCDNDHVSKMSRIFNPHLNKTANGDCRRDPRERSRSPIERAVAPTMSLHGSHLYTSLPSL

SEQ ID NO: 77111 - protein, 39 aa, Homo sapiens
MQVGQTGKIVAPELYIAVGISGAIQHLAGMKDSKHVSLD

SEQ ID NO: 77112 - protein, 227 aa, Homo sapiens
  MOD_RES (1)..(1): Any amino acid
XVQHAPSESVDNASMPPVKVEFSLTDYGSKEKLVDFLSRGMTQLQGTRALGSAIEYTIENVFESAPNPRDLKIVVLMLTGEVPEQQLEEAQRVILQAKCKGYFFVVLGIGRKVNIKEVYTFASEPNDVFFKLVDKSTELNEEPLMRFGRLLPSFVSSENAFYLSPDIRKQCDWFQGDQPTKNLVKFGHKQVDRVLLCCPGWTAVVQSWLTVTSASWIQAILMLQPPE

SEQ ID NO: 77113 - protein, 97 aa, Homo sapiens
MQTACQAVQHQRGRRQYNKLRNLLKDARHDCILFANEFQQCCYLPRERGESMEKWQTRSIYNAAVWYYHHCQDRMPIVMVTEDEEAIQQYGSETEGV

SEQ ID NO: 77114 - protein, 132 aa, Homo sapiens
MTLTERLREKISRAFYNHGLLCASYPIPIILFTGFCILACCYPLLKLPLPGTGPVEFTTPVKDYSPPPVDSDRKQGEPTEQPEWYVGAPVAYVQQIFVKSSVFPWHKNLLAVDVFRSPLSRAFQLVEEIRNH

SEQ ID NO: 77115 - protein, 490 aa, Homo sapiens
MQQLQQQHLLSLQRQGLLTIQPGQPALPLQPLAQGMIPTELQQLWKEVTSAHTAEETTGNNHSSLDLTTTCVSSSAPSKTSLIMNPHASTNGQLSVHTPKRESLSHEEHPHSHPLYGHGVCKWPGCEAVCEDFQSFLKHLNSEHALDDRSTAQCRVQMQVVQQLELQLAKDKERLQAMMTHLHVKSTEPKAAPQPLNLVSSVTLSKSASEASPQSLPHTPTTPTAPLTPVTQGPSVITTTSMHTVGPIRRRYSDKYNVPISSADIAQNQEFYKNAEVRPPFTYASLIRQAILESPEKQLTLNEIYNWFTRMFAYFRRNAATWKNAVRHNLSLHKCFVRVENVKGAVWTVDEVEFQKRRPQKISGNPSLIKNMQSSHAYCTPLNAALQASMAENSIPLYTTASMGNPTLGNLASAIREELNGAMEHTNSNESDSSPGRSPMQAVHPVHVKEEPLDPEEAEGPLSLVTTANHSPDFDHDRDYEDEPVNEDME

SEQ ID NO: 77116 - protein, 164 aa, Homo sapiens
IDFEYSSYNYRGFDIGNHFCEWMYDYSYEKYPFFRANIRKYPTKKQQLHFISSYLPAFQNDFENLSTEEKSIIKEEMLLEVNRFALASHFLWGLWSIVQAKISSIEFGYMYPNVVTWWHQDSVAQPRKPGEKPLSLMLWLPLEVALTSRPADLASPASEKCLQS

SEQ ID NO: 77117 - protein, 72 aa, Homo sapiens
MWRVKKLSLSLSPSPQTGKPSMRTPLRELTLQPGALTNSGKRSPACSSLTPSLCKLGLQISVSIMWTQRRKL

SEQ ID NO: 77118 - protein, 427 aa, Homo sapiens
MLLMVVSMACVGFFLVQRAGPHVGGQDKPFLSAWPSAVVPRGGHVTLRCHYRHRFNNFMLYKEDRIHVPIFHGRLFQESFNMSPVTTAHAGNYTCRGSHPHSPTGWSAPSNPVVIMVTGNHRKPSLLAHPGPLVKSGERVILQCWSDIMFEHFFLHKEGISKDPSRLVGQIHDGVSKANFSIGPMMLALAGTYRCYGSVTHTPYQLSAPSDPLDIVVTGPYEKPSLSAQPGPKVQAGESVTLSCSSRSSYDMYHLSREGGAHERRLPAVRKVNRTFQADFPLGPATHGGTYRCFGSFRHSPYEWSDPSDPLLVSVTGNPRHLHILIGTSVVIILFILLLFFLLHLWCSNKKNAAVMDQEPAGNRTANSEDSDEQDPQEVTYAQLDHCVFTQRKITRPSQRPKTPPTDTILYTELPNAKPRSKVVSCP

SEQ ID NO: 77119 - protein, 662 aa, Homo sapiens
VLTSYRSTAERKLLPLLKPPKPTRVRQDATIFGDPPQPDLDLLSEDGIQTGAGPGGVDLWAVRGQERGRGELKPSKLQSPTGTGLFASPPAAALVLKRVAVFIVTIPAGAGVGSPGWGSWSFFFSSLWLLSPGDSPDEAPQNTPPATVEGREEEGLEVLKEQNWELPLQDEPLYQTYRAAVLSEELWGVGEDGSPSPANAGDAPTFPRPPGPRNTLWQELPAVQASGLLDTLSPQERRMQESLFEVVTSEASYLRSLRLLTDTFVLSQALRDTLTPRDHHTLFSNVQRVQGVSERFLATLLSRVRSSPHISDLCDVVHAHAVGPFSVYVDYVRNQQYQEETYSRLMDTNVRFSAELRRLQSLPKCERLPLPSFLLLPFQRITRLRMLLQNILRQTEEGSSRQENAQKALGAVSKIIERCSAEVGRMKQTEELIRLTQRLRFHKVKALPLVSWSRRLEFQGELTELGCRRGGVLFASRPRFTPLCLLLFSDLLLITQPKSGQRLQVLDYAHRSLVQAQQVPDPSGPPTFRLSLLSNHQGRPTHRLLQASSLSDMQRWLGAFPTPGPLPCSPDTIYEDCDCSQELCSESSAPAKTEGRSLESRAAPKHLHKTPEGWLKGLPGAFPAQLVCEVTGEHERRRHLRQNQRLLEAVGSSSGTPNAPPP

SEQ ID NO: 77120 - protein, 108 aa, Homo sapiens
MNRIRIHVLPTNRGRITPVPRSQEPLSCAFTHRPCSHPRLEGQEFCIKHILEDKNAPFKQCSYISTKNGKRCPNAAPKPEKKDGVSFCAEHVRRNALALHAQMKKTNP

SEQ ID NO: 77121 - protein, 361 aa, Homo sapiens
MEALRVQMFMPCSFESLYLSSAEHPGASKPPISSSSMTSRILLRQQLMREQMQEQERREQQQKLQAAQFMQQRVPVSQTPAINVSVPTTLPSATQVPMEVLKVQTHLENPTKYHIQQAQRQQVKQYLSTTLANKHANQVLSLPCPNQPGDHVMPPVPGSSAPNSPMAMLTLNSNCEKEGFYKFEEQNRAESECPGMNTHSRASCMQMDDVIDDIISLESSYNEEILGLMDPALQMANTLPVSGNLIDLYGNQGLPPPGLTISNSCPANLPNIKRELTACIFPTESEARALAKERQKKDNHNLIERRRRFNINDRIKELGTLIPKSNDPDMRWNKGTILKASVDYIRKLQREQQRAKELENR

SEQ ID NO: 77122 - protein, 45 aa, Homo sapiens
  MOD_RES (1)..(1): Any amino acid
XDLDHPGFSDQVYRQRRKLIAEIAFQYRHGDPIPRVEYTAEEIAT

SEQ ID NO: 77123 - protein, 168 aa, Homo sapiens
MHLNLEGLGGLEGREALALCPGDGSHLLCRRTDSSFSFMAFFFTFMAQLVISIIQAVGIPGWGVCGWIATISFFGTNIGSAVVMLIPTVMFTVMAVFSFIALSMVHKFYRGSGGSFSKAQEEWTTGAWKNPHVQQAAQNAAMGAAQGAMNQPQTQYSATPNYTYSNEM

SEQ ID NO: 77124 - protein, 121 aa, Homo sapiens
MSAEASARPLRVGSRVEVIGKGHRGTVAYVGATLFATGKWVGVILDEAKGKNDGTVQGRKYFTCDEGHGIFVRQSQIQVFEDGADTTSPETPDSSASKVLKREGTDTTAKTSKLRGLKPKK

SEQ ID NO: 77125 - protein, 158 aa, Homo sapiens
  MOD_RES (1)..(1): Any amino acid
XWGEKKAVLAGDLILSAASIALARIGNTTVISILTQVIEDLVRGEFLQLGSKENENERFAHYLEKTFKKTASLIANSCKAVSVLGCPDPVVHEIAYQYGKNVGIAFQLIDDVLDFTSCSDQMGKPTSADLKLGLATGPVLFACQQVHCQGKTGSCCKH

SEQ ID NO: 77126 - protein, 119 aa, Homo sapiens
MGLLLPLALCILVLCCGAMSPPQLALNPSALLSRGCNDSDVLAVAGFALRDINKDRKDGYVLRLNRVNDAQEYRRGGLGSLFYLTLDVLETDCHVLRKKAWQDCGMRIFFESFQKKRFT

SEQ ID NO: 77127 - protein, 217 aa, Homo sapiens
GFKPRERSGGEQAQDWDALPPKRPRLGAGNKIGGRRLIVVLEGASLETVKVGKTYELLNCDKHKSILLKNGRDPGEARPDITHQSLLMLMDSPLNRAGLLQVYIHTQKNVLIEVNPQTRIPRTFDRFCGLMVQLLHKLSVRAADGPQKLLKVIKNPVSDHFPVGCMKVGTSFSIPVVSDVRELVPSSDPIVFVVGAFAHGKRCDLLCCPDLSAVAQS

SEQ ID NO: 77128 - protein, 311 aa, Homo sapiens
  MOD_RES (1)..(1): Any amino acid
XCMSSCQGSLHGPRRPQPGASGRSTHTDGGGSSPAGEQEPSQHRTGAAVQRKPWPSGGLWRQDQQPGPGEAPHTQAFGEWPWGQELGSRAPGLGGDAGSPAPPFHSSSYRISLAGVEPSLVQAALGQLVRLSCSDDTAPESQAAWQKDGQPISSDRHRLQFDGSLIIHPLQAEDAGTYSCGSTRPGRDSQKIQLRIIGGDMAVLSEAELSRFPQPRDPAQDFGQAGAAGPLGAIPSSHPQPANRLRLDQNQPRVVDASPGQRIRMTCRAEGFPPPAIEWQRDGQPVSSPSTHRPAQGPWQGLRRPARAGQL

SEQ ID NO: 77129 - protein, 1575 aa, Homo sapiens
MRTTKVYKLVIHKKGFGGSDDELVVNPKVFPHIKLGDIVEIAHPNDEYSPLLLQVKSLKEDLQKETISVDQTVTQVFRLRPYQDVYVNVVDPKVSTCAYITQKVEFAGIRAQAGELWVKNEKVMCGYISEDTRVVFRSTSAMVYIFIQMSCEMWDFDIYGDLYFEKAVNGFLADLFTKWKEKNCSHEVTVVLFSRTFYDAKSVDEFPEINRASIRQDHKGRFYEDFYKVVVQNERREEWTSLLVTIKKLFIQYPVLVRLEQAEGFPQGDNSTSAQGNYLEAINLSFNVFDKHYINRNFDRTGQMSVVITPGVGVFEVDRLLMILTKQRMIDNGIGVDLVCMGEQPLHAVPLFKLHNRSAPRDSRLGDDYNIPHWINHSFYTSKSQLFCNSFTPRIKLAGKKPASEKAKNGRDTSLGSPKESENALPIQVDYDAYDAQVFRLPGPSRAQCLTTCRSVRERESHSRKSASSCDVSSSPSLPSRTLPTEEVRSQASDDSSLGKSANILMIPHPHLHQYEVSSSLGYTSTRDVLENMMEPPQRDSSAPGRFHVGSAESMLHVRPGGYTPQRALINPFAPSRMPMKLTSNRRRWMHTFPVGPSGEAIQIHHQTRQNMAELQGSGQRDPTHSSAELLELAYHEAAGRHSNSRQPGDGMSFLNFSGTEELSVGLLSNSGAGMNPRTQNKDSLEDSVSTSPDPILTLSAPPVVPGFCCTVGVDWKSLTTPACLPLTTDYFPDRQGLQNDYTEGCYDLLPEADIDRRDEDGVQMTAQQVFEEFICQRLMQGYQIIVQPKTQKPNPAVPPPLSSSPLYSRGLVSRNRPEEEDQYWLSMGRTFHKVTLKDKMITVTRYLPKYPYESAQIHYTYSLCPSHSDSEFVSCWVEFSHERLEEYKWNYLDQYICSAGSEDFSLIESLKFWRTRFLLLPACVTATKRITEGEAHCDIYGDRPRADEDEWQLLDGFVRFVEGLNRIRRRHRSDRMMRKGTAMKGLQMTGPISTHSLESTAPPVGKKGTSALSALLEMEASQKCLGEQQAAVHGGKSSAQSAESSSVAMTPTYMDSPRKDGAFFMEFVRSPRTASSAFYPQVSVDQTATPMLDGTSLGICTGQSMDRGNSQTFGNSQNIGEQGYSSTNSSDSSSQQLVASSLTSSSTLTEILEAMKHPSTGVQLLSEQKGLSPYCFISAEVVHWLVNHVEGIQTQAMAIDIMQKMLEEQLITHASGEAWRTFIYGFYFYKIVTDKEPDRVAMQQPATTWHTAGVDDFASFQRKWFEVAFVAEELVHSEIPAFLLPWLPSRPASYASRHSSFSRSFGGRSQAAALLAATVPEQRTVTLDVDVNNRTDRLEWCSCYYHGNFSLNAAFEIKLHWMAVTAAVLFEMVQGWHRKATSCGFLLVPVLEGPFALPSYLYGDPLRAQLFIPLNISCLLKEGSEHLFDSFEPETYWDRMHLFQEAIAHRFGFVQDKYSASAFNFPAENKPQYIHVTGTVFLQLPYSKRKFSGQQRRRRNSTSSTNQNMFCEERVGYNWAYNTMLTKTWRSSATGDEKFADRLLKDFTDFCINRDNRLVTFWTSCLEKMHASAP

SEQ ID NO: 77130 - protein, 48 aa, Homo sapiens
  MOD_RES (1)..(1): Any amino acid
XELFSGGNTGINFEKYDDIPVEATGNNCPPHIESCKSMLFLLSKRKET

SEQ ID NO: 77131 - protein, 109 aa, Homo sapiens
MSMLRLQKRLASSVLRCGKKKVWLDPNETNEIANANSRQQIRKLIKDGLIIRKPVTVHSRARCRKNTLARRKGRHMGIGKCGYSQCPNAREGHMDEENEDFAPAAQKIP

SEQ ID NO: 77132 - protein, 270 aa, Homo sapiens [sequence omitted]

SEQ ID NO: 77133 - protein, 92 aa, Homo sapiens
MEDRLHMDNGLVPQKIVSVHLQDSTLKEVKDQVSNKQAQILEPKPEPSLEIKPEQDGMEHVGRDDPKALGEEPKQRRGSASGSEPAGDSDRG

SEQ ID NO: 77134 - protein, 47 aa, Homo sapiens
TPPLPTFARVTTAYGSYQDANIPFPRTSGARFCGADLSQPCLLITLA

SEQ ID NO: 77135 - protein, 250 aa, Homo sapiens
  MOD_RES (1)..(1): Any amino acid
XEQQKELKNQEELSSLVWICTSTHSATKVLIIDAVQPGNILDSFTVCNSHVLCIASVPGARETDYPAGEDLSESGQVDKASLCGSMTSNSSAETDSLLGGITVVGCSAEGVTGAATSPSTNGASPVMDKPPAEEATEATEGNAGSAEDTVDISQTGVYTEHVFTDPLGVQIPEDLSPVYQSSNDSDAYKDQISVLPNEQDLVREEAQKMSSLLPTMWLGAQNGCLYVHSSVAQWRKCLHSIKLKDSILSI

SEQ ID NO: 77136 - protein, 172 aa, Homo sapiens
  MOD_RES (1)..(1): Any amino acid
XQLIKAAPAGKTSSVFEDPVISKFTNMMMIGGNKVLARSLMIQTLEAVKRKQFEKYHAASAEEQATIERNPYTIFHQALKNCEPMIGLVPILKGGRFYQVPVPLPDRRRRFLAMKWMITECRDKKHQRTLMPEKLSHKLLEAFHNQGPVIKRKHDLHKMAEANRALAHYRWW

SEQ ID NO: 77137 - protein, 1008 aa, Homo sapiens
MSVSFHTHTKELWTWMEDLQKEMLEDVCADSVDAVQELIKQFQQQQTATLDATLNVIKEGEDLIQQLRSAPPSLGEPSEARDSAVSNNKTPHSSSISHIESVLQQLDDAQVQMEELFHERKIKLDIFLQLRIFEQYTIEVTAELDAWNEDLLRQMNDFNTEDLTLAEQRLQRHTERKLAMNNMTFEVIQQGQDLHQYITEVQASGIELICEKDIDLAAQVQELLEFLHEKQHELELNAEQTHKRLEQCLQLRHLQAEVKQVLGWIRNGESMLNASLVNASSLSEAEQLQREHEQFQLAIESLFHATSLQKTHQSALQVQQKAEVLLQAGHYDADAIRECAEKVALHWQQLMLKMEDRLKLVNASVAFYKTSEQVCSVLESLEQEYRRDEDWCGGRDKLGPAAEIDHVIPLISKHLEQKEAFLKACTLARRNAEVFLKYIHRNNVSMPSVASHTRGPEQQVKAILSELLQRENRVLHFWTLKKRRLDQCQQYVVFERSAKQALDWIQETGEFYLSTHTSTGETTEETQELLKEYGEFRVPAKQTKEKVKLLIQLADSFVEKGHIHATEIRKWVTTVDKHYRDFSLRMGKYRYSLEKALGVNTEDNKDLELDIIPASLSDREVKLRDANHEVNEEKRKSARKKEFIMAELLQTEKAYVRDLHECLETYLWEMTSGVEEIPPGILNKEHIIFGNIQEIYDFHNNIFLKELEKYEQLPEDVGHCFVTWADKFQMYVTYCKNKPDSNQLILEHAGTFFDEIQQRHGLANSISSYLIKPVQRITKYQLLLKELLTCCEEGKGELKDGLEVMLSVPKKANDAMHVSMLEGFDENLDVQGELILQDAFQVWDPKSLIRKGRERHLFLFEISLVFSKEIKDSSGHTKYVYKNKLLTSELGVTEHVEGDPCKFALWSGRTPSSDNKTVLKASNIETKQEWIKNIREVIQERIIHLKGALKEPLQLPKTPAKQRNNSKRDGVEDIDSQGDGSSQPDTISIASRTSQNTVDSDKDWSTGV

SEQ ID NO: 77138 - protein, 299 aa, Homo sapiens
ANMDNNQSQKTFKNKETLIIEPEKNASRIESLEQEKVDEEEEGKKDESSCSSEEDEEDDSESEAETDKTKPLASVTNANTSSTQAAPVAVTTPTVSSGQATPTSPIKKFPTTATKISPKEEERKDESPATWRLGLRKTGSYGALAEITASKEGQKEKDTAGVTRSASSPRLSSSLDNKEKEKDSKGTRLAYVAPTIPRRLASTSDIEEKENRDSSSLRTSSSYTRRKWEDDLKKNSSVNEGSTYHKRSYLTPVRDEESESQRKARSRQARQSRRSTQGVTLTDLQEAEKTIGRSRSTRT

SEQ ID NO: 77139 - protein, 376 aa, Homo sapiens
MLPAVGSVDEEEDPAEEDCPELVPIETTQSEEEEKSGLGAKIPVTIITGYLGAGKTTLLNYILTEQHSKRVAVILNESGEGSALEKSLAVSQGGELYEEWLELRNGCLCCSVKDNGLRAIENLMQKKGKFDDILLETTGLADPGAVTSMFWVDAELGSDIYLDGIITIVDSKYGLKHLTEEKPDGLINEATRQVALADIILINKTDLVPEEDVKKLRTTIRSINGLGQILETQRSSLQKKLQHVPGTQPHLDQSIVTITFEVPGNAKEEHLNMFIQNLLWEKNVRNKDNHCMEVIRLKGLVSIKDKSQQVIVQGVHELYDLEETPVSWKDDTERTNRLVLIGRNLDKDILKQLFIATVTETEKQWTTHFKEDQVCT

SEQ ID NO: 77140 - protein, 46 aa, Homo sapiens
MKMHSTESLLKKIERETWRESGVSLIATVTRLMERLLDYRTSIRLN

SEQ ID NO: 77141 - protein, 426 aa, Homo sapiens
MNPAAEAEFNILLATDSYKVTHYKQYPPNTSKVYSYFECREKKTENSKLRKVKYEETVFYGLQYILNKYLKGKVVTKEKIQEAKDVYKEHFQDDVFNEKGWNYILEKYDGHLPIEIKAVPEGFVIPRGNVLFTVENTDPECYWLTNWIETILVQSWYPITVATNSREQKKILAKYLLETSGNLDGLEYKLHDFGYRGVSSQETAGIGASAHLVNFKGTDTVAGLALIKKYYGTKDPVPGYSVPAAEHSTITAWGKDHEKDAFEHIVTQFSSVPVSVVSDSYDIYNACEKIWGEDLRHLIVSRSTQAPLIIRPDSGNPLDTVLKVLEILGKKFPVTENSKGYKLLPPYLRVIQGDGVDINTLQEIVEGMKQKMWSIENIAFGSGGGLLQKLTRDLLNCSFKCSYVVTNGLGVCHLLITSVLLPSLCI

SEQ ID NO: 77142 - protein, 65 aa, Homo sapiens
  MOD_RES (1)..(1): Any amino acid
XRNISALKRDLDARAKNECYRATFRLPRDERLDGHTSCTLWTPFNKLHIPGQMFISNNYICFATR

SEQ ID NO: 77143 - protein, 441 aa, Homo sapiens
WVWNQFFVLEEHMGPDPQYVGKLHSNSDKGDGSVKYILTGEGAGTIFIIDDTTGDIHSTKSLDREQKTHYVLHAQAIDRRTNKPLEPESEFIIKVQDINDNAPKFTDGPYIVTVPEMSDMGTSVLQVTATDADDPTYGNSARVVYSILQGQPYFSVDPKTGVIRTALHNMDREAREHYSVVIQAKDMAGQVGGLSGSTTVNITLTDVNDNPPRFPQKHYQLYVPESAQVGSAVGKIKANDADTGSNADMTYSIINGDGMGIFSISTDKETREGILSLKKPLNYEKKKSYTLNIEGANTHLDFRFSHLGPFKDATMLKIIVGDVDEPPLFSMPSYLMEVYENAKIGTVVGTVLAQDPDSTNSLVRYFINYNVEDDRFFNIDANTGTIRTTKVLDREETPWYNITVTASEIAAAAPSPSGFVHAREMGVCGPAMQKPSCPRLV

SEQ ID NO: 77144 - protein, 131 aa, Homo sapiens
  MOD_RES (1)..(1): Any amino acid
XPPTLEVTQQPVRAENQVNVTCQVRKFYPQRLQLTWLENGNVSRTETASTLTENKDGTYNWMSWLLVNVSAHRDDVKLTCQVEHDGQPAVSKSHDLKVSAHPKEQGSNTAPVSLEFYRRGNQDLGSNGGYC

SEQ ID NO: 77145 - protein, 101 aa, Homo sapiens
MQVSIACTEQNLRSRSSEDRLCGPRPGPGGGNGGPAGGGHGNPPGGGGSGPKARAALVPRPPAPAGALRESTGRGTGMKYRYGGGRAAHPFRFPFGTPETA

SEQ ID NO: 77146 - protein, 208 aa, Homo sapiens
KRLTKGGKKGAKKKVVDPFSKKDWYDVKAPAMFNIRNIGKTLVTRTQGTKIASDGLKGRVFETMIEAHVDVKTTDGYLLRLFCVGFTKKRNNQIRKTSYAQHQQVRQIRKKMMEIMTREVQTNDLKEVVNKLIPDSIGKDIEKACQSIYPLHDVFVRKVKMLKKPKFELGKLMELHGEGSSSGKATGDETGAKVERADGYEPPVQESV

SEQ ID NO: 77147 - protein, 190 aa, Homo sapiens
MFSFNMFDHPIPRVFQNRFSTQYRCFSVSMLAGPNDRSDVEKGGKSRLNITYPMLFKLTNKNSDRMTHCGVLEFVADEGICYLPHWMMQNLLLEEGGLVQVESVNLQVATYSKFQPQSPDFLDITNPKAVLENALRNFACLTTGDVIAINYNEKIYELRVMETKPDKAVSIIECDMNVDFDAPLGYKEPE

SEQ ID NO: 77148 - protein, 193 aa, Homo sapiens
MKQQQWCGMTAKMGTVLSGVFTIMAVDMYLIFEQKHLGNGSCTEITPKYRGASNIINNFIICWSFKIVLFLSFITILISCFLLYSVYAQIFRGLVIYIVWIFFYETANVVIQILTNNDFDIKEVRIMRWFGLVSRTVMHCFWMFFVINYAHITYKNRSQGNIISYKRRISTAEILHSRNKRLSISRGALVKQV

SEQ ID NO: 77149 - protein, 308 aa, Homo sapiens
MKPILLQGHERSITQIKYNREGDLLFTVAKDPIVNVWYSVNGERLGTYMGHTGAVWCVDADWDTKHVLTGSADNSCRLWDCETGKQLALLKTNSAVRTCGFDFGGNIIMFSTDKQMGYQCFVSFFDLRDPSQIDNNEPYMKIPCNDSKITSAVWGPLGECIIAGHESGELNQYSAKSGEVLVNVKEHSRQINDIQLSRDMTMFVTASKDNTAKLFDSTTLEHQKTFRTERPVNSAALSPNYDHVVLGGGQEAMDVTTTSTRIGKFEARFFHLAFEEEFGRVKGHFGPINSVAFHPDGKRQADHLRSGV

SEQ ID NO: 77150 - protein, 105 aa, Homo sapiens
MHWLRKVQGLCTLWGTQMSSRTLYINSRQLVSLQWGHQEVPAKFNFASDVLDHWADMEKAGKRLPSPALWWVNGKGKELMWNFRELSENSQQAANILSGACGLQR

SEQ ID NO: 77151 - protein, 81 aa, Homo sapiens
MAEAGPQAPPPPGTPSRHEKSLGLLTTKFVSLLQEAKDGVLDLKLAADTLAVRQKRRIYDITNVLEGVWGLAAIPGRLLTN

SEQ ID NO: 77152 - protein, 269 aa, Homo sapiens
MIGVNSVQSASKVRVRTSGSVKYSREDSIRRQSHRSKSMKISNSSEFSAKENKALYNSIKNEKLEWAVDDEEKKKSPSESTEEKANGTHPKTISRIGSTTNPFLDIPHDPNAAVYKSGFLARKIHADMDGKKTPRGKRGWKTFYAVLKGTVLYLQKDESKLKQITTELAEHRSYPPDKKVKAKDVDEYKLKDHYLEFEKTRYEMYVSILKEGGKELLSNDESEAAGLKKSHSSPSLNPDTSPITAKVKRNVSERKDHRPETPSIKQKVT

SEQ ID NO: 77153 - protein, 160 aa, Homo sapiens
  MOD_RES (1)..(1): Any amino acid
XDLLEETQRKDEEMGSLQDRVIALETSTQVALDHLESVPEKLSLLEDFKDFRDSCSSSERTDGRYSKYRVRRNSLQHHQDDTKYRTKSFKGDRTFLEGSHTRGLDHSSSWQDHSRFLSSPRFSYVNSFTKRTVAPDSASNKEDATMNGTSSQPKKEEYGS

SEQ ID NO: 77154 - protein, 151 aa, Homo sapiens; identical to SEQ ID NO: 68063

SEQ ID NO: 77155 - protein, 229 aa, Homo sapiens
MQGILLLVFAKYQHLPYIQILSTKSTPTGLFGYWGNKGGVNICLKLYGYYVSIINCHLPPHISNNYQRLEHFDRILEMQNCEGRDIPNILDHDLIIWFGDMNFRIEDFGLHFVRESIKNRCYGGLWEKDQLSIAKKHDPLLREFQEGRLLFPPTYKFDRNSNDYDTSEKKRKPAWTDRILWRLKRQPCAGPDTPIPPASHFSLSLRGYSSHMTYGISDHKPVSGTFDLE

SEQ ID NO: 77156 - protein, 217 aa, Homo sapiens
MAAACRSVKGLVAVITGGASGLGLATAERLVGQGASAVLLDLPNSGGEAQAKKLGNNCVFAPADVTSEKDVQTALALAKGKFGRVDVAVNCAGIAVASKTYNLKKGQTHTLEDFQRVLDVNLMGTFNVIRLVAGEMGQNEPDQGGQRGVIINTASVAAFEGQVGQAAYSASKGGIVGMTLPIARDLAPIGIRVMTIAPGRHIPSLHHTWDWVGSMDS

SEQ ID NO: 77157 - protein, 60 aa, Homo sapiens
MSNVSEERRKRQQNIKEGLQFIQSPLSYPGTQEQYAVYLRALVRNLFNEGNDVYREHDWN

SEQ ID NO: 77158 - protein, 37 aa, Homo sapiens
MEQWDHFHNQQEDTDSCSESVKFDARSMTALLPPRNQ

SEQ ID NO: 77159 - protein, 325 aa, Homo sapiens
MAPWLQLLSLLGLLPGAVAAPAQPRAASFQAWGPPSPELLAPTRFALEMFNRGRAAGTRAVLGLVRGRVRRAGQGSLYSLEATLEEPPCNDPMVCRLPVSKKTLLCSFQVLDELGRHVLLRKDCGPVDTKVPGAGEPKSAFTQGSAMISSLSQNHPDNRNETFSSVISLLNEDPLSQDLPVKMASIFKNFVITYNRTYESKEEARWRLSVFVNNMVRAQKIQALDRGTAQYGVTKFSDLTEEEFRTIYLNTLLRKEPGNKMKQAKSVGDLAPPEWDWRSKGAVTKVKDQGMCGSCWAFSVTGNVEGQWFLNQGTLLSLSEQALGL

SEQ ID NO: 77160 - protein, 230 aa, Homo sapiens
MHTLLAATKDSLAMDPPVVNRPKKSKTKKAPIKTITKAAPAAPPVPAANEIATNKPKITWQALNLPVITQISQALPTTEVTNTQASSVTAQPKKANKMKRVTAKAAQGSQSPTGHEGGTIQLKSPLQVLKLPVISQNIHAPIANESASSQALITSIKPKKASKAKKAANKAIASATEVSLAATATHTATTQGQITNETASIHTTAASIRTKKASKARKTIAKVINTDTEH

SEQ ID NO: 77161 - protein, 105 aa, Homo sapiens
MCEEETTALVCDNGSGLCKAGFAGDDAPRAVFPSIVGRPRHQGVMVGMGQKDSYVGDEAQSKRGILTLKYPIEHGIITNWDDMEKPLAGIFYQPNIARSQKAMNT

SEQ ID NO: 77162 - protein, 41 aa, Homo sapiens
LSSSQGTIETSLQDIDSRLSPGGSLADAWAHQEGTHPKDRK

SEQ ID NO: 77163 - protein, 106 aa, Homo sapiens
  MOD_RES (1)..(1): Any amino acid
XTKESTSLLDELALINNGSDKGNQQEKERSVDLNFLPSVDPETVLQTGHELLSELQQRRFNGSDGGVSWSPMDDELLAQPQVMKLLDSLREQYTRYQEVCREAEKC

SEQ ID NO: 77164 - protein, 670 aa, Homo sapiens
MAQAVDRDTNRPLEPPSEFIVKVQDINDNPPEFLHETYHANVPERSNVGTSVIQVTASDADDPTYGNSAKLVYSILEGQPYFSVEAQTGIIRTALPNMDREAKEEYHVVIQAKDMGGHMGGLSGTTKVTITLTDVNDNPPKFPQSVYQMSVSEAAVPGEEVGRVKAKDPDIGENGLVTYNIVDGDGMESFEITTDYETQEGVIKLKKPVDFETKRAYSLKVEAANVHIDPKFISNGPFKDTVTVKISVEDADEPPMFLAPSYIHEVQENAAAGTVVGRVHAKDPDAANSPIRYSIDRHTDLDRFFTINPEDGFIKTTKPLDREETAWLNITVFAAEIHNRHQEAKVPVAIRVLDVNDNAPKFAAPYEGFICESDQTKPLSNQPIVTISADDKDDTANGPRFIFSLPPEIIHNPNFTVRDNRDNTAGVYARRGGFSRQKQDLYLLPIVISDGGIPPMSSTNTLTIKVCGCDVNGALLSCNAEAYILNAGLSTGALIAILACIVILLVIVVLFVTLRRQKKEPLIVFEEEDVRENIITYDDEGGGEEDTEAFDIATLQNPDGINGFIPRKDIKPEYQYMPRPGLRPAPNSVDVDDFINTRIQEADNDPTAPPYDSIQIYGYEGRGSVAGSLSSLESATTDSDLDYDYLQNWGPRFKKLADLYGSKDTFDDDS

SEQ ID NO: 77165 - protein, 377 aa, Homo sapiens
MEVKPPPGRPQPDSGRRRRRRGEEGHDPKEPEQLRKLFIGGLSFETTDDSLREHFEKWGTLTDCVVMRDPQTKRSRGFGFVTYSCVEEVDAAMCARPHKVDGRVVEPKRAVSREDSVKPGAHLTVKKIFVGGIKEDTEEYNLRDYFEKYGKIETIEVMEDRQSGKKRGFAFVTFDDHDTVDKIVVQKYHTINGHNCEVKKALSKQEMQSAGSQRGRGGGSGNFMGRGGNFGGGGGNFGRGGNFGGRGGYGGGGGGSRGSYGGGDGGYNGFGGDGGNYGGGPGYSSRGGYGGGGPGYGNQGGGYGGGGGYDGYNEGGNFGGGNYGGGGNYNDFGNYSGQQQSNYGPMKGGSFGGRSSGSPYGGYGSGGGSGGYGSRRF

SEQ ID NO: 77166 - protein, 69 aa, Homo sapiens
MQRVSGLLSWTLSRVLWLSGLSEPGAARQPRIMEEKALEVYGWNAMAGSRLTATSAFWFQVILLPQSPK

SEQ ID NO: 77167 - protein, 264 aa, Homo sapiens
MELSDVTLIEGVGNEVMVVAGVVVLILALVLAWLSTYVADSGSNQLLGAIVSAGDTSVLHLGHVDHLVAGQGNPEPTELPHPSEGLPKRQAGAGSSSPEAPLRSEDSTCLPPSPGLITVRLKFLNDTEELAVARPEDTVGALKSKYFPGQESQMKLIYQGRLLQDPARTLRSLNITDNCVIHCHRSPPGSAVPGPSASLAPSATEPPSLGVNVGSLMVPVFVVLLGVVWYFRINYRQFFTAPATVSLVGVTVFFSFLVFGMYGR

SEQ ID NO: 77168 - protein, 660 aa, Homo sapiens
MARRPRHSIYSSDEDDEDFEMCDHDYDGLLPKSGKRHLGKTRWTREEDEKLKKLVEQNGTDDWKVIANYLPNRTDVQCQHRWQKVLNPELIKGPWTKEEDQRVIELVQKYGPKRWSVIAKHLKGRIGKQCRERWHNHLNPEVKKTSWTEEEDRIIYQAHKRLGNRWAEIAKLLPGRTDNAIKNHWNSTMRRKVEQEGYLQESSKASQPAVATSFQKNSHLMGFAQAPPTAQLPATGQPTVNNDYSYYHISEAQNVSSHVPYPVALHVNIVNVPQPAAAAIQRHYNDEDPEKEKRIKELELLLMSTENELKGQQVLPTQNHTCSYPGWHSTTIADHTRPHGDSAPVSCLGEHHSTPSLPADPGSLPEESASPARCMIVHQGTILDNVKNLLEFAETLQFIDSFLNTSSNHENSDLEMPSLTSTPLIGHKLTVTTPFHRDQTVKTQKENTVFRTPAIKRSILESSPRTPTPFKHALAAQEIKYGPLKMLPQTPSHLVEDLQDVIKQESDESGIVAEFQENGPPLLKKIKQEVESPTDKSGNFFCSHHWEGDSLNTQLFTQTSPVADAPTGVQWHDFGSLQPLPPGFKRFSCLSLPRSWDYRHPPPRPANFEFLVETGFLHVGQAGLELLTSGDLPASASQSARITGVSHRARPGGIFLQAPF

SEQ ID NO: 77169 - protein, 2039 aa, Homo sapiens
MGASSPRSPEPVGPPAPGLPFCCGGSLLAVVVLLALPVAWGQCNAPEWLPFARPTNLTDEFEFPIGTYLNYECRPGYSGRPFSIICLKNSVWTGAKDRCRRKSCRNPPDPVNGMVHVIKGIQFGSQIKYSCTKGYRLIGSSSATCIISGDTVIWDNETPICDRIPCGLPPTITNGDFISTNRENFHYGSVVTYRCNPGSGGRKVFELVGEPSIYCTSNDDQVGIWSGPAPQCIIPNKCTPPNVENGILVSDNRSLFSLNEVVEFRCQPGFVMKGPRRVKCQALNKWEPELPSCSRVCQPPPDVLHAERTQRDKDNFSPGQEVFYSCEPGYDLRGAASMRCTPQGDWSPAAPTCEVKSCDDFMGQLLNGRVLFPVNLQLGAKVDFVCDEGFQLKGSSASYCVLAGMESLWNSSVPVCEQIFCPSPPVIPNGRHTGKPLEVFPFGKTVNYTCDPHPDRGTSFDLIGESTIRCTSDPQGNGVWSSPAPRCGILGHCQAPDHFLFAKLKTQTNASDFPIGTSLKYECRPEYYGRPFSITCLDNLVWSSPKDVCKRKSCKTPPDPVNGMVHVITDIQVGSRINYSCTTGHRLIGHSSAECILSGNAAHWSTKPPICQRIPCGLPPTIANGDFISTNRENFHYGSVVTYRCNPGSGGRKVFELVGEPSIYCTSNDDQVGIWSGPAPQCIIPNKCTPPNVENGILVSDNRSLFSLNEVVEFRCQPGFVMKGPRRVKCQALNKWEPELPSCSRVCQPPPDVLHAERTQRDKDNFSPGQEVFYSCEPGYDLRGAASMRCTPQGDWSPAAPTCEVKSCDDFMGQLLNGRVLFPVNLQLGAKVDFVCDEGFQLKGSSASYCVLAGMESLWNSSVPVCEQIFCPSPPVIPNGRHTGKPLEVFPFGKTVNYTCDPHPDRGTSFDLIGESTIRCTSDPQGNGVWSSPAPRCGILGHCQAPDHFLFAKLKTQTNASDFPIGTSLKYECRPEYYGRPFSITCLDNLVWSSPKDVCKRKSCKTPPDPVNGMVHVITDIQVGSRINYSCTTGHRLIGHSSAECILSGNTAHWSTKPPICQRIPCGLPPTIANGDFISTNRENFHYGSVVTYRCNLGSRGRKVFELVGEPSIYCTSNDDQVGIWSGPAPQCIIPNKCTPPNVENGILVSDNRSLFSLNEVVEFRCQPGFVMKGPRRVKCQALNKWEPELPSCSRVCQPPPEILHGEHTPSHQDNFSPGQEVFYSCEPGYDLRGAASLHCTPQGDWSPEAPRCAVKSCDDFLGQLPHGRVLFPLNLQLGAKVSFVCDEGFRLKGSSVSHCVLVGMRSLWNNSVPVCEHIFCPNPPAILNGRHTGTPSGDIPYGKEISYTCDPHPDRGMTFNLIGESTIRCTSDPHGNGVWSSPAPRCELSVRAGHCKTPEQFPFASPTIPINDFEFPVGTSLNYECRPGYFGKMFSISCLENLVWSSVEDNCRRKSCGPPPEPFNGMVHINTDTQFGSTVNYSCNEGFRLIGSPSTTCLVSGNNVTWDKKAPICEIISCEPPPTISNGDFYSNNRTSFHNGTVVTYQCHTGPDGEQLFELVGERSIYCTSKDDQVGVWSSPPPRCISTNKCTAPEVENAIRVPGNRSFFTLTEIIRFRCQPGFVMVGSHTVQCQTNGRWGPKLPHCSRVCQPPPEILHGEHTLSHQDNFSPGQEVFYSCEPSYDLRGAASLHCTPQGDWSPEAPRCTVKSCDDFLGQLPHGRVLLPLNLQLGAKVSFVCDEGFRLKGRSASHCVLAGMKALWNSSVPVCEQIFCPNPPAILNGRHTGTPFGDIPYGKEISYACDTHPDRGMTFNLIGESSIRCTSDPQGNGVWSSPAPRCELSVPAACPHPPKIQNGHYIGGHVSLYLPGMTISYICDPGYLLVGKGFIFCTDQGIWSQLDHYCKEVNCSFPLFMNGISKELEMKKVYHYGDYVTLKCEDGYTLEGSPWSQCQADDRWDPPLAKCTSRTHDALIVGTLSGTIFFILLIIFLSWIILKHRKGNNAHENPKEVAIHLHSQGGSSVHPRTLQTNEENSRVLP

SEQ ID NO: 77170 - protein, 214 aa, Homo sapiens
MAVLSAPGLRGFRILGLRSSVGPAVQARGVHQSVATDGPSSTQPALPKARAVAPKPSSRGEYVVAKLDDLVNWARRSSLWPMTFGLACCAVEMMHMAAPRYDMDRFGVVFRASPRQSDVMIVAGTLTNKMAPALRKSSLRPDAGAALRGLHGELRQRRRLLPLFLLGGEGLRPHRARGHLHPRLPTTAEALLYGILQLQRKIKRERRLQIWYRR

SEQ ID NO: 77171 - protein, 28 aa, Homo sapiens
MVWEVKTNQMPNAVQKLLLVMDKRASGM

SEQ ID NO: 77172 - protein, 1166 aa, Homo sapiens
MQDVQGPRPGSPGDAEDRRELGLHRGEVNFGGSGKKRGKFVRVPSGVAPSVLFDLLLAEWHLPAPNLVVSLVGEEQPFAMKSWLRDVLRKGLVKAAQSTGAWILTSALRVGLARHVGQAVRDHSLASTSTKVRVVAVGMASLGRVLHRRILEEAQEDFPVHYPEDDGGSQGPLCSLDSNLSHFILVEPGPPGKGDGLTELRLRLEKHISEQRAGYGGTGSIEIPVLCLLVNGDPNTLERISRAVEQAAPWLILVGSGGIADVLAALVNQPHLLVPKVAEKQFKEKFPSKHFSWEDIVRWTKLLQNITSHQHLLTVYDFEQEGSEELDTVILKALVKACKSHSQEPQDYLDELKLAVAWDRVDIAKSEIFNGDVEWKSCDLEEVMVDALVSNKPEFVRLFVDNGADVADFLTYGRLQELYRSVSRKSLLFDLLQRKQEEARLTLAGLGTQQAREPPAGPPAFSLHEVSRVLKDFLQDACRGFYQDGRPGDRRRAEKGPAKRPTGQKWLLDLNQKSENPWRDLFLWAVLQNRHEMATYFWAMGQEGVAAALAACKILKEMSHLETEAEAARATREAKYERLALDLFSECYSNSEARAFALLVRRNRCWSKTTCLHLATEADAKAFFAHDGVQAFLTRIWWGDMAAGTPILRLLGAFLCPALVYTNLITFSEEAPLRTGLEDLQDLDSLDTEKSPLYGLQSRVEELVEAPRAQGDRGPRAVFLLTRWRKFWGAPVTVFLGNVVMYFAFLFLFTYVLLVDFRPPPQGPSGPEVTLYFWVFTLVLEEIRQGFFTDEDTHLVKKFTLYVGDNWNKCDMVAIFLFIVGVTCRMLPSAFEAGRTVLAMDFMVFTLRLIHIFAIHKQLGPKIIVVERMMKDVFFFLFFLSVWLVAYGVTTQALLHPHDGRLEWIFRRVLYRPYLQIFGQIPLDEIDEARVNCSTHPLLLEDSPSCPSLYANWLVILLLVTFLLVTNVLLMNLLIAMFSYTFQVVQGNADMFWKFQRYNLIVEYHERPALAPPFILLSHLSLTLRRVFKKEAEHKREHLERDLPDPLDQKVVTWETVQKENFLSKMEKRRRDSEGEVLRKTAHRVDFIAKYLGGLREQEKRIKCLESQINYCSVLVSSVADVLAQGGGPRTGSQHCGEGSQLVAADHRGGLDGWEQPGAGQPPSDT

SEQ ID NO: 77173 - protein, 393 aa, Homo sapiens
MLELKPSSVDSKFSTTMQAYVFPRCFGTAWVLTSFFPSYSDLDTVFITSNMIANFCCEPAEWVQTKSIHISCPKENASSKFLAPYTTFSRIHTKSITCLDISSRGGLGVSSSTDGTMKIWQASNGELRRVLEGHVFDVNCCRFFPSGLVVLSGGMDAQLKIWSAEDASCVVTFKGHKGGILDTAIVDRGRNVVSASRDGTARLWDCGRSACLGVLADCGSSINGVAVGAADNSINLGSPEQMPSEREVGTEAKMLLLAREDKKLQCLGLQSRQLVFLFIGSDAFNCCTFLSGFLLLAGTQDGNIYQLDVRSPRAPVQVIHRSGAPVLSLLSVRDGFIASQGDGSCFIVQQDLDYVTELTGADCDPVYKVATWEKQIYTCCRDGLVRRYQLSDL

SEQ ID NO: 77174 - protein, 165 aa, Homo sapiens
MLGSVATTLPLSSSNSSGMPLGYYLSSPQISRVTISTTGQLTSKATVGSCSRVENSLDASPFSVPKKQDESPMIGDGEDYFLSLFGDSKKLTAHSNYTQKTLKYFSMILEEVGQFTSSSLGDVEIAEVNVKGLFVKLINSSLDKEMAIGDHILQQNVNGQTISLY

SEQ ID NO: 77175 - protein, 46 aa, Homo sapiens
MRPWALAVTRWPPSAPVGQRRFSAGPGSTPGQLWGSSRRPDLHTSP

SEQ ID NO: 77176 - protein, 138 aa, Homo sapiens
MDASLSMLANCEKLSLSTNCIEKIANLNGLKNLRILSLGRNNIKNLNGLEAVGDTLEELWISYNFIEKLKGIHIMKKLKILYMSNNLVKDWAEFVKLAELPCLEDLVFVGNPLEEKHSAENNWIEEATKRVPKLKKLD

SEQ ID NO: 77177 - protein, 165 aa, Homo sapiens
MRLEWGPRPAALPWPAGMCAAERAEGAFTLQSVAQPMRPIASTATKCGNCGPGYSTPLEAMKGPREEIVYLPCIYRNTGTEAPDYLATVDVDPKSPQYCQVIHRLPMPNLKDELHHSGWNTCSSCFGDSTKSRTKLVLPSLISSRIYVVDVGSEPRAPKLHKACH

SEQ ID NO: 77178 - protein, 4262 aa, Homo sapiens
MPRPGTMALCLLTLVLSLLPPQAAAEQDLSVNRAVWDGGGCISQGDVLNRQCQQLSQHVRTGSAANTATGTTSTNVVEPRMYLSCSTNPEMTSIESSVTSDTPGVSSTRMTPTESRTTSESTSDSTTLFPSSTEDTSSPTTPEGTDVPMSTPSEESISSTMAFVSTAPLPSFEAYTSLTYKVDMSTPLTTSTQASSSPTTPESTTIPKSTNSEGSTPLTSMPASTMKVASSEAITLLTTPVEISTPVTISAQASSSPTTAEGPSLSNSAPSGGSTPLTRMPLSVMLVVSSEASTLSTTPAATNIPVITSTEASSSPTTAEGTSIPTSTYTEGSTPLTSTPASTMPVATSEMSTLSITPVDTSTLVTTSTEPSSLPTTAEATSMLTSTLSEGSTPLTNMPVSTILVASSEASTTSTIPVDSKTFVTTASEASSSPTTAEDTSIATSTPSEGSTPLTSMPVSTTPVASSEASNLSTTPVDSKTQVTTSTEASSSPPTAEVNSMPTSTPSEGSTPLTSMSVSTMPVASSEASTLSTTPVDTSTPVTTSSEASSSSTTPEGTSIPTSTPSEGSTPLTNMPVSTRLVVSSEASTTSTTPADSNTFVTTSSEASSSSTTAEGTSMPTSTYSERGTTITSMSVSTTLVASSEASTLSTTPVDSNTPVTTSTEATSSSTTAEGTSMPTSTYTEGSTPLTSMPVNTTLVASSEASTLSTTPVDTSTPVTTSTEASSSPTTADGASMPTSTPSEGSTPLTSMPVSKTLLTSSEASTLSTTPLDTSTHITTSTEASCSPTTTEGTSMPISTPSEGSPLLTSIPVSITPVTSPEASTLSTTPVDSNSPVTTSTEVSSSPTPAEGTSMPTSTYSEGRTPLTSMPVSTTLVATSAISTLSTTPVDTSTPVTNSTEARSSPTTSEGTSMPTSTPGEGSTPLTSMPDSTTPVVSSEARTLSATPVDTSTPVTTSTEATSSPTTAEGTSIPTSTPSEGTTPLTSTPVSHTLVANSEASTLSTTPVDSNTPLTTSTEASSPPPTAEGTSMPTSTPSEGSTPLTRMPVSTTMVASSETSTLSTTPADTSTPVTTYSQASSSSTTADGTSMPTSTYSEGSTPLTSVPVSTRLVVSSEASTLSTTPVDTSIPVTTSTEASSSPTTAEGTSIPTSPPSEGTTPLASMPVSTTLVVSSEANTLSTTPVDSKTQVATSTEASSPPPTAEVTSMPTSTPGERSTPLTSMPVRHTPVASSEASTLSTSPVDTSTPVTTSAETSSSPTTAEGTSLPTSTTSEGSTLLTSIPVSTTLVTSPEASTLLTTPVDTKGPVVTSNEVSSSPTPAEGTSMPTSTYSEGRTPLTSIPVNTTLVASSAISILSTTPVDNSTPVTTSTEACSSPTTSEGTSMPNSNPSEGTTPLTSIPVSTTPVVSSEASTLSATPVDTSTPGTTSAEATSSPTTAEGISIPTSTPSEGKTPLKSIPVSNTPVANSEASTLSTTPVDSNSPVVTSTAVSSSPTPAEGTSIAISTPSEGSTALTSIPVSTTTVASSEINSLSTTPAVTSTPVTTYSQASSSPTTADGTSMQTSTYSEGSTPLTSLPVSTMLVVSSEANTLSTTPIDSKTQVTASTEASSSTTAEGSSMTISTPSEGSPLLTSIPVSTTPVASPEASTLSTTPVDSNSPVITSTEVSSSPTPAEGTSMPTSTYTEGRTPLTSITVRTTPVASSAISTLSTTPVDNSTPVTTSTEARSSPTTSEGTSMPNSTPSEGTTPLTSIPVSTTPVLSSEASTLSATPIDTSTPVTTSTEATSSPTTAEGTSIPTSTLSEGMTPLTSTPVSHTLVANSEASTLSTTPVDSNSPVVTSTAVSSSPTPAEGTSIATSTPSEGSTALTSIPVSTTTVASSETNTLSTTPAVTSTPVTTYAQVSSSPTTADGSSMPTSTPREGRPPLTSIPVSTTTVASSEINTLSTTLADTRTPVTTYSQASSSPTTADGTSMPTPAYSEGSTPLTSMPLSTTLVVSSEASTLSTTPVDTSTPATTSTEGSSSPTTAGGTSIQTSTPSERTTPLAGMPVSTTLVVSSEGNTLSTTPVDSKTQVTNSTEASSSATAEGSSMTISAPSEGSPLLTSIPLSTTPVASPEASTLSTTPVDSNSPVITSTEVSSSPIPTEGTSMQTSTYSDRRTPLTSMPVSTTVVASSAISTLSTTPVDTSTPVTNSTEARSSPTTSEGTSMPTSTPSEGSTPFTSMPVSTMPVVTSEASTLSATPVDTSTPVTTSTEATSSPTTAEGTSIPTSTLSEGTTPLTSIPVSHTLVANSEVSTLSTTPVDSNTPFTTSTEASSPPPTAEGTSMPTSTSSEGNTPLTRMPVSTTMVASFETSTLSTTPADTSTPVTTYSQAGSSPTTADDTSMPTSTYSEGSTPLTSVPVSTMPVVSSEASTHSTTPVDTSTPVTTSTEASSSPTTAEGTSIPTSPPSEGTTPLASMPVSTTPVVSSEAGTLSTTPVDTSTPMTTSTEASSSPTTAEDIVVPISTASEGSTLLTSIPVSTTPVASPEASTLSTTPVDSNSPVVTSTEISSSATSAEGTSMPTSTYSEGSTPLRSMPVSTKPLASSEASTLSTTPVDTSIPVTTSTETSSSPTTAKDTSMPISTPSEVSTSLTSILVSTMPVASSEASTLSTTPVDTRTLVTTSTGTSSSPTTAEGSSMPTSTPGERSTPLTNILVSTTLLANSEASTLSTTPVDTSTPVTTSAEASSSPTTAEGTSMRISTPSDGSTPLTSILVSTLPVASSEASTVSTTAVDTSIPVTTSTEASSSPTTAEVTSMPTSTPSETSTPLTSMPVNHTPVASSEAGTLSTTPVDTSTPVTTSTKASSSPTTAEGIVVPISTASEGSTLLTSIPVSTTPVASSEASTLSTTPVDTSIPVTTSTEGSSSPTTAEGTSMPISTPSEVSTPLTSILVSTVPVAGSEASTLSTTPVDTRTPVTTSAEASSSPTTAEGTSMPISTPGERRTPLTSMSVSTMPVASSEASTLSRTPADTSTPVTTSTEASSSPTTAEGTGIPISTPSEGSTPLTSIPVSTTPVAIPEASTLSTTPVDSNSPVVTSTEVSSSPTPAEGTSMPISTYSEGSTPLTGVPVSTTPVTSSAISTLSTTPVDTSTPVTTSTEAHSSPTTSEGTSMPTSTPSEGSTPLTYMPVSTMLVVSSEDSTLSATPVDTSTPVTTSTEATSSTTAEGTSIPTSTPSEGMTPLTSVPVSNTPVASSEASILSTTPVDSNTPLTTSTEASSSPPTAEGTSMPTSTPSEGSTPLTSMPVSTTTVASSETSTLSTTPADTSTPVTTYSQASSSPPIADGTSMPTSTYSEGSTPLTNMSFSTTPVVSSEASTLSTTPVDTSTPVTTSTEASLSPTTAEGTSIPTSSPSEGTTPLASMPVSTTPVVSSEVNTLSTTPVDSNTLVTTSTEASSSPTIAEGTSLPTSTTSEGSTPLSIMPLSTTPVASSEASTLSTTPVDTSTPVTTSSPTNSSPTTAEVTSMPTSTAGEGSTPLTNMPVSTTPVASSEASTLSTTPVDSNTFVTSSSQASSSPATLQVTTMRMSTPSEGSSSLTTMLLSSTYVTSSEASTPSTPSVDRSTPVTTSTQSNSTPTPPEVITLPMSTPSEVSTPLTIMPVSTTSVTISEAGTASTLPVDTSTPVITSTQVSSSPVTPEGTTMPIWTPSEGSTPLTTMPVSTTRVTSSEGSTLSTPSVVTSTPVTTSTEAISSSATLDSTTMSVSMPMEISTLGTTILVSTTPVTRFPESSTPSIPSVYTSMSMTTASEGSSSPTTLEGTTTMPMSTTSERSTLLTTVLISPISVMSPSEASTLSTPPGDTSTPLLTSTKAGSFSIPAEVTTIRISITSERSTPLTTLLVSTTLPTSFPGASIASTPPLDTSTTFTPSTDTASTPTIPVATTISVSVITEGSTPGTTIFIPSTPVTSSTADVFPATTGAVSTPVITSTELNTPSTSSSSTTTSFSTTKEFTTPAMTTAAPLTYVTMSTAPSTPRTTSRGCTTSASTLSATSTPHTSTSVTTRPVTPSSESSRPSTITSHTIPPTFPPAHSSTPPTTSASSTTVNPEAVTTMTTRTKPSTRTTSFPTVTTTAVPTNTTIKSNPTSTPTVPRTTTCFGDGCQNTASRCKNGGTWDGLKCQCPNLYYGELCEEVVSSIDIGPPETISAQMELTVTVTSVKFTEELKNHSSQEFQEFKQTFTEQMNIVYSGIPEYVGVNITKLRHDVFQHHWHPSAKHYGDPVRP

SEQ ID NO: 77179 - protein, 73 aa, Homo sapiens
MRREGSTVLQLKLQQRRTREELVSQGIMPPLKSPAAFHEQRRSLERARTEDYLKRKIRSRPERSELVRMHILE

SEQ ID NO: 77180 - protein, 161 aa, Homo sapiens
MEDEMPKTLYVGNLSRDVTEALILQLFSQIGPCKNCKMIMDTAGNDPYCFVEFHEHRHAAAALAAMNGRKIMGKEVKVNWATTPSSQKKDTSSSTVVSTQRSQVLVHLHMDSHKLNGVMSGQPKLLAFEKTVKYFNIKLLQCKIISMSLLVISAQKLQLKI

SEQ ID NO: 77181 - protein, 320 aa, Homo sapiens
MLKAYQQKLFVTHTVDELLWGYKDEILSLIHVFRPDISPYFGLFYEKNGTNDGDYVFLTGEDSYLNFTKIVEWNGKTSLDWWITDKCNMINGTDGDSFHPLITKDEVLYVFPSDFCRSVYITFSDYESVQGLPAFRYKVPAEILANTSDNAGFCIPEGNCLGSGVLNVSICKNGAPIIMSFPHFYQADERFVSAIEGMHPNQEDHETFVDINPLTGIILKAAKRFQINIYVKKLDDFVETGDIRTMVFPVMYLNESVHIDKETASRLKSMINTTLIITNIPYIIMALGVFFGLVFTWLACKGQGSMDEGTADERAPLIRT

SEQ ID NO: 77182 - protein, 198 aa, Homo sapiens
MAGPLQGGGARALDLLRGLPRVSLANLKPNPGSKKPERRPRGRRRGRKCGRGHKGERQRGTRPRLGFEGGQTPFYIRIPKYGFNEGHSFRRQYKPLSLNRLQYLIDLGRVDPSQPIDLTQLVNGRGVTIQPLKRDYGVQLVEEGADTFTAKVNIEVQLASELAIAAIEKNGGVVTTAFYDPRSLGKFVPRSFSSFSLC

SEQ ID NO: 77183 - protein, 60 aa, Homo sapiens
MAIAYNHPDVVSVILEQKANALHATNNLQIIPDFSLKDSRDQTVLGLALWTGMHTIAAQL

SEQ ID NO: 77184 - protein, 24 aa, Homo sapiens
MDEEEGDTCTICLEQWTNAGDHRL

SEQ ID NO: 77185 - protein, 45 aa, Homo sapiens
GLWNLASLFSNLCLFVLMPFAFFFLESEGFAGLKKEGKMSRQNLV

SEQ ID NO: 77186 - protein, 95 aa, Homo sapiens
MAASAFAGAVRAASGILRPLNILASSTYRNCVKNASLISALSTGRFSHIQTPVVSSTPRLTTSERNLTCGHTSVILNRLAIRKNYGKRHLQGRSD

SEQ ID NO: 77187 - protein, 185 aa, Homo sapiens
MKDCPMPRNAARISEKRKEYMDACGEANNQNFQQRYHAEEVEERFGRFKPGVISEELQDALGVTDKSLPPFIYRMRQLGYPPGWLKEAELENSGLALYDGKDGTDGETEVGEIQQNKSVTYDLSKLVNYPGFNISTPRGIPDEWRIFGSIPMQACQQKDVFANYLTSNFQAPGVKSGNKRSSSHS

SEQ ID NO: 77188 - protein, 290 aa, Homo sapiens
MERCSRCHRLLLLLPLVLGLSAAPGWAGAPPVDVLRALRFPSLPDGVRRAKGICPADVAYRVARPAQLSAPTRQLFPGGFPKDFSLLTVVRTRPGLQAPLLTLYSAQGVRQLGLELGPPVRFLYEDQTGRPQPPSQPVFRGLSLADGKWHRVAVAVKGQSVTLIVDCKKRVTRPLPRSARPVLDTHGVIIFGARILDEEVFEGDVQELAIVPGVQAAYESCEQKELECEGGQRERPQNQQPHRAQRSPQQQPSRLHRPQNQEPQSQVRELGEPPSAAHPREGRHPGISPP

SEQ ID NO: 77189 - protein, 293 aa, Homo sapiens
MTRHLRLTAEGEREEKTEEASDITGRTEKQQWGRTDQTPRLPAPKEQGRAADALLKAVAASSVAEKAVEAARMAKLIAQDLQPMLEAPGRRPRQDSEGSDTEPLDEDSPGVYENGLTPSEGSPELPSSPASSRQPWRPPACRSPLPPGGDQGPFSSPKAWPEEWGGAGAQAEELAGYEAEDEAGMQGPGPRDGSPLLGGCSDSSGSLREEEGEDEEPLPPLRAPAGTEPEPIAMLVLRGSSSRGPDAGCLTEELGEPAATERPAQPGAANPLVVGAVALLDLSLAFLFSQLLT

SEQ ID NO: 77190 - protein, 297 aa, Homo sapiens
MALRLLKLAATSASARVVAAGAQRVRGIHSSVQCKLRYGMWHFLLGDKASKRLTERSRVITVDGNICTGKGKLAKEIAEKLGFKHFPEAGIHYPDSTTGDGKPLATDYNGNCSLEKFYDDPRSNDGNSYRLQSWLYSSRLLQYSDALEHLLTTGQGVVLERSIFSDFVFLEAMYNQGFIRKQCVDHYNEVKSVTICDYLPPHLVIYIDVPVPEDIEYLKFDKGPWLKQDNRTLYHLRLLVQDKFEVLNYTSIPIFLPEVTIGAHQTDRVLHQFRELPGRKYSPGYNTEVGDKWIWLK

SEQ ID NO: 77191 - protein, 184 aa, Homo sapiens
MATVWDEAEVGTGRAGGPGTGARRETPLTRGKEQDGIGEEVLKMSTEEIIQRTRLLDSEIKIMKSEVLRVTHELQAMKDKIKENSEKIKVNKTLPYLVSNVIELLDVDPNDQEEDGANIDLDSQRKGKCAVIKTSTRQTYFLPVIGLVDAEKLKPGDLVGVNKDSYLILETLPTEYDSRVKAME

SEQ ID NO: 77192 - protein, 137 aa, Homo sapiens
MRTEAEAAGPPLEPGDFVQLPVPVIQQLYHWDCGLACSRMVLRYLGQLDDSEFERALQKLQLTRSIWTIDLAYLMHHFGVRHRFCTQTLGVDKGYKNQSFYRKHFDTEETRVNQLFAQAKACKVLVEKCRNVQHQHQ

SEQ ID NO: 77193 - protein, 193 aa, Homo sapiens
  MOD_RES (1)..(1): Any amino acid
XMFCSPAGQHIRCSRVDIISRSGEKIPVSVWMKRMRQERRLCCVVVLEPVERVSTWVAFQSDGTVTSCDSLFAHLHGYVSGEDVAGQHITDLIPSVQLPPSGQHIPKNLKIQRSVGRARDGTTFPLSLKLKSQPSSEEATTGEAAPVSGYRASVWVFCTISGLITLLPDGTIHGINHSFALTLFGYGKTELLG

SEQ ID NO: 77194 - protein, 461 aa, Homo sapiens
MSGSSGPAPTPAVTKARRGDLTLQHGGGGRLGPRVGALTAAGGPCRKQLPPPPLSSLLGQGPGPGVQLDIASQSLDQEILLKVKTEIEEELKSLDKEISEAFTSTGFDRHTSPVFSPANPESSMEDCLAHLGEKVSQELKEPLHKALQMLLSQPVTYQAFRECTLETTVHASGWNKGTVFSLESEEEEYPGITAEDSNDIYILPSDNSGQVSPPESPTVTTSWQSESLPVSLSASQSWHTESLPVSLGPESWQQIAMDPEEVKSLDSNGAGEKSENNSSNSDIVHVEKEEVPEGMEEAAVASVVLPARELQEALPEAPAPLLPHITATSLLGTREPDTEVITVEKSSPATSLFVELDEEEVKAATTEPTEVEEVVPALEPTETLLSEKEINAREESLVEELSPASEKKPVPPSEGKSRLSPAGEMKPMPLSEGKSILLFGGAAAVAILAVAIGVALALRKK

SEQ ID NO: 77195 - protein, 194 aa, Homo sapiens
ETNIAVFWCLLTVTFSIKMFLTVTRLYFSAEEGGERSVCLTFAFLFLLLAMLVQVVREETLELGLEPGLASMTQNLEPLLKKQGWDWALPVAKLAIRVGLAVVGSVLGAFLTFPGLRLAQTHRDALTMSEDRPMLQLSDSAFDSGRLWLLVVLCLLRLAVTRPHLQAYLCLAKARVEQLRREAGRIEAREIQQR

SEQ ID NO: 77196 - protein, 251 aa, Homo sapiens
MAQGRVAHLIEWKGWSKPSDSPAALESAFSSYSDLSEGEQEARFAAGVAEQFAIAEAKLRAWSSVDGEDSTDDSYDEDFAGGMDTDMAGQLPLGPHLQDLFTGHRFSRPVRQGSVEPESDCSQTVSPDTLCSSLCSLEDGLLGSPARLASQLLGDELLLAKLPPSRESAFRSLGPLEAQDSLYNSPLTEGWLLPSRSLWVEPSLKGPCPAGLVLCFIHLSIVSKSSSFFLKTEGFWSVFSVGSSLLWEALE

SEQ ID NO: 77197 - protein, 37 aa, Homo sapiens
MYDDSYVPGFEDSEAPPAEASSAAGILSSCPAWRAWR

SEQ ID NO: 77198 - protein, 737 aa, Homo sapiens
MQLLQQQQQEAVSEGSSSGRAREASGAPTSSKDNYLGGTSTISDNAKELCKAVSVSMGLGVEALEHLSPGEQLRGDCMYAPLLGVPPAVRPTPCAPLAECKGSLLDDSAGKSTEDTAEYSPFKGGYTKGLEGESLGCSGSAAAGSSGTLELPSTLSLYKSGALDEAAAYQSRDYYNFPLALAGPPPPPPPPHPHARIKLENPLDYGSAWAAAAAQCRYGDLASLHGAGAAGPGSGSPSAAASSSWHTLFTAEEGQLYGPCGGGGGGGGGGGGGGGGGGGGGGGEAGAVAPYGYTRPPQGLAGQESDFTAPDVWYPGGMVSRVPYPSPTCVKSEMGPWMDSYSGPYGDMRLETARDHVLPIDYYFPPQKTCLICGDEASGCHYGALTCGSCKVFFKRAAEGKQKYLCASRNDCTIDKFRRKNCPSCRLRKCYEAGMTLGARKLKKLGNLKLQEEGEASSTTSPTEETTQKLTVSHIEGYECQPIFLNVLEAIEPGVVCAGHDNNQPDSFAALLSSLNELGERQLVHVVKWAKALPGFRNLHVDDQMAVIQYSWMGLMVFAMGWRSFTNVNSRMLYFAPDLVFNEYRMHKSRMYSQCVRMRHLSQEFGWLQITPQEFLCMKALLLFSIKANLFARIPVDGLKNQKFFDELRMNYIKELDRIIACKRKNPTSCSRRFYQLTKLLDSVQPIARELHQFTFDLLIKSHMVSVDFPEMMAEIISVQVPKILSGKVKPIYFHTQ

SEQ ID NO: 77199 - protein, 172 aa, Homo sapiens
PRTRLPMGASALCVVVLCWLYIFPVYRLPNEKEIVQGVLQQGTAWRRNQTAARAFRKQMEDCCDPAHLFAMTKMNSPMGKSMWYDGEFLYSFTIDNSTYSLFPQATPFQLPLKKCAVVGNGGILKKSGCGRQIDEANFVMRCNLPPLSSEYTKDVGSKSQLVTANPSIIRQR

SEQ ID NO: 77200 - protein, 84 aa, Homo sapiens
MKGVDDLDFFIGDEAIEKPTYATKWPIRHGIVEDWDLMERFMEQVIFKYLRAEPEDHYFLLTEPPLNTPENREYTAEIMFESFN

SEQ ID NO: 77201 - protein, 31 aa, Homo sapiens
MATDWLGSIVSINCGDSLGVYQGRVSAVDQV

SEQ ID NO: 77202 - protein, 104 aa, Homo sapiens
MSPAFRAMDVEPRAKGVLLEPFVHQVGGHSCVLRFNETTLCKPLVPREHQFYETLPAEMRKFTPQYKGVVSVRFEEDEDRNLCLIAYPLKGDHGIVDIVDNSDC

SEQ ID NO: 77203 - protein, 132 aa, Homo sapiens
MSRTFEVLTRETVSISIRASLQQTQAVPLLMAHQYLRGSVETQVTIATAILAGVYALIIFEIVHRTLAAMLGSLAALAALAVIGDRPSLTHVVEWIDFETLALLFGMMILVAIFSETGFFDYCAVKAYRLSR

SEQ ID NO: 77204 - protein, 75 aa, Homo sapiens
MMFRDQVGILAGWFKGWNECEQTVALLSLLKRVTRTQARFLQLCLEHSLADCNDIHLLESEANSAAIVSQWQQES

SEQ ID NO: 77205 - protein, 99 aa, Homo sapiens
MKGKLARSTKEIPDEISILLLGVAHFKGQWVTKFDSRKTSLEDFYLDEERTVRVPMMSDPKAVLRYGLDSDLSCKIAQLPLTGSMSIIFFLPLKVTQNL

SEQ ID NO: 77206 - protein, 62 aa, Homo sapiens
MEAPLRPAADILRRNPQQDYELVQRVGSGTYGDVYKARNVHTGELAAVKIIKLEPGSCLFAY

SEQ ID NO: 77207 - protein, 415 aa, Homo sapiens
  MOD_RES (1)..(1): Any amino acid
XQRPRDSCCPILTPLEPMSPQQQAVMNNRCFQLGEGDCWDLPVDYTKMKPRRIDEDESKDITPEDLDPFQEALEERRYPGEVTIPSPKPKYPQCKESKKDLITLSGCPLADKSIRSMLATSSQELKCPTPGCDGSGHITGNYASHRSLSGCPRAKKSGIRIAQSKEDKEDQEPIRCPVPGCDGQGHITGKYASHRSASGCPLAAKRQKDGYLNGSQFSWKSVKTEGMSCPTPGCDGSGHVSGSFLTHRSLSGCPRATSAMKKAKLSGEQMLTIKQRASNGIENDEEIKQLDEEIKELNESNSQMEADMIKLRTQITTMESNLKTIEEENKVIEQQNESLLHELANLSQSLIHSLANIQLPHMDPINEQNFDAYVTTLTEMYTNQDRYQSPENKALLENIKQAVRGIQEDGVWWGQ

SEQ ID NO: 77208 - protein, 194 aa, Homo sapiens
MGRRSTSSTKSGKFMNPTDQARKEARKRELKKNKKQRMMVRAAVLKMKDPKQIIRDMEKLDEMEFNPVQQPQLNEKVLKDKRKKLRETFERILRLYEKENPDIYKELRKLEVEYEQKRAQLSQYFDAVKPSEVMMMMFLAPVKMMAILRTWIKISMMTVLMTVTPTNQMEKVTGMNLCTVIMVRETTMKKRSQV

SEQ ID NO: 77209 - protein, 315 aa, Homo sapiens
MATPRGLGALLLLLLLPTSGQEKPTEGPRNTCLGSNNMYDIFNLNDKALCFTKCRQSGSDSCNVENLQRYWLNYEAHLMKEGLTQKVNTPFLKALVQNLSTNTAEDFYFSLEPSQVPRQVMKDEDKPPDRVRLPKSLFRSLPGNRSVVRLAVTILDIGPGTLFKGPRLGLGDGSGVLNNRLVGLSVGQMHVTKLAEPLEIVFSHQRPPPNMTLTCVFWDVTKGTTGDWSSEGCSTEVRPEGTVCCCDHLTFFALLLRPTLDQSTVHILTRISQAGCGVSMIFLAFTIILYAFLRPARPDGHRHWECQQLRPLHHP

SEQ ID NO: 77210 - protein, 160 aa, Homo sapiens
MSEVRLPPLRALDDFVLGSARLAAPDPCDPQRWCHRVINNLLYYQTNYLLCFGIGLALAGYVRPLHTLLSALVVAVALGVLVWAAETRAAVRRCRRSHPAACLAAVLAVGLLVLWVAGGACTFLFSIAGPVLRESPLPRDSQESSQSMLKAPGQPCRSPG

SEQ ID NO: 77211 - protein, 74 aa, Homo sapiens
MLRRALLCLAVAALVRADAPEEEDHVLVLRKSNFAEALAAHKYLLVEFLCQSRWEAEGRRFRDQVGQGGRHGGV

SEQ ID NO: 77212 - protein, 168 aa, Homo sapiens
MAFLASGPYLTHQQKVLRLYKRALRHLESWCVQRARFEEHKNEKDMAKATQLLKEAEEEFWYRQHPQPYIFPDSPGGTSYERYDCYKVPEWCLDDWHPSEKAMYPDYFAKREQWKKLRRESWEREVKQLQEETPPGGPLTEALPPARKEGDLPPLWWYIVTRPRERPM

SEQ ID NO: 77213 - protein, 67 aa, Homo sapiens
MVSDEDELNLLVIVVDANPIWWGKQALKESQFTLSKCIDAVMVLGNSHLFMNRSNKLAVIASHIQER

SEQ ID NO: 77214 - protein, 114 aa, Homo sapiens
MVDSTEYEVASQPEVETSPLGDGASPGPEQVKLKKEISLLNGVCLIVGNMIGSGIFVSPKGVLIYSASFGLSLVIWAVGGLFSVFGALCYAELGTTIKKSGASYAYILEAFGGF

SEQ ID NO: 77215 - protein, 174 aa, Homo sapiens
MAVSEIKPKLKLNPLTKVPISHNKRDRDLPGSLQCQLQHKEKKLSASQMAAFQDAYNFFYKDKTGCIDFHGLMCTVAKLGMNLTKHDVYNELKCADIDRDGKVNFSDFIKVLTDKNLFLKAVVPEKETCLDLAGNPGILLFEILSRLLETSALPRKSIIEIVSYFQRKFQHTGP

SEQ ID NO: 77216 - protein, 649 aa, Homo sapiens
MKIIFPILSNPVFRRTVKLLLCLLWIGYSQGTTHVLRFGGIFEYVESGPMGAEELAFRFAVNTINRNRTLLPNTTLTYDTQKINLYDSFEASKKACDQLSLGVAAIFGPSHSSSANAVQSICNALGVPHIQTRWKHQVSDNKDSFYVSLYPDFSSLSRAILDLVQFFKWKTVTVVYDDSTGLIRLQELIKAPSRYNLRLKIRQLPADTKDAKPLLKEMKRGKEFHVIFDCSHEMAAGILKQALAMGMMTEYYHYIFTTLDLFALDVEPYRYSGVNMTGFRILNTENTQVSSIIEKWSMERLQAPPKPDSGLLDGFMTTDAALMYDAVHVVSVAVQQFPQMTVSSLQCNRHKPWRFGTRFMSLIKEAHWEGLTGRITFNKTNGLRTDFDLDVISLKEEGLEKIGTWDPASGLNMTESQKGKPANITDSLSNRSLIVTTILEEPYVLFKKSDKPLYGNDRFEGYCIDLLRELSTILGFTYEIRLVEDGKYGAQDDANGQWNGMVRELIDHKADLAVAPLAITYVREKVIDFSKPFMTLGISILYRKPNGTNPGVFSFLNPLSPDIWMYILLAYLGVSCVLFVIARFSPYEWYNPHPCNPDSDVVENNFTLLNSFWFGVGALMQQDVLPYCIRDYTKDMTVLSSCPKHCPPG

SEQ ID NO: 77217 - protein, 168 aa, Homo sapiens
MAVFPWHSRNRNYKAEFASCRLEAVPLEFGDYHPLKPITVTESKTKKVNRKGSTSSTSSSSSSSVVDPLSSVLDGTDPLSMFAATADPAALAAAMDSSRRKRDRDDNSVVGSDFEPWTNKRGEILARYTTTEKLSIAKLGLPHWQCQRRCGPGWRSWMTLRRVPKRSC

SEQ ID NO: 77218 - protein, 36 aa, Homo sapiens
MGFSSDEYLSLVARLIIHFRDIRTVAWLVHTVLWGS

SEQ ID NO: 77219 - protein, 281 aa, Homo sapiens
MASESETLNPSARIMTFYPTMEEFRNFSRYIAYIESQGAHRAGLAKVVPPKEWKPRASYDDIDDLVIPAPIQQLVTGQSGLFTQYNIQKKAMTVREFRKIANSDKYCTPRYSEFEELERKYWKNLTFNPPIYGADVNGTLYEKHVDEWNIGRLRTILDLVEKESGITIEGVNTPYLYFGMWKTSFAWHTEDMDLYSINYLHFGEPKSWYSVPPEHGKRLERLAKGFFPGSAQSCEAFLRHKMTLISPLMLKKYGIPFDKVTQEAGEFMITFPYGYHAGFNH

SEQ ID NO: 77220 - protein, 98 aa, Homo sapiens
  MOD_RES (1)..(1): Any amino acid
XPVLRGDGARPSWLASALACVLIFTIVVDILGNLLVILSVYRNKKLRNAGCQHEDTGCGIRRRCIQLSLQSQDKPAPTHYWLNLTNRYSFVFCFFKCI

SEQ ID NO: 77221 - protein, 134 aa, Homo sapiens
MVLILGRRLNREDLGVRDSPATKRKVFEMDPKSLTGHEFFDFSSGSSHAENILQIFNEFRDSRLFTDVIICVEGKEFPCHRAVLSACSSYFRAMFCNDHRESREMLVEINGILAEAMECFLQYVYTGKVKITTE

SEQ ID NO: 77222 - protein, 463 aa, Homo sapiens
LNFGNLGSTSTPATTSAPSSGFGTGLFGSKPATGFTLGGTNTGTPATTSAATTGFSLGFNKPAASATPFALPITSTSASGLTLSSALTSTPAASTGFTLNNLGGTTATTTTASTGLSLGGALAGLGGSLFQSTNTGTSGLGQNALGLTLGTTAATSTAGNEGLGGIDFSSSSDKKSDKTGTRPEDSKALKDENLPPVICQDVENLQKFVKEQKQVQEEISRMSSKAMLKVQEDIKALKQLLSLAANGIQRNTLNIDKLKIETAQELKNAEIALRTQKTPPGLQHEYAAPADYFRILVQQFEVQLQQYRQQIEELENHLATQANNSHITPQDLSMAMQKIYQTFVALAAQLQSIHENVKVLKEQYLGYRKMFLGDAVDVFETRRAEAKKWQNTPRVTTGPTPFSTMPNAAAVAMAATLTQQQQPATGDKWCNVAELKNRTQLSLFVNKLELSCYCVIDLLYNEQ

SEQ ID NO: 77223 - protein, 94 aa, Homo sapiens
MKLLWQVTVHHHTWNAILLPFVYLTAQVWILCAAIAAAASAGPQNCPSVCSCSNQFSKVVCTRRGLSEVPQGIPSNTRYLNLMENNIQMIQADT

SEQ ID NO: 77224 - protein, 475 aa, Homo sapiens
MGPLSAPPCTQRITWKGLLLTALLLNFWNLPTTAQVTIEAEPTKVSKGKDVLLLVHNLPQNLAGYIWYKGQMKDLYHYITSYVVDGQIIIYGPAYSGRETVYSNASLLIQNVTREDAGSYTLHIVKRGDGTRGETGHFTFTLYLETPKPSISSSNLYPREDMEAVSLTCDPETPDASYLWWMNGQSLPMTHSLQLSKNKRTLFLFGVTKYTAGPYECEIRNPVSASRSDPVTLNLLPKLPKPYITINNLNPRENKDVLAFTCEPKSENYTYIWWLNGQSLPVSPRVKRPIENRILILPSVTRNETGPYQCEIQDRYGGIRSYPVTLNVLYGPDLPRIYPSFTYYHSGENLYLSCFADSNPPAEYSWTINGKFQLSGQKLFIPQITTKHSGLYACSVRNSATGMESSKSMTVKVSDSCFHSSSKYLPSATVQNCFLFKEIYEKTLTRTLEYKFLITSRSYHWTKNFQNFNEQADTS

SEQ ID NO: 77225 - protein, 192 aa, Homo sapiens
  MOD_RES (1)..(1): Any amino acid
XEENGRRARADRAHRPWPPNAPSATRPCTSHDGKPFCHKPCYATLFGPKGVNIGGAGSYIYEKPLAEGPQVTGPIEVPAARAEERKASGPPKGPSRASSVTTFTGEPNTCPRCSKKVYFAEKVTSLGKDWHRPCLRCERCGKTLTPGGHAEHDGQPYCHKPCYGILFGPKGVNTGAVGSYIYDRDPEGKVQP

SEQ ID NO: 77226 - protein, 253 aa, Homo sapiens
MEEPEEPADSGQSLVPVYIYSPEYVSMCDSLAKIPKRASMVHSLIEAYALHKQMRIVKPKVASMEEMATFHTDAYLQHLQKVSQEGDDDHPDSIEYGLGYDCPATEGIFDYAAAIGGATITAAQCLIDGMCKVAINWSGGWHHAKKDEASGFCYLNDAVLGILRLRRKFERILYVDLDLHHGDGVEDAFSFTSKVMTVSLHKFSPGFFPGTGDVSDVGLGKGRYYSVNVPIQDGIQDEKYYQICERALFIRTP

SEQ ID NO: 77227 - protein, 222 aa, Homo sapiens
MAVVSEDDFQHSSNSTYRTTSSSLRADQEALLEKLLDRPPPGLQRPEDRFCGTYIIFFSLGIGSLLPWNFFITAKEYWMFKLRNSSSPATGEDPEGSDILNYFESYLAVASTVPSMLCLVANFLLVNRVAVHIRVLASLTVILAIFMVITALVKVDTSSWTRGFFAVTIVCMVILSGASTVFSSSIYGMTGSFPMRNSQALISEDLLCPGDAKMNKHQSPRS

SEQ ID NO: 77228 - protein, 162 aa, Homo sapiens
MAPQNLSTFCLLLLYLIGAVIAGRDFYKILGVPRSASIKDIKKAYRKLALQLHPDRNPDDPQAQEKFQDLGAAYEVLSDSEKRKQYDTYGEEGLKDGHQSSHGDIFSHFFGDFGFMFGGTPRQQDRNIPRGSDIIVDLEVTLEEVYAGNFVEFFQDTGGDSR

SEQ ID NO: 77229 - protein, 86 aa, Homo sapiens
MSMDVTFLGTGAAYPSPTRGASAVVLRCEGECWLFDCGEGTQTQLMKSQLKAGYPEYMSNNFPCNVSCCFSLFPKDQNCFRNWRHI

SEQ ID NO: 77230 - protein, 918 aa, Homo sapiens
MAVQPKETLQLESAAEVGFVRFFQGMPEKPTTTVRLFDRGDFYTAHGEDALLAAREVFKTQGVIKYMGPAGAKNLQSVVLSKMNFESFVKDLLLVRQYRVEVYKNRAGNKASKENDWYLAYKASPGNLSQFEDILFGNNDMSASIGVVGVKMSAVDGQRQVGVGYVDSIQRKLGLCEFPDNDQFSNLEALLIQIGPKECVLPGGETAGDMGKLRQIIQRGGILITERKKADFSTKDIYQDLNRLLKGKKGEQMNSAVLPEMENQVAVSSLSAVIKFLELLSDDSNFGQFELTTFDFSQYMKLDIAAVRALNLFQGSVEDTTGSQSLAALLNKCKTPQGQRLVNQWIKQPLMDKNRIEERLNLVEAFVEDAELRQTLQEDLLRRFPDLNRLAKKFQRQAANLQDCYRLYQGINQLPNVIQALEKHEGKHQKLLLAVFVTPLTDLRSDFSKFQEMIETTLDMDQVENHEFLVKPSFDPNLSELREIMNDLEKKMQSTLISAARDLGLDPGKQIKLDSSAQFGYYFRVTCKEEKVLRNNKNFSTVDIQKNGVKFTNSKLTSLNEEYTKNKTEYEEAQDAIVKEIVNISSGYVEPMQTLNDVLAQLDAVVSFAHVSNGAPVPYVRPAILEKGQGRIILKASRHACVEVQDEIAFIPNDVYFEKDKQMFHIITGPNMGGKSTYIRQTGVIVLMAQIGCFVPCESAEVSIVDCILARVGAGDSQLKGVSTFMAEMLETASILRSATKDSLIIIDELGRGTSTYDGFGLAWAISEYIATKIGAFCMFATHFHELTALANQIPTVNNLHVTALTTEETLTMLYQVKKGVCDQSFGIHVAELANFPKHVIECAKQKALELEEFQYIGESQGYDIMEPAAKKCYLERENLRVTEPKDQCLILLTWKRKLRGGKRSACSRPERQNQGSG

SEQ ID NO: 77231 - protein, 156 aa, Homo sapiens
MEQPKGVDWTVIILTCQYKDSVQVFQRELEVRQKREQIPAGTLLLAVEDPEKRVGSGGATLNALLVAAEHLSARAGFTVVTSDVLHSAWILILHMGRDFPFDDCGRAFTCLPVENPEAPVEALVCNLDCLLDIMTYRLGPGSPPGVWVCSTDMLLS

SEQ ID NO: 77232 - protein, 377 aa, Homo sapiens
  MOD_RES (1)..(1): Any amino acid
XDLEELCPVCGDKVSGYHYGLLTCESCKGFFKRTVQNNKRYTCIENQNCQIDKTQRKRCPYCRFQKCLSVGMKLEAVRADRMRGGRNKFGPMYKRDRALKQQKKALIRANGLKLEAMSQVIQAMPSDLTISSAIQNIHSASKGLPLNHAALPPTDYDRSPFVTSPISMTMPPHGSLQGYQTYGHFPSRAIKSEYPDPYTSSPESIMGYSYMDSYQTSSPASIPHLILELLKCEPDEPQVQAKIMAYLQQEQANRSKHEKLSTFGLMCKMADQTLFSIVEWARSSIFFRELKGLTLSPSLECSGTILAHGNLHLLHSSDSPASASRVAGITGVHHNTHLIFVFLVEMGFCHVGQAGLKTPDLRVICLPRPPKVLGLWA

SEQ ID NO: 77233 - protein, 507 aa, Homo sapiens
MAEYDLTTRIAHFLDRHLVFPLLEFLSVKEIYNEKELLQGKLDLLSDTNMVDFAMDVYKNLYSDDIPHALREKRTTVVAQLKQLQAETEPIVKMFEDPETTRQMQSTRDGRMLFDYLADKHGFRQEYLDTLYRYAKFQYECGNYSGAAEYLYFFRVLVPATDRNALSSLWGKLASEILMQNWDAAMEDLTRLKETIDNNSVSSPLQSLQQRTWLIHWSLFVFFNHPKGRDNIIDLFLYQPQYLNAIQTMCPHILRYLTTAVITNKDVRKRRQVLKDLVKVIQQESYTYKDPITEFVECLYVNFDFDGAQKKLRECESVLVNDFFLVACLEDFIENARLFIFETFCRIHQCISINMLADKLNMTPEEAERWIVNLIRNARLDAKIDSKLGHVVMGNNAVSPYQQVIEKTKSLSFRSQMLAMNIEKKLNQNSRSELNYPKNTLLQHRNAMEQEMVTQDTPGDSRKQGRSESSEGLMGEENVLIFASEFFSIGLLATFYFSSYTTSSHLW

SEQ ID NO: 77234 - protein, 102 aa, Homo sapiens
MFDKASLKLGLDKAVLQSMSGRDGNITGIQQFSKKEIEDLLRKGAYAAIMEEDDEGSKFCEEDIDQILLRRTTTITIESEGKGSTFAKVYLSLCLVDAKEKK

SEQ ID NO: 77235 - protein, 274 aa, Homo sapiens
MRRLTVDDFEIGRPLGKGKFGNVYLARLKESHFIVALKVLFKSQIEKEGLEHQLRREIEIQAHLQHPNILRLYNYFHDARRVYLILEYAPRGELYKELQKSEKLDEQRTATIIEELADALTYCHDKKVIHRDIKPENLLLGFRGEVKIADFGWSVHPLPERKTMCGTLDYLPPEMIEGRTYDEKVDLWCIGVLCYELLVGYPPFESASHSETYRRILKVDVRFPLSMPLGARDLISRLLRYQPLERLPLAQILKHPWVQAHSRRVLPPCAQMAS

SEQ ID NO: 77236 - protein, 228 aa, Homo sapiens
MQEVCSGEDTHGGHFPSRPGHTGAEQQCVQGRLTLWLPQQHRRWPQLPHRALLRPDPHLRGSQAQQAAPTQLPVPPVLQQRTLHQGLPPGTPQRRGPDSIPGQKALLRRVQVSQVQEKMDERELLGQHGAGVHQVPHQRVSTQAETPGEARRPGRVRPEQGAPAAPLREVQGPGLLLPSRAVTGCPPAPRATPRQPEETLLPCATPRGCVSPCAWGALAGLRGWAGGS

SEQ ID NO: 77237 - protein, 919 aa, Homo sapiens
EFLQEGLEKGDEELRPALPFQPDPPAPFTPSPLPRLANQDSRPVFTSPTPAMAAVPTQPQSKEGPWSPESESPMLRITAPLPPGPSMAVPTLGPGEIASTTPPSRAWTPTQEGPGDMGRPWVAEVVSQGAGIGIQGTITSSTASGDDEETTTTTTIITTTITTVQTPGPCSWNFSGPEGSLDSPTDLSSPTDVGLDCFFYISVYPGYGVEIKVQNISLREGETVTVEGLGGPDPLPLANQSFLLRGQVIRSPTHQAALRFQSLPPPAGPGTFHFHYQAYLLSCHFPRRPAYGDVTVTSLHPGGSARFHCATGYQLKGARHLTCLNATQPFWDSKEPVCIAACGGVIRNATTGRIVSPGFPGNYSNNLTCHWLLEAPEGQRLHLHFEKVSLAEDDDRLIIRNGDNVEAPPVYDSYEVEYLPIEGLLSSGKHFFVELSTDSSGAAAGMALRYEAFQQGHCYEPFVKYGNFSSSTPTYPVGTTVEFSCDPGYTLEQGSIIIECVDPHDPQWNETEPACRAVCSGEITDSAGVVLSPNWPEPYGRGQDCIWGVHVEEDKRIMLDIRVLRIGPGDVLTFYDGDDLTARVLGQYSGPRSHFKLFTSMADVTIQFQSDPGTSVLGYQQGFVIHFFEVPRNDTCPELPEIPNGWKSPSQPELVHGTVVTYQCYPGYQVVGSSVLMCQWDLTWSEDLPSCQRVTSCHDPGDVEHSRRLISSPKFPVGATVQYICDQGFVLMGSSILTCHDRQAGSPKWSDRAPKCLLEQLKPCHGLSAPENGARSPEKQLHPAGATIHFSCAPGYVLKGQASIKCVPGHPSHWSDPPPICRAASLDGFYNSRSLDVAKAPAASSTLDAAHIAAAIFLPLVAMVLLVGGVYFYFSRLQGKSSLQLPRPRPRPYNRITIESAFDNPTYETGETREYEVSI

SEQ ID NO: 77238 - protein, 76 aa, Homo sapiens
LFLQHPETPKSIPELSISLPHLDSASSWRIRSSASYLLLAIVLISWGCIIYASMVSARRQLRKKYPDKIFGTNENL

SEQ ID NO: 77239 - protein, 136 aa, Homo sapiens
MSPHPTALLGLVLCLAQTIHTQEEDLPRPSISAEPGTVIPLGSHVTFVCRGPVGVQTFRLERESRSTYNDTEDVSQASPSESEARFRIDSVSEGNAGPYRCIYYKPPKWSEQSDYLELLVKGPTQRPSDNSHNERE

SEQ ID NO: 77240 - protein, 78 aa, Homo sapiens
MTAQGGLVANRGRRFKWAIELSGPGGGSRGRSDRGSGQGDSLYPVGYLDKQVPDTSVQETDRILVEKRMEFSGGGLLL

SEQ ID NO: 77241 - protein, 242 aa, Homo sapiens
MNYKRVSNTPLRTVDGSPMMKAAMYSVEITVEKDKVTGETRVLSSTTLLPRQPLPLGIKVYEDETKVVHAVDGTAENGIHPLSSSEVDELIHKADEVTLSEAGSTAGAAETRGAVEGAARTTPSRREITGVQAQPGEATSGPPGIQPGQEPPVTMIFMGYQNVEDEAETKKVLGLQDTITAELVVIEDAAEPKEPAPPNGSAAEPPTEAASREENQAGPEATTSDPQDLDMKKHRCKCCSIM

SEQ ID NO: 77242 - protein, 287 aa, Homo sapiens
MGTLRDLQYALQEKIEELRQRDALIDELELELDQKDELIQKLQNELDKYRSVIRPATQQAQKQSASTLQGEPRTKRQAISAEPTAFDIQDLSHVTLPFYPKSPQSKDLIKEAILDNDFMKNLELSQIQEIVDCMYPVEYGKDSCIIKEGDVGSLVYVMEDGKVEVTKEGVKLCTMGPGKVFGELAILYNCTRTATVKTLVNVKLWAIDRQCFQTIMMRTGLIKHTEYMEFLKSVPTFQSLPEEILSKLADVLEECLALSPRLECNGVISAYCNLHLPGSSHSPDSAS

SEQ ID NO: 77243 - protein, 84 aa, Homo sapiens
PELQVCVFCRNNKEAMALYTTHILKGPDGRVLCPVLRRYTCPLCGASGDNAHTIKYCPLSKVPPPPARPPPRSARDGPPGKKLR

SEQ ID NO: 77244 - protein, 435 aa, Homo sapiens
MSDHGDVSLPPEDRVRALSQLGSAVEVNEDIPPRRYFRSGVEIIRMASIYSEEGNIEHAFILYNKYITLFIEKLPKHRDYKSAVIPEKKDTVKKLKEIAFPKAEELKAELLKRYTKEYTEYNEEKKKEAEELARNMAIQQELEKEKQRVAQQKQQQLEQEQFHAFEEMIRNQELEKERLKIVQEFGKVDPGLGGPLVPDLEKPSLDVFPTLTVSSIQPSDCHTTVRPAKPPVVDRSLKPGALSNSESMVADYSPFSFTVPTIDGLRHVVVPGRLCPQFLQLASANTARGVETCGILCGKLMRNEFTITHVLIPKQSAGSDYCNTENEEELFLIQDQQGLITLGWIHTHPTQTAFLSSVDLHTHCSYQMMLPESVAIVCSPKFQETGFFKLTDHGLEEISSCRQKGFHPHSKDPPLFCSCSHVTVVDRAVTITDLR

SEQ ID NO: 77245 - protein, 149 aa, Homo sapiens
MFRTAVMMAASLALTGAVVAHAYYLKHQFYPTVVYLTKSSPSMAVLYIQAFVLVFLLGKVMGKVFFGQLRAAEMEHLLERSWYAVTETCLAFTVFRDDFSPRFVALFTLLLFLKCFHWLAEDRVDFMERSPNISWLFHCRIVSTPITAS

SEQ ID NO: 77246 - protein, 187 aa, Homo sapiens
MPVWGGGNKCGACGRTVYHAEEVQCDGRSFHRCCFLCMVCRKNLDSTTVAIHDEEIYCKSCYGKKYGPKGYGYGQGAGTLNMDRGERLGIKPESVQPHRPTTNPNTSKFAQKYGGAEKCSRCGDSVYAAEKIIGAGKPWHKNCFRCAKCGKSLESTTLTEKEGEIYCKGKIHFSYCCPYEYSTLVLV

SEQ ID NO: 77247 - protein, 144 aa, Homo sapiens
MLSDHSIRSFDDLQRLLHGDPGEEDGAELDLNMTRSHSGGELESLARGRRSLGSLTIAEPAMIAECKTRTEVFEISRRLIDRTNANFLVWPPCVEVQRCSGCCNNRNVQCRPTQVQLRPVQVRKIEIVRKKPIFKKATVTLEDH

SEQ ID NO: 77248 - protein, 144 aa, Homo sapiens
KLESIDGARYHALLIPSCPGALTDLASSGSLARILQHFHSESKPICAVGHGVAALCCATNEDRSWVFDSYSLTGPSVCELVRAPGFARLPLVVEDFVKDSGACFSGLGAAPGWGRGGKQEDRPPEEQRRAGEDFPIYQCVFIYP

SEQ ID NO: 77249 - protein, 115 aa, Homo sapiens
MANWVFCNRCFQPPHRTSCFSLTNCGHVYCDACLGKGKKNECLICKAPCRTVLLSKHRPFPVSDSESPTARLYSCVRRAPWIPHRGTRVRLRRRTLWTRLLCTRVDFLHSLRPLP

SEQ ID NO: 77250 - protein, 340 aa, Homo sapiens
ASPTSPKVFPLSLDSTPQDGNVVVACLVQGFFPQEPLSVTWSESGQNVTARNFPPSQDASGDLYTTSSQLTLPATQCPDGKSVTCHVKHYTNPSQDVTVPCPVPPPPPCCHPRLSLHRPALEDLLLGSEANLTCTLTGLRDASGATFTWTPSSGKSAVQGPPERDLCGCYSVSSVLPGCAQPWNHGETFTCTAAHPELKTPLTANITKSGNTFRPEVHLLPPPSEELALNELVTLTCLARGFSPKDVLVRWLQGSQELPREKYLTWASRQEPSQGTTTFAVTSILRVAAEDWKKGDTFSCMVGHEALPLAFTQKTIDRLAGKPTHVNVSVVMAEVDGTCY

SEQ ID NO: 77251 - protein, 253 aa, Homo sapiens
MEPRTGDAADPRGSRGGRGPSPLAGPSARQLLARLDARPLAARAAVDVAALVRRAGATLRLRRKEAVSVLDSADIEVTDSRLPHATIVDHRPQVGDLVLHINGESTQGLTHAQAVERIRAGGPQLHLVIRRPLETHPGKPRGVGEPRKGVDRSPDPGGPEVTGSRSSSTSLVQHPPSRTTLKKTRGSPEPSPEAAADGPTVSPPERRAEDPNDQIPGSPGPWLVPSEERLSRALGVRGAAQLAQEMAAGRRRH

SEQ ID NO: 77252 - protein, 37 aa, Homo sapiens
MSLVAEAFVSQIAGWSAVAQPGLTATSASRVQAILLP

SEQ ID NO: 77253 - protein, 1805 aa, Homo sapiens
MAKPTSKDSGLKEKFKILLGLGTPRPNPRSAEGKQTEFIITAEILRELSMECGLNNRIRMIGQICEVAKTKKFEEHAVEALWKAVADLLQPERPLEARHAVLALLKAIVQGQGERLGVLRALFFKVIKDYPSNEDLHERLEVFKALTDNGRHITYLEEELADFVLQWMDVGLSSEFLLVLVNLVKFNSCYLDEYIARMVQMICLLCVRTASSVDIEVSLQVLDAVVCYNCLPAESLPLFIVTLCRTINVKELCEPCWKLMRNLLGTHLGHSAIYNMCHLMEDRAYMEDAPLLRGAVFFVGMALWGAHRLYSLRNSPTSVLPSFYQAMACPNEVVSYEIVLSITRLIKKYRKELQVVAWDILLNIIERLLQQLQTLDSPELRTIVHDLLTTVEELCDQNEFHGSQERYFELVERCADQRPESSLLNLISYRAQSIHPAKDGWIQNLQALMERFFRSESRGAVRIKVLDVLSFVLLINRQFYEEELINSVVISQLSHIPEDKDHQVRKLATQLLVDLAEGCHTHHFNSLLDIIEKVMARSLSPPPELEERDVAAYSASLEDVKTAVLGLLVILQTKLYTLPASHATRVYEMLVSHIQLHYKHSYTLPIASSIRLQAFDFLLLLRADSLHRLGLPNKDGVVRFSPYCVCDYMEPERGSEKKTSGPLSPPTGPPGPAPAGPAVRLGSVPYSLLFRVLLQCLKQESDWKVLKLVLGRLPESLRYKVLIFTSPCSVDQLCSALCSMLSGPKTLERLRGAPEGFSRTDLHLAVVPVLTALISYHNYLDKTKQREMVYCLEQGLIHRCASQCVVALSICSVEMPDIIIKALPVLVVKLTHISATASMAVPLLEFLSTLARLPHLYRNFAAEQYASVFAISLPYTNPSKFNQYIVCLAHHVIAMWFIRCRLPFRKDFVPFITKGLRSNVLLSFDDTPEKDSFRARSTSLNERPKSLRIARPPKQGLNNSPPVKEFKESSAAEAFRCRSISVSEHVVRSRIQTSLTSASLGSADENSVAQADDSLKNLHLELTETCLDMMARYVFSNFTAVPKRSPVGEFLLAGGRTKTWLVGNKLVTVTTSVGTGTRSLLGLDSGELQSGPESSSSPGVHVRQTKEAPAKLESQAGQQVSRGARDRVRSMSGGHGLRVGALDVPASQFLGSATSPGPRTAPAAKPEKASAGTRVPVQEKTNLAAYVPLLTQGWAEILVRRPTGNTSWLMSLENPLSPFSSDINNMPLQELSNALMAAERFKEHRDTALYKSLSVPAASTAKPPPLPRSNTVASFSSLYQSSCQGQLHRSVSWADSAVVMEEGSPGEVPVLVEPPGLEDVEAALGMDRRTDAYSRSSSVSSQEEKSLHAEELVGRGIPIERVVSSEGGRPSVDLSFQPSQPLSKSSSSPELQTLQDILGDPGDKADVGRLSPEVKARSQSGTLDGESAAWSASGEDSRGQPEGPLPSSSPRSPSGLRPRGYTISDSAPSRRGKRVERDALKSRATASNAEKVPGINPSFVFLQLYHSPFFGDESNKPILLPNESFERSVQLLDQIPSYDTHKIAVLYVGEGQSNSELAILSNEHGSYRYTEFLTGLGRLIELKDCQPDKVYLGGLDVCGEDGQFTYCWHDDIMQAVFHIATLMPTKDVDKHRCDKKRHLGNDFVSIVYNDSGEDFKLGTIKGQFNFVHVIVTPLDYECNLVSLQCRKDMEGLVDTSVAKIVSDRNLPFVARQMALHANMASQVHHSRSNPTDIYPSKWIARLRHIKRLRQRICEEAAYSNPSLPLVHPPSHSKAPAQTPAEPTPGYEVGQRKRLISSVEDFTEFV

SEQ ID NO: 77254 - protein, 397 aa, Homo sapiens
MASTEGANNMPKQVEVRMHDSHLGSEEPKHRHLGLRLCDKLGKNLLLTLTVFGVILGAVCGGLLRLASPIHPDVVMLIAFPGDILMRMLKMLILPLIISSLITGLSGLDAKASGRLGTRAMVYYMSTTIIAAVLGVILVLAIHPGNPKLKKQLGPGKKNDEVSSLDAFLDLIRNLFPENLVQACFQQIQTVTKKVLVAPPPDEEANATSAVVSLLNETVTEVPEETKMVIKKGLEFKDGMNVLGLIGFFIAFGIAMGKMGDQAKLMVDFFNILNEIVMKLVIMIMWYSPLGIACLICGKIIAIKDLEVVARQLGMYMVTVIIGLIIHGGIFLPLIYFVVTRKNPFSFFAGIFQAWITALGTASSAGTLPVTFRCLEENLGIDKRVTRFVLPVGATIN

SEQ ID NO: 77255 - protein, 267 aa, Homo sapiens
MVRGAGPGPSLSALSHPTGASGMAAAEGPGYLVSPQAEKHRRARNWTDAEMRGLMLVWEEFFDELKQTKRNAKVYEKMASKLFEMTGERRLGEEIKIKITNMTFQYRKLKCMTDSESAPPDWPYYLAIDGILAKVPESCDGKLPDSQPPGPSTSQTEASLSPPAKSTPLYFPYNQCSYEGRFEDDRSDSSSSLLSLKFRSEERPVKKRKVQSCHLQKKQLRLLEAMVEEQRRLSRAVEETCREISRCYSTVCRRGCPVAMEWLWTLS

SEQ ID NO: 77256 - protein, 326 aa, Homo sapiens
MAEHPPLLDTTQILSSDISLLSAPIVSADGTQQVILVQVNPGEAFTIRREDGQFQCITGPAQVPMMSPNGSVPPIYVPPGYAPQVIEDNGVRRVVVVPQAPEFHPGSHTVLHRSPHPPLPGFIPVPTMMPPPPRHMYSPVTGAGDMTTQYMPQYQSSQVYGDVDAHSTHGRSNFRDERSSKTYERLQKKLKDRQGTQKDKMSSPPSSPQKCPSPINEHNGLIKGQIAGGINTGSAKIKSGKGKGGTQVDTEIEEKDEETKAFEALLSNIVKPVASDIQARTVVLTWSPPSSLINGETDESSVPELYGYEVLISSTGKDGKYKSVYV

SEQ ID NO: 77257 - protein, 53 aa, Homo sapiens
  MOD_RES (1)..(1): Any amino acid
XFMLAGVILGGAYLYKYFALQSFSLVAQTGVQWRDLGSLHPLSPGQMTCTTVE

SEQ ID NO: 77258 - protein, 250 aa, Homo sapiens
GNKGAKGDRGLPGPRGPQGALGEPGKQGSRGDPGDAGPRGDSGQPGPKGDPGRPGFSYPGPRGAPGEKGEPGPRGPEGGRGDFGLKGEPGRKGEKGEPADPGPPGEPGPRGPRGVPGPEGEPGPPGDPGLTECDVMTYVRETCGCCGSEVSPVPPDDPATPPDCEKRCGALDVVFVIDSSESIGYTNFTLEKNFVINVVNRLGAIAKDPKSETGTRVGVVQYSHEGTFEAIQLDDERIDSLSSFKEAVKN

SEQ ID NO: 77259 - protein, 11 aa, Homo sapiens
VAKTKQQIEEQ

SEQ ID NO: 77260 - protein, 68 aa, Homo sapiens
MRDFPLAAGGTHPENAGAARGKDPLPQQRKTKRKKAYRQRALRDAPSKQWASATAPSSCFCCNPRGTR

SEQ ID NO: 77261 - protein, 42 aa, Homo sapiens
DEERDPLLHSFGHLKEVLNSITGCPRGTEVAVQLAVESLLPD

SEQ ID NO: 77262 - protein, 220 aa, Homo sapiens
MNWRRKSVIGLSFDFVALNLTGFVAYSVFNIGLLWVPYIKEQFLLKYPNGVNPVNSNDVFFSLHAVVLTLIIIVQCCLYERGGQRVSWPAIGFLVLAWLFAFVTMIVAAVGVTTWLQFLFCFSYIKLAVTLVKYFPQAYMNFYYKSTEGWSIGNVLLDFTGGSFSLLQMFLQSYNNDQWTLIFGDPTKFGLGVFSIVFDVVFFIQHFCLYRKRPGYDQLN

SEQ ID NO: 77263 - protein, 336 aa, Homo sapiens
MAFLMHLLVCVFGMGSWVTINGLWVELPLLVMELPEGWYLPSYLTVVIQLANIGPLLVTLLHHFRPSCLSEVPIIFTLLGVGTVTCIIFAFLWNMTSWVLDGHHSIAFLVLTFFLALVDCTSSVTFLPFMSRLPTYYLTTFFVGEGLSGLLPALVALAQGSGLTTCVNVTEISDSVPSPVPTRETDIAQVSAVPGGPLRAWDLLWGLQHGHGGDEPLPPLAGPLGWGSPHCGLVGAFQRLPQLRQGDAGRGPARPQPQRPLVVRGGGAAGLAARSAAHVPSGQRAAALLVRGLLQSALSSLGRPPTPPPSLTDGTGVQRGQVTEQGAGTERQSLSN

SEQ ID NO: 77264 - protein, 65 aa, Homo sapiens
  MOD_RES (1)..(1): Any amino acid
XAILSTLLIGLLLVTLIILRKKHLQMARECGAGTFVNFASLERDGKLPYNWSKNGLKKRKLTKVF

SEQ ID NO: 77265 - protein, 448 aa, Homo sapiens
MSRINKNVVLALLTLTSSAFLLFQLYYYKHYLSTKNGAGLSKSKGSRIGFDSTQWRAVKKFIMLTSNQNVPVFLIDPLILELINKNFEQVKNTSHGSTSQCKFFCVPRDFTAFALQYHLWKNEEGWFRIAENMGFQCLKIESKDPRLDGIDSLSGTEIPLHYICKLATHAIHLVVFHERSGNYLWHGHLRLKEHIDRKFVPFRKLQFGRYPGAFDRPELQQVTVDGLEVLIPKDPMHFVEEVPHSRFIECRYKEARAFFQQYLDDNTVEAVAFRKSAKELLQLAAKTLNKLGVPFWLSSGTCLGWYRQCNIIPYSKDVDLGIFIQDYKSDIILAFQDAGLPLKHKFGKVEDSLELSFQGKDDVKLDVFFFYEETDHMWNGGTQAKTGKKFKYLFPKFTLCWTEFVDMKVHVPCETLEYIEANYDDLEDDSLIVGEWKSLLWSPNWATV

SEQ ID NO: 77266 - protein, 253 aa, Homo sapiens
MDPKQTTLLCLGDFPMPFISAKSSPVIPLDGSVKIQCQAIREAYLTQLMIIKNSTYREIGRRLKFWNETDPEFVIDHMDANKAGRYQCQYRIGHYRFRYSNTLELVVTGLYGKPFLSADRGLVLMPGENISLTCSSAHIPFDRFSLAKEGELSLPQHQSGEHPANFSLGPVDLNVSGIYRCYDSIHQDYTTQNLIRMAVAGLVLVALLAILVENWHSHTALNKEASADVAEPSWSQQMCQPGLTFARTPSVCK

SEQ ID NO: 77267 - protein, 396 aa, Homo sapiens
  MOD_RES (1)..(1): Any amino acid
XSAVHKMIVDRQYMGVSKRKCIVWGVAFLSDGTIISVDSAGKVQFWDSATGTLVKSHLIANADVQSIAVADQEDSFVVGTAEGTVFHFQLVPVTSNSSEKQWVRTKPFQHHTHDVRTVAHSPTALISGGTDTHLVFRPLMEKVEVKNYDAALRKITFPHRCLISCSKKRQLLLFQFAHHLELWRLGSTVATGTVEAMCLLAVSPDGNWLAASGTSAGVHVYNVKQLKLHCTVPAYNFPVTAMAIAPNTNNLVIAHSDQQVFEYSIPDKQYTDWSRTVQKQGFHHLWLQRDTPITHISFHPKRPMHILLHDAYMFCIIDKSLPLPNDKTLLYNPFPPTNESDVIRRRTAHAFKISKIYKPLLFMDLLDERTLVAVERPLDDIIAQLPPPIKKKKFGT

SEQ ID NO: 77268 - protein, 59 aa, Homo sapiens
  MOD_RES (1)..(1): Any amino acid
XSEEEVEEPEERQQTPEVVPDDSGTFYDQAVVRLECSGAILADCNLRFLDSSNPPASAS

SEQ ID NO: 77269 - protein, 102 aa, Homo sapiens
  MOD_RES (1)..(1): Any amino acid
XERTASDGKAVGMASDIPGLHLPGGGRLPPEHGKSGCSDLEEAVDSGAANHWHRAVQSETKEGDSVSARERPPHHPNGQHRGCSVAPREPSAGQEDDWRVCE

SEQ ID NO: 77270 - protein, 26 aa, Homo sapiens
  MOD_RES (1)..(1): Any amino acid
XTTDEDEEGKLPEDIMKCTSASYLRL

SEQ ID NO: 77271 - protein, 48 aa, Homo sapiens
  MOD_RES (1)..(1): Any amino acid
XRKKAAATGLPEGPAVPVPSRGNLAQPGGSSWRRIALLILAITIHNVP

SEQ ID NO: 77272 - protein, 250 aa, Homo sapiens
  MOD_RES (1)..(1): Any amino acid
XLLKLTRDFPQRHEKYQSWAGTFHLCLKKNKYPDSRSTFIKHAGSYLKRGEFLSIHTAITCFFLQISARFLWQGKYKCHFFNGTERVQFLERLFYNQEEFVRFDSDVGEYRAVTELGRPVAESWNSQKDILEDRRGQVDTVCRHNYGVGESFTVQRRVHPEVTVYPAKTQPLQHHNLLVCSVSGFYPGSIEVRWFRNGQEEKAGVVSTGLIQNGDWTFQTLVMLETVPRSGEVYTCQVEHPSVMSPLTVE

SEQ ID NO: 77273 - protein, 87 aa, Homo sapiens
MSRINKNVVLALLTLTSSAFLLFQLYYYKHYLSTKNGAGLSKSKGSRIGFDSTQWNQLDTFPRSVNDCIDNNLEDVFRSVQLKNLLC

SEQ ID NO: 77274 - protein, 17 aa, Homo sapiens
  MOD_RES (1)..(1): Any amino acid
XDAFDIWGQGTMVTVSS

SEQ ID NO: 77275 - protein, 658 aa, Homo sapiens
MVAERTHKAAATGARGPGELGAPGTVALVAARAERGARLPSPGSCGLLTLALCSLALSLLAHFRTAELQARVLRLEAERGEQQMETAILGRVNQLLDEKWKLHSRRRREAPKTSPGCNCPPGPPGPTGRPGLPGVKGQPGEKGQPGTRGFPGFPGPIGLDGKPGHPGPKGDMGLTGPPGQPGPQGQKGEKGQCGEYPHRLLPLLNSVRLAPPPVIKRRTFQGEQSQASIQGPPGPPGPPGPSGPLGHPGLPGPMGPPGLPGPPGPKGDPGIQGYHGRKGERGMPGMPGKHGAKGAPGIAVAGMKGEPGIPGTKGDPGAEGKPGPPGLLGKRGQRGEKGAEGSPGLPGLLGQKGEKGDAGNSIGGGRGEPGPPGLPGPPGPKGEAGVDGQVGPPGQPGDKGERGAAGEQGPDGPKGSKGEPGKGEMVDYNGNINEALQEIRTLALMGPPGLPGQIGPPGAPGIPGQKGEIGLPGPPGHDGEKGPRGKPGDMGPPGPQGPPGKDGPPGVKGENGHPGSPGEKGEKGETGQAGSPGLQGVPGPKGEAGLDGAKGEKGFQGEKGDRGPLGLPGTPGPIGVPGPAGPKGERGSKGDPGMTGPTGAAGLPGLHGPPGDKGNRGERGKKGSRGPKGDKGDQGAPGLDAPCPLGEDGLPVQGCWNK

SEQ ID NO: 77276 - protein, 194 aa, Homo sapiens
  MOD_RES (1)..(1): Any amino acid
XASWKRLTEEFLNAPLPSIKEIKTDAHYSILSLLLCLSDSPSNSSYVETPRNKEVEKKDDFDWGKYLMEDEEMDIGPYMDTPNWSEESEEENDQQPLSREDSGIQVDRTPLEEQDQNRKLDPCISWKADEPDDRSWLEHHVVHQYWTARPSHFPHSLHLHSNLAAVWDQHLYSSDPLYVPDDRVLVTETQVIRE

SEQ ID NO: 77277 - protein, 103 aa, Homo sapiens
MVNAGAMSGSGNLMDFLDEPFPDVGTYEDFHTIDWLREKSRDTDRHRKITSKSKESIWEFIKSLLDAWSGWVVMLLIGLLAGTVTQRQGPGSTLCTAVFPRHG

SEQ ID NO: 77278 - protein, 226 aa, Homo sapiens
  MOD_RES (1)..(1): Any amino acid
XLALAFHDGSVHIVHRLSLQTMAVFYSSAAPRPVDEPAMKRPRTAGPAVHLKAMQLSWTSLALVGIDSHGKLSVLRLSPSMGHPLEVGLALRHLLFLLEYCMVTGYDWWDILLHVQPSMVQSLVEKLHEEYTRQTAALQQVLSTRILAMKASLCKLSPCTVTRVCDYHTKLFLIAISSTLKSLLRPHFLNTPDKSPGDRLTEICTKITDVDIDKVMINLKTEEFVL

SEQ ID NO: 77279 - protein, 288 aa, Homo sapiens
MSVGFIGAGQLAFALAKGFTAAGVLAAHKIMASSPDMDLATVSALRKMGVKLTPHNKETVQHSDVLFLAVKPHIIPFILDEIGADIEDRHIVVSCAAGVTISSIEKKLSAFRPAPRVIRCMTNTPVVVREGATVYATGTHAQVEDGRLMEQLLSSVGFCTEVEEDLIDAVTGLSGSGPAYGAAKMLLHSEQHPGQLKDNVSSPGGATIHALHVLESGGFRSLLINAVEASCIRTRELQSMADQEQVSPAAIKKTILDKVKLDSPAGTALSPSGHTKLLPRSLAPAGKD

SEQ ID NO: 77280 - protein, 89 aa, Homo sapiens
MKRLDVNAAGIWEPKKGDVLCSRHFKKTDFDRSAPNIKLKPGVIPSIFDSPYHLQISMFKRKCLFKAKNYFSVTIIANIYKVPIFIQST

SEQ ID NO: 77281 - protein, 376 aa, Homo sapiens
MTITRDEYPSNPMVLRGINQKAAFPQYQPVVMLEKGYTIHWNGPAPRTTFLYLVNFNKNDWIRVGLCYPSNTSFQVTFGYLQRQNGSLSKIEEYEPVHSLEELQRKQSERKFYFDSSTGLLFLYLKAKSHRHGHSYCSSQGCERVKIQAATDSKDISNCMAKAYPQYYRKPSVVKRMPAMLTGLCQGCGTRQVVFTSDPHKSYLPVQFQSPDKAETQRGDPSVISVNGTDFTFRSAGVLLLVVDPCSVPFRLTEKTVFPLADVSRIEEYLKTGIPPRSIVLLSTRGEIKQLNISHLLVPLGLAKPAHLYDKGSTIFLGFSGNFKPSWTKLFTSPAGQGLGVLEQFIPLQLDEYGCPRATTVRRRDLELLKQASKAH

SEQ ID NO: 77282 - protein, 486 aa, Homo sapiens
MKNWGVIGGIAAALAAGIYVIWGPITERKKRRKGLVPGLVNLGNTCFMNSLLQGLSACPAFIRWLEEFTSQYSRDQKEPPSHQYLSLTLLHLLKALSCQEVTDDEVLDASCLLDVLRMYRWQISSFEEQDAHELFHVITSSLEDERDRQPRVTHLFDVHSLEQQSEITPKQITCRTRGSPHPTSNHWKSQHPFHGRLTSNMVCKHCEHQSPVRFDTFDSLSLSIPAATWGHPLTLDHCLHHFISSESVRDVVCDNCTKIEAKGTLNGEKVEHQRTTFVKQLKLGKLPQCLCIHLQRLSWSSHGTPLKRHEHVQFNEFLMMDIYKYHLLGHKPSQHNPKLNKNPGPTLELQDGPGAPTPVLNQPGAPKTQIFMNGACSPSLLPTLSAPMPFPLPVVPDYSSSTYLFRLMAVVVHHGDMHSGHFVTYRRSPPSARNPLSTSNQWLWVSDDTVRKASLQEVLSSSAYLLFYERVLSRMQHQSQECKSEE

SEQ ID NO: 77283 - protein, 121 aa, Homo sapiens
MDKLNKITVPASQKLRQLQKMVHDIKNNEGGIMNKIKKLKVKAPPSVPRRDYASESPADEEEQWSDDFDSDYENPDEHSDSEMYVMPAEENADDSYEPPPVEQETRPVHPALPFARGEYIG

SEQ ID NO: 77284 - protein, 651 aa, Homo sapiens
MTPILTVLICLGLSLGPRTHVQAGHLPKPTLWAEPGSVITQGSPVTLRCQGGQETQEYRLYREKKTAPWITRIPQELVKKGQFPIPSITWEHAGRYRCYYGSDTAGRSESSDPLELVVTGAYIKPTLSAQPSPVVNSGGNVTLQCDSQVAFDGFILCKEGEDEHPQCLNSQPHARGSSRAIFSVGPVSPSRRWWYRCYAYDSNSPYEWSLPSDLLELLVLGVSKKPSLSVQPGPIVAPEETLTLQCGSDAGYNRFVLYKDGERDFLQLAGAQPQAGLSQANFTLGPVSRSYGGQYRCYGAHNLSSEWSAPSDPLDILIAGQFYDRVSLSVQPGPTVASGENVTLLCQSQGWMQTFLLTKEGAADDPWRLRSTYQSQKYQAEFPMGPVTSAHAGTYRCYGSQSSKPYLLTHPSDPLELVVSGPSGGPSSPTTGPTSTSGPEDQPLTPTGSDPQSGLGRHLGVVIGILVAVILLLLLLLLLFLILRHRRQGKHWTSTQRKADFQHPAGAVGPEPTDRGLQWRSSPAADAQEENLYAAVKHTQPEDGVEMDTRQSPHDEDPQAVTYAEVKHSRPRREMASPPSPLSGEFLDTKDRQAEEDRQMDTEAAASEAPQDVTYAQLHSLTLRRKATEPPPSQEGPSPAVPSIYATLAIH

SEQ ID NO: 77285 - protein, 73 aa, Homo sapiens
MAALRALCGFRGVAAQVLRPGAGVRLPIQPSRCGPSKGHNCEEHYPELWAPTPSSAWCPATSDGIEWGDGAEV

SEQ ID NO: 77286 - protein, 286 aa, Homo sapiens
MRQAGRYLPEFRETRAAQDFFSTCRSPEACCELTLQPLRRFPLDAAIIFSDILVVPQALGMEVTMVPGKGPSFPEPLREEQDLERLRDPEVVASELGYVFQAITLTRQRLAGRVPLIGFAGAPWTLMTYMVEGGGSSTMAQAKRWLYQRPQASHQLLRILTDALVPYLVGQVVAGAQIIFAKDGHFALEELAQAGYEVVGLDWTVAPKKARECVGKTVTLQGNLDPCALYASEEEIGQLVKQMLDDFGPHRYIANLGHGLYPDMDPEHVGAFVDAVHKHSRLLRQN

SEQ ID NO: 77287 - protein, 586 aa, Homo sapiens
MEMQDLTSPHSRLSGSSESPSGPKLGNSHINSNSMTPNGTEVKTEPMSSSETASTTADGSLNNFSGSAIGSSSFSPRPTHQFSPPQIYPSKPYPHILPTPSSQTMAAYGQTQFTTGMQQATAYATYPQPGQPYGISSYGIKTEGGLSQSQSPGQTGFLSYGTSFSTPQPGQAPYSYQMQGSSFTTSSGIYTGNNSLTNSSGFNSSQQDYPSYPSFGQGQYAQYYNSSPYPAHYMTSSNTSPTTPSTNATYQLQEPPSGITSQAVTDPTAEYSTIHSPSTPIKDSDSDRLRRGSDGKSRGRGRRNNNPSPPPDSDLERVFIWDLDETIIVFHSLLTGSYANRYGRDPPTSVSLGLRMEEMIFNLADTHLFFNDLEECDQVHIDDVSSDDNGQDLSTYNFGTDGFPAAATSANLCLATGVRGGVDWMRKLAFRYRRVKEIYNTYKNNVGGLLGPAKREAWLQLRAEIEALTDSWLTLALKALSLIHSRTNCVNILVTTTQLIPALAKVLLYGLGIVFPIENIYSATKIGKESCFERIIQRFGRKVVYVVIGDGVEEEQGAKKHAMPFWRISSHSDLMALHHALELEYL

SEQ ID NO: 77288 - protein, 197 aa, Homo sapiens
  MOD_RES (1)..(1): Any amino acid
XFQAGLYVTESPQPQEAEAVSLGRLSDKSSTSETSLGEERAPDEGGAPVDKSSLRSGDSSQDLKQSEGSEEEEEEEDSCVVLEEEEGEQEEVTGASELTLSDTVLSMETVVAGGSGGDGEEEEEALPEQSEGKEQKILLGPTRQQFTVSSGESPPLSAGNIYQKRPVLGDIVSGPVLSCLLHIARLYGEPVLTYQYL

SEQ ID NO: 77289 - protein, 89 aa, Homo sapiens
MKKTQEISKGKRKEDSLTASQRKQSSGGQKSESKMSAGPHLPLKAPRENPCFPLPAAGGSRYYLAYGSITPISAFVFVVFFSVFFPSFY

SEQ ID NO: 77290 - protein, 44 aa, Homo sapiens
MSPHPTALLGLVLCLAQTIHTQEVDAEILLCFPPRRSAQTLHLG

SEQ ID NO: 77291 - protein, 237 aa, Homo sapiens
MGNVPSAVKHCLSYQQLLREHLWIGDSVAGALDPAQETSQLSGLPEFVKIVEVGPRDGLQNEKVIVPTDIKIEFINRLSQTGLSVIEVTSFVSSRWVPQVSKRLYGMGCYEISLGDTIGVGTPGSMKRMLESVMKEIPPGALAVHCHDTYGQALANILTALQMGINVVDSAVSGLGGCPYAKGASGNVATEDLIYMLNGLGLNTGVNLYKVMEAGDFICKAVNKTTNSKVAQASFNA

SEQ ID NO: 77292 - protein, 142 aa, Homo sapiens
MSRSKRDNNFYSVEIGDSTFTVLKRYQNLKPIGSGAQGIVCAAYDAILERNVAIKKLSRPFQNQTHAKRAYRELVLMKCVNHKNIIGLLNVFTPQKSLEEFQDVYIVMELMDANLCQVIQMELDHERMSYLLYQMLCGIKHL

SEQ ID NO: 77293 - protein, 811 aa, Homo sapiens
MPKPPKPRNNLEDRHNPGIQGRREHRPGPGRVRAASSPGGSAPRAERRLWGEGWESGAAPHPHSSRVSALRPCGVVGAWVGMGVCQRTRAPWKEKSQLERAALGFRKGGSGMFASGWNQTVPIEEAGSMAALLLLPLLLLLPLLLLKLHLWPQLRWLPADLAFAVRALCCKRALRARALAAAAADPEGPEGGCSLAWRLAELAQQRAAHTFLIHGSRRFSYSEAERESNRAARAFLRALGWDWGPDGGDSGEGSAGEGERAAPGAGDAAAGSGAEFAGGDGAARGGGAAAPLSPGATVALLLPAGPEFLWLWFGLAKAGLRTAFVPTALRRGPLLHCLRSCGARALVLAPEFLESLEPDLPALRAMGLHLWAAGPGTHPAGISDLLAEVSAEVDGPVPGYLSSPQSITDTCLYIFTSGTTGLPKAARISHLKILQCQGFYQLCGVHQEDVIYLALPLYHMSGSLLGIVGCMGIGATVVLKSKFSAGQFWEDCQQHRVTVFQYIGELCRYLVNQPPSKAERGHKVRLAVGSGLRPDTWERFVRRFGPLQVLETYGLTEGNVATINYTGQRGAVGRASWLYKHIFPFSLIRYDVTTGEPIRDPQGHCMATSPGEPGLLVAPVSQQSPFLGYAGGPELAQGKLLKDVFRPGDVFFNTGDLLVCDDQGFLRFHDRTGDTFRWKGENVATTEVAEVFEALDFLQEVNVYGVTVPGHEGRAGMAALVLRPPHALDLMQLYTHVSENLPPYARPRFLRLQESLATTETFKQQKVRMANEGFDPSTLSDPLYVLDQAVGAYLPLTTARYSALLAGNLRI

SEQ ID NO: 77294 - protein, 216 aa, Homo sapiens
MPTAAAPIISSVQKLVLYETRARYFLVGSNNAETKYRVLKIDRTEPKDLVIIDDRHVYTQQEVRELLGRLDLGNRTKMGQKGSSGLFRAVSAFGVVGFVRFLEGYYIVLITKRRKMADIGGHAIYKVEDTNMIYIPNDSVRVTHPDEARYLRIFQNVDLSSNFYFSYSYDLSHSLQYNLTVLRMPLEMLKSEMTQNRQESFDIFEDEGLITQGGSG

SEQ ID NO: 77295 - protein, 476 aa, Homo sapiens
MSDAQLGPLRLTLLSVSARTGFCKKQQELWQRRKEAAEALGTRKVSVLLATSHSGARPAVSTMDSSAAPTNASNCTDALAYSSCSPAPSPGSWVNLSHLDGNLSDPCGPNRTDLGGRDSLCPPTGSPSMITAITIMALYSIVCVVGLFGNFLVMYVIVRYTKMKTATNIYIFNLALADALATSTLPFQSVNYLMGTWPFGTILCKIVISIDYYNMFTSIFTLCTMSVDRYIAVCHPVKALDFRTPRNAKIINVCNWILSSAIGLPVMFMATTKYRQGSIDCTLTFSHPTWYWENLLKICVFIFAFIMPVLIITVCYGLMILRLKSVRMLSGSKEKDRNLRRITRMVLVVVAVFIVCWTPIHIYVIIKALVTIPETTFQTVSWHFCIALGYTNSCLNPVLYAFLDENFKRCFREFCIPTSSNIEQQNSTRIRQNTRDHPSTANTVDRTNHQNYYIIHRCCCNTPLISQKPVLLWFCD

SEQ ID NO: 77296 - protein, 80 aa, Homo sapiens
MYFPSWLSQLYRGLSRPIRRTTQPIWGSLYRSLLQSSQRRIPEFSSFVVRTNTCGELRSSHLGQEVTLCGWIQYRSRQPL

SEQ ID NO: 77297 - protein, 57 aa, Homo sapiens
MGASGSKARGLWPFASAAGGGGSEAAGAEQALVRPRGRAVPPFVFTRRGLGFCYFSL

SEQ ID NO: 77298 - protein, 513 aa, Homo sapiens
MQRTFAWLLDRVQHLGAPVTLRASYLEIYNEQVRDLLSLGSPRPLPVRWNKTRGFYVEQLRVVEFGSLEALMELLQTGLSRRRNSAHTLNQASSRSHALLTLYISRQTAQQMPSVDPGEPPVGGKLCFVDLAGSEKVAATGSRGELMLEANSINRSLLALGHCISLLLDPQRKQSHIPFRDSKLTKLLADSLGGRGVTLMVACVSPSAQCLPETLSTLRYASRAQRVTTRPQAPKSPVAKQPQRLETEMLQLQEENRRLQFQLDQMDCKASGLSGARVAWAQRNLYGMLQEFMLENERLRKEKSQLQNSRDLAQNEQRILAQQVHALERRLLSACYHHQQGPGLTPPCPCLMAPAPPCHALPPLYSCPCCHICPLCRVPLAHWACLPGEHHLPQVLDPEASGGRPPSARPPPWAPPCSPGSAKCPRERSHSDWTQTRVLAEMLTEEEVVPSAPPLPVRPPKTSPGLRGGAGVPNLAQRLEALRDQIGSSLRRGRSQPPCSEGARSPGQVLPPH

SEQ ID NO: 77299 - protein, 297 aa, Homo sapiens
MEDYTKIEKIGEGTYGVVYKGRHKTTGQVVAMKKIRLESEEEGVPSTAIREISLLKELRHPNIVSLQDVLMQDSRLYLIFEFLSMDLKKYLDSIPPGQYMDSSLVKSYLYQILQGIVFCHSRRVLHRDLKPQNLLIDDKGTIKLADFGLARAFGIPIRVYTHEAITLWYRSPEVLLGSARYSTPVDIWSIGTIFAELATKKPLFHGDSEIDQLFRIFRALGTPNNEVWPEVESLQDYKNTFPKWKPGSLASHVKNLDENGLDLLSKMLIYDPAKRISGKMALNHPYFNDLDNQIKKM

SEQ ID NO: 77300 - protein, 165 aa, Homo sapiens
MAEDKTKPSELDQGKYDADDNVKIICLGDSAVGKSKLMERFLMDGFQPQQLSTYALTLYKHTATVDGKTILVADINVTQKSFNFAKKFSLPLYFVSAADGTNVVKLFNDAIRLAVSYKQNSQDFMDEIFQELENFSLEQEEEDVPDQEQSSSIETPSEEVASPHS

SEQ ID NO: 77301 - protein, 222 aa, Homo sapiens
MLLSLKPSEAPELDEDEGFGDWSQRPEQRQQHEGAQGALDSGEPPQCRSPEGEQEDRPGLHAYEKEDSDEVHLEELSLSKEGPGPEDTVQDNLGAAGAEEEQEEHQKCQQPRTPSPLVLEGTIEQSSPPLSPTTKLIDRTESLNRSIEKSNSVKKSQPDLPISKIDQWLEQYTQAIETAGRTPKLARQASIELPSMAVASTKSRWETGEVQAQSAAKTPSCK

SEQ ID NO: 77302 - protein, 343 aa, Homo sapiens
MSVLRRMMRVSNRSLLAFIFFFSLSSSCLYFIYVAPGIDYPEGNNSSDYLVQTTTYLPENFTYSPYLPCPEKLPYMRGFLNVNVSEVSFDEIHQLFSKDLDIEPGGHWRPKDCKPRWKVAVLIPFRNRHEHLPIFFLHLIPMLQKQRLEFAFYVIEQTGTQPFNRAMLFNVGFKEAMKDSVWDCVIFHDVDHLPENDRNYYGCGEMPRHFAAKLDKYMYILPYKEFFGGVSGLTVEQFRKINGFPNAFWGWGGEDDDLWNRVHYAGYNVTRPEGDLGKYKSIPHHHRGEVQFLGRYKLLRYSKERQYIDGLNNLIYRPKILVDRLYTNISVNLMPELAPIEDY

SEQ ID NO: 77303 - protein, 174 aa, Homo sapiens
  MOD_RES (1)..(1): Any amino acid
XLKMETPGMTTPSLKTDGGRRTATSPPPTTSQTIISTIPSTAMHTRSTAAPIPILPERGEAIQEFPSSPMGQAPGTWSSSGGPWTSPPHSSSRRLASPLAPLSVIPSTSQTMARSSSQSQTTRFSPTPTHSQQASQAGTLWPWWLRSGTMLTSPLVGGPHFIRNTRRSMVNTAC

SEQ ID NO: 77304 - protein, 42 aa, Homo sapiens
MSQWYELQQLDSKFLEQVHQLYDDSFPMEIRQYLAQWLEKQD

SEQ ID NO: 77305 - protein, 82 aa, Homo sapiens
MASILRSPQALQLTLALIKPDAVAHPLILEAVHQQILSNKFLIVRMRELLWRKEDCQRFYREHEGKEVEVQKVALGTRMKVS

SEQ ID NO: 77306 - protein, 34 aa, Homo sapiens
MMWQKVMECSRAKFPTRTCQGILELDNRRKSLPE

SEQ ID NO: 77307 - protein, 81 aa, Homo sapiens
MQNDAGEFVDLYVPRKCSASNRIIGAKDHASIQMNVAEVDKVTGRFNGQFKTYAICGAIRRMGESDDSILRLAKADGIVSK

SEQ ID NO: 77308 - protein, 712 aa, Homo sapiens
MGSGARFPSGTLRVRWLLLLGLVGPVLGAARPGFQQTSHLSSYEIITPWRLTRERREAPRPYSKQVSYVIQAEGKEHIIHLERNKDLLPEDFVVYTYNKEGTLITDHPNIQNHCHYRGYVEGVHNSSIALSDCFGLRGLLHLENASYGIEPLQNSSHFEHIIYRMDDVYKEPLKCGVSNKDIEKETAKDEEEEPPSMTQLLRRRRAVLPQTRYVELFIVVDKERYDMMGRNQTAVREEMILLANYLDSMYIMLNIRIVLVGLEIWTNGNLINIVGGAGDVLGNFVQWREKFLITRRRHDSAQLVLKKGFGGTAGMAFVGTVCSRSHAGGINVFGQITVETFASIVAHELGHNLGMNHDDGRDCSCGAKSCIMNSGASGSRNFSSCSAEDFEKLTLNKGGNCLLNIPKPDEAYSAPSCGNKLVDAGEECDCGTPKECELDPCCEGSTCKLKSFAECAYGDCCKDCRFLPGGTLCRGKTSECDVPEYCNGSSQFCQPDVFIQNGYPCQNNKAYCYNGMCQYYDAQCQVIFGSKAKAAPKDCFIEVNSKGDRFGNCGFSGNEYKKCATGNALCGKLQCENVQEIPVFGIVPAIIQTPSRGTKCWGVDFQLGSDVPDPGMVNEGTKCGAGKICRNFQCVDASVLNYDCDVQKKCHGHGVCNSNKNCHCENGWAPPNCETKGYGGSVDSGPTYNGQMAKIKQTLLDSRGVFLDMFLQ

SEQ ID NO: 77309 - protein, 1816 aa, Homo sapiens
MALSSAWRSVLPLWLLWSAACSRAASGDDNAFPFDIEGSSAVGRQDPPETSEPRVALGRLPPAAEKCNAGFFHTLSGECVPCDCNGNSNECLDGSGYCVHCQRNTTGEHCEKCLDGYIGDSIRGAPQFCQPCPCPLPHLANFAESCYRKNGAVRCICNENYAGPNCERCAPGYYGNPLLIGSTCKKCDCSGNSDPNLIFEDCDEVTGQCRNCLRNTTGFKCERCAPGYYGDARIAKNCAVCNCGGGPCDSVTGECLEEGFEPPTGCDKCVWDLTDDLRLAALSIEEGKSGVLSVSSGAAAHRHVNEINATIYLLKTKLSERENQYALRKIQINNAENTMKSLLSDVEELVEKENQASRKGQLVQKESMDTINHASQLVEQAHDMRDKIQEINNKMLYYGEEHELSPKEISEKLVLAQKMLEEIRSRQPFFTQRELVDEEADEAYELLSQAESWQRLHNETRTLFPVVLEQLDDYNAKLSDLQEALDQALNYVRDAEDMNRATAARQRDHEKQQERVREQMEVVNMSLSTSADSLTTPRLTLSELDDIIKNASGIYAEIDGAKSELQVKLSNLSNLSHDLVQEAIDHAQDLQQEANELSRKLHSSDMNGLVQKALDASNVYENIVNYVSEANETAEFALNTTDRIYDAVSGIDTQIIYHKDESENLLNQARELQAKAESSSDEAVADTSRRVGGALARKSALKTRLSDAVKQLQAAERGDAQQRLGQSRLITEEANRTTMEVQQATAPMANNLTNWSQNLQHFDSSAYNTAVNSARDAVRNLTEVVPQLLDQLRTVEQKRPASNVSASIQRIRELIAQTRSVASKIQVSMMFDGQSAVEVHSRTSMDDLKAFTSLSLYMKPPVKRPELTETADQFILYLGSKNAKKEYMGLAIKNDNLVYVYNLGTKDVEIPLDSKPVSSWPAYFSIVKIERVGKHGKVFLTVPSLSSTAEEKFIKKGEFSGDDSLLDLDPEDTVFYVGGVPSNFKLPTSLNLPGFVGCLELATLNNDVISLYNFKHIYNMDPSTSVPCARDKLAFTQSRAASYFFDGSGYAVVRDITRRGKFGQVTRFDIEVRTPADNGLILLMVNGSMFFRLEMRNGYLHVFYDFGFSGGPVHLEDTLKKAQINDAKYHEISIIYHNDKKMILVVDRRHVKSMDNEKMKIPFTDIYIGGAPPEILQSRALRAHLPLDINFRGCMKGFQFQKKDFNLLEQTETLGVGYGCPEDSLISRRAYFNGQSFIASIQKISFFDGFEGGFNFRTLQPNGLLFYYASGSDVFSISLDNGTVIMDVKGIKVQSVDKQYNDGLSHFVISSVSPTRYELIVDKSRVGSKNPTKGKIEQTQASEKKFYFGGSPISAQYANFTGCISNAYFTRVDRDVEVEDFQRYTEKVHTSLYECPIESSPLFLLHKKGKNLSKPKASQNKKGGKSKDAPSWDPVALKLPERNTPRNSHCHLSNSPRAIEHAYQYGGTANSRQEFEHLKGDFGAKSQFSIRLRTRSSHGMIFYVSDQEENDFMTLFLAHGRLVYMFNVGHKKLKIRSQEKYNDGLWHDVIFIRERSSGRLVIDGLRVLEESLPPTEATWKIKGPIYLGGVAPGKAVKNVQINSIYSFSGCLSNLQLNGASITSASQTFSVTPCFEGPMETGTYFSTEGGYVVLDESFNIGLKFEIAFEVRPRSSSGTLVHGHSVNGEYLNVHMKNGQVIVKVNNGIRDFSTSVTPKQSLCDGRWHRITVIRDSNVVQLDVDSEVNHVVGPLNPKPIDHREPVFVGGVPESLLTPRLAPSKPFTGCIRHFVIDGHPVSFSKAALVSGAVSINSCPAA

SEQ ID NO: 77310 - protein, 225 aa, Homo sapiens
MTSEFFAAQLRAQISDDTTHPISYYKPEFYTPVDGGTAHLSVVAEDGSAVSATSTINLYFGSKVRSPVSEILFNDEMDDFSSPNITNEFGVPPSPANFIQPGKQPLSSMCPTIMVGQDGQVRMVVGAAGGTQITTATALAIIYNLWFGYDVKRAVEEPRLHNQLLPNVTTVERNIDQAVTAALETRHHHTQIASTFIAVVQAIVRTAGGWAAASDSRKGGEPAGY

SEQ ID NO: 77311 - protein, 324 aa, Homo sapiens
MRCALALSALLLLLSTPPLLPSSPSPSPSPSQNATQTTTDSSNKTAPTPASSVTIMATDTAQQSTVPTSKANEILASVKATTLGVSSDSPGTTTLAQQVSGPVNTTVARGGGSGNPTTTIESPKSTKSADTTTVATSTATAKPNTTSSQNGAEDTTNSGGKSSHSVTTDLTSTKAEHLTTPHPTSPLSPRQPTSTHPVATPTSSGHDHLMKISSSSSTVAIPGYTFTSPGMTTTLPSSVISQRTQQTSSQMPASSTAPSSQETVQPTSPATALRTPTLPETMSSSPTAASTTHRYPKTPSPTVAHESNWVTPAGVGQVGEPRLG

SEQ ID NO: 77312 - protein, 221 aa, Homo sapiens
MAGSQDIFDAIVMADERFHGEGYREGYEEGSSLGVMEGRQHGTLHGAKIGSEIGCYQGFAFAWKCLLHSCTTEKDSRKMKVLESLIGMIQKFPYDDPTYDKLHEDLDKIRGKFKQTGLSPSAVMVRPPSYVELPVTCWCWEAPRCNQKCTDPAARRPDPQTCASQDRLRCAPCTCHQPLASRYTQHPGLVPLPHHDRQSVPQGPRVVQTDAAARMVEQQTM

SEQ ID NO: 77313 - protein, 180 aa, Homo sapiens
SRPEEERVGPRRTPGLSHEEIWAVVSSSSRPLPVHCPALTSRTWQASLFHHEQASREDKTFRGARCMEPSPERPACSQQEPTLGMDAMASEHRDVLVLLPSREQLRLAVGVKATGRELFQQVCNVASIRDAQFFGLCVVRNNEYIFMDLEQKLSKYFSKDWKKERNELLRPEGLSAGGLW

SEQ ID NO: 77314 - protein, 350 aa, Homo sapiens
MKEDGGAEFSARSRKRKANVTVFLQDPDEEMAKIDRTARDQCGSQPWDNNAVCADPCSLIPTPDKEDDDRVYPNSTCKPRIIAPSRGSPLPVLSWANREEVWKIMLNKEKTYLRDQHFLEQHPLLQPKMRAILLDWLMEVCEVYKLHRETFYLAQDFFDRYMATQENVVKTLLQLIGISSLFIAAKLEEIYPPKLHQFAYVTDGACSGDEILTMELMIMKLLDLCVLDVDCLEFPYGILAASALYHFSSSELMQKVSGYQWCDIENCVKWMVPFAMVIRETGSSKLKHFRGVADEDAHNIQTHRDSLDLLDKARAKKAMLSEQNRASPLPSGLLTPPQSGKKQSSGPEMA

SEQ ID NO: 77315 - protein, 53 aa, Homo sapiens
MAGRRLNLRWALSVLCVLLMAETVSGTRGSSTGAHISPQFPASVPQGVWPECL

SEQ ID NO: 77316 - protein, 779 aa, Homo sapiens
MGEVTAEEVEKFLDSNIGFAKQYYNLHYRAKLISDLLGAKEAAVDFSNYHSPSSMEESEIIFDLLRDFQENLQTEKCIFNVMKKLCFLLQADRMSLFMYRTRNGIAELATRLFNVHKDAVLEDCLVMPDQEIVFPLDMGIVGHVAHSKKIANVPNTEEILLWSGSKVFEELTDIERQFHKALYTVRAFLNCDRYSVGLLDMTKQKEFFDVWPVLMGEVPPYSGPRTPDGREINFYKVIDYILHGKEDIKVIPNPPPDHWALVSGLPAYVAQNGLICNIMNAPAEDFFAFQKEPLDESGWMIKNVLSMPIVNKKEEIVGVATFYNRKDGKPFDEMDETLMESLTQFLGWSVLNPDTYESMNKLENRKDIFQDIVKYHVKCDNEEIQKILKTREVYGKEPWECEEEELAEILQAELPDADKYEINKFHFSDLPLTELELVKCGIQMYYELKVVDKFHIPQEALVRFMYSLSKGYRKITYHNWRHGFNVGQTMFSLLVTGKLKRYFTDLEALAMVTAAFCHDIDHRGTNNLYQMKSQNPLAKLHGSSILERHHLEFGKTLLRDESLNIFQNLNRRQHEHAIHMMDIAIIATDLALYFKKRTMFQKIVDQSKTYESEQEWTQYMMLEQTRKEIVMAMMMTACDLSAITKPWEVQSQVALLVAAEFWEQGDLERTVLQQNPIPMMDRNKADELPKLQVGFIDFVCTFVYKEFSRFHEEITPMLDGITNNRKEWKALADEYDAKMKVQEEKKQKQQSAKSAAAGNQPGGNPSPGGATTSKSCCIQ

SEQ ID NO: 77317 - protein, 56 aa, Homo sapiens
MERAGATSRGGQAPGFLLRLHTEGRAEAARVQEQDLRQWGLTDSLGVFLLWMKLTG

SEQ ID NO: 77318 - protein, 241 aa, Homo sapiens
MAGIFKEFFFSTEDLPEVILTLSLISSIGAFLNRHLEDFPIPVPVILFLLGCSFEVLSFTSSQVQRYANAIQWMSPDLFFRIFTPVVFFTTAFDMDTYMLQKLFWQILLISIPGFLVNYILVLWHLASVNQLLLKPTQWLLFSAILVSSDPMLTAAAIRDLGLSRSLISLINGESLMTSVISLITFTSIMDFDQRLQSKRNHTLGELVGMSGIFTLAIVGLLLNSTSFKAAIEETLLLESS

SEQ ID NO: 77319 - protein, 549 aa, Homo sapiens
MAAQLLTDEALESVTFRDVTVDFTQEEWQQLEPAQKDLYRDVMLENYRNLVSLDWETRPEMKELDPKNDISEDKLSVVGEATGGPTRNGARGPGSEGVWEPGSWPERPRGDAGAEWEPLGIPQGNKLLGGSVPACHELKAFANQGCVLVPPRLDDPTEKGACPPVRRGKNFSSTSDLSKPPMPCEEKKTYDCSECGKAFSRSSSLIKHQRIHTGEKPFECDTCGKHFIERSSLTIHQRVHTGEKPYACGDCGKAFSQRMNLTVHQRTHTGEKPYVCDVCGKAFRKTSSLTQHERIHTGEKPYACGDCGKAFSQNMHLIVHQRTHTGEKPYVCPECGRAFSQNMHLTEHQRTHTGEKPYACKECGKAFNKSSSLTLHQRNHTGEKPYVCGECGKAFSQSSYLIQHQRFHIGVKPFECSECGKAFSKNSSLTQHQRIHTGEKPYECYICKKHFTGRSSLIVHQIVHTGEKPYVCGECGKAFSQSAYLIEHQRIHTGEKPYRCGQCGKSFIKNSSLTVHQRIHTGEKPYRCGECGKTFSRNTNLTRHLRIHT

SEQ ID NO: 77320 - protein, 201 aa, Homo sapiens
MKHVNERFQDEKNKEVVLMCIGVTSGVGRLLFGRIADYVPGVKKVYLQVLSFFFIGLMSMMIPLCSIFGALIAVCLIMGLFDGCFISIMAPIAFELVGAQDVSQAIGFLLGFMSIPMTVGPPIAGLLRDKLGSYDVAFYLAGVPPLIGGAVLCFIPWIHSKKQREISKTTGKEKMEKMLENQNSLLSSSSGMFKKESDSII

SEQ ID NO: 77321 - protein, 145 aa, Homo sapiens
MAAAMPLALLVLLLLGPGGWCLAEPPRDSLREELVITPLPSGDVAATFQFRTRWDSELQREGVWINLGRSSVMSSQGSSAPLSTSSTPPTQSLPLPPSNPWVWPMTLTTTFCAMLCCRGRWSAPKTSPPGRSSCPVVPRQASLCC

SEQ ID NO: 77322 - protein, 170 aa, Homo sapiens
MNVRMFSLMVGIFSVLNTTQFFIFDLNQKTHICYEAKFSIYVDSKSELVTWTLFHRANISTGLSLTTIIIGCFLFYCIHKNIYMGLLIYAMWIITYELINFSIVLLLNGIIKDHFKTLSYLHWIFQISHMLLHFFCLPFIVKHAYNLYKESQTVGRKRRHRLCSTIAVNS

SEQ ID NO: 77323 - protein, 64 aa, Homo sapiens
MAQGLVTFADVAIDFSQEEWACLNSAQRDLYWDVMLENYSNLVSLDLESAYENKSLPTEKNIHE

SEQ ID NO: 77324 - protein, 166 aa, Homo sapiens
MATNFLAHEKIWFDKFKYDDAERRFYEQMNGPVAGASRQENGASVILRDIARARENIQKSLAGSSGPGASSGTSGDHGELVVRIASLEVENQSLRGVVQELQQAISKLEARLNVLEKSSPGHRATAPQTQHVSPMRQVEPPAKKPATPAEDDEDDDIDLFGSDNEE

SEQ ID NO: 77325 - protein, 202 aa, Homo sapiens
MSDEDDLEDSEPDQDDSEKEEDEKETEEGEDYRKEGEEFPEEWLPTPLTEDMMKEGLSLLCKTGNGLAHAYVKLEVKERDLTDIYLLRSYIHLRYVDISENHLTDLSPLNYLTHLLWLKADGNRLRSAQMNELPYLQIASFAYNQITDTEGISHPRLETLNLKGDQRRWPSDLIRLPGAATTCMTENRGCLFLPQSWKFITT

SEQ ID NO: 77326 - protein, 158 aa, Homo sapiens
MKSLLKIFAWATLRMERGAKEKNHQLYKPYTNGIIAKDPTSLEEEIKEIRRSGSSKALDNTPEFELSDIFYFCRKGMETIMDDEVTKRFSAEELESWNLLSRTNYNFQYISLRLTVLWGLGVLIRYCFLLPLRIALAFTGISLLVVGTTVVGYLPNGR

SEQ ID NO: 77327 - protein, 110 aa, Homo sapiens
MVKKFKDSKSVLLITCKTCNRTVKHHGKSRSFVSTLKSNPATPTSKLSLKTPERRTANPNHDMSGSKGKSPASVFRTPTSGQSVSTCSSKNTSKTKKHFSQLKMLLSQNE

SEQ ID NO: 77328 - protein, 391 aa, Homo sapiens
VPDSPARTPQPPEMNPLSAVNMFQKQNSKPSVPVSIPKSKEKQGRPPGALVPASSLKGGNLGSMSVRSKLPNSPAASSHPKLKSSKGITKKPQAPSNNASSSLASLNPVGKNTSSPALPRTAPCISESPRKCISSPNTPKAKVIPAQNSADLPESTLLPNKCSGKTQPKYLKHNHISSRDNAVSHLAAHSNSSSKCPKLPKANIPVRPKPSFQSSAKMTKTSSKTIATGLGTQSQPSDGAPQAKPVPAQKLKSALNLNQPVSVSSVSPVKATQKSKDKNIVSATKKQPQNKSAFQKTGPSSLKSPGRTPLSIVSLPQSSTKTQTAPKSAQTVAKSQHSTKGPPRSGKTPASIRKPPSSVKDADSGDKKPTAKKKEDDDHYFVMTGSKKPRK

SEQ ID NO: 77329 - protein, 158 aa, Homo sapiens
GGQQHAVPCPHGGPGGQGQPRAEAAGTGQGHRGGHRPGAVVGAAQHLHRGLGVAGGGPGPGPAVLQTRKARRLKQAKEEAQMEVEQYRREREHEFQSKQQAAMGSQGNLSAEVEQATRRQVQGMQSSQQRNRERVLAQLLGMVCDVRPQVHPNYRISA

SEQ ID NO: 77330 - protein, 184 aa, Homo sapiens
VHQGVRGFVLDATDGRGILNATISVAEINHPVTTYKTGDYWRLLVPGTYKITASARGYNPVTKNVTVKSEGAIQVNFTLVRSSTDSNNESKKGKGASSSTNDASDPTTKEFETLIKDLSAENGLESLMLRSSSNLALALYRYHSYKDLSEFLRGLVMNYPHITNLTNLGPKNLLLSSQIVFYIH

SEQ ID NO: 77331 - protein, 220 aa, Homo sapiens
  MOD_RES (1)..(1): Any amino acid
XSMPTHSSPRSRDYNPYNYSDSISPFNKSALKEAMFDDDADQFPDDLSLDHSDLVAELLKELSNHNERVEERKIALYELMKLTQEESFSVWDEHFKTILLLLLETLGDKEPTIRALALKVLREILRHQPARFKNYAELTVMKTLEAHKDPHKEGYDNSESSVRKACVFCLVAVHAVIGDELKPHLSQLTGSKMKLLNLYIKRAQTGSGGADPTTDVSGQS

SEQ ID NO: 77332 - protein, 51 aa, Homo sapiens
MKVQTLIVVIIGMLVLLLDFLGLVHLGQLLIFHIYLKAKKMTTFEYLINNR

SEQ ID NO: 77333 - protein, 135 aa, Homo sapiens
MLVYRLQTQEKPNTTVQVPAFLQELVDRDNSKFEEWCIEMAEMRKQSVDKGKAKHEEVKELYQRLPAGAEPYEFVSLEWLQKWLDESTPTKPIDNHACLCSHDKLHPDKISIMKRISEYAADIFYSRYGGGPRLT

SEQ ID NO: 77334 - protein, 738 aa, Homo sapiens
MQFLHKLILNHNPLTTVEDPYLFKLPALKYLDMGTTLVPLTTLKNILMMTVELEKLILPSHMACCLCQFKNSIEAVCKTVKLHCNSACLTNTIHCPEEASVGNPEGAFMKVLQARKNYTSTELIVEPEEPSDSSGINLSGFGSEQLDTNDESDFISTLRYILPYFSAVNLDVKSLLLPLIKLPTTGNSLAKIQTVGQNRQRVKRVLMGPRSIQKRHFKEVGRQSIRREQGAQASVENAAEEKRLGSPAPREVEQPHTQQGPEKLAGNAVYTKPSFTQEHKAAVSVLKPFSKGAPSTSSPAKALPQVRDRWKDLTHAISILESAKARVTNTKTSKPIVHARKKYRFHKTRSHVTHRTPKVKKSPKVRKKSYLSRLMLANRLPFSAAKSLINSPSQGAFSSLGDLSPQENPFLEVSAPSEHFIEKNNTKHTTARNAFEENDFMENTNMPEGTISENTNYNHPPEADSAGTAFNLGPTVKQTETKWEYNNVGTDPSPEPKSFNYPLLSSPGDQFEIQLTQQLQSLIPNNNVRRLIAHVIRTLKMDCSGAHVQVTCAKLISRTGHLMKLLSGQQEVKASKIEWDTDQWKIENYINESTEAQSEQKEKSLELKKEVPGYGYTDKLILALIVTGILTILIILFCLIVICCHRRSLQEDEEGFSRGIFRFLPRRGCSSRRESQDGLSSFGQPLWFKDMYKPLSATRINNHAWKLHKKSSNEDKILNRDPGDSEAPTEEEESEALP

SEQ ID NO: 77335 - protein, 541 aa, Homo sapiens
MSSPDGPSFPSGPLSGGASPSGDEGFFPFVLERRDSFLGGGPGPEEPEDLALQLQQKEKDLLLAAELGKMLLERNEELRRQLETLSAQHLEREEVCAAMGRGLNSARLRRQKRRLRPQVQKPRQQLERLQQENHELRRGLAARGAEWEARAVELEGDVEALRAQLGEQRSEQQDSGRERARALSELSEQNLRLSQQLAQASQTEQELQRELDALRGQCQAQALAGAELRTRLESLQGENQMLQSRRQDLEAQIRGLREEVEKGEGRLQTTHEELLLLRRERREHSLELERARSEAGEALSALRRLQRRVSELEEESRLQDADVSAASLQSELAHSLDDGDQGQGADAPGDTPTTRSPKTRKASSPQPSPPEEILEPPKKRTSLSPAEILEEKEVEVAKLQDEISLQQAELQSLREELQRQKELRAQEDPGEALHSALSDRDEAVNKALELSLQLNRVSLERDSLSRELLRAIRQKVALTQELEAWQDDMQVVIGQQLRSQRQKELSASASSSTPRRAAPRFSLRLGPGPAGGFLSNLFRRT

SEQ ID NO: 77336 - protein, 207 aa, Homo sapiens
MTECFLPPTSSPSEHRRVEHGSGLTRTPSSEEISPTKFPGLYRTGEPSPPHDILHEPPDVVSDDEKDHGKKKGKFKKKEKRTEGYAAFQEDSSGDEAESPSKMKRSKGIHVFKKPSFSKKKEKDFKIKEKPKEEKHKEEKHKEEKHKEKKSKDLTAADVVKQWKEKKKKKKPIQEPEVPQIDVPNLKPIFGIPLADAVERTMMYDGI

SEQ ID NO: 77337 - protein, 20 aa, Homo sapiens
MIRRPPAVVCYICGREYGTK

SEQ ID NO: 77338 - protein, 167 aa, Homo sapiens
MESGSTAASEEARSLRECELYVQKHNIQALLKDSIVQLCTARPERPMAFLREYFERLEKEEAKQIQNLQKAGTRTDSREDEISPPPPNPVVKGRRRRGAISAEVYTEEDAASYVRKVIPKDYKTMAALAKAIEKNVLFSHLDDNERSDIFDAMFSVSFIAGETVIQQ

SEQ ID NO: 77339 - protein, 73 aa, Homo sapiens
MAEPEQDIGEKPAVRIQNPKENDFIEIELKRQELSYQNLLNVSCCELGIKPERVEKIRKLPNTLLRKVRVKSF

SEQ ID NO: 77340 - protein, 679 aa, Homo sapiens
MDQGYGGAYGTGVASWQGYENYNYYGAQNTSVTTGATYSYGPASWEAAKANDGGLAAGAPAMHMASYGPEPCTDNSDSLIAKINQRLDMMSKEGGRGGSGGGGEGIQDRESSFRFQPFESYDSRPCLPEHNPYRPSYSYDYEFDLGSDRNGSFGGQYSECRDPARERGSLDGFMRGRGQGRFQDRSNPGTFMRSDPFVPPAASSEPLSTPWNELNYVGGRGLGGPSPSRPPPSLFSQSMAPDYGVMGMQGAGGYDSTMPYGCGRSQPRMRDRDRPKRRGFDRFGPDGTGRKRKQFQLYEEPDTKLARVDSEGDFSENDDAAGDFRSGDEEFKGEDELCDSGRQRGEKEDEDEDVKKRREKQRRRDRTRDRAADRIQFACSVCKFRSFDDEEIQKHLQSKFHKETLRFISTKLPDKTVEFLQEYIVNRNKKIEKRRQELMEKETAKPKPDPFKGIGQEHFFKKIEAAHCLACDMLIPAQPQLLQRHLHSVDHNHNRRLAAEQFKKTSLHVAKSVLNNRHIVKMLEKYLKGEDPFTSETVDPEMEGDDNLGGEDKKETPEEVAADVLAEVITAAVRAVDGEGAPAPESSGEPAEDEGPTDTAEAGSDPQAEQLLEEQVPCGTAHEKGVPKARSEAAEAGNGAETMAAEAESAQTRVAPAPAAADAEVEQTDAESKDAVPTE

SEQ ID NO: 77341 - protein, 81 aa, Homo sapiens
  MOD_RES (1)..(1): Any amino acid
XKAHPQKAGVQKQACMLIRNLVAHGQAFSKPILDLGAEALIMQARSAHRDCEDVAKAALRDLGCHVELRELWTGQRGNLAP

SEQ ID NO: 77342 - protein, 439 aa, Homo sapiens
MEGVLYKWTNYLSGWQPRWFLLCGGILSYYDSPEDAWKGCKGSIQMAVCEIQVHSVDNTRMDLIIPGEQYFYLKARSVAERQRWLVALGSAKACLTDSRTQKEKEFAENTENLKTKMSELRLYCDLLVQQVDKTKEVTTTGVSNSEEGIDVGTLLKSTCNTFLKTLEECMQIANAAFTSELLYRTPPGSPQLAMLKSSKMKHPIIPIHNSLERQMELSTCENGSLNMEINGEEEILMKNKNSLYLKSAEIDCSISSEENTDDNITVQGEIRKEDGMENLKNHDNNLTQSGSDSSCSPECLWEEGKEVIPTFFSTMNTSFSDIELLEDSGIPTEAFLASCYAVVPVLDKLGPTVFAPVKMDLVGNIKKVNQKYITNKEEFTTLQKIVLHEVEADVAQVRNSATEALLWLKRGLKFLKGFLTEVKNGEKDIQTALSVGMWV

SEQ ID NO: 77343 - protein, 65 aa, Homo sapiens
  MOD_RES (1)..(1): Any amino acid
XMKSRIESVLRQMLNNSGNLEINPSTEITSLTDQAAANWLINGHTVPELRQGQVRIISNDVCNAP

SEQ ID NO: 77344 - protein, 44 aa, Homo sapiens
  MOD_RES (1)..(1): Any amino acid
XGAPSAAALATPDTLQGQCSAFVQLWAGLQPILCGNNRRCGGAT

SEQ ID NO: 77345 - protein, 409 aa, Homo sapiens
MSRRRISCKDLGHADCQGWLYKKKEKGSFLSNKWKKFWVILKGSSLYWYSNQMAEKADGFVNLPDFTVERASECKKKHAFKISHPQIKTFYFAAENVQEMNVWLNKLGSAVIHQESTTKDEECYSESEQEDPEIAAETPPPPHASQTQSLTAQQASSSSPSLSGTSYSFSSLENTVKTPSSFPSSLSKERQSLPDTVNSLSAAEDEGQPITFAVQVHSPVPSEAGIHKALENSFVTSESGFLNSLSSDDTSSLSSNHDHLTVPDKPAGSKIMDKEETKVSEDDEMEKLYKSLEQASLSPLGDRRPSTKKELRKSFVKRCKNPSINEKLHKIRTLNSTLKCKEHDLAMINQLLDDPKLTARKYREWKVMNTLLIQDIYQQQRASPAPDDTDDTPQELKKSPSSPSVENSI

SEQ ID NO: 77346 - protein, 227 aa, Homo sapiens
MTFKILCISCKRRSETNAETFTEWTFRQKGTEEFVKILRYENEVLQLEEDERFEGRVVWNGSRGTKDLQDLSIFITNVTYNHSGDYECHVYRLLFFENYEHNTSVVKKIHIEVVDKETKSCSVAQAGILWRDHSPLQPRTPEIQRSFCLSLPRSWDYRSNRDMASIVSEIMMYVLIVVLTIWLVAEMIYCYKKIAAATETAAQENASEYLAITSESKENCTGVQVAE

SEQ ID NO: 77347 - protein, 187 aa, Homo sapiens
LMSSKDLAYQMTIYDWELFNCVHELELIYHTFGRHNFKKTTANLDLFLRRFNEIQFWVVTEICLCSQLSKRVQLLKKFIKIAAHCKEYKNLNSFFAIVMGLSNVAVSRLALTWEKLPSKFKKFYAEFESLMDPSRNHRAYRLTVAKLEPPLIPFMPLLIKDMTFTHEGNKTFIDNLVNFEKMVCAVL

SEQ ID NO: 77348 - protein, 659 aa, Homo sapiens
MKLKLNVLTIILLPVHLLITIYSALIFIPWYFLTNAKKKNAMAKRIKAKPTSDKPGSPYRSVTHFDSLAVIDIPGADTLDKLFDHAVSKFGKKDSLGTREILSEENEMQPNGKVFKKLILGNYKWMNYLEVNRRVNNFGSGLTALGLKPKNTIAIFCETRAEWMIAAQTCFKYNFPLVTLYATLGKEAVVHGLNESEASYLITSVELLESKLKTALLDISCVKHIIYVDNKAINKAEYPEGFEIHSMQSVEELGSNPENLGIPPSRPTPSDMAIVMYTSGSTGRPKGVMMHHSNLIAGMTGQCERIPGLGPKDTYIGYLPLAHVLELTAEISCFTYGCRIGYSSPLTLSDQSSKIKKGSKGDCTVLKPTLMAAVPVKALLGGNVRMMLSGGAPLSPQTHRFMNVCFCCPIGQGYGLTESCGAGTVTEVTDYTTGRVGAPLICCEIKLKDWQEGGYTINDKPNPRGEIVIGGQNISMGYFKNEEKTAEDYSVDENGQRWFCTGDIGEFHPDGCLQIIDRKKDLVKLQAGEYVSLGKVEAALKNCPLIDNICAFAKSDQSYVISFVVPNQKRLTLLAQQKGVEGTWVDICNNPAMEAEILKEIREAANAMKLERFEIPIKVRLSPEPWTPETGLVTDAFKLKRKELRNHYLKDIERMYGGK

SEQ ID NO: 77349 - protein, 158 aa, Homo sapiens
MLNNLLLFSLQISLIGTTLGGNVLIWPMEGSHWLNVKIIIDELIKKEHNVTVLVASGALFITPTSNPSLTFEIYKVPFGKERIEGVIKDFVLTWLENRPSPSTIWRFYQEMAKVIKDFHMVSQEICDGVLKNQQLMAKLKKSKFEVLVSDPVFPCGDI

SEQ ID NO: 77350 - protein, 210 aa, Homo sapiens
MADKLTRIAIVNHDKCKPKKCRQECKKSCPVVRMGKLCIEVTPQSKIAWISETLCIGCGICIKKCPFGALSIVNLPSNLEKETTHRYCANAFKLHRLPIPRPGEVLGLVGTNGIGKSTALKILAGKQKPNLGKYDDPPDWQEILTYFRGSELQNYFTKILEDDLKAIIKPQYVDQIPKAAKGTVGSILDRKDETKTQAIVCQQLDLTHLK

SEQ ID NO: 77351 - protein, 113 aa, Homo sapiens
MKCDSRAYLLGQQSVSGWGLQPRFQEYIIRVQRGISVENSWQIVRRYSDFDLLNNSLQIAGLSLPLPPKKLIGNMDREFIAERQKGLQNYLNVITTNHILSNCELVKKFLDPN

SEQ ID NO: 77352 - protein, 152 aa, Homo sapiens
MQTQEILRILRLPELGDLGQFFRSLSATTLVSMGALAAILAYWFTHRPKALQPPCNLLMQSEEVEDSGGARRSVIGSGPQLLTHYYDDARTMYQVFRRGLSISGNGPCLGFRKPKQPYQWLSYQEVADRAEFLGSGLLQHNCKACTDQFIGV

SEQ ID NO: 77353 - protein, 429 aa, Homo sapiens
GKPLNIPCKAFFGFSGESGPMIYWMKGEKFIEELAGHIREGEIRLLKEHLGEKEVELALIFDSVVEADLANYTCHVENRNGRKHASVLLRKKDLIYKIELAGGLGAIFLLLVLLVVIYKCYNIELMLFYRQHFGADETNDDNKEYDAYLSYTKVDQDTLDCDNPEEEQFALEVLPDVLEKHYGYKLFIPERDLIPSGTYMEDLTRYVEQSRRLIIVLTPDYILRRGWSIFELESRLHNMLVSGEIKVILIECTELKGKVNCQEVESLKRSIKLLSLIKWKGSKSSKLNSKFWKHLVYEMPIKKKEMLPRCHVLDSAEQGLFGELQPIPSIAMTSTSATLVSSQADLPEFHPSDSMQIRHCCRGYKHEIPATTLPVPSLGNHHTYCNLPLTLLNGQLPLNNTLKDTQEFHRNSSLLPLSSKELSFTSDIW

SEQ ID NO: 77354 - protein, 191 aa, Homo sapiens
MFPFYSCWRTGLLLLLLAVAVRESWQTEEKTCDLVGEKGKESEKELALVKRLKPLFNKSFESTVGQGSDTYIYIFRVCREAGNHTSGAGLVQINKSNGKETVVGRLNETHIFNGSNWIMLIYKGGDEYDNHCGKEQRRAVVMISCNRHTLADGCDFVCRSKPRNVPAAYRGVGDDQLGEESEERDDHLLPM

SEQ ID NO: 77355 - protein, 366 aa, Homo sapiens
MSKPHSEAGTAFIQTQQLHAAMADTFLEHMCRLDIDSPPIKKGVNLPGAAVDLPAVSEKDIQDLKFGVEQDVDMVFASFIRKASDVHEVRKVLGEKGKNIKIISKIENHEGVRRFDEILEASDGIMVARGDLGIEIPAEKVFLAQKMMIGRCNRAGKPVICATQMLESMIKKPRPTRAEGSDVANAVLDGADCIMLSGETAKGDYPLEAVRMQHLIAREAEAAMFHRKLFEELVRASSHSTDLMEAMAMGSVEASYKCLAAALIVLTESGRSAHQVARYRPRAPIIAVTRNPQTARQAHLYRGIFPVLCKDPVQEAWAEDVDLRVNFAMNVGKARGFFKKGDVVIVLTGWRPGSGFTNTMRVVPVP

SEQ ID NO: 77356 - protein, 80 aa, Homo sapiens
MASPRELTQNPLKKIWMPYSNGRPALHACQRGGGLVFQQEEGCLLALKLSLGRNFSRDVLRIETEKYAVWACVCVPGHCA

SEQ ID NO: 77357 - protein, 117 aa, Homo sapiens
MSDLGAVISLLLWGRQLFALYSGNDVTDISDDRFPKPPEIANGYVEHLFRYQCKNYYRLRTEGDGVYTLNDKKQWINKAVGDKLPECEAVCGKPKNPANPVQRILGGHLVRGWDPKL

SEQ ID NO: 77358 - protein, 111 aa, Homo sapiens
MLDWRLASAHFILAVTLTLWSSGKVLSVDVTTTEAFDSGVIDVQSTPTVREEKSATDLTAKLLLLDELVSLENDVIETKKKRSFSGFGSPLDRLSAGSVDHKGKQRCNFLG

SEQ ID NO: 77359 - protein, 243 aa, Homo sapiens
MNGAGPGPAAAAPVPVPVPVPDWRQFCELHAQAAAVDFAHKFCRFLRDNPAYDTPDAGASFSRHFAANFLDVFGEEVRRVLVAGPTTRGAAVSAEAMEPELADTSALKAAPYGHSRSSEDVSTHAATKARVRKGFSLRNMSLCVVDGVRDMWHRRASPEPDAAAAPRTAEPRDKWTRRLRLSRTLAAKVELVDIQREGALRFMVADDAAAGSGGSAQWQKCRLLLRRAVAEERFRLEFFVPPK

SEQ ID NO: 77360 - protein, 164 aa, Homo sapiens
MAWTFECSRTTSPEPLSTSPCRTTSSRNSPTMSCPASVACEPSTSTTTSSPPKNNLISKVPRGALSRQTQLRELYLQHNQLTDSGLDATTFSKLHSLEYLDLSHNQLTTVPAGLPRTLAILHLGRNRIRQVEAARLHGARGLRYLLLQHNQLGSSGLPAGALRP

SEQ ID NO: 77361 - protein, 119 aa, Homo sapiens
MTAPGAAGRCPPTTWLGSLLLLVCLLASRSITEEVSEYCSHMIGSGHLQSLQRLIDSQMETSCQITFEFVDQEQLKDPVCYLKKAFLLVQDIMEDTMRFRDNTPNAIAIVQLQELSLRL

SEQ ID NO: 77362 - protein, 205 aa, Homo sapiens
MSQTSLKQKKNEPGMRSSKESLEAEKRKESDKTGVRLSNQMRRAVNPNHSLRCCPFQGHSSCRRCLCAAEGTALGPCHTIRIYIHMCLLWEQGQQITMMRVSRDHTTDSGGEPQTTWGSQESSLRKTDSRGYLVRSQWSRISRSPSTKAPSIDEPRSRNTSAKLPSSSTSSRTPSTSPSLHDSSPPPLSGQPSLQPPASPQLPRS

SEQ ID NO: 77363 - protein, 153 aa, Homo sapiens
MLCFTKTPLQESLIELSDSSLSKMATDMFLAVMRFMGDAPLKGQSDLDVLCNLLKLCGDHEVMRDECYCQVVKQITDNTSSKQDSCQRGWRLLYIVTAYHSCSEVLHPHLTRFLQDVSRTPGLPFQGIAKACEQNLQKTLRFGGRLELPSSIE

SEQ ID NO: 77364 - protein, 99 aa, Homo sapiens
AAAEASLNKSKSATTTPSGSPRTSQQNVYNPSEGSTWNPFDDDNFSKLTAEELLNKDFAKLGEGKHPEKLGGSAESLIPGFQSTQGDAFATTSFSAGTV

SEQ ID NO: 77365 - protein, 877 aa, Homo sapiens
MKLKEVDRTAMQAWSPAQNHPIYLATGTSAQQLDATFSTNASLEIFELDLSDPSLDMKSCATFSSSHRYHKLIWGPYKMDSKGDVSGVLIAGGENGNIILYDPSKIIAGDKEVVIAQNDKHTGPVRALDVNIFQTNLVASGANESEIYIWDLNNFATPMTPGAKTQPPEDISCIAWNRQVQHILASASPSGRATVWDLRKNEPIIKVSDHSNRMHCSGLAWHPDVATQMVLASEDDRLPVIQMWDLRFASSPLRVLENHARGILAIAWSMADPELLLSCGKDAKILCSNPNTGEVLYELPTNTQWCFDIQWCPRNPAVLSAASFDGRISVYSIMGGSTDGLRQKQVDKLSSSFGNLDPFGTGQPLPPLQIPQQTAQHSIVLPLKKPPKWIRRPVGASFSFGGKLVTFENVRMPSHQGAEQQQQQHHVFISQVVTEKEFLSRSDQLQQAVQSQGFINYCQKKIDASQTEFEKNVWSFLKVNFEDDSRGKYLELLGYRKEDLGKKIALALNKVDGANVALKDSDQVAQSDGEESPAAEEQLLGEHIKEEKEESEFLPSSGGTFNISVSGDIDGLITQALLTGNFESAVDLCLHDNRMADAIILAIAGGQELLARTQKKYFAKSQSKITRLITAVVMKNWKEIVESCDLKNWREALAAVLTYAKPDEFSALCDLLGTRLENEGDSLLQTQACLCYICAGNVEKLVACWTKAQDGSHPLSLQDLIEKVVILRKAVQLTQAMDTSTVGVLLAAKMSQYANLLAAQGSIAAALAFLPDNTNQPNIMQLRDRLCRAQGEPVAGHESPKIPYEKQQLPKGRPGPVAGHHQMPRVQTQQYYPHGENPPPPGFIMHGNVNPNAAGQLPTSPGHMHTQVPPYPQPQRK

SEQ ID NO: 77366 - protein, 173 aa, Homo sapiens
KSPAAARRAKSQYSGQLHEVREVKACMLNNMCEVTQRVIGIVKTQTQLIFLMMNQVEGQQKNLVHAIESLPGSGPLTALDQDLLLLKATSAATLSCLGECLNLLQQSVHQAGQPSQKPGASENILGWHGSKSHSTEQLKNGTLGSLPSASANITWAILPNSAEDEQTSQPEPE

SEQ ID NO: 77367 - protein, 646 aa, Homo sapiens
MPFKWNAQRIQTLPNQNQSQTQPLLKTPPAVLQPIAPQTTFGVQTQPQPQSLLQAQISAASITPLLQTQPQPLLQQPQQKAGLLQPPVRIVSQPQPARRLDPPSRFSGRNDRGDQVPNRKDDRSRERERERRRSRERSPQRKRSRERSPRRERERSPRRVRRVVPRYTVQFSKFSLDCPSCDMMELRRRYQNLYIPSDFFDAQFTWVDAFPLSRPFQLGNYCNFYVMHREVESLEKNMAILDPPDADHLYSAKVMLMASPSMEDLYHKSCALAEDPQELRDGFQHPARLVKFLVGMKGKDEAMAIGGHWSPSLDGPDPEKDPSVLIKTAIRCCKALTGIDLSVCTQWYRFAEIRYHRPEETHKGRTVPAHVETVVLFFPDVWHCLPTRSEWETLSRGYKQQLVEKLQGERKEADGEQDEEEKDDGEAKEISTPTHWSKLDPKTMKVNDLRKELESRALSSKGLKSQLIARLTKQLKVEEQKEEQKELEKSEKEEDEDDDRKSEDDKEEEERKRQEEIERQRRERRYILPDEPAIIVHPNWAAKSGKFDCSIMSLSVLLDYRLEDNKEHSFEVSLFAELFNEMLQRDFGVRIYKSLLSLPEKEDKKEKDKKSKKDERKDKKEERDDETDEPKPKRRKSGDDKDKKED

SEQ ID NO: 77368 - protein, 909 aa, Homo sapiens
MITSAAGIISLLDEDEPQLKEFALHKLNAVVNDFWAEISESVDKIEVLYEDEGFRSRQFAALVASKVFYHLGAFEESLNYALGAGDLFNVNDNSEYVETIIAKCIDHYTKQCVENADLPEGEKKPIDQRLEGIVNKMFQRCLDDHKYKQAIGIALETRRLDVFEKTILESNDVPGMLAYSLKLCMSLMQNKQFRNKVLRVLVKIYMNLEKPDFINVCQCLIFLDDPQAVSDILEKLVKEDNLLMAYQICFDLYESASQQFLSSVIQNLRTVGTPIASVPGSTNTGTVPGSEKDSDSMETEEKTSSAFVGKTPEASPEPKDQTLKMIKILSGEMAIELHLQFLIRNNNTDLMILKNTKDAVRNSVCHTATVIANSFMHCGTTSDQFLRDNLEWLARATNWAKFTATASLGVIHKGHEKEALQLMATYLPKDTSPGSAYQEGGGLYALGLIHANHGGDIIDYLLNQLKNASNDIVRHGGSLGLGLAAMGTARQDVYDLLKTNLYQDDAVTGEAAGLALGLVMLGSKNAQAIEDMVGYAQETQHEKILRGLAVGIALVMYGRMEEADALIESLCRDKDPILRRSGMYTVAMAYCGSGNNKAIRRLLHVAVSDVNDDVRRAAVESLGFILFRTPEQCPSVVSLLSESYNPHVRYGAAMALGICCAGTGNKEAINLLEPMTNDPVNYVRQGALIASALIMIQQTEITCPKVNQFRQLYSKVINDKHDDVMAKFGAILAQGILDAGGHNVTISLQSRTGHTHMPSVVGVLVFTQFWFWFPLSHFLSLAYTPTCVIGLNKDLKMPKVQYKSNCKPSTFAYPAPLEVPKEKEKEKVSTAVLSITAKAKKKEKEKEKKEEEKMEVDEAEKKEEKEKKKEPEPNFQLLDNPARVMPAQLKVLTMPETCRYQPFKPASSF

SEQ ID NO: 77369 - protein, 110 aa, Homo sapiens
MRANVINEIMSTERHYIKHLKDICEGYLKQCRKRRDMFSDEQLKVIFGNIEDIYRFQMGFVRDLEKQYNNDDPHLSEIGPCFLEHQDGFWIYSEYCNNHLDACMELSKLM

SEQ ID NO: 77370 - protein, 140 aa, Homo sapiens
VEKDITPSELPANPAIRANCHQEPSVCLQAACPESWIGFQRKCFYFSDDTKNWTSSQRFCDSQDADLAQVESFQELNFLLRYKGPSDHWIGLSREQGQPWKWINGTEWTRQLVMKEDGANLYVAKVSQVPRMNPRPVMVR

SEQ ID NO: 77371 - protein, 360 aa, Homo sapiens
MDDVEVVYTIDIQKYIPCYQLFSFYNSSGEVNEQALKKILSNVKKNVVGWYKFRRHSDQIMTFRERLLHKNLQEHFSNQDLVFLLLTPSIITESCSTHRLEHSLYKPQKGLFHRVPLVVANLGMSEQLGYKTVSGSCMSTGFSRAVQTHSSKFFEEDGSLKEVHKINEMYASLQEELKSICKKVEDSEQAVDKLVKDVNRLKREIEKRRGAQIQAAREKNIQKDPQENIFLCQALRTFFPNSEFLHSCVMSLKNRHVSKSSCNYNHHLDVVDNLTLMVEHTDIPEASPASTPQIIKHKALDLDDRWQFKRSRLLDTQDKRSKADTGSSNQDKASKMSSPETDEEIEKMKGFGEYSRSPTF

SEQ ID NO: 77372 - protein, 127 aa, Homo sapiens
  MOD_RES (1)..(1): Any amino acid
XGSWYKHVKSWWEKGKSPRVLFLFYEDLKEDIRKEVIKLIHFLERKPSEELVDRIIHHTSFQEMKNNPSTNYTTLPDEIMNQKLSPFMRKGITGDWKNHFTVALNEKFDKHYEQQMKESTLKFRTEI

SEQ ID NO: 77373 - protein, 249 aa, Homo sapiens
MDFPCLWLGLLLPLVAALDFNYHRQEGMEAFLKTVAQNYSSVTHLHSIGKSVKGRNLWVLVVGRFPKEHRIGIPEFKYVANMHGDETVGRELLLHLIDYLVTSDGKDPEITNLINSTRIHIMPSMNPDGFEAVKKPDCYYSIGRENYNQYDLNRNFPDAFEYNNVSRQPETVAVMKWLKTETFVLSANLHGGALVASYPFDNGVQATGALYSRSLTPDDDVFQYLAHTYASRNPNMKKGDECKNKMNFP

SEQ ID NO: 77374 - protein, 187 aa, Homo sapiens
MAAIRKKLVIVGDGACGKTCLLIVFSKDQFPEVYVPTVFENYVADIEVDGKQVELALWDTAGQEDYDRLRPLSYPDTDVILMCFSIDSPDSLENIPEKWTPEVKHFCPNVPIILVGNKKDLRNDEHTRRELAKMKQEPHCVARLECCGTILAQLQPPPPRFKRFPCLSLLSSWGYRRPLPHPGAGET

SEQ ID NO: 77375 - protein, 173 aa, Homo sapiens
  MOD_RES (1)..(1): Any amino acid
XQDNTCEEYHTVGPHSCHIPKDLALFTPYEIWVEATNRLGSARSDVLTLDILDVVTTDPPPDVHVSRVGGLEDQLSVRWVSPPALKDFLFQAKYQIRYRVEDSVDWKVVDDVSNQTSCRLAGLKPGTVYFVQVRCNPFGIYGSKKAGIWKRPGPGGGACEPRGGEPSSGPVRR

SEQ ID NO: 77376 - protein, 58 aa, Homo sapiens
MQYLIQDRREVYSILQAEGILLPRYAILNRDPNNPKECNLIEGEDHVEVNGEVFQKPF

SEQ ID NO: 77377 - protein, 92 aa, Homo sapiens
MGNPKVKAHGKKVLTSLGDAIKHLDDLKGTFAQLSELHCDKLHVDPENFKLLGNVLVTVLAIHFGKEFTPEVQASWQKMVTGVASALSSRYH

SEQ ID NO: 77378 - protein, 116 aa, Homo sapiens
  MOD_RES (1)..(1): Any amino acid
XLEAYNPSDGTWLRLADLQVPRSGLAGCVVGGLLYAVGGRNNSPDGNTDSSALDCYNPMTNQWSPCAPMSVPRNRIGVGVIDGHIYAVGGSHGCIHHNSVERRLRPAQLYLCCWGL

SEQ ID NO: 77379 - protein, 140 aa, Homo sapiens
MGKDFRYYFQHPWSRMIVAYLVIFFNFLIFAEDPVSHSQTEANVIVVGNCFSFVTNKYPRGVGWRILKVLLWLLAILTGLIAGKFLFHQRLFGQLLRLKMFREDHGSWMTMFFSTILFLFIFSHIYNTILLMDGNMGSLI

SEQ ID NO: 77380 - protein, 319 aa, Homo sapiens
LEIMLEPKVWREAATQVFFALGLGFGGVIAFSSYNKRDNNCHFDAVLVSFINFFTSVLATLVVFAVLGFKANVINEKCITQNSETIMKFLKMGNISQDIIPHHINLSTVTAEDYHLVYDIIQKVKEEEFPALHLNSCKIEEELNKAVQGTGLAFIAFTEAMTHFPASPFWSVMFFLMLVNLGLGSMFGTIEGIVTPIVDTFKVRKEILTVICCLLAFCIGLIFVQRSGNYFVTMFDDYSATLPLLIVVILENIAVCFVYGIDKFMEDLKDMLGFAPSRYYYYMWKYISPLMLLSLLIASVVNMGLSPPGYNAWIEDKHL

SEQ ID NO: 77381 - protein, 89 aa, Homo sapiens
MAPTQGPRAPLEFGGPLGAAALLLLLPATMFHLLLAARSGPARLLGPPASLPGLEVLWSPRALLLWLAWLGLQAALYLLPARKASRPWC

SEQ ID NO: 77382 - protein, 121 aa, Homo sapiens
  MOD_RES (1)..(1): Any amino acid
XRTQTQKEEEEEKPQTTYSAFIQLLPVLVIVIISVITQLLATNPPYSLFYKSTLGYTISRETQNLQVPYFVDKNFDKAYRGASLHDLEKTIEKDYIDYIQTSCWKEKQQRGTLLTEVLAHV

SEQ ID NO: 77383 - protein, 415 aa, Homo sapiens
  MOD_RES (1)..(1): Any amino acid
XEEQVELSTIEELIKDAIVSTQPAMMVNLRACSAPGGLVPSEKPPMMPQAQPAIPRPNRLFLRQLRASHLGNELEGTEELCCVAELDNPMQQKWTKPARAGSEVEWTEDLALDLGPQSRELTLKVLRSSSCGDTELLGQATLPVGSPSRPLSRRQLCPLTPGPGKALGPAATMAVELHYEEGSPRNLGTPTSSTPRPSITPTKKIELDRTIMPDGTIVTTVTTVQSRPRIDGKLDSPSRSPSKVEVTEKTTTVLSESSGPSNTSHSSSRDSHLSNGLDPVAETAIRQLTEPSGRVAKKTPTKRSTLIISGVSKVPIAQDELALSLGYAASLEASVQDDAGTSGGPSSPPSDPPAMSPGPLDALSSPTSVQEADETTRSDISERPSVDDIESETGSTGALETRSLKDHKASPLPLQ

SEQ ID NO: 77384 - protein, 61 aa, Homo sapiens
MERKNPSRESPRRLSAKVGKGTEMKKVARQLGMAAAESDKDSGFSGQQLIPAPVVDCPALL

SEQ ID NO: 77385 - protein, 198 aa, Homo sapiens
MVMEKPSPLLVGREFVRQYYTLLNKAPEYLHRFYGRNSSYVHGGVDASGKPQEAVYGQNDIHHKVLSLNFSECHTKIRHVDAHATLSDGVVVQVMGLLSNSGQPERKFMQTFVLAPEGSVPNKFYVHNDMFRYEDEVFGDSEPELDEESEDEVEEEQEERQPSPEPVQENANSGYYEAHPVTNGIEEPLEESSHEPEP

SEQ ID NO: 77386 - protein, 133 aa, Homo sapiens
MAPPPPPLAASTPLLHGEFGSYPARGPRFALTLTSQALHIQRLRPKPEARPRGGLVPLAEVSGCCTLRSRSPSDSAAYFCIYTYPRGRRGARRRATRTFRADGAATYEENRAEAQRWATALTCLLRGLPLPGD

SEQ ID NO: 77387 - protein, 110 aa, Homo sapiens
MPQVTFNDVAIDFTHEEWGWLSSAQRDLYKDVMVQNYENLVSVAGLSVTKPYVITLLEDGKEPWMMEKKLSKDWESRWENKELSTKKDNYDEDSPQTVIIEKVVKQSYEF

SEQ ID NO: 77388 - protein, 144 aa, Homo sapiens
MGHCSLKLLCSREPPASPFRVARTIEIMPKFKQRRRKLKAKAERLFKKKEASHFQSKLITPPPPPPSPERVGISSIDISQSRSWLTSSWNFNFPNIRDAIKLWTNRVWSIYSWCQNCITQSLEVLKDTIFPSRICHRELYSVKQ

SEQ ID NO: 77389 - protein, 160 aa, Homo sapiens
MGCCYSSENEDSDQDREERKLLLDPSSPPTKALNGAEPNYHSLPSARTDEQALLSSILAKTASNIIDVSAADSQGMEQHEYMDRARQYSTRLAVLSSSLTHWKKLPPLPSLTSQPHQVLASEPIPFSDLQQVRHPSPAPAHPSHTAQGMAEGSPTLPQRR

SEQ ID NO: 77390 - protein, 26 aa, Homo sapiens
MPQPSVSGMDPPFGDAFRSHTFSEQT

SEQ ID NO: 77391 - protein, 502 aa, Homo sapiens
MDFLLLQDPASTCVPEPASQHTLRSGPGCLQQPEQQGVRDPGGIWAKLGAAEASAERLQGRRSRGASGSEPQQMGSDVRDLNALLPAVPSLGGGGGCALPVSGAAQWAPVLDFAPPGASAYGSLGGPAPPPAPPPPPPPPPHSFIKQEPSWGGAEPHEEQCLSAFTVHFSGQFTGTAGACRYGPFGPPPPSQASSGQARMFPNAPYLPSCLESQPAIRNQGYSTVTFDGTPSYGHTPSHHAAQFPNHSFKHEDPMGQQGSLGEQQYSVPPPVYGCHTPTDSCTGSQALLLRTPYSSDNLYQMTSQLECMTWNQMNLGATLKGHSTGYESDNHTTPILCGAQYRIHTHGVFRGIQDVRRVPGVAPTLVRSASETSEKRPFMCAYPGCNKRYFKLSHLQMHSRKHTGEKPYQCDFKDCERRFSRSDQLKRHQRRHTGVKPFQCKTCQRKFSRSDHLKTHTRTHTGEKPFSCRWPSCQKKFARSDELVRHHNMHQRNMTKLQLAL

SEQ ID NO: 77392 - protein, 276 aa, Homo sapiens
MPRVYIGRLSYNVREKDIQRFFSGYGRLLEVDLKNGYGFVEFEDSRDADDAVYELNGKELCGERVIVEHARGPRRDRDGYSYGSRSGGGGYSSRRTSGRDKYGPPVRTEYRLIVENLSSRCSWQDLKDFMRQAGEVTYADAHKERTNEGVIEFRSYSDMKRALDKLDGTEINGRNIRLIEDKPRTSHRRSYSGSRSRSRSRRRSRSRSRRSSRSRSRSISKSRSRSRSRSKGRSRSRSKGRKSRSKSKSKPKSDRGSHSHSRSRSKDEYEKSRSSL

SEQ ID NO: 77393 - protein, 73 aa, Homo sapiens
MQGSTRRMGVMTDVHRRFLQLLMTHGVLEEWDVKRLQTHCYKVHDRNATVDKLEDFINNINSVLESLYIEIKR

SEQ ID NO: 77394 - protein, 133 aa, Homo sapiens
GIFRRILHVLYTDCIRQCSGPLYVDRMVLLVMGNVINWSLAAYGLIMRPNDFASYLLAIGICNLLLYFAFYIIMKKTPAESREHNRDCILLDFFDDHDIWHFLSSIAMFGSFLVLLTLDDDLDTVQRDKIYVF

SEQ ID NO: 77395 - protein, 128 aa, Homo sapiens
MPGPLRSLEMESLQFRDVAVEFSLEEWHCLDTAQQNLYRDVMLENYRHLVFLGIIVSKPDLITCLEQGIKPLTMKRHEMIAKPPGPGMVVAPICNPRILGGQHRRIPGAQKFETSLGKIWRPLFIKII

SEQ ID NO: 77396 - protein, 187 aa, Homo sapiens
MSASQDSRDNGPDGMEPEGVIESNWNEIVDSFDDMNLSESLLRGIYAYGFEKPSAIQQRAILPCIKGYDVIAQAQSGTGKTATFAISILQQIELDLKATQALVLAPTRELAQQIQKVVMALGDYMGASCHACIGGTNVRAEVQKLQMEAPHIIVGTPGRVFDMLNRRYLSPKYIKMFVLDEADEMLS

SEQ ID NO: 77397 - protein, 153 aa, Homo sapiens
  MOD_RES (1)..(1): Any amino acid
XRGVEICIATPGRLIDFLECGKTNLRRTTYLVLDEADRMLDMGFEPQIRKIVDQIRPDRQTLMWSATWPKEVRQLAEDFLKDYIHINIGALELSANHNILQIVDVCHDVEKDEKLIRLMEEIMSEKENKTIVFVETKRRCDELTRKMRRDGYV

SEQ ID NO: 77398 - protein, 289 aa, Homo sapiens
MEIQCSRILLSSLRFSVSRLLTLSRISAWFGPPASTPASTMSIRVTQKSYKVSTSGPRAFSSRSYTSGPGSRISSSSFSRVGSSNFRGGLGGGYGGASGMGGITAVTVNQSLLSPLVLEVDPNIQAVRTQEKEQIKTLNNKFASFIDKVRFLEQQNKMLETKWSLLQQQKTARSNMDNMFESYINNLRRQLETLGQEKLKLEAELGNMQGLVEDFKNKYEDEINKRTEMENEFVLIKKDVDEAYMNKVELESRLEGLTDEINFLRQLYEEEIRELQSQISDTSVVLSMD

SEQ ID NO: 77399 - protein, 34 aa, Homo sapiens
MASRVLAALIVASVVGLAELYVMVRAMEGELGEL

SEQ ID NO: 77400 - protein, 140 aa, Homo sapiens
QLLWQENERLQTMVQNTKAELTHSREKVRQLESNLLPKHQKHLNPSGTMNPTEQEKLSLKRECDQFQKEQSPANRKVSQMNSLEQELETIHLENEGLKKKQVKLDEQLMENSVVGSSREGCSSLPEIVCEDAAPEVHCDA

SEQ ID NO: 77401 - protein, 171 aa, Homo sapiens
  MOD_RES (1)..(1): Any amino acid
XWTLGRRAVAGLLASPSPAQAQTLTRVPRPAELAPLCGRRGLRTDIDATCTPRRASSNQRGLNQIWNVKKQSVYLMNLRKSGTLGHPGSLDETTYERLAEETLDSLAEFFEDLADKPYTFEDYDVSFGSGVLTVKLGGDLGTYVINKQTPNKQIWLSSPSRLTWLLWLFHP

SEQ ID NO: 77402 - protein, 98 aa, Homo sapiens
MYQVSGQRPSGCDAPYGAPSAAPGPAQTLSLLPGLEVVTGSTHPAEAAPEEGSLEEAATPMPQGNGPGIPQGLDSTDLDVPTEAVTCQPQGNPLGCTP

SEQ ID NO: 77403 - protein, 399 aa, Homo sapiens
MGGCAGSRRRFSDSEGEETVPEPRLPLLDHQGAHWKNAVGFWLLGLCNNFSYVVMLSAAHDILSHKRTSGNQSHVDPGPTPIPHNSSSRFDCNSVSTAAVLLADILPTLVIKLLAPLGLHLLPYSPRVLVSGICAAGSFVLVAFSHSVGTSLCGVVFASISSGLGEVTFLSLTAFYPRAVISWWSSGTGGAGLLGALSYLGLTQAGLSPQQTLLSMLGIPALLLASYFLLLTSPEAQDPGGEEEAESAARQPLIRTEAPESKPGSSSSLSLRERWTVFKGLLWYIVPLVVVYFAEYFINQGLFELLFFWNTSLSHAQQYRWYQMLYQAGVFASRSSLRCCRIRFTWALALLQCLNLVFLLADVWFGFLPSIYLVFLIILYEGLLGGAAYVNTFHNIALE

SEQ ID NO: 77404 - protein, 121 aa, Homo sapiens
KESRAVSLLTSPAAGIKTVDPLPLREDSEDNIHKFAEATLPVSKIPKYPTNPPGQLPSPPHVPSYWHPSRRIQGSLRDPEFQHNDEDRLSEISARSAASSLRAFQTLARAKKRKENFWGKT

SEQ ID NO: 77405 - protein, 166 aa, Homo sapiens
MLKDYDWINAERHLFGQPNSAYDFKTNNPKEAGQRLQKLQEMKEKLGRNVNMRAMNVLTEAEERYNDLMKKKRIVENDKSKILTTIEDLDQKKNQALNIAWQKVNKDFGSIFSTLLPGANAMLAPPEGQTVLDGLEFKVALGNTWKENLTELSGGQRQKQQNHTTG

SEQ ID NO: 77406 - protein, 56 aa, Homo sapiens
RPRDTLSDLRAQLVGQGVSSWKRAFYYNARRLDDHQTVRDARLQDGSVLLLVSDPR

SEQ ID NO: 77407 - protein, 117 aa, Homo sapiens
MARTAGDTLDVFTMIDIFKYVIYGIAAAFFVYGILLMVEGFFTTGAIKDLYGDFKITTCGRCVSAWFIMLTYLFMLAWLGVTAFTSLPVYMYFNLWTICRNTTLVEGANLCLDLRQF

SEQ ID NO: 77408 - protein, 101 aa, Homo sapiens
MILTKAQYDEIAQCLVSVPPTRQSLRKLKQRFPRYLNGVVKNGAAPVLLDLANEVDYAPSLMARLILERFLQEHEETPPSKSIINSMLRDPSQIPDGVLAN

SEQ ID NO: 77409 - protein, 214 aa, Homo sapiens; identical to SEQ ID NO: 49007

SEQ ID NO: 77410 - protein, 49 aa, Homo sapiens
MDPIEKDWCDWAMISRPYSTLRDCLEHFAELFDLGFPNPLAERIIFETH

SEQ ID NO: 77411 - protein, 126 aa, Homo sapiens
  MOD_RES (1)..(1): Any amino acid
XNDYVCKKGEIGREMYIIQAGQVQVLGGPDGKSVLVTLKAGSVFGEISLLAVGGGNRRTANVVAHGFTNLFILDKKDLNEILVHYPESQKLLRKKARPRARKTSRERKAPPPQTSTRTQRRPPPTH

SEQ ID NO: 77412 - protein, 66 aa, Homo sapiens
MGHMLLPFRLGLGGPIGSGHQFFPWIHIGDLAGILTHALEANHVHGVLNGVAPSSATNAEFAQTLG

SEQ ID NO: 77413 - protein, 131 aa, Homo sapiens
MTPPRLFWVWLLVAGTQGVNDGDMRLADGGATNQGRVEIFYRGQWGTVCDNLWDLTDASVVCRALGFENATQALGRAAFGQGSGPIMLDEVQCTGTEASLADCKSLGWLKSNCRHERDAGVVCTNGAFQSE

SEQ ID NO: 77414 - protein, 37 aa, Homo sapiens
MAASKKAVLGPLVGAVDQGTSSTRFLLLVSATRGKPL

SEQ ID NO: 77415 - protein, 151 aa, Homo sapiens
MSSTVSYWILNSTRNSIATLQGGRRLYSRYVSNRNKLKWRLFSRVPPTLNSSPCGGFTLCKAYRHTSTEEDDFHLQLSPEQINEVLRAGETTHKILDLESRVPNSVLRFESNQLAANSPVEDRRGVASCLQTNGLMFGIFDGHGGHACAQA

SEQ ID NO: 77416 - protein, 65 aa, Homo sapiens
MQKEMKMIKDEDVHFDLAVKKTPSFPHCLQPVASRGKAPQRHPFPEALRGPFSQFRPRAPSMTLR

SEQ ID NO: 77417 - protein, 180 aa, Homo sapiens
MAHHLPAAMESHQDFRSIKAKFQASQPEPSDLPKKPPKPEFGKLKKFSQPELSEHPKKAPLPEFGAVSLKPPPPEVTDLPKKPPPPEVTDLPKKPSKLELSDLSKKFPQLGATPFPRKPLQPEVGEAPLKASLPEPGAPARKPLQPDELSHPARPPSEPKSGAFPRKLWQPEAGEATPRS

SEQ ID NO: 77418 - protein, 101 aa, Homo sapiens
MPRVVPDQRSKFENEEFFRKLSRECEIKYTGFRDRPHEERQARFQNACRDGRSEIVYLKAPMILNGVCVIWKGWIDLQRLDGMGCLEFDEERAQQEDALAQ

SEQ ID NO: 77419 - protein, 74 aa, Homo sapiens
  MOD_RES (1)..(1): Any amino acid
XEIQQQIWIPSVFIGERSSEYLRALFVYEKGLPQPLRGPLAHSDPEDLPHLQAACSSGSWGRRPRGRNSRARGG

SEQ ID NO: 77420 - protein, 287 aa, Homo sapiens
MAAAAVNGAAGFSSSGPAATSGAVLQAATGMYEQLKGEWNRKSPNLSKCGEELGRLKLVLLELNFLPTTGTKLTKQQLILARDILEIGAQWSILRKDIPSFERYMAQLKCYYFDYKEQLPESAYMHQLLGLNLLFLLSQNRVAEFHTELERLPAKDIQTNVYIKHPVSLEQYLMEGSYNKVFLAKGNIPAESYTFFIDILLDTIRDEIAGCIEKAYEKILFTEATRILFFNTPKKMTDYAKKRGWVLGPNNYYSFASQQQKPEDTTIPSTELAKQVIEYARQLEMIV

SEQ ID NO: 77421 - protein, 221 aa, Homo sapiens
HCISCNKCVSGFDHHCKWINNCVGSRNYWFFFSTVASATAGMLCLIAILLYVLVQYLVNPGVLRTDPRYEDVKNMNTWLLFLPLFPVQVQTLIVVIIGMLVLLLDFLGLVHLGQLLIFHIYLKAKKMTTFEYLINNRKEESSKHQAVRKDPYVQMDKGVLQQGAGALGSSAQGVKAKSSLLIHKHLCHFCTSVNQDGDSTARGHLTTLPQDFREQAPVTWK

SEQ ID NO: 77422 - protein, 94 aa, Homo sapiens
MQPPLDLKQILPFPLEPAPTLGLFSNYSTSQAEAHYKGNRHARRVKGIEAAKTRGREPGVREPGDPAPPGSTPTNGDGVAPRPVSMENGLGPAP

SEQ ID NO: 77423 - protein, 110 aa, Homo sapiens
MEGTAGTITSNEWSSPTSPEGSTASGGSQALDKPIDNDAEGVWSPDIEQSFQEALAIYPPCGRRKIILSDEGKMYGLQPHPGAGSSQSSRDPGQAKVLARSFARPSRNVP

SEQ ID NO: 77424 - protein, 113 aa, Homo sapiens
MLRTAMGLRSWLAAPWGALPPRPPLLLLLLLLLLLQPPPPTWALSPRISLPLGSEERPFLRFEAEHISNYTALLLSRDGRTLYVGAREALFALSSNLSFLPGGEYQELLWGAD

SEQ ID NO: 77425 - protein, 119 aa, Homo sapiens
ARLKFPIDYPYSPPAFRFLTKMWHPNIYETGDVCISILHPPVDDPQSGELPSERWNPTQNVRTILLSVISLLNEPNTFSPANVDASVMYRKWKESKGKDREYTDIIRSWGPRWTRSVTA

SEQ ID NO: 77426 - protein, 20 aa, Homo sapiens
MADSAELKEEEWERRSPSAF

SEQ ID NO: 77427 - protein, 73 aa, Homo sapiens
MTTFKEAVTFKDVAVFFTEEELGLLDPAQRKLYQDVMLENFTNLLSVGHQPFHPFHFLREEKFWMMETATQRE

SEQ ID NO: 77428 - protein, 225 aa, Homo sapiens
  MOD_RES (1)..(1): Any amino acid
XNGKINLTVFKLLQEHLGEFIFLCEKCFDHKPRMISKRNKDNSTACSHPVTKHEFEDNKCLVHILRETTVKYSKIRSFHGQCQLDLCRHEVRYGCLREDECFYAHSLVELKVWIMQNETGISHDAIAQESKRYWQNLEANVPGAQVLGNQIMPGFLNMKIKFVCAQCLRNGQVIEPDKNRKYCSAKARHSWTKDRRAMRVMSIEPVQPYCFWEKMSICWKLFLCS

SEQ ID NO: 77429 - protein, 156 aa, Homo sapiens
MARSATLAAAALALCLLLAPPGLAWYKPAAGHSSYSVGRAAGLLSGLRRSPYARRSQPYRGAEPPGGAGASPELQLHPRLRSLVSPACRGLMGGGGRTWVGVRRPLSLCLPAPQAVCVQDVAPNLQRCERLPDGRGTYQCKANVFLSLRAADCLAA

SEQ ID NO: 77430 - protein, 184 aa, Homo sapiens
MALLLCLVCLTAALAHGCLHCHSNFSKKFSFYRHHVNFKSWWVGDIPVSGALLTDWSDDTMKELHLAIPAKITREKLDQVATAVYQMMDQLYQGKMYFPGKGRETEAGPPHPGTPRPPPEPDLLLPRRLRVFPQRAAKHLPGAGAPHPERHHRKPHRLSAPLWSSAQWKSAVQGLLNYINNWHK

SEQ ID NO: 77431 - protein, 166 aa, Homo sapiens
MTIKGSKVQVSFCAPGAPGRSTLAALIAAQRVMHSNQKGLLPEPNPVQIMKSLNNPAMLQVLLQPQLCGRAVKPAVLGTPHSLPHLMNPSISPAFLHLNKAHQNLSHIPLAQQQLMKFENIHTNNKPGLLGEPPAVVLQTALGIGSVLPLKKELGHHHGEAHKSCL

SEQ ID NO: 77432 - protein, 101 aa, Homo sapiens
  MOD_RES (1)..(1): Any amino acid
XLGKPKPEEMNVKMLDFETFLPILQHISRNKEQGTYEDFVEGLRVFDKESNGTVMGAELRHVLATLGEKMTEAEVEQLLAGQEDANGCINYEAFVKHIMSG

SEQ ID NO: 77433 - protein, 643 aa, Homo sapiens
MGQTKSTSSGGGNRKCNQEQSKNQPLDARVDKIKDKKPRKKAMESSSNSDSDSGTSSDTSSEGISSSDSDDLEEDEEEEDQSIEESEDDDSDSESEAQHKSNNQVLLHGISDPKADGQKATEKAQEKRIHQPLPLASESQTHSFQSQQKQPQVLSQQLPFIFQSSQAKEESVNKHTSVIQSTGLVSNVKPLSLVNQAKKETYMKLIVPSPDVLKAGNKNTSEESSLLTSELRSKREQYKQAFPSQLKKQESSKSLKKVIAALSNPKATSSSPAHPKQTLENNHPNPFLTNALLGNHQPNGVIQSVIQEAPLALTTKTKMQSKINENIAAASSTPFSSPVNLSTSGRRTPGNQTPVMPSASPILHSQGKEKAVSNNVNPVKTQHHSHPAKSLVEQFRGTDSDIPSSKDSEDSNEDEEEDDEEEDEEDDEDDESDDSQSGTSKRRRVTDERELRIPLEYGWQRETRIRNFGGRLQGEVAYYAPCGKKLRQYPEVIKYLSRNGIMDISRDNFSFSAKIRVGDFYEARDGPQGMQWCLLKEEDVIPRIRAMEGRRGRPPNPDRQRAREESRMRRRKGRPPNVGNAEFLDNADAKLLRKLQAQEIARQAAQIKLLRKLQKQEQARVAKEAKKQQAIMLLRRSGSKKNR

SEQ ID NO: 77434 - protein, 193 aa, Homo sapiens
MDLPEGPVGGPTAEMYLRERPEEARLGMPVSLEEQILNSTFEACDPQRTGTVAVAQVLAYLEAVTGQGPQDARLQTLANSLDPNGEGPKATVDLDTFLVVMRDWIAACQLHGGLELEEETAFQGALTSRQLPSGCPEAEEPANLESFGGEDPRPELQATADLLSSLEDLELSNRRLVGENAKLQRSMETAEEG

SEQ ID NO: 77435 - protein, 173 aa, Homo sapiens
MGKKQNKKKVEEVLEEEEEEYVVEKVLDRRVVKGKVEYLLKWKGFSDEDNTWEPEENLDCPDLIAEFLQSQKTAHETDKSEGGKRKADSDSEDKGEESKPKKKKEESEKPRGFARGLEPERIIGATDSSGELMFLMKWKNSDEADLVPAKEANVKCPQVVISFYEERLTWHSY

SEQ ID NO: 77436 - protein, 83 aa, Homo sapiens
MGGLFSRWRTKPSTVEVLESIDKEIQALEEFREKNQRLQKLWVGRLILYSSVLYLFTCLIVYLWYLPDEFTARLAMTLPFFAF

SEQ ID NO: 77437 - protein, 42 aa, Homo sapiens
MLKREGKVQPYTKTLDGGWGWMIVIHFFLVWVLLSYTKWLLW

SEQ ID NO: 77438 - protein, 70 aa, Homo sapiens
  MOD_RES (1)..(1): Any amino acid
XQQFHSKPVDSDSDDDPLEAFMAEVEDQAARDMKRLEEKDKERKNVKKLIFDTWQKTQLLVWFRRKRKTI

SEQ ID NO: 77439 - protein, 120 aa, Homo sapiens
MKKKLVVLGLLAVVLVLVIVGLCLWLPSASKEPDNHVYTRAAVAADAKQCSKIGRDALRDGGSAVDAAIAALLCVGLMNAHSMGIGGGLFLTIYNSTTRKAEVINAREVAPRLAFATMFN

SEQ ID NO: 77440 - protein, 161 aa, Homo sapiens
MKILVAFLVVLTIFGIQSHGYEVFNIISPSNNGGNVQETVTIDNEKNTAIINIHAGSCSSTTIFDYKHGYIASRVLSRRACFILKMDHQNIPPLNNLQWYIYEKQALDNMFSSKYTWVKYNPLESLIKDVDWFLLGSPIEKLCKHIPLYKGEVVENTREYQ

SEQ ID NO: 77441 - protein, 39 aa, Homo sapiens
MPSIKLQSSDGEIFEVDVEIAKQSVTIKTMLEGHPFCIV

SEQ ID NO: 77442 - protein, 289 aa, Homo sapiens
RAALAAERKFFLSHPAYRHMADRMGTPHLQKTLNQQLTNHIRESLPALRSKLQSQLLSLEKEVEEYKNFRPDDPTRKTKALLQMVQQFGVDFEKRIEGSGDQVDTLELSGGARINRIFHERFPFELVKMEFDEKDLRREISYAIKNIHGVRTGLFTPDMAFEAIVKKQIVKLKEPSLKCVDLVVSELATVIKKCAEKLSSYPRLREETERIVTTYIREREGRTKDQILLLIDIEQSYINTNHEDFIGFANCYYTEQLVTCAQQRSTQLNKKRAIPNQVIRRGWLTINNI

SEQ ID NO: 77443 - protein, 62 aa, Homo sapiens
MTSLFAQEIRLSKRHEEIVSQRLMLLQQMENKLGDQHTEKASQLQTVETAFKRNLSLLKDIE

SEQ ID NO: 77444 - protein, 541 aa, Homo sapiens
  MOD_RES (1)..(1): Any amino acid
XALLLPRELGPSMAPEDHYRRLVSALSEASTFEDPQRLYHLGLPSHGEDPPWHDPPHHLPSHDLLRVRQEVAAAALRGPSGLEAHLPSSTAGQRRKQGLAQHREGAAPAAAPSFSERELPQPPPLLSPQNAPHVALGPHLRPPFLGVPSALCQTPGYGFLPPAQAEMFAWQQELLRKQNLARLELPADLLRQKELESARPQLLAPETALRPNDGAEELQRRGALLVLNHGAAPLLALPPQGPPGSGPPTPSRDSARRAPRKGGPGPASARPSESKEMTGARLWAQDGSEDEPPKDSDGEDPETAAVGCRGPTPGQAPAGGAGAEGKGLFPGSTLPLGFPYAVSPYFHTGAVGGLSMDGEEAPAPEDVTKWTVDDVCSFVGGLSGCGEYTRVFREQGIDGETLPLLTEEHLLTNMGLKLGPALKIRAQVRRWGVRSGSPDHSWAESSGWVCDSPHQAISLQVARRLGRVFYVASFPVALPLQPPTLRAPERELGTGEQPLSPTTATSPYGGGHALAGQTSPKQENGTLALLPGAPDPSQPLC

SEQ ID NO: 77445 - protein, 390 aa, Homo sapiens
MVARPLHSTEGQPESLGKMFSVQLSLGEQTWESEGSSIKKAQQAVANKALTESTLPKPVQKPPKSNVNNNPGSITPTVELNGLAMKRGEPAIYRPLDPKPFPNYRANYNFRGMYNQRYHCPVPKIFYVQLTVGNNEFFGEGKTRQAARHNAAMKALQALQNEPIPERSPQNGESGKDVDDDKDANKSEISLVFEIALKRNMPVSFEVIKESGPPHMKSFVTRVSVGEFSAEGEGNSKKLSKKRAATTVLQELKKLPPLPVVEKPKLFFKKRPKTIVKAGPEYGQGMNPISRLAQIQQAKKEKEPDYVLLSERGMPRRREFVMQVKVGNEVATGTGPNKKIAKKNAAEAMLLQLGYKASTNLQDQLEKTGENKGWSGPKPGFPEPTNNRKS

SEQ ID NO: 77446 - protein, 455 aa, Homo sapiens
MLHPETSPGRGHLLAVLLALLGTAWAEVWPPQLQEQAPMAGALNRKESFLLLSLHNRLRSWVQPPAADMRRLDWSDSLAQLAQARAALCGTPTPSLASGLWRTLQVGWNMQLLPAGLVSFVEVVSLWFAEGQRYSHAAGECARNATCTHYTQLVWATSSQLGCGRHLCSAGQAAIEAFVCAYSPRGNWEVNGKTIVPYKKGAWCSLCTASVSGCFKAWDHAGGLCEVPRNPCRMSCQNHGRLNISTCHCHCPPGYTGRYCQVRCSLQCVHGRFREEECSCVCDIGYGGAQCATKVHFPFHTCDLRIDGDCFMVSSEADTYYRARMKCQRKGGVLAQIKSQKVQDILAFYLGRLETTNEVIDSDFETRNFWIGLTYKTAKDSFRWATGEHQAFTSFAFGQPDNHGLVWLSAAMGFGNCVELQASAAFNWNDQRCKTRNRYICQFAQEHISRWGPGS

SEQ ID NO: 77447 - protein, 1545 aa, Homo sapiens
  MOD_RES (1)..(1): Any amino acid
XINEEHIHMAQSSPAPFQVLVSPYGLNGTLTGQAYKMSDPATRKLIEEWQYFYPMVLKKKEESKEEDELGYDDDFPVAVEVIVGGVRMVYPSAFVLISQNDIPVPQSVASAGGHIAVGQQGLGSVKDPSNCGMPLTPPTSPEQAILGESGGMQSAASHLVSQDGGMITMHSPKRSGKIPPKLHNHMVHRVWKECILNRTQSKRSQMSTPTLEEEPASNPATWDFVDPTQRVSCSCSRHKLLKRCAVGPNRPPTVSQPGFSAGPSSSSSLPPPASSKHKTAERQEKGDKLQKRPLIPFHHRPSVAEELCMEQDTPGQKLGLAGIDSSLEVSSSRKYDKQMAVPSRNTSKQMNLNPMDSPHSPISPLPPTLSPQPRGQETESLDPPSVPVNPALYGNGLELQQLSTLDDRTVLVGQRLPLMAEVSETALYCGIRPSNPESSEKWWHSYRLPPSDDAEFRPPELQGERCDAKMEVNSESTALQRLLAQPNKRFKIWQDKQPQLQPLHFLDPLPLSQQPGDSLGEVNDPYTFEDGDIKYIFTANKKCKQGTEKDSLKKNKSEDGFGTKDVTTPGHSTPVPDGKNAMSIFSSATKTDVRQDNAAGRAGSSSLTQVTDLAPSLHDLDNIFDNSDDDELGAVSPALRSSKMPAVGTEDRPLGKDGRAAVPYPPTVADLQRMFPTPPSLEQHPAFSPVMNYKDGISSETVTALGMMESPMVSMVSTQLTEFKMEVEDGLGSPKPEEIKDFSYVHKVPSFQPFVGSSMFAPLKMLPSHCLLPLKIPDACLFRPSWAIPPKIEQLPMPPAATFIRDGYNNVPSVGSLADPDYLNTPQMNTPVTLNSAAPASNSGAGVLPSPATPRFSVPTPRTPRTPRTPRGGGTASGQGSVKYDSTDQGSPASTPSTTRPLNSVEPATMQPIPEAHSLYVTLILSDSVMNIFKDRNFDSCCICACNMNIKGADVGLYIPDSSNEDQYRCTCGFSAIMNRKLGYNSGLFLEDELDIFGKNSDIGQAAERRLMMCQSTFLPQVEGTKKPQEPPISLLLLLQNQHTQPFASLNFLDYISSNNRQTLPCVSWSYDRVQADNNDYWTECFNALEQGRQYVDNPTGGKVDEALVRSATVHSWPHSNVLDISMLSSQDVVRMLLSLQPFLQDAIQKKRTGRTWENIQHVQGPLTWQQFHKMAGRGTYGSEESPEPLPIPTLLVGYDKDFLTISPFSLPFWERLLLDPYGGHRDVAYIVVCPENEALLEGAKTFFRDLSAVYEMCRLGQHKPICKVLRDGIMRVGKTVAQKLTDELVSEWFNQPWSGEENDNHSRLKLYAQVCRHHLAPYLATLQLDSSLLIPPKYQTPPAAAQGQATPGNAGPLAPNGSAAPPAGSAFNPTSNSSSTNPAASSSASGSSVPPVSSSASAPGISQISTTSSSGFSGSVGGQNPSTGGISADRTQGNIGCGGDTDPGQSSSQPSQDGQESVTERERIGIPTEPDSADSHAHPPAVVIYMVDPFTYAAEEDSTSGNFWLLSLMRCYTEMLDNLPEHMRNSFILQVTVCKFIIYF

SEQ ID NO: 77448 - protein, 625 aa, Homo sapiens
MFPLIGKTIIFDNFPDPSDTWEITETIGKGTYGKVFKVLNKKNGQKAAVKILDPIHDIDEEIEAEYNILKALSDHPNVVRFYGIYFKKDKVNGDKLWLVLELCSGGSVTDLVKGFLKRGERMSEPLIAYILHEALMGLQHLHNNKTIHRDVKGNNILLTTEGGVKLVDFGVSAQLTSTRHRRNTSVGTPFWMAPEVIACEQQLDTTYDARCDTWSLGITAIELGDGDPPLADLHPMRALFKIPRNPPPKLRQPELWSAEFNDFISKCLTKDYEKRPTVSELLQHKFITQIEGKDVMLQKQLTEFIGIHQCMGGTEKARRERIHTKKGNFNRPLISNLKDVDDLATLEILDENTVSEQLEKCYSRDQIYVYVGDILIALNPFQSLGLYSTKHSKLYIGSKRTASPPHIFAMADLGYQSMITYNSDQCIVISGESGAGKTENAHLLVQQLTVLGKANNRTLQEKILQVNNLVEAFGNACTIINDNSSRFGKYLEMKFTSSGAVVGAQISEYLLEKSRVIHQAIGEKNFHIFYYIYAGLAEKKKLAHYKLPENKPPRYLQNDHLRTVQDIMNNSFYKSQYELIEQCFKVIGFTMEVLLCFAFGQMSYKKLSPPTVWSLEEKQLYDPIL

SEQ ID NO: 77449 - protein, 36 aa, Homo sapiens
MTKMDIRGAVDAAVPTNIIAAKRCFKLKAASVLKHL

SEQ ID NO: 77450 - protein, 161 aa, Homo sapiens
MDSFDLALLQEWDLESLCVYEPDRNALRRKERERRNQETQQDDGTFNSSYSLFSEPYKTNKGDELSNRIQNTLGNYDEMKDFLTDRSNQSHLVGVPKPGVPQTPVNKIDEHFVADSRAQNQPSSICSTTTSTPAAVPVQQSKRGTMGWQKAGHPPSDGQQR

SEQ ID NO: 77451 - protein, 82 aa, Homo sapiens
MMSPTGDNSELLAEIKAGKSLKPTPQSKGLTTVFSGIGQPAFQPDSPLPSVSPALSPVRSPTPPAAGFQPLLNGSLVPVPPT

SEQ ID NO: 77452 - protein, 300 aa, Homo sapiens
DEVIELDFDQLPEGDEVISILKQEHTQLHIWIALALEYYKQGKTEEFVKLLEAARIDGNLDYRDHEKDQMTCLDTLAAYYVQQARKEKNKDNKKDLITQATLLYTMADKIIMYDQNHLLGRACFCLLEGDKMDQADAQFHFVLNQSPNNIPALLGKACISFNKKDYRGALAYYKKALRTNPGCPAEVRLGMGHCFVKLNKLEKARLAFSRALELNSKCVGALVGLAVLELNNKEDYSKVQHLALHAFHNTEVEAMQAESCYQLARSFHVQEDYDQAFQYYYQATQFASSSFVLPFFGLGQ

SEQ ID NO: 77453 - protein, 58 aa, Homo sapiens
  MOD_RES (1)..(1): Any amino acid
XEPTPGLSDTSPDEGLIEDLTIEDKAVEQLAEGLLSHYLPDLQRSKQALQELTTKLYC

SEQ ID NO: 77454 - protein, 1127 aa, Homo sapiens [sequence omitted]

SEQ ID NO: 77455 - protein, 775 aa, Homo sapiens
  MOD_RES (1)..(1): Any amino acid
XSLSFRSDTDKPSSAAEVLTEASSCWTDTVECFSDYMTLWIPRSHVEGLRRWLARTLHLPGTWRSPDHLDSSLAKCGYFLHLASDGDFLFRVQYSACFVQKEKANYRLEIRIFQKGVMGLERSDRYIMKCPMLRSRLGQESVHCGPMFIQVSRPLPLWRDNRQTPWLLSLRGELVASLEDASLMGLYVDMNATTVTVQSPRQGLLQRWEVLNTSAELLPLWLVSGHHAYSLEAACPPVSFQPESEVLVHIPKQRLGLVKRGSYIEETLSLRFLRVHQSNIFMVTENKDFVVVSIPAAGVLQVQRCQEVGGTPGTQAFYRVDLSLEFAEMAAPVLWTVESFFQCVGSGTESPASTAALRTTPSPPSPGPETPPAGVPPAASSQKGLGPFLQTAKPARRGQTSASILPRVVQAQRGPQPPPGEAGIPGHPTPPATLPSEPVEGVQASPWRPRPVLPTHPALTLPVSSDASSPSPPAPRPERPESLLVSGPSVTLTEGLGTVRPEQDPAKSPGSPLLLRGLSSGDVAAPEPIMGEPGQASEEFQPLARPWRATLAAEELVSHRSPGEPQETCSGTEVERPRQTGPGLPREGARGHMDLSSSEPSQDIEGPGLSILPARDATFSTPSVRQPDPSAWLSSGPELTGMPRVRLAAPLAVLPMEPLPPEPVRPAALLTPEASSVGGPDQARYLESAPGWPVGQEEWGVAHTSSPPSTQTLSLWAPTGVLLPSLVELEYPFQAGRGASLQQELTEPTLALSAESHRPPELQDSVEGLSERPSR

SEQ ID NO: 77456 - protein, 152 aa, Homo sapiens
  MOD_RES (1)..(1): Any amino acid
XVPEEIPPEVVQEYVDIMEELLGPSLGATGEPEKQREEGEVKQPQEEDWTPPDPGLLSYTDKLCSQKDFVTKVEAVIHPQFLEELLSPDPQMDFLALSQELEQEEGLTLAQVPQGQEGPGTQGPPDCLIPPAGDARLLGEPLWSGKMQVQRE

SEQ ID NO: 77457 - protein, 227 aa, Homo sapiens
MHNLYSITGYPDPPGTMEEEEEDDDYENSTPPYKDLPPKPGTMEEEEEDDDYENSTPPYKDLPPKPGTMEEEEEDDDYENSTPPYKDLPPKPGSSAPPRPPRAAKETEKPPLPCKPRNMTGLDLAAVTCPPPQLAVNLEPSPLQPSLAATPVPWLNQRSGGPGCCQKRWMVYLCLLVVTSLFLGCLGLTVTLIKYQELMEELRMLSFQQMTWRTNIRGGWVGWVLSL

SEQ ID NO: 77458 - protein, 265 aa, Homo sapiens
MLPPQKKPWESMAKGLVLGALFTSFLLLVYSYAVPPLHAGLASTRTPEAAASCSPPALEPEAVIRANGSAGECQPRRNIVFLKTHKTASSTLLNILFRFGQKHRLKFAFPNGRNDFDYPTFFARSLVQDYRPGACFNIICNHMRFHYDEVRGLVPTNAIFITVLRDPARLFESSFHYFGPVVPLTWKLSAGDKLTEFLQDPDRYYDPNGFNAHYLRNLLFFDLGYDNSLDPSSPQVQEHILEVERRFHLVLLQEYFDESLVLLKD

SEQ ID NO: 77459 - protein, 421 aa, Homo sapiens
MSDHGDVSLPPEDRVRALSQLGSAVEVNEDIPPRRYFRSGVEIIRMASIYSEEGNIEHAFILYNKYITLFIEKLPKHRDYKSAVIPEKKDTVKEIAFPKAEELKAELLKRYTKEYTEYNEEKKKEAEELARNMAIQQELEKEKQRVAQQKQQQLEQEQFHAFEEMIRNQELEKERLKIVQEFGKVDPGLGGPLVPDLEKPSLDVFPTLTVSSIQPSDCHTTVRPAKPPVVDRSLKPGALSNSESIPTIDGLRHVVVPGRLCPQFLQLASANTARGVETCGILCGKLMRNEFTITHVLIPKQSAGSDYCNTENEEELFLIQDQQGLITLGWIHTHPTQTAFLSSVDLHTHCSYQMMLPESVAIVCSPKFQETGFFKLTDHGLEEISSCRQKGFHPHSKDPPLFCSCSHVTVVDRAVTITDLR

SEQ ID NO: 77460 - protein, 149 aa, Homo sapiens
MASQKRPSQRHRDTGILDSIGRFFGGDRGAPKRGSGKDSHHPARTAHYGSLPQKSHGRTQDENPVVHFFKNIVTPRTPPPSQGKGRGLSLSRFSWGAEGQRPGFGYGGRASDYKSAHKGFKGVDAQGTLSKIFKLGGRDSRSGSPMARR

SEQ ID NO: 77461 - protein, 145 aa, Homo sapiens
GRKSQQLSENSLDSLHRMWSPQDRKYNSPPTQLSLKPNSQSLRSGNWSERKSHRLPRLPKRHSHDDMLLLAQLSLPSSPSSLNEDSLSTTSELLSSRRARRIPKVPSPEAAHWSRAGGRAGSQPFSLFPGFLPSLIWTASSIPFE

SEQ ID NO: 77462 - protein, 231 aa, Homo sapiens
MSRERGSRSEEPGAGNRESGSREPGLAAAAMSTVDLARVGACILKHAVTGEAVELRSLWREHACVVAGLRRFGCVVCRWIAQDLSSLAGLLDQHGVRLVGVGPEALGLQEFLDGDYFAGELYLDESKQLYKELGFKRLWTQASPEFGQATWCLRRYNSLSILPAALGKPVRDVAAKAKAVGIQGNLSGDLLQSGGLLVVSKEVPRRLRPQGAHPAGPGHLCGGLCQRPASV

SEQ ID NO: 77463 - protein, 25 aa, Homo sapiens
MDSVMPSQEPPVDDKNEDADLPSEE

SEQ ID NO: 77464 - protein, 181 aa, Homo sapiens
  MOD_RES (1)..(1): Any amino acid
XSLKLYPFQCFLAHDQAVRTLQWCKANSHFLVSAGSDRKIKFWDLRRPYEPINSIKRFLSTELAWLLPYNGVTVAQDNCYASYGLCGIHYIDAGYLGFKAYFTAPRKGTVWSLSGSDWLGTIAAGDISGELIAAILPDMALNPINVKRPVERRFVRIRTSNSSCWILTHMPSQILLYIKQI

SEQ ID NO: 77465 - protein, 287 aa, Homo sapiens
MREAFEQEAKQINKPRLMVTAAVAAGISNIQSGYEIPQLSQYLDYIHVMTYDLHGSWEGYTGENSPLYKYPTDTGSNAYLNVDYVMNYWKDNGAPAEKLIVGFPTYGHNFILSNPSNTGIGAPTSGAGPAGPYAKESGIWAYYEICTFLKNGATQGWDAPQEVPYAYQGNVWVGYDNIKSFDIKAQWLKHNKFGGAMVWAIDLDDFTGTFCNQGKFPLISTLKKALGLQSASCTAPAQPIEPITAAPSGSGNGSGSSSSGGSSGGSGFCAVRANGLYPVANNRNAFW

SEQ ID NO: 77466 - protein, 317 aa, Homo sapiens
SIHQIRPSCAFPVCHDTEERCRLVLSYVLEGLKSVDSSIKKESDLPAADPSTPIPLKYEDESSRGGPEGLEKQMALFLDKMGSLQKGNYSSQSGMIPGSWQHKMKLQLILKSSKAYYVLSDAAMSLQKYGRALRYIKLALQSHDTYCCLCTNMLSEVLLFLSQYLTLCGDIQLMLAQNANNRAAHLEEFHYQTKEDQEILHSLHRESSCQGVPQAWTTWFTVGLCSLAHAYLSIQKRGRNIRVLIFALYLFIYFLRRSFALVAQAGVQWCNLGSLKPPPPGFKQFSCLSLPSSWNYRHAPPCPASPPWPPKVLGLQV

SEQ ID NO: 77467 - protein, 707 aa, Homo sapiens
SKMDRQSVLHVLGILKNSKFLKVCLPAYVVGMITEPIPDIRNQYPEHISNIISLLQDLVSVFPASSVQETSMLVSLLPTSLNALRASGVDIEEETEKNLEKVQTIIEHLQEKRREGTLRVDTYTLVQPEAEDHVESYRTMPIYPTYNEVHLDERPFLRPNIISGKYDSTAIYLDTHFRLLREDFVRPLREGILELLQSFEDQGLRKRKFDDIRIYFDTRIITPMCSSSGIVYKVQFDTKPLKFVRWQNSKRLLYGSLVCMSKDNFETFLFATVSNREQEDLCRGIVQLCFNEQSQQLLAEVQPSDSFLMVETTAYFEAYRHVLEGLQEVQEEDVPFQRNIVECNSHVKEPRYLLMGGRYDFTPLIENPSATGEFLRNVEGLRHPRINVLDPGQWPSKEALKLDDSQMEALQFALTRELAIIQGPPGTGKTYVGLKIVQALLTNESVWQISLQKFPILVVCYTNHALDQFLEGIYNCQKTSIVRVGGRSNSEILKQFTLRELRNKREFRRNLPMHLRRAYMSIMTQMKESEQELHEGAKTLECTMRGVLREQYLQKYISPQHWESLMNGPVQDSEWICFQHWKHSMMLEWLGLGVGSFTQSVSPAGPENTAQAEGDEEEEGEEESSLIEIAEEADLIQADRVIEEEEVVRPQRRKKEESGADQELAKMLLAMRLDHCGTGTAAGQEQATGEWQTVPCLVLMSADPAQP

SEQ ID NO: 77468 - protein, 194 aa, Homo sapiens
MGRKKIQITRIMDERNRQVTFTKRKFGLMKKAYELSVLCDCEIALIIFNSTNKLFQYASTDMDKVLLKYTEYNEPHESRTNSDIVETLRKKGLNGCDSPDPDADDSVGHSPESEDKYRKINEDIDLMISRQRLCAVPPPNFEMPVSIPVSSHNSLVYSNPVSSLGNPNLLPLAHPSLQRNSMSPGVTHRPPSAG

SEQ ID NO: 77469 - protein, 143 aa, Homo sapiens
MEVTADQPRWVSHHHPAVLNGQHPDTHHPGLSHSYMDAAQYPLPEEVDVLFNIDGQGNHVPPYYGNSVRATVQRYPPTHHGSQVCRPPLLHGSLPWLDGGKALGSHHTASPWNLSPFSKTSIHHGSPGPLSVYPPASSSSLSG

SEQ ID NO: 77470 - protein, 470 aa, Homo sapiens
MGLQACLLGLFALILSGKCSYSPEPDQRRTLPPGWVSLGRADPEEELSLTFALRQQNVERLSELVQAVSDPSSPQYVGGLHRFPPTSSLRQRPEPQVTGTVGLHLGVTPSVIRKRYNLTSQDVGSGTSNNSQACAQFLEQYFHDSDLAQFMRLFGGNFAHQASVARVVGQQGRGRAGIEASLDVQYLMSAGANISTWVYSSPGRHEGQEPFLQWLMLLSNESALPHVHTVSYGDDEDSLSSAYIQRVNTELMKAAARGLTLLFASGDSGAGCWSVSGRHQFRPTFPASSPYVTTVGGTSFQEPFLITNEIVDYISGGGFSNVFPRPSYQEEAVTKFLSSSPHLPPSSYFNASGRAYPDVAALSDGYWVVSNRVPIPWVSGTSASTPVFGGILSLINEHRILSGRPPLGFLNPRLYQQHGAGLFDVTRGCHESCLDEEVEGQGFCSGPGWDPVTGWGTPNFPALLKTLLNP

SEQ ID NO: 77471 - protein, 155 aa, Homo sapiens
MSKSVPAFLQDESDDRETDTASESSYQLSRHKKSPSSLTNLSSSSGMTSLSSVSGSVMSVYSGDFGNLEVKGNIQFAIEYVESLKELHVFVAQCKDLAAADVKKQRSDPYVKAYLLPDKGKMGKKKTLVVKKTLNPVYNEILRYKIEKQILKTQK

SEQ ID NO: 77472 - protein, 559 aa, Homo sapiens
MVPWVRTMGQKLKQRLRLDVGREICRQYPLFCFLLLCLSAASLLLNRYIHILMIFWSFVAGVVTFYCSLGPDSLLPNIFFTIKYKPKQLGLQELFPQGHSCAVCGKVKCKRHRPSLLLENYQPWLDLKISSKVDASLSEVLELVLENFVYPWYRDVTDDESFVDELRITLRFFASVLIRRIHKVDIPSIITKKLLKAAMKHIEVIVKARQKVKNTEFLQQAALEEYGPELHVALRSRRDELHYLRKLTELLFPYILPPKATDCRSLTLLIREILSGSVFLPSLDFLADPDTVNHLLIIFIDDSPPEKATEPASPLVPFLQKFAEPRNKKPSVLKLELKQIREQQDLLFRFMNFLKQEGAVHVLQFCLTVEEFNDRILRPELSNDEMLSLHEELQKIYKTYCLDESIDKIRFDPFIVEEIQRIAEGPYIDVVKLQTMRCLFEAYEHVLSLLENVFTPMFCHSDEYFRQLLRGAESPTRNSKLNRGSLSLDDFRNTQKRGESFGISRIGSKIKGVFKSTTMEGAMLPNYGVAEGEDDFLDTSLNIGLSIEDILNSMYLNQN

SEQ ID NO: 77473 - protein, 64 aa, Homo sapiens
CFYTPKCHQDRNDLLNSALDIKEFFDHKNGTPFSCFYSPASQSEDVILIKNVMLQTAELKKSRH

SEQ ID NO: 77474 - protein, 1027 aa, Homo sapiens
MSYNYVVTAQKPTAVNGCVTGHFTSAEDLNLLIAKNTRLEIYVVTAEGLRPVKEVGMYGKIAVMELFRPKDPQGRHVKTYEVSLREKEFNKGPWKQENVEAEASMVIAVPEPFGGAIIIGQESITYHNGDKYLAIAPPIIKQSTIVCHNRVDPNGSRYLLGDMEGRLFMLLLEKEEQMDGTVTLKDLRVELLGETSIAECLTYLDNGVVFVGSRLGDSQLVKLNVDSNEQGSYVVAMETFTNLGPIVDMCVVDLERQGQGQLVTCSGAFKEGSLRIIRNGIGIHEHASIDLPGIKGLWPLRSDPNRETDDTLVLSFVGQTRVLMLNGEEVEETELMGFVDDQQTFFCGNVAHQQLIQITSASVRLVSQEPKALVSEWKEPQAKNISVASCNSSQVVVAVGRALYYLQIHPQELRQISHTEMEHEVACLDITPLGDSNGLSPLCAIGLWTDISARILKLPSFELLHKEMLGGEIIPRSILMTTFESSHYLLCALGDGALFYFGLNIETGLLSDRKKVTLGTQPTVLRTFRSLSTTNVFACSDRPTVIYSSNHKLVFSNVNLKEVNYMCPLNSDGYPDSLALANNSTLTIGTIDEIQKLHIRTVPLYESPRKICYQEVSQCFGVLSSRIEVQDTSGGTTALRPSASTQALSSSVSSSKLFSSSTAPHETSFGEEVEVHNLLIIDQHTFEVLHAHQFLQNEYALSLVSCKLGKDPNTYFIVGTAMVYPEEAEPKQGRIVVFQYSDGKLQTVAEKEVKGAVYSMVEFNGKLLASINSTVRLYEWTTEKELRTECNHYNNIMALYLKTKGDFILVGDLMRSVLLLAYKPMEGNFEEIARDFNPNWMSAVEILDDDNFLGAENAFNLFVCQKDSAATTDEERQHLQEVGLFHLGEFVNVFCHGSLVMQNLGETSTPTQGSVLFGTVNGMIGLVTSLSESWYNLLLDMQNRLNKVIKSVGKIEHSFWRSFHTERKTEPATGFIDGDLIESFLDISRPKMQEVVANLQYDDGSGMKREATADDLIKVVEELTRIH

SEQ ID NO: 77475 - protein, 553 aa, Homo sapiens
MVEAIVEFDYQAQHDDELTISVGEIITNIRKEDGGWWEGQINGRRGLFPDNFVREIKKEMKKDPLTNKAPEKPLHEVPSGNSLLSSETILRTNKRGERRRRRCQVAFSYLPQNDDELELKVGDIIEVVGEVEEGWWEGVLNGKTGMFPSNFIKELSGESDELGISQDEQLSKSRPEGLPPASLLPFPAHGAKGKTTFEGTILYRAAPGKTEGHRRYYSLRETTGSESDGGDSSSTKSEGANGTVATAAIQPKKVKGVGFGDIFKDKPIKLRPRSIEVENDFLPVEKTIGKKLPATTATPDSSKTEMDSRTKSKDYCKVIFPYEAQNDDELTIKEGDIVTLINKDCIDVGWWEGELNGRRGVFPDNFVKLLPPDFEKEGNRPKKPPPPSAPVIKQGAGTTERKHEIKKIPPERPEMLPNRTEEKERPEREPKLDLQKPSVPAIPPKKPRPPKTNSLSRPGALPPRRPERPVGPLTHTRYCCALTSGAGVGWLWKEHRRGTDCHRPWEEGRGEGGAQASLLHPPAKLSEDTGHFCPCSCTQAGVSVRLRGAVWVS

SEQ ID NO: 77476 - protein, 140 aa, Homo sapiens
FVVTGVLLIMFSLNLHMRIPQINWNLTDLVNTGLSAFLFFIASIVLAALNHRAGAEIAAVIFGFLATAAYAVNTFLAVQKWRVSVRQQSTNDYIRARTESRDVDSRPEIQRLDTFSYSTNVTVRKKSPTNLLSLNHWQLA

SEQ ID NO: 77477 - protein, 75 aa, Homo sapiens
MWLYLAAFVGLYYLLHWYRERQVVSHLQDKYVFITGCDSGFGNLLARQLDARGLRVLAACLTEKGAEQLRGQTSD

SEQ ID NO: 77478 - protein, 98 aa, Homo sapiens
MALRHLALLAGLLVGVASKSMENTDTDVPAPEVLTRSTAGVRGACASQRGALRCLLGERLLRNGWVRRGPHGEASWPAMGAPLPAVTAQRAAHRYRGV

SEQ ID NO: 77479 - protein, 153 aa, Homo sapiens
MCHDVIFMAWLKQQFSECTLIDATHRDVDVLLLLSNSAYYVAYYDDEVDKVNQYQRLSLENLEKIEIGPEPTLFGKPKFSCMRLHYRYKEASGYFHTLRAVMRNPEEDGKDTLQCIAEMLQITKQAMGSDLPIIEKKLESCHEGYQRREDTNC

SEQ ID NO: 77480 - protein, 348 aa, Homo sapiens
MPHIDNDVKLDFKDVLLRPKRSTLKSRSEVDLTRSFSFRNSKQTYSGVPIIAANMDTVGTFEMAKVLCKFSLFTAVHKHYSLVQWQEFAGQNPDCLESIWLPAQAQALLTLSSWNRSWKLFPRKYICLDVANGYSEHFVEFVKDVRKRFPQHTIMAGNVVTGEMVEELILSGADIIKVGIGPGSVCTTRKKTGVGYPQLSAVMECADAAHGLKGHIISDGGCSCPGDVAKAFGAGADFVMLGGMLAGHSESGGELIERDGKKYKLFYGMSSEMAMKKYAGGVAEYRASEGKTVEVPFKGDVEHTIRDILGGIRSTCTYVGAAKLKELSRRTTFIRVTQQVNPIFSEAC

SEQ ID NO: 77481 - protein, 200 aa, Homo sapiens
MSKQPRLLLLCKVATDVFNSKNLAVQAQKKILGKMVSKSIATTLIDDTSSEVLDELYRVTREYTQNKKEAEKIIKNLIKTVIKLAILYRNNQFNQDELALMEKFKKKVHQLAMTVVSFHQVDYTFDRNVLSRLLNECREMLHQIIQRHLTAKSHGRVNNVFDHFSDCEFLAALYNPFGNFKPHLQKLCDGINKMLDEENI

SEQ ID NO: 77482 - protein, 118 aa, Homo sapiens
MNLDGSAQDPEKREYSSVCVGREDDIKKSERMTAVVHDREVVIFYHKGEYHAMDIRCYHSGGPLHLGDIEDFDGRPCIVCPWHKYKITLATGEGLYQSINPKDPSAKPKWCSKGIKQR

SEQ ID NO: 77483 - protein, 224 aa, Homo sapiens
MAASMFYGRLVAVATLRNHRPRTAQRAAAQVLGSSGLFNNHGLQVQQQQQRNLSLHEYMSMELLQEAGVSVPKGYVAKSPDEAYAIAKKLGSKDVVIKAQVLAGGRGKGTFESGLKGGVKIVFSPEEAKAVSSQMIGKKLFTKQTGEKGRICNQVLVCERKYPRREYYFAITMERSFQGPVLIGSSHGGVNIEDVAAESPEAIIKEPIDIEEGIKKEQALQFSC

SEQ ID NO: 77484 - protein, 205 aa, Homo sapiens
MMQESATETISNSSMNQNGMSTLSSQLDAGSRDGRSSGDTSSEVSTVELLHLQQQQALQAARQLLLQQQTSGLKSPKSSDKQRPLQVPVSVAMMTPQVITPQQMQQILQQQVLSPQQLQALLQQQQAVMLQQSKWFIQQQLQEFYKKQQEQLHLQLLQQQQQQQQQQQQQQQQQQQQQQQQQQQQQQQQQQQQQQQQHPGKQAKE

SEQ ID NO: 77485 - protein, 157 aa, Homo sapiens
MKNCGVNCSGDVFTALIGEIASPNYPKPYPENSRCEYQIRLEKGFQVVVTLRREDFDVEAADSAGNCLDSLVFVAGDRQFGPYCGHGFPGPLNIETKSNALDIIFQTDLTGQKKGWKLRYHGDPMPCPKEDTPNSVWEPAKAKYVFRDVVQITCLDG

SEQ ID NO: 77486 - protein, 46 aa, Homo sapiens
MGHPPLLPLLLLLHTCVPAWATARDSISKKKKRKKKERRNLRRYNL

SEQ ID NO: 77487 - protein, 366 aa, Homo sapiens
MRRPGAPASWIWWRMLRQVLRRGLQSFCHRLGLCVSRHPVFFLTVPAVLTITFGLSALNRFQPEGDLERLVAPSHSLAKIERSLASSLFPLDQSKSQLYSDLHTPGRYGRVILLSPTGDNILLQAEGILQTHRAVLEMKVNHKGYNYTFSHLCVLRNQDKKCVLDDIISVLEDLRQAAVSNKTTARVQVRYPNTKLKDGRNSFIGHQLGGVVEVPNSKDQRVKSARAIQITYYLQTYGSATQDLIGEKWENEFCKLIRKLQEEHQELQLYSLASFSLWRDFHKTSILARSKVLVSLVLILTTATLSSSMKDCLRSKPFLGLLGVLTVCISIITAAGIFFITDGKYNSTLLGIPFFAMGISTEFTSS

SEQ ID NO: 77488 - protein, 76 aa, Homo sapiens
MERPLENGDESPDSQGHATDWRFAVCSFRDAWEEEEPASQMHVKDPGPPRPPAGATQDEELQGSPLSRKFQLPPAA

SEQ ID NO: 77489 - protein, 181 aa, Homo sapiens
MMHLAFLVLLCLPVCSAYPLSGAAKEEDSNKDLAQQYLEKYYNLEKDVKQFRRKDSNLIVKKIQGMQKFLGLEVTGKLDTDTLEVMRKPRCGVPDVGHFSSFPGMPKWRKTHLTYRIVNYTPDLPRDAVDSAIEKALKVWEEVTPLTFSRLYEGEADIMISFAVKGHSLAHAYPPGPGLYG

SEQ ID NO: 77490 - protein, 279 aa, Homo sapiens
  MOD_RES (1)..(1): Any amino acid
XLLTAVSEGRLSLDDLLQRLHHNPRRIFHLPPQEDTYVEVDLEHEWTIPSHMPFSKAHWTPFEGQKVKGTVRRVVLRGEVAYIDGQVLVPPGYGQDVRKWPQGAVPQLPPSAPATSEMTTTPERPRRGIPGLPDGRFHLPPRIHRASDPGLPAVFLRPGAGIPRGSRAWAEEPKEKSSRKVAEPELMGTPDGTCYPPPPVPRQASPQNLGTPGLLHPQTSPLLHSLVGQHILSVQQFTKDQMSHLFNVAHTLRMMVQKERSLDILKGKVMASMFYEVST

SEQ ID NO: 77491 - protein, 257 aa, Homo sapiens
IEQFCQEKKEMVNMRVGVHTGTVLCGILGMRRFKFDVWSNDVNLANLMEQLGVAGKVHISEATAKYLDDRYEMEDGKVIERLGQSVVADQLKGLKTYLISGQRAKESRCSCAEALLSGFEVIDGSQVSSGPRGQGTASSGNVSDLAQTVKTFDNLKTCPSCGITFAPKSEAGAEGGAPQNGCQDEHKNSTKVTSSWLLFLSVPLLAHPPKASGGPNPKTQNGLLSPPQEEKLTNSQTSLCEILQEKGRWAGVSLDQS

SEQ ID NO: 77492 - protein, 251 aa, Homo sapiens
MSREVAEQEERLRRGDDLRLQMALEESRRDTVKIPKKKEQTTLLDLMDALPSSGPAAQKAEPWGPSASTNQTNPWGGPAAPASTSDPWPSFGTKPAASIDPWGVPTGATVQSVPKNSDPWAASQQPASSAGKRASDAWGAVSTTKPVSVSGSFELFSNLNGTIKDDFSEFDNLRTSKKTAESVTSLPSQNNGTTSPDPFESQPLTVASSKPSSARKTPESFLGPNAALVNLDSLVTRPAPPAQSLNPFLAP

SEQ ID NO: 77493 - protein, 229 aa, Homo sapiens
MNASEFRRRGKEMVDYMANYMEGIEGRQVYPDVEPGYLRPLIPAAAPQEPDTFEDIINDVEKIIMPGAASPACTELETVMMDWLGKMLELPKAFLNEKAGEGGGVIQGSASEATLVALLAARTKVIHRLQAASPELTQAAIMEKLVAYSSDQAHSSVERAGLIGGVKLKAIPSDGNFAMRASALQEALERDKAAGLIPFFMVATLGTTTCCSFDNLLEVGPIFCRFIQL

SEQ ID NO: 77494 - protein, 301 aa, Homo sapiens
MEVMKSIIQKYQHKRISLVEAGVTRHRSIFNGLKALAEDQINSKLSKPEVVIIHDAVRPFVEEGVLLKVVTAAKEHGAAGAIRPLVSTVVSPSADGCLDYSLERARHRASEMPQAFLFDVIYEAYQQCSDYDLEFGTECLQLALKYCCTKAKLVEGSPDLWKVTYKRDLYAAESIIKERISQEICVVMDTEEDNKHVGHLLEEVLKSELNHVKVTSEALGHAGRHLQQIILDQCYNFVCVNVTTSDFQETQKLLSMLEESSLCILYPVVVVSVHFLDFKLVPPSQKMENLMQIREFAKEVK

SEQ ID NO: 77495 - protein, 29 aa, Homo sapiens
MTGELEVKNMDMKPGSTLKITGSIADGTD

SEQ ID NO: 77496 - protein, 162 aa, Homo sapiens
MAEEVVVVAKFDYVAQQEQELDIKKNERLWLLDDSKSWWRVRNSMNKTGFVPSNYVERKNSARKASIVKNLKDTLGIGKVKRKPSVPDSASPADDSFVDPGERLYDLNMPAYVKFNYMAEREDELSLIKGTKVWNHHLHSVITLGLHSLESLLAILGIMAKS

SEQ ID NO: 77497 - protein, 855 aa, Homo sapiens
MTDVSVTVCHINSPGDFYLQLIEGLDILFLLKTIEEFYKSEDGENLEILCPVQDQACVAKFEDGIWYRAKVIGLPGHQEVEVKYVDFGNTAKITIKDVRKIKDEFLNAPEKAIKCKLAYIEPYKRTMQWSKEAKEKFEEKAQDKFMTCSVIKILEDNVLLVELFDSLGAPEMTTTSINDQLVKEGLASYEIGYILKDNSQKHIEVWDPSPEEIISNEVHNLNPVSAKSLPNENFQSLYNKELPVHICNVISPEKIYVQWLLTENLLNSLEEKMIAAYENSKWEPVKWENDMHCAVKIQDKNQWRRGQIIRMVTDTLVEVLLYDVGVELVVNVDCLRKLEENLKTMGRLSLECSLVDIRPAGGSDKWTATACDCLSLYLTGAVATIILQVDSEENNTTWPLPVKIFCRDEKGERVDVSKYLIKKGLALRERRINNLDNSHSLSEKSLEVPLEQEDSVVTNCIKTNFDPDKKTADIISEQKVSEFQEKILEPRTTRGYKPPAIPNMNVFEATVSCVGDDGTIFVVPKLSEFELIKMTNEIQSNLKCLGLLEPYFWKKGEACAVRGSDTLWYRGKVMEVVGGAVRVQYLDHGFTEKIPQCHLYPILLYPDIPQFCIPCQLHNTTPVGNVWQPDAIEVLQQLLSKRQVDIHIMELPKNPWEKLSIHLYFDGMSLSYFMAYYKYCTSEHTEEMLKEKPRSDHDKKYEEEQWEIRFEELLSAETDTPLLPPYLSSSLPSPGELYAVQVKHVVSPNEVYICLDSIETSNQSNQHSDTDDSGVSGESESESLDEALQRVNKKVEALPPLTDFRTEMPCLAEYDDGLWYRAKIVAIKEFNPLSILVQFVDYGSTAKLTLNRLKI

SEQ ID NO: 77498 - protein, 181 aa, Homo sapiens
MFQQFQASCLVLFFLVGFAQQTLKPQNRKVDCNKGVTGTIYEYGALTLNGEEYIQFKQFAGKHVLFVNVAAYCGLAAQYPELNALQEELKNFGVIVLAFPCNQFGKQEPGTNSEILLGLKTPALRPLIFWAHQANSSGSPCRSMISAGTLRNFWWGPMESLSCIGSTRLQSAQSSQTSWST

SEQ ID NO: 77499 - protein, 102 aa, Homo sapiens
MENQVQTLTSYLWSRHLPVEPEELQRRARHLEKKFLENPDLSQTEEKLRGAVLHALRKTTYHWQELSYTEGLSLVYMAARLDGGFAAVSRAFHEIRARNPAF

SEQ ID NO: 77500 - protein, 422 aa, Homo sapiens
MDHPSREKDERQRTTKPMAQRSAHCSRPSGSSSSSGVLMVGPNFRVGKKIGCGNFGELRLGKNLYTNEYVAIKLEPIKSRAPQLHLEYRFYKQLGSAGEGLPQVYYFGPCGKYNAMVLELLGPSLEDLFDLCDRTFTLKTVLMIAIQLLSRMEYVHSKNLIYRDVKPENFLIGRQGNKKEHVIHIIDFGLAKEYIDPETKKHIPYREHKSLTGTARYMSINTHLGKEQSRRDDLEALGHMFMYFLRGSLPWQGLKADTLKERYQKIGDTKRNTPIEALCENFPEEMATYLRYVRRLDFFEKPDYEYLRTLFTDLFEKKGYTFDYAYDWVGRPIPTPVGSVHVDSGASAITRESHTHRDRPSQQQPLRNQPRSLTSRVFCPAVRPLFPLPSTHINRNNVLEMKPGGRSSYTCKRSLIGSTLTR

SEQ ID NO: 77501 - protein, 245 aa, Homo sapiens
MAELQQLRVQEAVESMVKSLERENIRKMQVAGLGPNQDPLLSGWVPGPSLSHHATPCTAAASPQTGCGRPWGRRGGLGQDFGSFGGSDEIRVPLPCARLFSAPSSPGQERPRRQVGSPWWQALAPPPSPLTRPLPQGLMFRCSASCCEDSQASMKQVHQCIERCHVPLAQAQALVTSELEKFQDRLARCTMHCNDKAKDSIDAGSKELQVKQQLDSCVTKCVDDHMHLIPTMTKKMKEALLSIGK

SEQ ID NO: 77502 - protein, 133 aa, Homo sapiens
MAQISSGGGGQSRCLLFALVLAICVHSQGSEMGSEKEQSPEPHLPEEGEGGKPWRVDDSEGSWIPPGEKEHGQESLSDELQETHPKKPWQKVTVRARELGDPIAHPRHEADEKPFICAQCGKTFNNTSNLRTH

SEQ ID NO: 77503 - protein, 52 aa, Homo sapiens
  MOD_RES (1)..(1): Any amino acid
XIQDSPFGDAPLGRSHYWPSQSQTWCPKVYKQVPPGSAHQSRGAPACRPNPS

SEQ ID NO: 77504 - protein, 80 aa, Homo sapiens
MTSMASLFSFTSPAVKRLLGWKQGDEEEKWAEKAVDALVKKLKKKKGAMEELEKALSSPGQPSKCVTIPRSLDGRLQVSH

SEQ ID NO: 77505 - protein, 97 aa, Homo sapiens
MNVHRGSDSDRLLRQEASCLVDDTLAVAQEKEANSLASSGPHNLTYPLGPRNEDLSLDYASQPANLQFPHIMPLAEDIKGSCFQSGNKRNHEPFIAP

SEQ ID NO: 77506 - protein, 143 aa, Homo sapiens
MMMLQNILQINSGDLLRIGRKALYSILDEVIFKLFSTPSPVIRSTATKLLLLMAESHQEILILLRQSTCYKGLRRLLSKQETGTEFSQELRQLVGLLSPMVYQEVEEQKLHQAACLIQAYWKGFQTRKRLKKLPSAVIALQRS

SEQ ID NO: 77507 - protein, 122 aa, Homo sapiens
MALDFLAGCAGGVAGVLVGHPFDTVKALGTERIQDLDLLYSAQNHSHRPEAHGLHTFLHEGSFLSCFLGHSNNQGAVVLTYDEGVTGHPWAWDGECGWGLAVGAPRLDVMLKFCVALTAFTF

SEQ ID NO: 77508 - protein, 122 aa, Homo sapiens
  MOD_RES (1)..(1): Any amino acid
XQTREVRKKPLINYRFLRAAANAEPRGPQAQRTSCAKRECGAFTQRVRERAGRQPPAGGTRHSRAERGRRRSHPRSRTRTTALLRSSQTKQGDGHQGEAAVSERFPQGHPEALTREEPRHAA

SEQ ID NO: 77509 - protein, 205 aa, Homo sapiens
MSNVRVSNGSPSLERMDARQAEHPKPSACRNLFGPVDHEELTRDLEKHCRDMEEASQRKWNFDFQNHKPLEGKYEWQEVEKGSLPEFYYRPPRPPKGACKVPAQESQDVSGSRPAAPLIGAPANSEDTHLVDPKTDPSDSQTGLAEQCAGIRKRPATDDTSLLDEARKIYMKILKIHIADFMEWTSCISTEKQQHNNTKILGTLK

SEQ ID NO: 77510 - protein, 1648 aa, Homo sapiens
MDDDSLDELVARSPGPDGHPQVGPADPAGDFEESSVGSSGDSGDDSDSEHGDGTDGEDEGASEEEDLEDRSGSEDSEDDGETLLEVAGTQGKLEAAGSFNSDDDAESCPICLNAFRDQAVGTPENCAHYFCLDCIVEWSKNANSCPVDRTLFKCICIRAQFGGKILRKIPVENTKASEEEEDPTFCEVCGRSDREDRLLLCDGCDAGYHMECLDPPLQEVPVDEWFCPECAAPGVVLAADAGPVSEEEVSLLLADVVPTTSRLRPRAGRTRAIARTRQSERVRATVNRNRISTARRVQHTPGRLGSSLLDEAIEAVATGLSTAVYQRPLTPRTPARRKRKTRRRKKVPGRKKTPSGPSAKSKSSATRSKKRQHRVKKRRGKKVKSEATTRSRIARTLGLRRPVHSSCIPSVLKPVEPSLGLLRADIGAASLSLFGDPYELDPFDSEELSANPLSPLSAKRRALSRSALQSHQPVARPVSVGLSRRRLPAAVPEPDLEEEPVPDLLGSILSGQSLLMLGSSDVIIHRDGSLSAKRAAPVSFQRNSGSLSRGEEGFKGCLQPRALPSGSPAQGPSGNRPQSTGLSCQGRSRTPARTAGAPVRLDLPAAPGAVQARNLSNGSVPGFRQSHSPWFNGTNKHTLPLASAASKISSRDSKPPCRSVVPGPPLKPAPRRTDISELPRIPKIRRDDGGGRRDAAPAHGQSIEIPSACISRLTGREGTGQPGRGTRAESEASSRVPREPGVHTGSSRPPAPSSHGSLAPLGPSRGKGVGSTFESFRINIPGNMAHSSQLSSPGFCNTFRPVDDKEQRKENPSPLFSIKKTKQLRSEVYDPSDPTGSDSSAPGSSPERSGPGLLPSEITRTISINSPKAQTVQAVRCVTSYTVESIFGTEPEPPLGPSSAMSKLRGAVAAEGASDTEREEPTESQGLAARLRRPSPPEPWDEEDGASCSTFFGSEERTVTCVTVVEPEAPPSPDVLQAATHRVVELRPPSRSRSTSSSRSRKKAKRKRVSREHGRTRSGTRSESRDRSSRSASPSVGEERPRRQRSKAKSRRSSSDRSSSRERAKRKKAKDKSREHRRGPWGHSRRTSRSRSGSPGSSSYEHYESRKKKKRRSASRPRGRECSPTSSLERLCRHKHQRERSHERPDRKESVAWPRDRRKRRSRSPSSEHRAREHRRPRSREKWPQTRSHSPERKGAVREASPAPLAQGEPGREDLPTRLPALGEAHVSPEVATADKAPLQAPPVLEVAAECEPDDLDLDYGDSVEAGHVFDDFSSDAVFIQLDDMSSPPSPESTDSSPERDFPLKPALPPASLAVAAIQREVSLMHDEDPSQPPPLPEGTQEPHLLRPDAAEKAEAPSSPDVAPAGKEDSPSASGRVQEAARPEEVVSQTPLLRSRALVKRVTWNLQESESSAPAEDRAPRAPLHRPQKPREGAWDMEDVAPTGVRQAFSELPFPSHVLPEPGFPDTDPSQVYSPGLPPAPAQPSSIPPCALVSQPTVQFILQGSLPLVGCGAAQTLAPVPAALTPASEPASQATAASNSEEKTPAPRLAAEKTKKEEYMKKLHMQERAVEEVKLAIKPFYQKREVTKEEYKDILRKAVQKICHSKSGEINPVKVANLVKAYVDKYRHMRRHKKPEAGEEPPTQGAEG

SEQ ID NO: 77511 - protein, 20 aa, Homo sapiens
  MOD_RES (1)..(1): Any amino acid
XSPLLLASGMARDWPDARGI

SEQ ID NO: 77512 - protein, 889 aa, Homo sapiens
MAQPVHSLCSAFGLQCCLLFLLASWGAGATTFQEYQKTGELSTSDHIFPLTPGLVYSIPFDHIVLHSGQRPPELPKSTEIHEQKRHCNTTRHSKPTDKPTGNSKTIDHKSSTDNHEAPPTSEENSSNQGKDPMIRNQRSVDPADSTTTHKESAGKKHITPAPKSKINCRKSTTGKSTVTRKSDKTGRPLEKSMSTLDKTSTSSHKTTTSFHNSGNSQTKQKSTSFPEKITAASKTTYKTTGTPEESEKTEDSRTTVASDKLLTKTTKNIQETISANELTQSLAEPTEHGGRTANENNTPSPAEPTENRERTANENTTLSPAEPTENRERTANENTAPFPAGPTENREMTANENTTLFPAEPTEHGERTANENTTPSPAEPTEHGERTANENTTPSPAEPTEHGERTPFANDKTTSSSAESTEHGERTPLANENTTPSPAEPTENRERTANENTTPSPAGPTENRETTANEKTTLSPVEPTENRETTANEKTTPSPAEPTENGQRTPFANEKTTSSSAEPTEHGERTPLANENTTPSPAEPTENRERTANEKTTPSPAEPTENGDRTPLANEKTTPSLAEPTENGQRTPFANEKTTSSSAEPTEHEERTPLANENTTPSPAEPTENRERTANENTTPSPAGPTENREMTANEKTTLFPAEPTENRERTANEKTTSSPAEPTENGQRTPFANEKTTSSSAEPTEHGERTPLANENTTLSPAGPTENRERTANEKTTPFPAEPTENRERTANENTTPSPAQPTENGDRTPLANEKTTPSLAEPTENGKRTPFANEKTTSSSAEPTEHAERTPLANENTTSSPAEPTENRERTANEKTTQFPAEPTENRESTANEKTTPFPAEPTENREWTANENTTLSPAEPTEHEEMTPLA

SEQ ID NO: 77513 - protein, 61 aa, Homo sapiens
MAKGFYISKSLGILGILLGVAAVCTIIALSVVYSQEKNKNANSSPVASTTPSASATTNPAS

SEQ ID NO: 77514 - protein, 14 aa, Homo sapiens
MSLPSRQTAIIVNP

SEQ ID NO: 77515 - protein, 33 aa, Homo sapiens
MALPFRKDLEKYKDLDEDELLGNLSETELKQLE

SEQ ID NO: 77516 - protein, 443 aa, Homo sapiens
MASSLPWLCIILWLENALGKLEVEGNFYSENVSRILDNLLEGYDNRLRPGFGGAVTEVKTDIYVTSFGPVSDVEMTWTDERLKFGGPTEILSLNNLMVSKIWTPDTFFRNGKKSIAHNMTTPNKLFRIMQNGTILYTMRLTINADCPMRLVNFPMDGHACPLKFGSYAYPKSEIIYTWKKGPLYSVEVPEESSSLLQYDLIGQTVSSETIKSNTGEYVIMTVYFHLQRKMGYFMIQIYTPCIMTVILSQVSFWINKESVPARTVFGITTVLTMTTLSISARHSLPKVSYATAMDWFIAVCFAFVFSALIEFAAVNYFTNLQTQKAKRKAQFAAPPTVTISKATEPLEAEIVLHPDSKYHLKKRITSLSLPIVSSSEANKVLTRAPILQSTPVTPPPLSPAFGGTSKIDQYSRILFPVAFAGFNLVYWVVYLSKDTMEVSSSVE

SEQ ID NO: 77517 - protein, 522 aa, Homo sapiens
RMIQDTKQVPHTHEREINVMLYNKYFHQVLTICSESIIRVWELETGLQVYQILEPHGFNTEVTSAAVDESGFLFATGAYNGTVRIWDFGSGQEMKVLPEGKDWKEDEHCLRRLIFLKAQEKHQQLVLALERNGTIKMIQGKEDDIYLMVIWELPDVVPFLQDGKHAVHLRMSTRDRNMAIPFPDVELIVERNFSQPTDNPTMDLLRVNCIDLLQVEGYNLIAAGTLNGVIILWNFVTSTVKKVYRPEDCFTVNPDLHPKHFKINDILFLFRTPECARRSSQDSICSSSQCESSKGPQSSKGSKQSIHDSEVKGEQTDVMVGKQQPMDKKHPGIANLPEAQPPILVTAHEDGHLRLWTLEGRLLKDMLPFTKHSAISLTSLYTDSCTRILLAGNVEGHVILCNISSFLDPPHDEKKFKQLLSWRAHSLEIIQVIYVEEKQVVLTASIDGSVRLWHALNGHYCGYFGQRRLFELSQTRDFILPCDVTEYPIEIKEESKFTEKQKYEYPLIFDREKFEDIPWKVS

SEQ ID NO: 77518 - protein, 294 aa, Homo sapiens
MNANKDERLKARSQDFHLFPALMMLSMTMLFLPVTGTLKQNIPRLKLTYKDLLLSNSCIPFLGSSEGLDFQTLLLDEERGRLLLGAKDHIFLLSLVDLNKNFKKIYWPAAKERVELCKLAGKDANTECANFIRVLQPYNKTHIYVCGTGAFHPICGYIDLGVYKEDIIFKLDTHNLESGRLKCPFDPQQPFASVMTDEYLYSGTASDFLGKDTAFTRSLGPTHDHHYIRTDISEHYWLNGAKFIGTFFIPDTYNPDDDKIYFFFRESSQEGSTSDKTILSRVGRVCKENLCFED

SEQ ID NO: 77519 - protein, 304 aa, Homo sapiens
MDSVGRIQMRTRRTLRGHLAKIYAMHWGYDSRLLVSASQDGKLIIWDSYTTNKMHAIPLRSSWVMTCAYAPSGNYVACGGLDNICSIYNLKTREGNVRVSRELPGHTGYLSCCRFLDDSQIVTSSGDTTCALWDIETAQQTTTFTGHSGDVMSLSLSPDMRTFVSGACDASSKLWDIRDGMCRQSFTGHVSDINAVSFFPNGYAFATGSDDATCRLFDLRADQELLLYSHDNIICGITSVAFSKSGRLLLAGYDDFNCNVWDTLKGDRAGVLAGHDNRVSCLGVTDDGMAVATGSWDSFLRIWN

SEQ ID NO: 77520 - protein, 167 aa, Homo sapiens
MSFLKSFPPPGPAEGLLRQQPDTEAVLNGKGLGTGTLYIAESRLSWLDGSGLGFSLEYPTISLHALSRDRSDCLGEHLYVMVNAKFEEQGQGDIPTFYTYEEGLSHLTAEGQATLERLEGMLSQSVSSQYNMAGVRTEDSIRDYEDGMEVDTTPTVAGQFEDADVDH

SEQ ID NO: 77521 - protein, 114 aa, Homo sapiens
MGPEALSSLLLLLLVASGDADMKGHFDPAKCRYALGMQDRTIPDSDISASSSWSDSTAARHSRLESSDGDGAWCPAGSVFPKEEEYLQVDLQRLHLVALVGTQGRHAGGLGKEF

SEQ ID NO: 77522 - protein, 114 aa, Homo sapiens
MQEINQNLAEEAGLNITHICLPPDSSEAEIIDEILKINEDTRVHGLALQISENLFSNKVLNALKPEKDVDGVTDINLGKLVRGDAHECFVSPVAKAVIELLEKSGVNLDGKKIL

SEQ ID NO: 77523 - protein, 26 aa, Homo sapiens
MTLEEFSAGEQKTERIHIHLNGRILP

SEQ ID NO: 77524 - protein, 173 aa, Homo sapiens
  MOD_RES (1)..(1): Any amino acid
XKQLDADVSPKPTIFLPSIAETKLQKAGTYLCLLEKFFPDVIKIHWQEKKSNTILGSQEGNTMKTNDTYMKFSWLTVPEKSLDKEHRCIVRHENNKNGVDQEIIFPPIKTDVITMDPKDNCSKDANDTLLLQLTNTSAYYMYLLLLLKSVVYFAIITCCLLRRTAFCCNGEKS

SEQ ID NO: 77525 - protein, 117 aa, Homo sapiens
VFKACDEDHKGYLSREDFKTAVVMLFGYKPSKIEVDSVMSSINPNTSGILLEGFLNIVRKKKEAQRYRNEVRHIFTAFDTYYRGFLTLEDFKKAFRQVAPKLPERTVLEVFRGIFSA

SEQ ID NO: 77526 - protein, 64 aa, Homo sapiens
  MOD_RES (1)..(1): Any amino acid
XRERKVSMRLHRGAPVNISSSDLTGRQDTSRMSTSQRSRDMASLRLHAARQGTRCRPQRPRRTY

SEQ ID NO: 77527 - protein, 108 aa, Homo sapiens
MGERVRIKFGDFDIEDSDSCHFNYLRIYNGIGVSRTEIGKYCGLGLQMNHSIESKGNEITLLFMSGIHVSGRGFLASYSVIDKQGNFHLLQWFLQFVISNNKNKMLFL

SEQ ID NO: 77528 - protein, 36 aa, Homo sapiens
MKSILDGLADTTFRTITTDLLYVGSNDIQYEDIKGE

SEQ ID NO: 77529 - protein, 180 aa, Homo sapiens
  MOD_RES (1)..(1): Any amino acid
XQTLCREQKSFLSRLCQGEELQSDRDETGAYLIDRDPTYFGPILNFLRHGKLVLDKDMAEEGVLEEAEFYNIGPLIRIIKDRMEEKDYTVTQVPPKHVYRVLQCQEEELTQMVSTMSDGWRFEQLVNIGSSYNYGSEDQAEFLCVVSKELHSTPNGLSSESSRKTKVPVRTLSDLRLSLQ

SEQ ID NO: 77530 - protein, 504 aa, Homo sapiens
  MOD_RES (1)..(1): Any amino acid
XKILLKYGERESSYVFLHVCIQEFCAALFYLLKSHLDHPHPAVRCVQELLVANFEKARRAHWIFLGCFLTGLLNKKEQEKLDAFFGFQLSQEIKQQIHQCLKSLGERGNPQGQVDSLAIFYCLFEMQDPAFVKQAVNLLQEANFHIIDNVDLVVSAYCLKYCSSLRKLCFSVQNVFKKEDEHSSTSDYSLICWHHICSVLTTSGHLRELQVQDSTLSESTFVTWCNQLRHPSCRLQKLGINNVSFSGQSVLLFEVLFYQPDLKYLSFTLTKLSRDDIRSLCDALNYPAGNVKELALAFCHLSEQCCEYISEMLLRNKSVRYLDLSANVLKDEGLKTLCEALKHPDCCLDSLCLVKCFITAAGCEDLASALISNQNLKILQIGCNEIGDVGVQLLCRALTHTDCRLEILGLEECGLTSTCCKDLASVLTCSKTLQQLNLTLNTLDHTGVVVLCEALRHPECALQVLGLRKTDFDEETQALLTAEEERNPNLTITDDCDTITRVEI

SEQ ID NO: 77531 - protein, 125 aa, Homo sapiens
GLFISGIVGDRLNLRWVLSFGMCSSALVVFVFGALTEWLRFYNKWLYCCLWIVNGLLQSTGWPCVVAVMGNWFGKAGRGVVFGLWSACASVGNILGACLASSVLQYGYEICKDHLSPLSSSMPFW

SEQ ID NO: 77532 - protein, 109 aa, Homo sapiens
  MOD_RES (1)..(1): Any amino acid
XGGYRPPPRTKEVIINGQTVKLKYCFTCKIFRPPRASHCSLCDNCVVFIFAFVITHVILRSQQTGFLNALKDSPASVLEAVVCFFSVWSIVGLSGFHTYLISSNQTTNE

SEQ ID NO: 77533 - protein, 86 aa, Homo sapiens
MHTLVFLSTRQVLQCQPAACQALPLLPRELFPLLFKVAFMDKKTVVLRELVHTWPFPLLSFQQLLQECAHCSRALLQERPSTESMQ

SEQ ID NO: 77534 - protein, 71 aa, Homo sapiens
MLNRKTSHFLGMRVQSELEHLSELRREAGKDRSSVHGSAARTRASVRTQWTTAAAAKADEDPGANLFPSLR

SEQ ID NO: 77535 - protein, 100 aa, Homo sapiens
MADQRMDISSTISDFMSPGPTDLLSSSLGTSGVDCNRKRKGSSTDYQESMDTDKDDPHGRLEYTEHQGRIKNAREAHSQIEKRRRDKMNSFIDELASLVP

SEQ ID NO: 77536 - protein, 196 aa, Homo sapiens
MRRQSMTSATRDLHTALDGKATQGGKKDHQHVPIDIQTSKLLDWLVDRRHCSLKWQSLVLTIREKINAAIQDMPESEEIAQLLSGSYIHYFHCLRILDLLKGTEASTKNIFGRYSSQRMKDWQEIIALYEKDNTYLVELSSLLVRNVNYEIPSLKKQIAKCQQLQQEYSRKEEECQAGAAEMREQFYHSCKQYGIT

SEQ ID NO: 77537 - protein, 59 aa, Homo sapiens
MIRPQSSMSKHIPVSSRRIVASRAGNPRPAPHPRCRLCSEPGVSSSNSVVFLVTHLWSF

SEQ ID NO: 77538 - protein, 546 aa, Homo sapiens
MFTLDVKSNTVFDIITDNCDLHFKISRDRLSASSLTMESFAFLWAGGRASYGVSKGKVCFEMKVTEKIPVRHLYTKDIDIHEVRIGWSLTTSGMLLGEEEFSYGYSLKGIKTCNCETEDYGEKFDENDVITCFANFESDEVELSYAKNGQDLGVAFKISKEVLAGRPLFPHVLCHNCAVEFNFGQKEKPYFPIPEEYTFIQNVPLEDRVRGPKGPEEKKDCEVVMMIGLPGAGKTTWVTKHAAENPGKYNILGTNTIMDKMMVAGFKKQMADTGKLNTLLQRAPQCLGKFIEIAARKKRNFILDQTNVSAAAQRRKMCLFAGFQRKAVVVCPKDEDYKQRTQKKAEVEGKDLPEHAVLKMKGNFTLPEVAECFDEITYVELQKEEAQKLLEQYKEESKKALPPEKKQNTGSKKSNKNKSGKNQFNRGGGHRGRGGFNMRGGNFRGGAPGNRGGYNRRGNMPQRGGGGGGSGGIGYPYPRAPVFPGRGSYSNRGNYNRGGMPNRGNYNQNFRGRGNNRGYKNQSQGYNQWQQGVSNFLCALCTLIVF

SEQ ID NO: 77539 - protein, 143 aa, Homo sapiens
MAEVPELASEMMAYYSGNEDDLFFEADGPKQMKCSFQDLDLCPLDGGIQLRISDHHYSKGFRQAASVVVAMDKLRKMLVPCPQTFQENDLSTFFPFIFEEEPIFFDTWDNEAYVHDAPVRSLNCTLRDSQQKSLVMSGPYELK

SEQ ID NO: 77540 - protein, 177 aa, Homo sapiens
  MOD_RES (1)..(1): Any amino acid
XEMCVDARTFGNDARFIRRSCTPNAEVRHMIADGMIHLCIYAVSAITKDAEVTIAFDYEYSNCNYKVDCACHKGNRNCPIQKRNPNATELPLLPPPPSLPTIGAETRRRKARRKELEMEQQNEASEENNDQQSQEVPEKVTVSSDHESLSTAEYCLYLKGSRQSRRKTRRRERRGYR

SEQ ID NO: 77541 - protein, 146 aa, Homo sapiens
MKFGCLSFRQPYAGFVLNGIKTVETRWRPLLSSQRNCTIAVHIAHRDWEGDACRELLVERLGMTPAQIQALLRKGEKFGRGVIAGLVDIGETLQCPEDLTPDEVVELENQAALTNLKQKYLTVISNPRWLLEPIPRKGGKDVFQNP

SEQ ID NO: 77542 - protein, 4222 aa, Homo sapiens
MMPAQYALTSSLVLLVLLSTARAGPFSSRSNVTLPAPRPPPQPGGHTVGAGVGSPSSQLYEHTVEGGEKQVVFTHRINLPPSTGCGCPPGTEPPVLASEVQALRVRLEILEELVKGLKEQCTGGCCPASAQAGTGQTDVRTLCSLHGVFDLSRCTCSCEPGWGGPTCSDPTDAEIPPSSPPSASGSCPDDCNDQGRCVRGRCVCFPGYTGPSCGWPSCPGDCQGRGRCVQGVCVCRAGFSGPDCSQRSCPRGCSQRGRCEGGRCVCDPGYTGDDCGMRSCPRGCSQRGRCENGRCVCNPGYTGEDCGVRSCPRGCSQRGRCKDGRCVCDPGYTGEDCGTRSCPWDCGEGGRCVDGRCVCWPGYTGEDCSTRTCPRDCRGRGRCEDGECICDTGYSGDDCGVRSCPGDCNQRGRCEDGRCVCWPGYTGTDCGSRACPRDCRGRGRCENGVCVCNAGYSGEDCGVRSCPGDCRGRGRCESGRCMCWPGYTGRDCGTRACPGDCRGRGRCVDGRCVCNPGFTGEDCGSRRCPGDCRGHGLCEDGVCVCDAGYSGEDCSTRSCPGGCRGRGQCLDGRCVCEDGYSGEDCGVRQCPNDCSQHGVCQDGVCICWEGYVSEDCSIRTCPSNCHGRGRCEEGRCLCDPGYTGPTCATRMCPADCRGRGRCVQGVCLCHVGYGGEDCGQEEPPASACPGGCGPRELCRAGQCVCVEGFRGPDCAIQTCPGDCRGRGECHDGSCVCKDGYAGEDCGEEVPTIEGMRMHLLEETTVRTEWTPAPGPVDAYEIQFIPTTEGASPPFTARVPSSASAYDQRGLAPGQEYQVTVRALRGTSWGLPASKTITTMIDGPQDLRVVAVTPTTLELGWLRPQAEVDRFVVSYVSAGNQRVRLEVPPEADGTLLTDLMPGVEYVVTVTAERGRAVSYPASVRANTGSSPLGLLGTTDEPPPSGPSTTQGAQAPLLQQRPQELGELRVLGRDETGRLRVVWTAQPDTFAYFQLRMRVPEGPGAHEEVLPGDVRQALVPPPPPGTPYELSLHGVPPGGKPSDPIIYQGIMDKDEEKPGKSSGPPRLGELTVTDRTSDSLLLRWTVPEGEFDSFVIQYKDRDGQPQVVPVEGPQRSAVITSLDPGRKYKFVLYGFVGKKRHGPLVAEAKILPQSDPSPGTPPRLGNLWVTDPTPDSLHLSWTVPEGQFDTFMVQYRDRDGRPQVVPVEGPERSFVVSSLDPDHKYRFTLFGIANKKRYGPLTADGTTAPERKEEPPHPEFLEQPLLGELTVTGVTPDSLRLSWTVAQGPFDSFMVQYKDAQGQPQAVPVAGDENEVTVPGLDPDRKYKMNLYGLRGRQRVGPESVVAKTAPQEDVDETPSPTELGTEAPESPEEPLLGELTVTGSSPDSLSLFWTVPQGSFDSFTVQYKDRDGRPRAVRVGGKESEVTVGGLEPGHKYKMHLYGLHEGQRVGPVSAVGVTAPQQEETPPATESPLEPRLGELTVTDVTPNSVGLSWTVPEGQFDSFIVQYKDKDGQPQVVPVAADQREVTVYNLEPERKYKMNMYGLHDGQRMGPLSVVIVTAPLPPAPATEASKPPLEPRLGELTVTDITPDSVGLSWTVPEGEFDSFVVQYKDRDGQPQVVPVAADQREVTIPDLEPSRKYKFLLFGIQDGKRRSPVSVEAKTVARGDASPGAPPRLGELWVTDPTPDSLRLSWTVPEGQFDSFVVQFKDKDGPQVVPVEGHERSVTVTPLDAGRKYRFLLYGLLGKKRHGPLTADGTTEARSAMDDTGTKRPPKPRLGEELQVTTVTQNSVGLSWTVPEGQFDSFVVQYKDRDGQPQVVPVEGSLREVSVPGLDPAHRYKLLLYGLHHGKRVGPISAVAITAGREETETETTAPTPPAPEPHLGELTVEEATSHTLHLSWMVTEGEFDSFEIQYTDRDGQLQMVRIGGDRNDITLSGLESDHRYLVTLYGFSDGKHVGPVHVEALTVPEEEKPSEPPTATPEPPIKPRLGELTVTDATPDSLSLSWTVPEGQFDHFLVQYRNGDGQPKAVRVPGHEEGVTISGLEPDHKYKMNLYGFHGGQRMGPVSVVGVTAAEEETPSPTEPSMEAPEPAEEPLLGELTVTGSSPDSLSLSWTVPQGRFDSFTVQYKDRDGRPQVVRVGGEESEVTVGGLEPGRKYKMHLYGLHEGRRVGPVSAVGVTAPEEESPDAPLAKLRLGQMTVRDITSDSLSLSWTVPEGQFDHFLVQFKNGDGQPKAVRVPGHEDGVTISGLEPDHKYKMNLYGFHGGQRVGPVSAVGLTAPGKDEEMAPASTEPPTPEPPIKPRLEELTVTDATPDSLSLSWTVPEGQFDHFLVQYKNGDGQPKATRVPGHEDRVTISGLEPDNKYKMNLYGFHGGQRVGPVSAIGVTAAEEETPSPTEPSMEAPEPPEEPLLGELTVTGSSPDSLSLSWTVPQGRFDSFTVQYKDRDGRPQVVRVGGEESEVTVGGLEPGRKYKMHLYGLHEGRRVGPVSTVGVTAPQEDVDETPSPTEPGTEAPEPPEEPLLGELTVTGSSPDSLSLSWTVPQGRFDSFTVQYKDRDGRPQAVRVGGQESKVTVRGLEPGRKYKMHLYGLHEGRRLGPVSAVGVTEDEAETTQAVPTMTPEPPIKPRLGELTMTDATPDSLSLSWTVPEGQFDHFLVQYRNGDGQPKAVRVPGHEDGVTISGLEPDHKYKMNLYGFHGGQRVGPISVIGVTAAEEETPSPTELSTEAPEPPEEPLLGELTVTGSSPDSLSLSWTIPQGHFDSFTVQYKDRDGRPQVMRVRGEESEVTVGGLEPGRKYKMHLYGLHEGRRVGPVSTVGVTVPTTTPEPPNKPRLGELTVTDATPDSLSLSWMVPEGQFDHFLVQYRNGDGQPKVVRVPGHEDGVTISGLEPDHKYKMNLYGFHGGQRVGPISVIGVTAAEEETPAPTEPSTEAPEPPEEPLLGELTVTGSSPDSLSLSWTIPQGRFDSFTVQYKDRDGRPQVVRVRGEESEVTVGGLEPGCKYKMHLYGLHEGQRVGPVSAVGVTVPTMTPEPPIKPRLGELTVTDATPDSLSLSWMVPEGQFDHFLVQYRNGDGQPKAVRVPGHEDGVTISGLEPDHKYKMNLYGFHGGQRVGPVSAIGVTEEETPSPTEPSTEAPEAPEEPLLGELTVTGSSPDSLSLSWTIPQGRFDSFTVQYKDRDGQPQVVRVRGEESEVTVGGLEPGRKYKMHLYGLHEGQRVGPVSTVGITAPLPTPLPVEPRLGELAVAAVTSDSVGLSWTVAQGPFDSFLVQYRDAQGQPQAVPVSGDLRAVAVSGLDPARKYKFLLFGLQNGKRHGPVPVEARTAPDTKPSPRLGELTVTDATPDSVGLSWTVPEGEFDSFVVQYKDKDGRLQVVPVAANQREVTVQGLEPSRKYRFLLYGLSGRKRLGPISADSTTAPLEKELPPHLGELTVAEETSSSLRLSWTVAQGPFDSFVVQYRDTDGQPRAVPVAADQRTVTVEDLEPGKKYKFLLYGLLGGKRLGPVSALGMTAPEEDTPAPELAPEAPEPPEEPRLGVLTVTDTTPDSMRLSWSVAQGPFDSFVVQYEDTNGQPQALLVDGDQSKILISGLEPSTPYRFLLYGLHEGKRLGPLSAEGTTGLAPAGQTSEESRPRLSQLSVTDVTTSSLRLNWEAPPGAFDSFLLRFGVPSPSTLEPHPRPLLQRELMVPGTRHSAVLRDLRSGTLYSLTLYGLRGPHKADSIQGTARTLSPVLESPRDLQFSEIRETSAKVNWMPPPSRADSFKVSYQLADGGEPQSVQVDGQARTQKLQGLIPGARYEVTVVSVRGFEESEPLTGFLTTVPDGPTQLRALNLTEGFAVLHWKPPQNPVDTYDIQVTAPGAPPLQAETPGSAVDYPLHDLVLHTNYTATVRGLRGPNLTSPASITFTTGLEAPRDLEAKEVTPRTALLTWTEPPVRPAGYLLSFHTPGGQTQEILLPGGITSHQLLGLFPSTSYNARLQATWGQSLLPPVSTSFTTGGLRIPFPRDCGEEMQNGAGASRTSTIFLNGNRERPLNVFCDMETDGGGWLVFQRRMDGQTDFWRDWEDYAHGFGNISGEFWLGNEALHSLTQAGDYSMRVDLRAGDEAVFAQYDSFHVDSAAEYYRLHLEGYHGTAGDSMSYHSGSVFSARDRDPNSLLISCAVSYRGAWWYRNCHYANLNGLYGSTVDHQGVSWYHWKGFEFSVPFTEMKLRPRNFRSPAGGG

SEQ ID NO: 77543 - protein, 138 aa, Homo sapiens
MAALTTLFKYIDENQDRYIKPVQLQQPQRVSLECGNVTGASSPSRTPFQNPSLLLVHKQKLAKWVAIQSVSAWPEKRGEIRRMMEVAAADVKQLGGSVELVDIGKQKLPDGSEIPLPPILLGRLGSDPQKKTVCIYGH

SEQ ID NO: 77544 - protein, 12 aa, Homo sapiens
MATLGHTFPFYA

SEQ ID NO: 77545 - protein, 490 aa, Homo sapiens
MMNIFVGFVIVTFQEQGEKEYKNCELDKNQRQCVEYALKARPLRRYIPKNPYQYKFWYVVNSSPFEYMMFVLIMLNTLCLAMQHYEQSKMFNDAMDILNMVFTGVFTVEMVLKVIAFKPKGYFSDAWNTFDSLIVIGSIIDVALSEADNSEESNRISITFFRLFRVMRLVKLLSRGEGIRTLLWTFIKSFQALPYVALLIAMLFFIYAVIGMQMFGKVAMRDNNQINRNNNFQTFPQAVLLLFRCATGEAWQEIMLACLPGKLCDPESDYNPGEEYTCGSNFAIVYFISFYMLCAFLIINLFVAVIMDNFDYLTRDWSILGPHHLDEFKRIWSEYDPEAKGRIKHLDVVTLLRRIQPPLGFGKLCPHRVACKRLVAMNMPLNSDGTVMFNATLFALVRTALKIKTEGNLEQANEELRAVIKKIWKKTSMKLLDQVVPPAGDDEVTVGKFYATFLIQDYFRKFKKRKEQGLVGKYPAKNTTIALQMLERML

SEQ ID NO: 77546 - protein, 802 aa, Homo sapiens
MMADGAAAGAGGSPSLRELRARMVAAANEIAKERRKQDVVNRVATHSSNIRSTFKPVIDGSMLKNDIKQRLARERREEKRRQQDANKETQLLEKERKTKLQYEKQMEERQRKLKERKEKEEQRRIAAEEKRHQKDEAQKEKFTAILYRTLERRRLADDYQQKRWSWGGSAMANSESKTANKRSASTEKLEQGTSALIRQMPLSSAGLQNSVAKRKTDKERSSSLNRRDSNLHSSTDKEQAERKPRVEESPLEKVETPPKASVDAPPQVNVEVFCNTSMEASPKAGVGMAPEVSTDSFPVVSVDVSPVVSTYDSEMSMDASPELSIEALPKVDLETVPKVSIVASPEASLEAPPEVSLEALPEVSVEAAPEGSLEAPPKGSAEVAPKESVKGSPKESMEASPEAMVKASPKTSLEASMEASPKAKARDAPKKSEMDKQALIPIAKKRLSSYTECYKWSSSPENACGLPSPISTNRQIQKNCPPSPLPLISKQSPQTSFPYKIMPIQHTLSVQSASSTVKKKKETVSKTTNRCEALSQRHMIYEESGNKSTAGIMNAEAATKILTELRRLAREQREKEEEERQREEMQQRVIKKSKDMAKEAVGGQAEDHLKLKDGQQQNETKKKKGWLDQEDQEAPLQKGDAKIKAQEEADKRKKEHERIMLQNLQERLERKKRIEEIMKRTRKTDVNASKVTETSSHDIYEEAEADNEESDKDSLNEMFPSAILNGTGSPTKFKMPFNNAKKMTHKLVFLEDGTSQVRKEPKTYFNGDLKNFRQKSMKDTSIQEVVSRPSSKRMTSHTTKTR

SEQ ID NO: 77547 - protein, 165 aa, Homo sapiens
MEPSDMPAGYHCPLDSAPWDETRDPQSTELIPRRAISRSPTCARCRNHGVTAHLKGHKRLCLFQACECHKCVLILERRRVMAAQVALRRQQEAQLKKHLMRRGEASPKAPNHFRKGTTQPQVPSGKENIAPQPQTPHGAVLLAPTPPGKNSCGPLLLSHPPEASP

SEQ ID NO: 77548 - protein, 208 aa, Homo sapiens
MLSPTFVLWDVGYPLYTYGSICIIALIIWQVKKSCQKLSLVPNRSCCRCHRRVQQKSGDRTSRARRTSQEEAEKLWKLLFLMKSQGWLPQEGSVRRILCADPCCQICNVMALEIKQLLAAPEVGLDNKMKLFLHWINPEMKDRRHEESILLSKAETVTQDRTKNIEKSPTVTKDHVWGATTQKTTEDPEAQPPSTEEEGLIFCDAPSA

SEQ ID NO: 77549 - protein, 285 aa, Homo sapiens
MVRGAGPGPSLSALSHPTGASGMAAAEGPGYLVSPQAEKHRRARNWTDAEMRGLMLVWEEFFDELKQTKRNAKVYEKMASKLFEMTGERRLGEEIKIKITNMTFQYRKLKCMTDSESAPPDWPYYLAIDGILAKVPESCDGKLPDSQPPGPSTSQTEASLSPPAKSTPLYFPYNQCSYEGRFEDDRSDSSSSLLSLKFRSEERPVKKRKVQSCHLQKKQLRLLEAMVEEQRRLSRAVEETCREVRRVLDQQHILQIQTAAQPIAHLHFLSVDVGQARLPVARAGR

SEQ ID NO: 77550 - protein, 38 aa, Homo sapiens
MDIRNYILNYVASQPKLAPFVIQALIQVIAKITKLGWF

SEQ ID NO: 77551 - protein, 142 aa, Homo sapiens
MDAGSLYEPVSPHWFYCKIIDSKETWIPFNSEDSQQLEEAYSSGKGCNGRVVPTDGGRYDVHLGERMRYAVYWDELASEVRRCTWFYKGDKDNKYVPYSESFSQVLEETYMLAVTLDEWKKKLESPNREIIILHNPKENLYK

SEQ ID NO: 77552 - protein, 266 aa, Homo sapiens
MRLLPRLLLLLLLVFPATVLFRGGPRGLLAVAQDLTEDEETVEDSIIEDEDDEAEVEEDEPTDLVEDKEEEDVSGEPEASPSADTTILFVKGEDFPANNIVKFLVGFTNKGTEDFIVESLDASFRYPQDYQFYIQNFTALPLNTVVPPQRQATFEYSFIPAEPMGGRPFGLVINLNYKDLNGNVFQDAVFNQTVTVIEREDGLDGETIFMYMFLAGLGLLVIVGLHQLLESRKRKRPIQKVEMGTSSQNDVDMSWIPQETLNQISK

SEQ ID NO: 77553 - protein, 46 aa, Homo sapiens
MALVSGISLDPEAAIGVTKRPPPKWVDGVDEVSSIFSMMLAGLSRR

SEQ ID NO: 77554 - protein, 97 aa, Homo sapiens
MEARSMLVPPQASVCFEDVAMAFTQEEWEQLDLAQRTLYREVTLETWEHIVSLGLFLSKSDVISQLEQEEDLCRAEQEAPRGTRPSKKQRRYRARRI

SEQ ID NO: 77555 - protein, 433 aa, Homo sapiens
MAEAELHKERLQAIAEKRKRQTEIEGKRQQLDEQILLLQHSKSKVLREKWLLQGIPAGTAEEEEARRRQSEEDEFRVKQLEDNIQRLEQEIQTLESEESQISAKEQIILEKLKETEKSFKDFQKGFSSTDGDAVNYISSQLPDLPILCSRTAEPSPGQDGTSRAAAVYAMEINVEKDKQTGETKILSTSTIGPEGVHQKGVKVYDDGTKVVYEVRSGGTVVENGVHKLSTKDVEELIQKAGQSSLGGGHVSERTVIADGSLSHPKEHMLCKEAKLEMVHKSRKDHSSGNPGQQAQAPSAAGPEANLDQPVTMIFMGYQNIEDEEETKKVLGYDETIKAELVLIDEDDEKSLREKTVTDVSTIDGNAAELVSGRPVSDTTEPSSPEGKEESLATEPAPGVGWENVLLKEGESASNATETSGPDMTIKKPPQLSE

SEQ ID NO: 77556 - protein, 42 aa, Homo sapiens
MAEPDLECEQIRLKCIRSSALAQAGMQWRDHGSVHRQPPGLK

SEQ ID NO: 77557 - protein, 91 aa, Homo sapiens
MEAREPGRPTPTYHLVPNTSQSQVEEDVSSPPQRSSETMQLKKEISLLNGVSLVVGNMIGSGIFVSPKGVLVHTASYGMSLIVWAIGGLFS

SEQ ID NO: 77558 - protein, 187 aa, Homo sapiens [sequence omitted]

SEQ ID NO: 77559 - protein, 507 aa, Homo sapiens
  MOD_RES (1)..(1): Any amino acid
XPLSVPRSKSEMSYIDGEKVVKRSATLPLPARSSSLKSSSERNDWEPPDKKVDTRKYRAEPKSIYEYQPGKSSVLTNEKMSRDISPEEIDLKNEPWYKFFSELEFGKPSSAISPTPEISSETPGYIYSSNFHAVKRESDGAPGDLTSLENERQIYKSVLEGGDIPLQGLSGLKRPSSSASTKDSESPRHFIPADYLESTEEFIRRRHDDKEKLLADQRRLKREQEEADIAARRHTGVIPTHHQFITNERFGDLLNIDDTAKRKSGSEMRPARAKFDFKAQTLKELPLQKGDIVYIYKQIDQNWYEGEHHGRVGIFPRTYIELLPPAEKAQPKKLTPVQVLEYGEAIAKFNFNGDTQVEMSFRKGERITLLRQVDENWYEGRIPGTSRQGIFPITYVDVIKRPLVKNPVDYMDLPFSSSPSRSATASPQQPQAQQRRVTPDRSQTSQDLFSYQALYSYIPQNDDELELRDGDIVDVMEKCDDGWFVGTSRRTKQFGTFPGNYVKPLYL

SEQ ID NO: 77560 - protein, 90 aa, Homo sapiens
  MOD_RES (1)..(1): Any amino acid
XNIDNENNNSTPDPTWVHEIFQGTLTNETRCLTCETISSKDEDFLDLSVDVEQNTSITHCLRGFSNTETLCSEYKYYCEECRSKQEAHKR

SEQ ID NO: 77561 - protein, 102 aa, Homo sapiens
MGLLVFVRNLLLALCLFLVLGFLYYSAWKLHLLQWEEDSKDGLFQRCVPLDVGVTIFLSFRSMEVKRKNKGEYEKSTDLKLSVSCRGGLFFFFFRWSFTLVA

SEQ ID NO: 77562 - protein, 113 aa, Homo sapiens
MNFLRRRLSDSSFMANLPNGYMTDLQRPDSSTSSPASPAMERRHPQPLAASFSSPGSSLFSSLSSAMKQAPQATSGLMEPPGPSTPIVQRPRILLVIDDAHTDWSKYFHGKKV

SEQ ID NO: 77563 - protein, 139 aa, Homo sapiens
MAPHWAVWLLAARLWGLGIGAEVWWNLVPRKTVSSGELATVVRRFSQTGIQDFLTLTLTEPTGLLYVGAREALFAFSMEALELQGAISWEAPVEKKTECIQKGKNNQTECFNFIRFLQPYNASHLYVCGTYAFQPKCTY

SEQ ID NO: 77564 - protein, 24 aa, Homo sapiens
MLQCLEAVEQNNPRLLAQIDASMF

SEQ ID NO: 77565 - protein, 29 aa, Homo sapiens
MDLSGVKKKSLLGVKENNKKSSTRAPSPT

SEQ ID NO: 77566 - protein, 1009 aa, Homo sapiens
MVSKMIIENFEALKSWLSKTLEPICDADPSALAKYVLALVKKDKSEKELKALCIDQLDVFLQKETQIFVEKLFDAVNTKSYLPPPEQPSSGSLKVEFFPHQEKDIKKEEITKEEEREKKFSRRLNHSPPQSSSRYRENRSRDERKKDDRSRKRDYDRNPPRRDSYRDRYNRRRGRSRSYSRSRSRSWSKERLRERDRDRSRTRSRSRTRSRERDLVKPKYDLDRTDPLENNYTPVSSVPSISSGHYPVPTLSSTITVIAPTHHGNNTTESWSEFHEDQVDHNSYVRPPMPKKRCRDYDEKGFCMRGDMCPFDHGSDPVVVEDVNLPGMLPFPAQPPVVEGPPPPGLPPPPPILTPPPVNLRPPVPPPGPLPPSLPPVTGPPPPLPPLQPSGMDAPPNSATSSVPTVVTTGIHHQPPPAPPSLFTAVFVLPDTYDTDGYNPEAPSITNTSRPMYRHRVHAQRPNLIGLTSGDMDLPPREKPPNKSSMRIVVDSESRKRTIGSGEPGVPTKKTWFDKPNFNRTNSPGFQKKVQFGNENTKLELRKVPPELNNISKLNEHFSRFGTLVNLQVAYNGDPEGALIQFATYEEAKKAISSTEAVLNNRFIKVYWHREGSTQQLQTTSPKPLVQQPILPVVKQSVKERLGPVPSSTIEPAEAQSASSDLPQNVTKLSVKDRLGFVSKPSVSATEKVLSTSTGLTKTVYNPAALKAAQKTLLVSTSAVDNNEAQKKKQEALKLQQDVRKRKQEILEKHIETQKMLISKLEKNKTMKSEDKAEIMKTLEVLTKNITKLKDEVKAASPGRCLPKSIKTKTQMQKELLDTELDLYKKMQAGEEVTELRRKYTELQLEAAKRGILSSGRGRGIHSRGRGAVHGRGRGRGRGRGVPGHAVVDHRPRALEISAFTESDREDLLPHFAQYGEIEDCQIDDSSLHAVITFKTRAEAEAAAVHGARFKGQDLKLAWNKPVTNISAVETEEVEPDEEEFQEESLVDDSLLQDDDEEEEDNESRSWRR

SEQ ID NO: 77567 - protein, 157 aa, Homo sapiens
MYQVIQGIISPVNDTYGKKDLAASHHRVAMARLALQTSDWIRVDPWESEQAQWMETVKVLRHHHSKLLRSPPQMEGPDHGKALFSTPAGILKRILQTLFEHLTGTDSGLRLRTETASPSPHLKLETGYEWRWPNRNSSSLQLPARAIQKTGDFCISN

SEQ ID NO: 77568 - protein, 234 aa, Homo sapiens
MGAPAASLLLLLLLFACCWAPGGANLSQDDSQPWTSDETVVAGGTVVLKCQVKDHEDSSLQWSNPAQQTLYFGEKRALRDNRIQLVTSTPHELSISISNVALADEGEYTCSIFTMPVRTAKSLVTVLGIPQKPIITGYKSSLREKDTATLNCQSSGSKPAARLTWRKGDQELHGEPTRIQEDPNDTPTAMIRPDPPHPREGQKLLLHCEGRGNPVPQQYLWEKEGSVPPLKMTQ

SEQ ID NO: 77569 - protein, 215 aa, Homo sapiens
MADMQNLVERLERAVGRLEAVSHTSDMHRGYADSPSKAGAAPYVQAFDSLLAGPVAEYLKISKEIGGDVQKHAEMVHTGLKLERALLVTASQCQQPAENKLSDLLAPISEQIKEVITFREKNRGSKLFNHLSAVSESIQALGWVAMAPKPGPYVKEMNDAAMFYTNRVLKEYKDVDKKHVDWVKAYLSIWTELQAYIKEFHTTGLAWSKTGPVAK

SEQ ID NO: 77570 - protein, 767 aa, Homo sapiens
MATEGGKTSEPENNNKKPKTSGSQDSQPSPLALLAATCSKIGTPGENQATGQQQIIIDPSQGLVQLQNQPQQLELVTTQLAGNAWQLVASTPPASKENNVSQPASSSSSSSSSNNGSASPTKTKSGNSSTPGQFQVIQVQNPSGSVQYQVIPQLQTVEGQQIQINPTSSSSLQDLQGQIQLISAGNNQAILTAANRTASGNILAQNLANQTVPVQIRPGVSIPLQLQTLPGTQAQVVTTLPINIGGVTLALPVINNVAAGGGTGQVGQPAATADSGTSNGNQLVSTPTNTTTSASTMPESPSSSTTCTTTASTSLTSSDTLVSSADTGQYASTSASSSERTIEESQTPAATESEAQSSSQLQPNGMQNAQDQSNSLQQVQIVGQPILQQIQIQQPQQQIIQAIPPQSFQLQSGQTIQTIQQQPLQNVQLQAVNPTQVLIRAPTLTPSGQISWQTVQVQNIQSLSNLQVQNAGLSQQLTITPVSSSGGTTLAQIAPVAVAGAPITLNTAQLASVPNLQTVSVANLGAAGVQVQGVPVTITSVAGQQQGQDGVKVQQATIAPVTVAVGGIANATIGAVSPDQLTQVHLQQGQQTSDQEVQPGKRLRRVACSCPNCREGEGRGSNEPGKKKQHICHIEGCGKVYGKTSHLRAHLRWHTGERPFICNWMFCGKRFTRSDELQRHRRTHTGEKRFECPECSKRFMRSDHLSKHVKTHQNKKGGGTALAIVTSGELDSSVTEVLGSPRIVTVAAISQDSNPATPNVSTNMEEF

SEQ ID NO: 77571 - protein, 113 aa, Homo sapiens
MTQDRPLLAVQEALKKCFPVVEEQQGLWQSALRDCQPLLSSLSNLAEQLQAAQNLRFEDVPALRAFPDLKERLRRKQLVAGDIVLDKLGERLAILLKVRDMVSSHVERVFQIY

SEQ ID NO: 77572 - protein, 182 aa, Homo sapiens
  MOD_RES (1)..(1): Any amino acid
XPVDKVAAMREFRVLHTALHSSSSYREAVFKMLSNKESLDQIIVATPGLSSDPIALGVLQDKDLFSVFADPNMLDTLVPAHPALVNAIVLVLHSVAGSAPMPGTDSSSRSMPSSSYRDMPGGFLFEGLSDDEDDFHPSQWQPQLQQLRDMGIQDDELSLRALQATGGDIQAALELIFAGGAP

SEQ ID NO: 77573 - protein, 67 aa, Homo sapiens
MNGHISNHPSSFGMYPSQMNGYGSSPTFSQTDREHGSKTSAKALYEQRKNYARDSVSSVSDISQYRV

SEQ ID NO: 77574 - protein, 643 aa, Homo sapiens
MNEENMTELLSSGLKNDYNKETFTLKHKIDEQMFPCRFIKIVPLLSWGPSFNFSIWYVELSGIDDPDIVQPCLNWYSKYREQEAIRLCLKHFRQHNYTEAFESLQKKTKIALEHPMLTDIHDKLVLKGDFDACEELIEKAVNDGLFNQYISQQEYKPRWSQIIPKSTKGDGEDNRPGMRGGHQMVIDVQTETVYLFGGWDGTQDLADFWAYSVKENQWTCISRDTEKENGPSARSCHKMCIDIQRRQIYTLGRYLDSSVRNSKSLKSDFYRYDIDTNTWMLLSEDTAADGGPKLVFDHQMCMDSEKHMIYTFGGRILTCNGSVDDSRASEPQFSGLFAFNCQCQTWKLLREDSCNAGPEDIQSRIGHCMLFHSKNRCLYVFGGQRSKTYLNDFFSYDVDSDHVDIISDGTKKDSGMVPMTGFTQRATIDPELNEIHVLSGLSKDKEKREENVRNSFWIYDIVRNSWSCVYKNDQAAKDNPTKSLQEEEPCPRFAHQLVYDELHKVHYLFGGNPGKSCSPKMRLDDFWSLKLCRPSKDYLLRHCKYLIRKHRFEEKAQVDPLSALKYLQNDLYITVDHSDPEETKEFQLLASALFKSGSDFTALGFSDVDHTYAQRTQLFDTLVNFFPDSMTPPKGNLVDLITL

SEQ ID NO: 77575 - protein, 319 aa, Homo sapiens
MVAQAWRTSMRKQREEACFRFLIVLGCLILAVLTTFKEYETVSGDWLLLLETFAIFIFGAEFALRIWAAGCCCRYKGWRGRLKFARKPLCMLDIFVLIASVPVVAVGNQGNVLATSLRSLRFLQILRMLRMDRRGGTWKLLGSAICAHSKELITAWYIGFLTLILSSFLVYLVEKDVPEVDAQGEEMKEEFETYADALWWGLITLATIGYGDKTPKTWEGRLIAATFSLIGVSFFALPAGILGSGLALKVQEQHRQKHFEKRRKPAAELIQAAWRYYATNPNRIDLVATWRFYESVVSFPFFRKEQLEAASRCHRRKSF

SEQ ID NO: 77576 - protein, 349 aa, Homo sapiens
MSLMVVSMACVGLFLVQRAGPHMGNHRKPSLLAHPGPLVKSGERVILQCWSDIMFEHFFLHKEGISKDPSRLVGQIHDGVSKANFSIGPMMLALAGTYRCYGSVTHTSYQLSAPSDPLDIVVTGPYEKPSLSAQPGPKVQAGESVTLSCSSRSSYDMYHLSREGGAHERRLPAVRKVNRTFQADFPLGPATHGGTYRCFGSFRHSPYELSDPSDPLLVSVTGNPSSSWPSPTEPSSKSGNPRHLHVLIGTSVVIILFILLLFFLLHLWYSNKKNAAVMDQEPAGNRTANSEDSDEQDPQEVTYAQLDHCVFTQRKITRPSQRPKTPPTDTILYTELPNAKPRSKVVSCP

SEQ ID NO: 77577 - protein, 382 aa, Homo sapiens
APVVAPPGVVVSRANKRSGAGPGGSGGGGARGAEEEPPPPLQAVLVADSFDRRFFPISKDQPRVLLPLANVALIDYTLEFLTATGVQETFVFCCWKAAQIKEHLLKSKWCRPTSLNVVRIITSELYRSLGDVLRDVDAKALVRSDFLLVYGDVISNINITRALEEHRLRRKLEKNVSVMTMIFKESSPSHPTRCHEDNVVVAVDSTTNRVLHFQKTQGLRRFAFPLSLFQGSSDGVEVRYDLLDCHISICSPQVAQLFTDNFDYQTRDDFVRGLLVNEEILGNQIHMHVTAKEYGARVSNLHMYSAVCADVIRRWVYPLTPEANFTDSTTQSCTHSRHNIYRGPEVITWCWTRPTCGRVFEWRLEHRSISLCFVTMLRSRNE

SEQ ID NO: 77578 - protein, 37 aa, Homo sapiens
MADSGLDKKSTKCPDCSSASQKDVLCVCSSKTRVPPV

SEQ ID NO: 77579 - protein, 70 aa, Homo sapiens
MRALTVQRVKFAMDLPLLKRAGQDLAEKTKNFVSRSLVIGEVLSMADMATGVKCGIIYWLFGGAIRNLGS

SEQ ID NO: 77580 - protein, 584 aa, Homo sapiens
MANGGGGGGGSSGGGGGGGGSSLRMSSNIHANHLSLDASSSSSSSSSSSSSSSSSSSSSSVHEPKMDALIIPVTMEVPCDSRGQRMWWAFLASSMVTFFGGLFIILLWRTLKYLWTVCCHCGGKTKEAQKINNGSSQADGTLKPVDEKEEAVAAEVGWMTSVKDWAGVMISAQTLTGRVLVVLVFALSIGALVIYFIDSSNPIESCQNFYKDFTLQIDMAFNVFFLLYFGLRFIAANDKLWFWLEVNSVVDFFTVPPVFVSVYLNRSWLGLRFLRALRLIQFSEILQFLNILKTSNSIKLVNLLSIFISTWLTAAGFIHLVENSGDPWENFQNNQALTYWECVYLLMVTMSTVGYGDVYAKTTLGRLFMVFFILGGLAMFASYVPEIIELIGNRKKYGGSYSAVSGRKHIVVCGHITLESVSNFLKDFLHKDRDDVNVEIVFLHNISPNLELEALFKRHFTQVEFYQGSVLNPHDLARVKIESADACLILANKYCADPDAEDASNIMRVISIKNYHPKIRIITQMLQYHNKAHLLNIPSWNWKEGDDAICLAELKLGFIAQSCLAQGLSTMLANLFSMRSFIKL

SEQ ID NO: 77581 - protein, 83 aa, Homo sapiens
MTTFLPVPQMMAGFSFGTFGNPPMESPSAWQTIHQPFIVSCLTLWSPGCWPQPIQRKEWDSGTFENLRVLSCAMVETCPSKVP

SEQ ID NO: 77582 - protein, 85 aa, Homo sapiens
MSGVRAVRISIESACEKQVHEVGLDGTETYLPPLSMSQNLARLAQRIDFSQGSGSEEEEAAGTEGDAQEWPGAGSSADQDDEEVS

SEQ ID NO: 77583 - protein, 363 aa, Homo sapiens
  MOD_RES (1)..(1): Any amino acid
XFFPSQRASAGDRSGGHCENFPTATASTWRWRGDSLKAERQGARKSTHIWLFVRGLHGKSGTWWDEHLSEENVPFIKQLVSDEDKAQLASKLCPLKDEPWPIHPWEPGSFRVGLIALKLGMMPLWTKDGQKHVVTLLQVQDCHVLKYTSKENCNGKMATLSVGGKTVSRFRKATSILEFYRELGLPPKQTVKIFNITDNAAIKPGTPLYAAHFRPGQYVDVTAKTIGKGFQGVMKRWGFKGQPATHGQTKTHRRPGAVATGDIGRVWPGTKMPGKMGNIYRTEYGLKVWRINTKHNIIYVNGSVPGHKNCLVKVKDSKLPAYKDLGKNLPFPTYFPDGDEEELPEDLYDENVCQPGAPSITFA

SEQ ID NO: 77584 - protein, 143 aa, Homo sapiens
MSSRRGSFLSTKLHCSSCLPCPLSFEKFKPSEKLQEHENFAKDLEMFARHAKRTTINTEDVKLLARRSNSLHMQEAAGIRKSSLLTFLAWWFEWTSQASAGPLIGEEAREVARRQEGAPPQQSARRDRMPCRNFFWKTFSSCK

SEQ ID NO: 77585 - protein, 191 aa, Homo sapiens
EPLPGQVCSTFTLCLHYRNQRFRSKPVPCACEPDFHDGFLLEVHRESLGDGTRMADSTTMLSISDPIHMVLIKTDIFGETTLVASYFLEWRSVLGSENGVTSLTVELMGVGTESKVSVGILNIKLEMYPPLNQTLSQEVVNTQLALERQKTAEKERLFLVYAKQWWREYLQIRPSHNSRLVKIFAQVCKLY

SEQ ID NO: 77586 - protein, 211 aa, Homo sapiens
MRWAAATLRGKARPRGRAGVTTPAPGNRTGTCAKLRLPPQATFQVLRGNGASVGTVLMFRCPSNHQMVGSGLLTCTWKGSIAEWSSGSPVCKLVPPHETFGFKVAVIASIVSCAIILLMSMAFLTCCLLKCVKKSKRRRSNRDHGESTSKLASVTRSVDKDPGIPRALSLSGSSSSPQAQVMVHMANPRQPLPASGLATGMPQQPAAYALG

SEQ ID NO: 77587 - protein, 66 aa, Homo sapiens
MFNSKFGSIPKFYVRAPGRVNIIGEHIDYCGYSVLPMAVEQDVLIAVEPVKTYALQLANTNPLYPK

SEQ ID NO: 77588 - protein, 30 aa, Homo sapiens
  MOD_RES (1)..(1): Any amino acid
XEKVADAMKQMQEKKNVGKVLLVPGPEKEN

SEQ ID NO: 77589 - protein, 88 aa, Homo sapiens
  MOD_RES (1)..(1): Any amino acid
XFDFIVRYFFAALTVLTLLGLLHGLVLLPVLLSILGPPPEVIQMYKESPEILSPPAPQGGGLRVGSLQVNISYWKELLWCQDLRPEEI

SEQ ID NO: 77590 - protein, 45 aa, Homo sapiens
MKFGCLSFRQPYAGFVLNGIKTVETRWRPLLSSQRNCTIAVHIAH

SEQ ID NO: 77591 - protein, 56 aa, Homo sapiens
HVSLRLDKEHLVNISGGPMTYSHRLEEIRLHFGSEDSQGSEHLLNGQAFSGEEKVC

SEQ ID NO: 77592 - protein, 154 aa, Homo sapiens
MGSRASTLLRDEELEEIKKETGFSHSQITRLYSRFTSLDKGENGTLSREDFQRIPELAINPLGDRIINAFFPEGEDQVNFRGFMRTLAHFRPIEDNEKSKDVNGPEPLNSRSNKLHFAFRLYDLDKDEKISRDELLQVLEKVDVEQKMSIRFLH

SEQ ID NO: 77593 - protein, 633 aa, Homo sapiens
MFPCPACQGDVELGERGLAGLFRNLTLERVVERYRQSVSVGGAILCQLCKPPPLEATKGCTECRATFCNECFKLFHPWGTQKAQHEPTLPTLSFRPKGLMCPDHKEEVTHYCKTCQRLVCQLCRVRRTHSGHKITPVLSAYQALKDKLTKSLTYILGNQDTVQTQICELEEAVRHTEVSGQQAKEEVSQLVRGLGAVLEEKRASLLQAIEECQQERLARLSAQIQEHRSLLDGSGLVGYAQEVLKETDQPCFVQAAKQLHNRIARATEALQTFRPAASSSFRHCQLDVGREMKLLTELNFLRVPEAPVIDTQRTFAYDQIFLCWRLPPHSPPAWHYTVEFRRTDVPAQPGPTRWQRREEVRGTSALLENPDTGSVYVLRVRGCNKAGYGEYSEDVHLHTPPAPVLHFFLDSRWGASRERLAISKDQRAVRSVPGLPLLLAADRLLTGCHLSVDVVLGDVAVTQGRSYWACAVDPASYLVKVGVGLESKLQESFQGAPDVISPRYDPDSGHDSGAEDATVEASPPFAFLTIGMGKILLGSGASSNAGLTGRDGPTAGCTVPLPPRLGICLDYERGRVSFLDAVSFRGLLECPLDCSGPVCPAFCFIGGGAVQLQEPVGTKPERKVTIGGFAKLD

SEQ ID NO: 77594 - protein, 276 aa, Homo sapiens
MGLLVFVRNLLLALCLFLVLGFLYYSAWKLHLLQWEEDSNSVVLSFDSAGQTLGSEYDRLGFLLNLDSKLFSKPAPMFLDDSFRKWARIREFVPPFGIKGQDNLIKAILSVTKEYRLTPALDSLRCRRCIIVGNGGVLANKSLGSRIDDYDIVVRLNSAPVKGFEKDVGSKTTLRITYPEGAMQRPEQYERDSLFVLAGFKWQDFKWLKYIVYKERVSASDGFWKSVATRVPKEPPEIRILNPYFIQEAAFTLIGLPFNNGLMGRGCGSDHGTTRL

SEQ ID NO: 77595 - protein, 249 aa, Homo sapiens
MERPQPDSMPQDLSEALKEATKEVHTQAENAEFMRNFQKGQVTRDGFKLVMASLYHIYVALEEEIERNKESPVFAPVYFPEELHRKAALEQDLAFWYGPRWQEVIPYTPAMQRYVKRLHEVGRTEPELLVAHAYTRYLGDLSGGQVLKKIAQKALDLPSSGEGLAFFTFPNIASATKFKQLYRSRMNSLEMTPAVRQRVIEEAKTAFLLNIQILPPWRLPEGSPHSTPAPRLRFSDGSLHSAFWWRQLL

SEQ ID NO: 77596 - protein, 585 aa, Homo sapiens
MDRCKHVGRLRLAQDHSILNPQKWCCLECATTESVWACLKCSHVACGRYIEDHALKHFEETGHPLAMEVRDLYVFCYLCKDYVLNDNPEGDLKLLRSSLLAVRGQKQDTPVRRGRTLRSMASGEDVVLPQRAPQGQPQMLTALWYRRQRLLARTLRLWFEKSSRGQAKLEQRRQEEALERKKEEARRRRREVKRRLLEELASTPPRKSARLLLHTPRDAGPAASRPAALPTSRRVPAATLKLRRQPAMAPGVTGLRNLGNTCYMNSILQVLSHLQKFRECFLNLDPSKTEHLFPKATNGKTQLSGKPTNSSATELSLRNDRAEACEREGFCWNGRASISRSLELIQNKEPSSKHISLCRELHTLFRVMWSGKWALVSPFAMLHSVWSLIPAFRGYDQQDAQEFLCELLHKVQQELESEGTTRRILIPFSQRKLTKQVLKVVNTIFHGQLLSQVTCISCNYKSNTIEPFWDLSLEFPERYHCIEKGFVPLNQTECLLTEMLAKFTETEALEGRIYACDQCNSKRRKSNPKPLVLSEARKQLMIYRLPQVLRLHLKRFRWSGRNHREKIGVHVVFDQVFGSTAMTQS

SEQ ID NO: 77597 - protein, 94 aa, Homo sapiens
  MOD_RES (1)..(1): Any amino acid
XTNLTFGDVANKATLCSMKGCMRALVAQLKSESEDLQQVIASVLRNLSWRADVNSKKTLREVGSVKALMECALEVKKMALQKQFHGLFVSILLI

SEQ ID NO: 77598 - protein, 312 aa, Homo sapiens
MSMSPTVIILACLGFFLDQSVWAHVGGQDKPFCSAWPSAVVPQGGHVTLRCHCRRGFNIFTLYKKDGVPVPELYNRIFWNSFLISPVTPAHAGTYRCRGFHPHSPTEWSAPSNPLVIMVTGLYEKPSLTARPGPTVRAGENVTLSCSSQSSFDIYHLSREGEAHELRLPAVPSINGTFQADFPLGPATHGETYRCFGSFHGSPYEWSDPSDPLPVSVTGNPSSSWPSPTEPSFKTGIARHLHAVIRYSVAIILFTILPFFLLHRWCSKKKSKPHEAEARELRALCGSRMGARRCCCNEPRACGTQNSEQGGL

SEQ ID NO: 77599 - protein, 187 aa, Homo sapiens
MVSKSDQLLIVVSILEGRHFPKRPKHMLVVEAKFDGEQLATDPVDHTDQPEFATELAWEIDRKALHQHRLQRTPIKLQCFALDPVTSAKETIGYIVLDLRTAQETKQAPKWYQLLSNKYTKFKSEIQISIALETDTKPPVDSFKAKGAPPRDGKGSHSVTQAGVQWCDLGLPQPRLPGSSDSPASAS

SEQ ID NO: 77600 - protein, 187 aa, Homo sapiens
MSRLRALLGLGLLVAGSRVPRIKSQTIACRSGPTWWGPQRLNSGGRWDSEVMASTVVKYLSQEEAQAVDQELFNEYQFSVDQLMELAGLSCATAIAKGYEPTIYYPKRPNKPLFTALVTQCQKMDIPFLGEMPAEPMTIDELYELVVDAIFGFSFKGDVREPFHSILSVLKGLTVPIASIDIPSAGW

SEQ ID NO: 77601 - protein, 53 aa, Homo sapiens
MRLTRCQAALAAAITLNLLVLFYVSWLQHQPRNSRARGPRRASAAGPRVTVLV

SEQ ID NO: 77602 - protein, 38 aa, Homo sapiens
RDVSPNVIHQKKLRLGEGTSLVQDHRALAELEFEAPLA

SEQ ID NO: 77603 - protein, 53 aa, Homo sapiens
MARGQQKIQSQQKNAKKQAGQKKKQGHDQKAAAKAALIYTCTVCRKSKLTNGN

SEQ ID NO: 77604 - protein, 293 aa, Homo sapiens
MKNFSESPKFRSLHFLNFPVFPERTQNSMACKRLLHTCQYIVPRCSVSTVSFDEESYEEFRSSPAPSSETDEAPLIFTARGETEERARGAPKQAWNSSFLEQLVKKPNWAHSVNPVHLEAQGIHISRHTRPKGQPLSSPKKNSGSAARPSTAIGLCRRSQTPGALQSTGPSNTELEPEERMAVPAGAQAHPDDIQSRLLGASGNPVGKGAVAMAPEMLPKHPHTPRDRRPQADTSLHGNLAGAPLPLLAGASTHFPSKRLIKVCSSAPPRPTRRFHTVCSQALSRPVVNAHLH

SEQ ID NO: 77605 - protein, 240 aa, Homo sapiens
MFRMLNSSFEDDPFFSVGLCSFKGFAGDITTISVKLMHTDVSSFQTMDQMVSNMRNYMQKLERNFGQLSVDPNGHSFCSSSVMTYSKIGDEPPKVFQASTQTRRAPGGIKETRKAMRDSDSGLEKMAIGHHIHDRAHVIKKSKNKKTGDEEVNQEFINMNESDAHAFDEEWQSEVLKYKPGRHNLGNTRMRSVGHENPGSRELKRREKPQQSPAIEHGRRSNVLGDKLHIKGSSVKSNKK

SEQ ID NO: 77606 - protein, 509 aa, Homo sapiens
  MOD_RES (1)..(1): Any amino acid
XGAQPGSGENTASVLQKDHYLDSSWRTENGLIPWTLDNTISEENRAVIEKMLLEEEYYLSKKSQPEKVWLDQKEDDKKYMKSLQKTAKIMVHSPTKPASYSVKWTIEEKELFEQGLAKFGRRWTKISKLIGSRTVLQVKSYARQYFKNKVKCGLDKETPNQKTGHNLQVKNEDKGTKAWTPSCLRGRADPNLNAVKIEKLSDDEEVDITDEVDELSSQTPQKNSSSDLLLDFPNSKMHETNQGEFITSDSQEALFSKSSRGCLQNEKQDETLSSSEITLWTEKQSNGDKKSIELNDQKFNELIKNCNKHDGRGIIVDARQLPSPEPCEIQKNLNDNEMLFHSCQMVEESHEEEELKPPEQEIEIDRNIIQEEEKQAIPEFFEGRQAKTPERYLKIRNYILDQWEICKPKYLNKTSVRPGLKNCGDVNCIGRIHTYLELIGAINFGCEQAVYNRPQTVDKVRIRDRKDAVEAYQLAQRLQSMRTRRRRVRDPWGNWCDAKDLEGQTFELV

SEQ ID NO: 77607 - protein, 161 aa, Homo sapiens
MSSVQSQQEQLSQSDPSPSPNSCSSFELIDMDAGSLYEPVSPHWFYCKIIDSKETWIPFNSEDSQQLEEAYSSGCNGRVVPTDGGRYDVHLGERMRYAVYWDELASEVRRCTWFYKGDKDNKYVPYSESFSQVLEETYMLAVTLDEWKKKLESPNREIIIL

SEQ ID NO: 77608 - protein, 199 aa, Homo sapiens
ATWTTRGFVFTRHSQTTAIPSCPEGTVPLYSGFSFLFVQGNQRAHGQDLGTLGSCLQRFTTMPFLFCNVNDVCNFASRNDYSYWLSTPALMPMNMAPITGRALEPYISRCTVCEGPAIAIAVHSQTTDIPPCPHGWISLWKGFSFIMKAYSINCESWGIRKNNKSLSGVHEEKTLKLKKTAELLFFILKNKVMTEHAVI

SEQ ID NO: 77609 - protein, 192 aa, Homo sapiens
MELIQDISRPPLEYVKGVPLIKYFAEALGPLQSFQARPDDLLISTYPKSGTTWVSQILDMIYQGGDLEKCHRAPIFMRVPFLEFKVPGIPSGMETLKNTPAPRLLKTHLPLALLPQTLLDQKVKVVYVARNAKDVAVSYYHFYHMAKVYPHPGTWESFLEKFMAGEVSYGSWYQHVQEWWELSRTHPVLYLF

SEQ ID NO: 77610 - protein, 115 aa, Homo sapiens
  MOD_RES (1)..(1): Any amino acid
XAIGADSARFEELLLQASKELQQAQTTRPESTQIQPQPGFCIKTNSSEGKVFINICHSPSIPPPADVTEEELLQMLEEDQAGFRIPMSLGEPHAELDAKQRFLAGARDHHRQGGP

SEQ ID NO: 77611 - protein, 259 aa, Homo sapiens
MKEINLLPDRVLSTPSVQLVQSWYVQSLLDIMEFLDKDPEDHRTLSQFTDALVTIRNRHNDVVPTMAQGVLEYKDTYGDDPVSNQNIQYFLDRFYLSRISIRMLINQHTLIFDGSTNPAHPKHIGSIDPNCNVSEVVKDAYDMAKLLCDKYYMASPDLEIQEINAANSKQPIHMVYVPSHLYHMLFELFKNAMRATVESHESSLILPPIKVMVALGEEDLSIKMSDRGGGVPLRKIERLFSYMYSTAPTPQPGTGGTPL

SEQ ID NO: 77612 - protein, 293 aa, Homo sapiens
MLVKHKETGNHYAMKILDKQKVVKLKQIEHTLNEKRILQAVNFPFLVKLEFSFKDNSNLYMVMEYVPGGEMFSHLRRIGRFSEPHARFYAAQIVLTFEYLHSLDLIYRDLKPENLLIDQQGYIQVTDFGFAKRVKGRTWTLCGTPEYLAPEIILSKGYNKAVDWWALGVLIYEMAAGYPPFFADQPIQIYEKIVSGKVRFPSHFSSDLKDLLRNLLQVDLTKRFGNLKNGVNDIKNHKWFATTDWIAIYQRKVEAPFIPKFKGPGDTSNFDDYEEEEIRVSINEKCGKEFSEF

SEQ ID NO: 77613 - protein, 190 aa, Homo sapiens
MADKQISLPAKLINGGIAGLIGVTCVFPIDLAKTRLQNQQNGQRVYTSMSDCLIKTVRSEGYFGMYRGAAVNLTLVTPEKAIKLAANDFFRHQLSKDGQKLTLLKEMLAGCGAGTCQVIVTTPMEMLKIQLQDAGRIAAQRKILAAQGQLSAQGGAQPSVEAPAAPRPTATQLTRDLLRSRGIAGLYKGL

SEQ ID NO: 77614 - protein, 167 aa, Homo sapiens
MFISLWEFFYGHFFRFWMKWLLRQMTGKCELQRIFDTYVGAQRTHRIENSLTYSKNKVLQKATHVVQSEVDKYVDDIMKEKNINPEKDASFKICMKMCLLQITGYKQLYLDVESVRKRPYDSDNLQHEELLMKLWNLLMPTKKLNARISKQWAEIGFQGDDPKTDFR

SEQ ID NO: 77615 - protein, 84 aa, Homo sapiens
MGSQHSAAARPSSCRRKQEDDRDGLLAEREQEEAIAQFPYVEFTGRDSITCLTCQGTGYIPTEQVNELVALIPHSDQRLRPQRT

SEQ ID NO: 77616 - protein, 22 aa, Homo sapiens
  MOD_RES (1)..(1): Any amino acid
XGSSNTGKLIFGQGTTLQVKPG

SEQ ID NO: 77617 - protein, 195 aa, Homo sapiens
AFHVCAAILECLEKRKISWLALFQLTESDLRLGRLLLRVAPDQHTRLLPFAFYSLLSYFHEDAAIREEAFLHVAVDMYLKLVQLFVAGDTSTVSPPAGRSLELKGQAGARASPTSRGAPPSRRLLLPKNVPAQHADYGGHTSPVSLIPRCPKKSFSHVAELLADRGDCDPEVSAALQSRQQAAPDADLSQEPHLF

SEQ ID NO: 77618 - protein, 79 aa, Homo sapiens
  MOD_RES (1)..(1): Any amino acid
XKTHKFRLHVTALDYLAPYAKYKVWIKPGAEQSFLYGNHVLKSGLGRITENTSQYQGVVVYSMADIPLTLGNMCGMKRR

SEQ ID NO: 77619 - protein, 66 aa, Homo sapiens
MGEEDYYLELCERPVQFEKANPVNCVFFDEANKQVFAVRSGGATGVVVKGPDDRNPISFRLRMPTF

SEQ ID NO: 77620 - protein, 128 aa, Homo sapiens
DRITVRSDEEMKAMLSYYYSTVMEQQVNGQLIEPLQIFPRACKPPGERNIHGLKVNTRAGPSQHSSPAVSDSLPSNSLKKSSAELKKILANGQMNEQDIRYRDTLGHGNGGTVYKAYHVPSGKILAVK

SEQ ID NO: 77621 - protein, 162 aa, Homo sapiens
MDHTSPTYMLANLTHLHSEQLLQGLNLLRQHHELCDIILRVGDVKIHAHKVVLASVSPYFKAMFTGNLSEKENSEVEFQCIDETALQAIVEYAYTGTVFISQDTVESLLPAANLLQIKLVLKECCAFLESQLDPGNCIGISRFAETYGCRDLYLAATKYICQ

SEQ ID NO: 77622 - protein, 51 aa, Homo sapiens
MSKPHSEAGTAFIQTQQLHAAMADTFLEHMCRLDIDSPPITARNTGIICTI

SEQ ID NO: 77623 - protein, 400 aa, Homo sapiens
MDSLGAVSTRLGFDLFKELKKTNDGNIFFSPVGILTAIGMVLLGTRGATASQLEEVFHSEKETKSSRIKAEEKEVVRIKAEGKEIENTEAVHQQFQKFLTEISKLTNDYELNITNRLFGEKTYLFLQKYLDYVEKYYHASLEPVDFVNAADESRKKINSWVESKTNEKIKDLFPDGSISSSTKLVLVNMVYFKGQWDREFKKENTKEEKFWMNKSTSKSVQMMTQSHSFSFTFLEDLQAKILGIPYKNNDLSMFVLLPNDIDGLEKIIDKISPEKLVEWTSPGHMEERKVNLHLPRFEVEDGYDLEAVLAAMGMGDAFSEHKADYSGMSSGSGLYAQKFLHSSFVAVTEEGTEAAAATGIGFTVTSAPGHENVHCNHPFLFFIRHNESNSILFFGRFSSP

SEQ ID NO: 77624 - protein, 94 aa, Homo sapiens
MADGGSPFLGRRDFVYPSSTRDPSASNGGGSPARREEKKRKAARLKFDFQAQSPKELTLQKGDIVYIHKEVDKNWLEGEHHGRLGIFPANYVEV

SEQ ID NO: 77625 - protein, 225 aa, Homo sapiens
GIGTAIGELPPYFMARAARLSGAEPDDEEYQEFEEMLEHAESAQDFASRAKLAVQKLVQKVGFFGILACASIPNPLFDLAGITCGHFLVPFWTFFGATLIGKAIIKMHIQKIFVIITFSKHIVEQMVAFIGLEDNGALQPPPPSAVPGIGPSLQKPFQEYLEAQRQKLHHKSEMGTPQGENWLSWMFEKLVVVMVCYFILSIINSMAQSYAKRIQQRLNSEEKTK

SEQ ID NO: 77626 - protein, 184 aa, Homo sapiens
MTDFLEVNRQELGRWLQEEPGAFNWSMYSQHACLIEGKGECWQDKERQLRARVKRVLPIDVHQPQPLGAGSPAPLPADALVSAFCLEAVSPDLASFQRALDHITTLLRPGGHLLLIGALEESWYLAGEARLTVVPVSEEEVREALVRSGYKVRDLRTYIMPAHLQTGVDDVKGVFFAWAQKVGL

SEQ ID NO: 77627 - protein, 170 aa, Homo sapiens
METFHTPSLGDEEFEIPPISLDSDPSLAVSDVVGHFDDLADPSSSQDGSFSAQYGVQTLDMPVGMTHGLMEQGGGLLSGGLTMDLDHSIGTQYSANPPVTIDVPMTDMTSGLMGHSQLTTIDQSELSSQLGLSLGGGTILPPAQSPEDRLSTTPSPTSSLHEDGVEDFRR

SEQ ID NO: 77628 - protein, 184 aa, Homo sapiens
MEGPLTPPPLQGGGAAAVPEPGARQHPGHETAAQRYSARLLQAGYEPESDFLILPGFIDFIADEVDLTSALTRKITLKTPLISSPMDTVTEADMAIAMAKFEQGFITDPVVLSPSHTVGDVLEAKMRHGFSGIPITETGTMGSKLVGIVTSRDIDFLAEKDHTTLLSEVMTPRIELVVAPAGVT

SEQ ID NO: 77629 - protein, 72 aa, Homo sapiens
MSWSFLTRLLEEIHNHSTFVGKIWLTVLIVFRIVLTAVGGESIYYDEQSKFVCNTEQPGCENVCYDAFAPLS

SEQ ID NO: 77630 - protein, 144 aa, Homo sapiens
MRTLEDSSGTVLHRLIQEQLRYGNLTETRTLLAIQQQALRGGAGTGGTGSPQASLEILAPEDSQVLQQATRQEPQGQEHQGGENHLAENTLYRLCPQPSKGEELPTYEEAKAHSQYYAAQQAGTRPHAGDRDPRGAPGGSRRQD

SEQ ID NO: 77631 - protein, 654 aa, Homo sapiens
MHSMISSVDVKSEVPVGLEPISPLDLRTDLRMMMPVVDPVVREKQLQQELLLIQQQQQIQKQLLIAEFQKQHENLTRQHQAQLQEHIKELLAIKQQQELLEKEQKLEQQRQEQEVERHRREQQLPPLRGKDRGRERAVASTEVKQKLQEFLLSKSATKDTPTNGKNHSVSRHPKLWYTAAHHTSLDQSSPPLSGTSPSYKYTLPGAQDAKDDFPLRKTASEPNLKVRSRLKQKVAERRSSPLLRRKDGNVVTSFKKRMFEVTESSVSSSSPGSGPSSPNNGPTGSVTENETSVLPPTPHAEQMVSQQRILIHEDSMNLLSLYTSPSLPNITLGLPAVPSQLNASNSLKEKQKCETQTLRQGVPLPGQYGGSIPASSSHPHVTLEGKPPNSSHQALLQHLLLKEQMRQQKLLVAGGVPLHPQSPLATKERISPGIRGTHKLPRHRPLNRTQSAPLPQSTLAQLVIQQQHQQFLEKQKQYQQQIHMNKRTTVPLSPRAHLHSLRVHLLDKSILTGAPATLAPSLIFEESPSTSRSCASHYFVWKAQPPRLLTLLSKSIEQLKQPGSHLEEAEEELQGDQAMQEDRAPSSGNSTRSDSSACVDDTLGQVGAVKVKEEPVDSDEDAQIQEMESGEQAAFMQQVIGKDLAPGFVIKVII

SEQ ID NO: 77632 - protein, 124 aa, Homo sapiens
  MOD_RES (1)..(1): Any amino acid
XALRRAAEERHQAGRREVEALRLWTQLQELRREHARLQRRLKRLEPCARLLEQALELLPGESKWIQIQNTAAEKTLLLGRSRMAVLNLFQLVCQHQGQPPTLDIEDTEGQLEHVKLFMQDLSAM

SEQ ID NO: 77633 - protein, 127 aa, Homo sapiens
MLETCGLLVALGDSTKPETVEPIPSHLALPEEVSLQEQLAQGVPRYSYLGQAMDQDGPSEMQEYFLRPGTDPQSEKLHGKMSLEHEGLATADGICSMMIQNQVSPEDALYGFDSYGPVTDSLIHEGE

SEQ ID NO: 77634 - protein, 75 aa, Homo sapiens
MAELQMLLEEEIPGGRRALFDSYTNLERVADYCENNYIQRWGLGMSCRLECSGVIIAHCSLELLCSSDHPASVSQ

SEQ ID NO: 77635 - protein, 81 aa, Homo sapiens
MTTASTSQVRQNYHQDSEAAINRQINLELYASYVYLSMPTGTPGHQGQKKSHRKIIPGRTLYVPDDLEESLPLSGPQFPCL

SEQ ID NO: 77636 - protein, 87 aa, Homo sapiens
MSENELDTTLHLKCKLGMKSILPIFRCLNSLERNIEKCRIFTRSDKCKVVIQFFYRHATWMELEVTMLSEISQAWKVKYCMFSQCGR

SEQ ID NO: 77637 - protein, 182 aa, Homo sapiens
MAAAPALKHWRTTLERVEKFVSPLYFTDCNLRGRWWTCWFRVELTIPEAWVGQEVHLCWESDGEGLVWRDGEPVQGLTKEGEKTSYVLTDRLGERDPRSLTLYVEVACNGLLGAGKGSMIAAPDPEKMFQLSRAELAVFHRDVHMLLVDLELLLGIAKGLGKDNQRSFQALYTANQMVNVCD

SEQ ID NO: 77638 - protein, 56 aa, Homo sapiens
MEEYAREPCPWRIVDDCGGAFTMGVIGGGVFQAIKGFRNAPVRRGFNVLLRLVSNS

SEQ ID NO: 77639 - protein, 194 aa, Homo sapiens
MAAEEMHWPVPMKAIGAQNLLTMPGGVAKAGYLHKKGGTQLQLLKWPLRFVIIHKRCVYYFKSSTSASPQGAFSLSGYNRVMRAAEETTSNNVFPFKIIHISKKHRTWFFSASSEEERKSWMALLRREIGHFHEKKDLPLDTSDSSSDTDSFYGAVERPVDISLSPYPTDNEDYEHDDEDDSYLEPDSPEPGRL

SEQ ID NO: 77640 - protein, 174 aa, Homo sapiens
  MOD_RES (1)..(1): Any amino acid
XCAATMASSDEDGTNGGASEAGEDREAPGERRRLGVLATAWLTFYDIAMTAGWLVLAIAMVRFYMEKGTHRGLYKSIQKTLKFFQTFALLEIVHCLIGIVPTSVIVTGVQVSSRIFMVWLITHSIKPIQNEESVVLFLVAWTVTEITRYSFYTFSLLDHLPYFIKWARWRYLAV

SEQ ID NO: 77641 - protein, 128 aa, Homo sapiens
MMYNEIGEAKKITERFIDPDKELEIMILNDSASAASSMEVTDRIASLEQRVQMQEDDIQLLKSALADVVRRLNITEEQQAVLNRKGPTKARPLMQTLPLRTTVNNGTVLPKKPTGSLPSPSGVRKETA

SEQ ID NO: 77642 - protein, 109 aa, Homo sapiens
MGKKGLQSWEDIDKLNSFPKLEEVRLLGIPLLQPYTTEERRKLVIARLPSVSKLNGSVVTDGEREDSERFFIRYYVDVPQEEVPFRYHELITKYGKLEPLAEVDLRPQS

SEQ ID NO: 77643 - protein, 205 aa, Homo sapiens
MGRKKIQITRIMDERNRQVTFTKRKFGLMKKAYELSVLCDCEIALIIFNSTNKLFQYASTDMDKVLLKYTEYNEPHESRTNSDIVEALNKKENKGCESPDPDSSYALTPRTEEKYKKINEEFDNMIKSHKIPAVPPPNFEMPVSIPVSSHNSLVYSNPVSSLGNPNLLPLAHPSLQRNSMSPGVTHRPPSAGNTGGLMGGDLTSG

SEQ ID NO: 77644 - protein, 326 aa, Homo sapiens
MARRPRHSIYSSDEDDEDFEMCDHDYDGLLPKSGKRHLGKTRWTREENRTDVQCQHRWQKVLNPELIKGPWTKEEDQRVIELVQKYGPKRWSVIAKHLKGRIGKQCRERWHNHLNPEVKKTSWTEEEDRIIYQAHKRLGNRWAEIAKLLPGRTDNAIKNHWNSTMRRKVEQEGYLQESSKASQPAVATSFQKNSHLMGFAQAPPTAQLPATGQPTVNNDYSYYHISEAQNVSSHVPYPVALHVNIVNVPQPAAAAIQRHYNDEDPEKEKRIKELELLLMSTENELKGQQVLPLCGPLLNSDIFSDWAANWDGSLCFATYIVNQQRQ

SEQ ID NO: 77645 - protein, 183 aa, Homo sapiens
  MOD_RES (1)..(1): Any amino acid
XVPEFSLPLEYYLIPFLIIVGICLILIVIFMITKFVQDRHRARRNRLRKDQLKKLPVHKFKKAYHCKCVDPWLTKTKKTCPVCKQKVVPSQGDSDSDTDSSQEENEVTEHTPLLRPLASVSAQSFGALSESRSHQNMTESSDYEEDDNEDTDSSDAENEINEHDVVVQLQPNGERDYNIANTV

SEQ ID NO: 77646 - protein, 125 aa, Homo sapiens
MGRARDAILDALENLTAEELKKFKLKLLSVPLREGYGRIPRGALLSMDALDLTDKLVSFYLETYGAELTANVLRDMGLQEMAGQLQAATHQGGSPRLAYRPTGPRPHGGKGREGDHLAHILPGSG

SEQ ID NO: 77647 - protein, 126 aa, Homo sapiens
MEEMFHKKSEAVRRLVEAAEEAHLKHEFDADLQYEYFNAVLINERDKDGNFLELGKEFILAPNDHFNNLPVNISLSDVQVPTNMYNKDPAIVNGVYWSESLNKVFVDNFDRDPSLIWQYFGSAKGF

SEQ ID NO: 77648 - protein, 203 aa, Homo sapiens
MGWKAESLESATMFLENWKRLQMRLGYFWDLTGIEEEEEHSRPEYETKVREKMLKESNQSAVQKLETNTTECGDEDDEDKLTWKDRFPGYLMNFASILFMIALTFSIVFGVIVYRITTAAALSLNKATRSNVRVTVTATAVIINLVVILILDEIYGAVAKWLTKIEVPKTEQTFEERLILKAFLLKFVNAYSPIFYVAFFKGR

SEQ ID NO: 77649 - protein, 53 aa, Homo sapiens
MGEIKVSPDYNWFRGTVPLKKIIVDDDDSKIWSLYDAGPRSIRCPLIFLPPVS

SEQ ID NO: 77650 - protein, 42 aa, Homo sapiens
MDLPEGPVGGPTAESAPEGETALLAGTPEQLLTHCGSSLTVE

SEQ ID NO: 77651 - protein, 161 aa, Homo sapiens
MTLRCLEPSGNGGEGTRSQWGTAGSAEEPSPQAARLAKALRELGQTGWYWGSMTVNEAKEKLKEAPEGTFLIRDSSHSDYLLTISVKTSAGPTNLRIEYQDGKFRLDSIICVKSKLKQFDSVVHLIDYYVQMCKDKRTGPEAPRNGTVHLYLTKPLYTSAP

SEQ ID NO: 77652 - protein, 126 aa, Homo sapiens
MWYVSTRGVAPRVNFEGALFSGYAPDGGLFMPEELPQLDRGTLCQWSTLSYPGLVKELCALFIGSELLPKDELNDLIDRAFSRFRHREVVHLSRLRNGLNVLELWHGVTYAFKDLSLSCTTQFLQY

SEQ ID NO: 77653 - protein, 87 aa, Homo sapiens
  MOD_RES (1)..(1): Any amino acid
XVSCCIKYFIFGFNVIFWFLGITFLGIGLWAWNEKGVLSNISSITDLGGFDPVWLFLVVGGVMFILGFAGCIGALRENTFLLKFDKQ

SEQ ID NO: 77654 - protein, 185 aa, Homo sapiens
MPPLEQFMEIPSMDRRELFFRDIERGDIVIGRISSIREFGFFMVLICLGSGIMRDIAHLEITALCPLRDVPSHSNHGDPLSYYQTGDIIRAGIKDIDRYHEKLAVSLYSSSLPPHLSGIKLGVISSEELPLYYRRSVELNSNSLESYENVMQSSLGFVNPGVVEFLLEKLGIDESNPPSLMRGLQ

SEQ ID NO: 77655 - protein, 90 aa, Homo sapiens
MAASKKAVLGPLVGAVDQGTSSTRFLVFNSKTAELLSHHQVEIKQEFPREGYWCQQPEGNHCSLGQDNWRASLQCCGPRQAFHLALTSVQ

SEQ ID NO: 77656 - protein, 65 aa, Homo sapiens
MSLPIGIYRRAVSYDDTLEDPAPMTPPPSDMGSVPWKPVIPERKYQHLAKVEEGEASLPSPAMTL

SEQ ID NO: 77657 - protein, 468 aa, Homo sapiens
MDSLASLVLCGVSLLLSVPRHEVPDILEVHLPHAQPQDAGVYSARYIGGNLFTSAFTRLIVRRCEAQKWGPECNHLCTACMNNGVCHEDTGECICPPGFMGRTCEKACELHTFGRTCKERCSGQEGCKSYVFCLPDPYGCSCATGWKGLQCNEGIQRMTPKIVDLPDHIEVNSGKFNPICKASGWPLPTNEEMTLVKPDGTVLHPKDFNHTDHFSVAIFTIHRILPPDSGVWVCSVNTVAGMVEKPFNISVKVLPKPLNAPNVIDTGHNFAVINISSEPYFGDGPIKSKKLLYKPVNHYEAWQHIQVTNEIVTLNYLEPRTEYELCVQLVRRGEGGEGHPGPVRRFTTASIGLPPPRGLNLLPKSQTTLNLTWQPIFPSSEDDFYVEVERRSVQKSDQQNIKVPGNLTSVLLNNLHPREQYVVRARVNTKAQGEWSEDLTAWTLSDILPPQPENIKISNITHSSAVIS

SEQ ID NO: 77658 - protein, 75 aa, Homo sapiens
MAHRGGERDFQTSARRMGTSLLFQLSVHERELDLVFLDHSYAKPWSAHPDASSARPTRMLFVTPRRQHESTISQP

SEQ ID NO: 77659 - protein, 65 aa, Homo sapiens
AAMYEIKVRSIPDHYFKGFWSEWSPSYYFRTPEINNSSGLSLSYGPVSPIIRRLWNIFVRNQEKI

SEQ ID NO: 77660 - protein, 151 aa, Homo sapiens
MELKSPEEEVVAALPEGMRPDSNLYGFPWELVICAAVVGFFAVLFFLWRSFRSVRSRLYVGREKKLALMLSGLIEEKSKLLEKFSLVQKEATCEKLNRSNSELEDEILCLEKELKEEKSKHSEQDELMADISKRIQSLEDESKSLKSQVAE

SEQ ID NO: 77661 - protein, 52 aa, Homo sapiens
MVKSSLQRILNSHCFAREKEGDKPSATIHASRTMPLLSLHSRGGSSSERMIG

SEQ ID NO: 77662 - protein, 45 aa, Homo sapiens
MKKCLLPVLITCMQTAICKDRMMMIMILLVNYRPDEFIECEDPVD

SEQ ID NO: 77663 - protein, 4637 aa, Homo sapiens
MSEPGGGGGEDGSAGLEVSAVQNVADVSVLQKHLRKLVPLLLEDGGEAPAALEAALEEKSALEQMRKFLSDPQVHTVLVERSTLKEDVGDEGEEEKEFISYNINIDIHYGVKSNSLAFIKRTPVIDADKPVSSQLRVLTLSEDSPYETLHSFISNAVAPFFKSYIRESGKADRDGDKMAPSVEKKIAELEMGLLHLQQNIEIPEISLPIHPMITNVAKQCYERGEKPKVTDFGDKVEDPTFLNQLQSGVNRWIREIQKVTKLDRDPASGTALQEISFWLNLERALYRIQEKRESPEVLLTLDILKHGKRFHATVSFDTDTGLKQALETVNDYNPLMKDFPLNDLLSATELDKIRQALVAIFTHLRKIRNTKYPIQRALRLVEAISRDLSSQLLKVLGTRKLMHVAYEEFEKVMVACFEVFQTWDDEYEKLQVLLRDIVKRKREENLKMVWRINPAHRKLQARLDQMRKFRRQHEQLRAVIVRVLRPQVTAVAQQNQGEVPEPQDMKVAEVLFDAADANAIEEVNLAYENVKEVDGLDVSKEGTEAWEAAMKRYDERIDRVETRITARLRDQLGTAKNANEMFRIFSRFNALFVRPHIRGAIREYQTQLIQRVKDDIESLHDKFKVQYPQSQACKMSHVRDLPPVSGSIIWAKQIDRQLTAYMKRVEDVLGKGWENHVEGQKLKQDGDSFRMKLNTQEIFDDWARKVQQRNLGVSGRIFTIESTRVRGRTGNVLKLKVNFLPEIITLSKEVRNLKWLGFRVPLAIVNKAHQANQLYPFAISLIESVRTYERTCEKVEERNTISLLVAGLKKEVQALIAEGIALVWESYKLDPYVQRLAETVFNFQEKVDDLLIIEEKIDLEVRSLETCMYDHKTFSEILNRVQKAVDDLNLHSYSNLPIWVNKLDMEIERILGVRLQAGLRAWTQVLLGQAEDKAEVDMDTDAPQVSHKPGGEPKIKNVVHELRITNQVIYLNPPIEECRYKLYQEMFAWKMVVLSLPRIQSQRYQVGVHYELTEEEKFYRNALTRMPDGPVALEESYSAVMGIVSEVEQYVKVWLQYQCLWDMQAENIYNRLGEDLNKWQALLVQIRKARGTFDNAETKKEFGPVVIDYGKVQSKVNLKYDSWHKEVLSKFGQMLGSNMTEFHSQISKSRQELEQHSVDTASTSDAVTFITYVQSLKRKIKQFEKQVELYRNGQRLLEKQRFQFPPSWLYIDNIEGEWGAFNDIMRRKDSAIQQQVANLQMKIVQEDRAVESRTTDLLTDWEKTKPVTGNLRPEEALQALTIYEGKFGRLKDDREKCAKAKEALELTDTGLLSGSEERVQVALEELQDLKGVWSELSKVWEQIDQMKEQPWVSVQPRKLRQNLDALLNQLKSFPARLRQYASYEFVQRLLKGYMKINMLVIELKSEALKDRHWKQLMKRLHVNWVVSELTLGQIWDVDLQKNEAIVKDVLLVAQGEMALEEFLKQIREVWNTYELDLVNYQNKCRLIRGWDDLFNKVKEHINSVSAMKLSPYYKVFEEDALSWEDKLNRIMALFDVWIDVQRRWVYLEGIFTGSADIKHLLPVETQRFQSISTEFLALMKKVSKSPLVMDVLNIQGVQRSLERLADLLGKIQKALGEYLERERSSFPRFYFVGDEDLLEIIGNSKNVAKLQKHFKKMFAGVSSIILNEDNSVVLGISSREGEEVMFKTPVSITEHPKINEWLTLVEKEMRVTLAKLLAESVTEVEIFGKATSIDPNTYITWIDKYQAQLVVLSAQIAWSENVETALSSMGGGGDAAPLHSVLSNVEVTLNVLADSVLMEQPPLRRRKLEHLITELVHQRDVTRSLIKSKIDNAKSFEWLSQMRFYFDPKQTDVLQQLSIQMANAKFNYGFEYLGVQDKLVQTPLTDRCYLTMTQALEARLGGSPFGPAGTGKTESVKALGHQLGRFVLVFNCDETFDFQAMGRIFVGLCQVGAWGCFDEFNRLEERMLSAVSQQVQCIQEALREHSNPNYDKTSAPITCELLNKQVKVSPDMAIFITMNPGYAGRSNLPDNLKKLFRSLAMTKPDRQLIAQVMLYSQGFRTAEVLANKIVPFFKLCDEQLSSQSHYDFGLRALKSVLVSAGNVKRERIQKIKREKEERGEAVDEGEIAENLPEQEILIQSVCETMVPKLVAEDIPLLFSLLSDVFPGVQYHRGEMTALREELKKVCQEMYLTYGDGEEVGGMWVEKVLQLYQITQINHGLMMVGPSGSGKSMAWRVLLKALERLEGVEGVAHIIDPKAISKDHLYGTLDPNTREWTDGLFTHVLRKIIDSVRGELQKRQWIVFDGDVDPEWVENLNSVLDDNKLLTLPNGERLSLPPNVRIMFEVQDLKYATLATVSRCGMVWFSEDVLSTDMIFNNFLARLRSIPLDEGEDEAQRRRKGKEDEGEEAASPMLQIQRDAATIMQPYFTSNGLVTKALEHAFQLEHIMDLTRLRCLGSLFSMLHQACRNVAQYNANHPDFPMQIEQLERYIQRYLVYAILWSLSGDSRLKMRAELGEYIRRITTVPLPTAPNIPIIDYEVSISGEWSPWQAKVPQIEVETHKVAAPDVVVPTLDTVRHEALLYTWLAEHKPLVLCGPPGSGKTMTLFSALRALPDMEVVGLNFSSATTPELLLKTFDHYCEYRRTPNGVVLAPVQLGKWLVLFCDEINLPDMDKYGTQRVISFIRQMVEHGGFYRTSDQTWVKLERIQFVGACNPPTDPGRKPLSHRFLRHVPVVYVDYPGPASLTQIYGTFNRAMLRLIPSLRTYAEPLTAAMVEFYTMSQERFTQDTQPHYIYSPREMTRWVRGIFEALRPLETLPVEGLIRIWAHEALRLFQDRLVEDEERRWTDENIDTVALKHFPNIDREKAMSRPILYSNWLSKDYIPVDQEELRDYVKARLKVFYEEELDVPLVLFNEVLDHVLRIDRIFRQPQGHLLLIGVSGAGKTTLSRFVAWMNGLSVYQIKVHRKYTGEDFDEDLRTVLRRSGCKNEKIAFIMDESNVLDSGFLERMNTLLANGEVPGLFEGDEYATLMTQCKEGAQKEGLMLDSHEELYKWFTSQVIRNLHVVFTMNPSSEGLKDRAATSPALFNRCVLNWFGDWSTEALYQVGKEFTSKMDLEKPNYIVPDYMPVVYDKLPQPPSHREAIVNSCVFVHQTLHQANARLAKRGGRTMAITPRHYLDFINHYANLFHEKRSELEEQQMHLNVGLRKIKETVDQVEELRRDLRIKSQELEVKNAAANDKLKKMVKDQQEAEKKKVMSQEIQEQLHKQQEVIADKQMSVKEDLDKVEPAVIEAQNAVKSIKKQHLVEVRSMANPPAAVKLALESICLLLGESTTDWKQIRSIIMRENFIPTIVNFSAEEISDAIREKMKKNYMSNPSYNYEIVNRASLACGPMVKWAIAQLNYADMLKRVEPLRNELQKLEDDAKDNQQKANEVEQMIRDLEASIARYKEEYAVLISEAQAIKADLAAVEAKVNRSTALLKSLSAERERWEKTSETFKNQMSTIAGDCLLSAAFIAYAGYFDQQMRQNLFTTWSHHLQQANIQFRTDIARTEYLSNADERLRWQASSLPADDLCTENAIMLKRFNRYPLIIDPSGQATEFIMNEYKDRKITRTSFLDDAFRKNLESALRFGNPLLVQDVESYDPVLNPVLNREVRRTGGRVLITLGDQDIDLSPSFVIFLSTRDPTVEFPPDLCSRVTFVNFTVTRSSLQSQCLNEVLKAERPDVDEKRSDLLKLQGEFQLRLRQLEKSLLQALNEVKGRILDDDTIITTLENLKREAAEVTRKVEETDIVMQEVETVSQQYLPLSTACSSIYFTMESLKQIHFLYQYSLQFFLDIYHNVLYENPNLKGVTDHTQRLSIITKDLFQVAFNRVARGMLHQDHITFAMLLARIKLKGTVGEPTYDAEFQHFLRGNEIVLSAGSTPRIQGLTVEQAEAVVRLSCLPAFKDLIAKVQADEQFGIWLDSSSPEQTVPYLWSEETPATPIGQAIHRLLLIQAFRPDRLLAMAHMFVSTNLGESFMSIMEQPLDLTHIVGTEVKPNTPVLMCSVPGYDASGHVEDLAAEQNTQITSIAIGSAEGFNQADKAINTAVKSGRWVMLKNVHLAPGWLMQLEKKLHSLQPHACFRLFLTMEINPKVPVNLLRAGRIFVFEPPPGVKANMLRTFSSIPVSRICKSPNERARLYFLLAWFHAIIQERLRYAPLGWSKKYEFGESDLRSACDTVDTWLDDTAKGRQNISPDKIPWSALKTLMAQSIYGGRVDNEFDQRLLNTFLERLFTTRSFDSEFKLACKVDGHKDIQMPDGIRREEFVQWVELLPDTQTPSWLGLPNNAERVLLTTQGVDMISKMLKMQMLEDEDDLAYAETEKKTRTDSTSDGRPAWMRTLHTTASNWLHLIPQTLSHLKRTVENIKDPLFRFFEREVKMGAKLLQDVRQDLADVVQVCEGKKKQTNYLRTLINELVKGILPRSWSHYTVPAGMTVIQWVSDFSERIKQLQNISLAAASGGAKELKNIHVCLGGLFVPEAYITATRQYVAQANSWSLEELCLEVNVTTSQGATLDACSFGVTGLKLQGATCNNNKLSLSNAISTALPLTQLRWVKQTNTEKKASVTSSSPWTSKLLQRRILAASTSGVSQSCAQSKLF

SEQ ID NO: 77664 - protein, 57 aa, Homo sapiens
MAAAAARWNHVWVGTETGILKGVNLQRKQAANFTAGGQPRREEAVSALCWGTGGETQ

SEQ ID NO: 77665 - protein, 3920 aa, Homo sapiens
MEDEERQKKLEAGKAKLAQFRQRKAQSDGQSPSKKQKKKRKTSSSKHDVSAHHDLNIDQSQCNEMYINSSQRVESTVIPESTIMRTLHSGEITSHEQGFSVELESEISTTADDCSSEVNGCSFVMRTGKPTNLLREEEFGVDDSYSEQGAQDSPTHLEMMESELAGKQHEIEELNRELEEMRVTYGTEGLQQLQEFEAAIKQRDGIITQLTANLQQARREKDETMREFLELTEQSQKLQIQFQQLQASETLRNSTHSSTAADLLQAKQQILTHQQQLEEQDHLLEDYQKKKEDFTMQISFLQEKIKVYEMEQDKKVENSNKEEIQEKETIIEELNTKIIEEEKKTLELKDKLTTADKLLGELQEQIVQKNQEIKNMKLELTNSKQKERQSSEEIKQLMGTVEELQKRNHKDSQFETDIVQRMEQETQRKLEQLRAELDEMYGQQIVQMKQELIRQHMAQMEEMKTRHKGEMENALRSYSNITVNEDQIKLMNVAINELNIKLQDTNSQKEKLKEELGLILEEKCALQRQLEDLVEELSFSREQIQRARQTIAEQESKLNEAHKSLSTVEDLKAEIVSASESRKELELKHEAEVTNYKIKLEMLEKEKNAVLDRMAESQEAELERLRTQLLFSHEEELSKLKEDLEIEHRINIEKLKDNLGIHYKQQIDGLQNEMSQKIETMQFEKDNLITKQNQLILEISKLKDLQQSLVNSKSEEMTLQINELQKEIEILRQEEKEKGTLEQEVQELQLKTELLEKQMKEKENDLQEKFAQLEAENSILKDEKKTLEDMLKIHTPVSQEERLIFLDSIKSKSKDSVWEKEIEILIEENEDLKQQCIQLNEEIEKQRNTFSFAEKNFEVNYQELQEEYACLLKVKDDLEDSKNKQELEYKSKLKALNEELHLQRINPTTVKMKSSVFDEDKTFVAETLEMGEVVEKDTTELMEKLEVTKREKLELSQRLSDLSEQLKQKHGEISFLNEEVKSLKQEKEQVSLRCRELEIIINHNRAENVQSCDTQVSSLLDGVVTMTSRGAEGSVSKVNKSFGEESKIMVEDKVSFENMTVGEESKQEQLILDHLPSVTKESSLRATQPSENDKLQKELNVLKSEQNDLRLQMEAQRICLSLVYSTHVDQVREYMENEKDKALCSLKEELIFAQEEKIKELQKIHQLELQTMKTQETGDEGKPLHLLIGKLQKAVSEECSYFLQTLCSVLGEYYTPALKCEVNAEDKENSGDYISENEDPELQDYRYEVQDFQENMHTLLNKVTEEYNKLLVLQTRLSKIWGQQTDGMKLEFGEENLPKEETEFLSIHSQMTNLEDIDVNHKSKLSSLQDLEKTKLEEQVQELESLISSLQQQLKETEQNYEAEIHCLQKRLQAVSESTVPPSLPVDSVVITESDAQRTMYPGSCVKKNIDGTIEFSGEFGVKEETNIVKLLEKQYQEQLEEEVAKVIVSMSIAFAQQTELSRISGGKENTASSKQAHAVCQQEQHYFNEMKLSQDQIGFQTFETVDVKFKEEFKPLSKELGEHGKEILLSNSDPHDIPESKDCVLTISEEMFSKDKTFIVRQSIHDEISVSSMDASRQLMLNEEQLEDMRQELVRQYQEHQQATELLRQAHMRQMERQREDQEQLQEEIKRLNRQLAQRSSIDNENLVSERERVLLEELEALKQLSLAGREKLCCELRNSSTQTQNGNENQGEVEEQTFKEKELDRKPEDVPPEILSNERYALQKANNRLLKILLEVVKTTAAVEETIGRHVLGILDRSSKSQSSASLIWRSEAEASVKSCVHEEHTRVTDESIPSYSGSDMPRNDINMWSKVTEEGTELSQRLVRSGFAGTEIDPENEELMLNISSRLQAAVEKLLEAISETSSQLEHAKVTQTELMRESFRQKQEATESLKCQEELRERLHEESRAREQLAVELSKAEGVIDGYADEKTLFERQIQEKTDIIDRLEQELLCASNRLQELEAEQQQIQEERELLSRQKEAMKAEAGPVEQRLVDAAVDAAPGAELLQETEKLMKEKLEVQCQAEKVRDDLQKQVKALEIDVEEQVSRFIELEQEKNTELMDLRQQNQALEKQLEKMRKFLDEQAIDREHERDVFQQEIQKLEQQLKVVPRFQPISEHQTREVEQLANHLKEKTDKCSELLLSKEQLQRDIQERNEEIEKLEFRVRELEQALLVSADTFQKVEDRKHFGAVEAKPELSLEVQLQAERDAIDRKEKEITNLEEQLEQFREELENKNEEVQQLHMQLEIQKKESTTRLQELEQENKLFKDDMEKLGLAIKESDAMSTQDQHVLFGKFAQIIQEKEVEIDQLNEQVTKLQQQLKITTDNKVIEEKNELIRDLETQIECLMSDQECVKRNREEEIEQLNEVIEKLQQELANIGQKTSMNAHSLSEEADSLKHQLDVVIAEKLALEQQVETANEEMTFMKNVLKETNFKMNQLTQELFSLKRERESVEKIQSIPENSVNVAIDHLSKDKPELEVVLTEDALKSLENQTYFKSFEENGKGSIINLETRLLQLESTVSAKDLELTQCYKQIKDMQEQGQFETEMLQKKIVNLQKIVEEKVAAALVSQIQLEAVQEYAKFCQDNQTISSEPERTNIQNLNQLREDELGSDISALTLRISELESQVVEMHTSLILEKEQVEIAEKNVLEKEKKLLELQKLLEGNEKKQREKEKKRSPQDVEVLKTTTELFHSNEESGFFNELEALRAESVATKAELASYKEKAEKLQEELLVKETNMTSLQKDLSQVRDHLAEAKEKLSILEKEDETEVQESKKACMFEPLPIKLSKSIASQTDGTLKISSSNQTPQILVKNAGIQINLQSECSSEEVTEIISQFTEKIEKMQELHAAEILDMESRHISETETLKREHYVAVQLLKEECGTLKAVIQCLRSKEGSSIPELAHSDAYQTREICSSDSGSDWGQGIYLTHSQGFDIASEGRGEESESATDSFPKKIKGLLRAVHNEGMQVLSLTESPYSDGEDHSIQQVSEPWLEERKAYINTISSLKDLITKMQLQREAEVYDSSQSHESFSDWRGELLLALQQVFLEERSVLLAAFRTELTALGTTDAVGLLNCLEQRIQEQGVEYQAAMECLQKADRRSLLSEIQALHAQMNGRKITLKREQESEKPSQELLEYNIQQKQSQMLEMQVELSSMKDRATELQEQLSSEKMVVAELKSELAQTKLELETTLKAQHKHLKELEAFRLEVKDKTDEVHLLNDTLASEQKKSRELQWALEKEKAKLGRSEERDKEELEDLKFSLESQKQRNLQLNLLLEQQKQLLNESQQKIESQRMLYDAQLSEEQGRNLELQVLLESEKVRIREMSSTLDRERELHAQLQSSDGTGQSRPPLPSEDLLKELQKQLEEKHSRIVELLNETEKYKLDSLQTRQQMEKDRQVHRKTLQTEQEANTEGQKKMHELQSKVEDLQRQLEEKRQQVYKLDLEGQRLQGIMQEFQKQELEREEKRESRRILYQNLNEPTTWSLTSDRTRNWVLQQKIEGETKESNYAKLIEMNGGGTGCNHELEMIRQKLQCVASKLQVLPQKASERLQFETADDEDFIWVQENIDEIILQLQKLTGQQGEEPSLVSPSTSCGSLTERLLRQNAELTGHISQLTEEKNDLRNMVMKLEEQIRWYRQTGAGRDNSSRFSLNGGANIEAIIASEKEVWNREKLTLQKSLKRAEAEVYKLKAELRNDSLLQTLSPDSEHVTLKRIYGKYLRAESFRKALIYQKKYLLLLLGGFQECEDATLALLARMGGQPAFTDLEVITNRPKGFTRFRSAVRVSIAISRMKFLVRRWHRVTGSVSININRDGFGLNQGAEKTDSFYHSSGGLELYGEPRHTTYRSRSDLDYIRSPLPFQNRYPGTPADFNPGSLACSQLQNYDPDRALTDYITRLEALQRRLGTIQSGSTTQFHAGMRR

SEQ ID NO: 77666 - protein, 44 aa, Homo sapiens
MTATLRPYLSAVRATLQAALCLENFSSQVVERHNKPEVEVSPRQ

SEQ ID NO: 77667 - protein, 91 aa, Homo sapiens
MAEGATTTDVDAGSLSYWPGQSEQPAPVLRLGWPVDSAWKGITRAQLYTQPPGEGQPPLKELVRLEIQAAHKLVAVVMDVFTDPDLLLDLV

SEQ ID NO: 77668 - protein, 135 aa, Homo sapiens
MAVSTEELEATVQEVLGRLKSHQFFQSTWDTVAFIVFLTFMGTVLLLLLLVVAHCCCCSSPGPRRESPRKVSPWKVSPAGLWDLHGTVLGVEAEGEGSGGKGAHPPREQRANLLGPAVLLVQERPKGVDNLALEP

SEQ ID NO: 77669 - protein, 38 aa, Homo sapiens
  MOD_RES (1)..(1): Any amino acid
XWASLEAAAKRKLSGLEQPQGALQTRRRKKKRPGSTSP

SEQ ID NO: 77670 - protein, 888 aa, Homo sapiens [sequence omitted]

SEQ ID NO: 77671 - protein, 331 aa, Homo sapiens
MNGQSQVLPGGGHESREGINMAAAPRTVLISGCSSGIGLELAVQLAHDPKKRYQVVATMRDLGKKETLEAAAGEALGQTLTVAQLDVCSDESVAQCLSCIQGEVDVLVNNAGMGLVGPLEGLSLAAMQNVFDTNFFGAVRLVKAVLPGMKRRRQGHIVVISSVMGLQGVIFNDVYAASKFALEGFFESLAIQLLQFNIFISLVEPGPVVTEFEGKLLAQVSMAEFPGTDPETLHYFRDLYLPASRKLFCSVGQNPQDVVQAIVNVISSTRPPLRRQTNIRYSPLTTLKTVDSSGSLYVRTTHRLLFRCPRLLNLGLQCLSCGCLPTRVRPR

SEQ ID NO: 77672 - protein, 55 aa, Homo sapiens
MRPPQCLLHTPSLASPLLLLLLWLLGGGVGAEGREDAELLVTVLRAPRCGTPTVS

SEQ ID NO: 77673 - protein, 145 aa, Homo sapiens
MVLLHWCLLWLLFPLSSRTQKLPTRDEELFQMQIRDKAFFHDSSVIPDGAEISSYLFRDTPKRYFFVVEEDNTPLSVTVTPCDAPLEWKLSLQELPEDRSGEGSGDLEPLEQQKQQIINEEGTELFSYKGNDVEYFISSSSPSGL

SEQ ID NO: 77674 - protein, 90 aa, Homo sapiens
MTTESGSDSESKPDQEAEPQEAAGAQGRAGAPVPEPPKEEQQQALEQFAAAAAHSTPVRREVTDKEQEFAARAAKQLEYQQLEDDKLSQK

SEQ ID NO: 77675 - protein, 142 aa, Homo sapiens
  MOD_RES (1)..(1): Any amino acid
XSEPLPFTYLPRDHGPFLPPSALLPDPDFFSGTVSLPGLEPPGGPDLLDDGFAYDPTAPTLFTMLDLLPPAPPHASAVVCSGGAGAVVGETPGPEPLTLDSYQAPGPGDGGTASLVGSNMFPNHYREAAFGGGLLSPGPEAT

SEQ ID NO: 77676 - protein, 216 aa, Homo sapiens
MTSRRWFHPNITGVEAENLLLTRGVDGSFLARPSKSNPGDFTLSVRRNGAVTHIKIQNTGDYYDLYGGEKFATLAELVQYYMEHHGQLKEKNGDVIELKYPLNCADPTSERWFHGHLSGKEAEKLLTEKGKHGSFLVRESQSHPGDFVLSVRTGDDKGESNDGKSKVTHVMIRCQELKYDVGGGERFDSLTDLVEHYKKNPMVETLGTVLQLKQPL

SEQ ID NO: 77677 - protein, 189 aa, Homo sapiens
  MOD_RES (1)..(1): Any amino acid
XAKNLYSRLFSWLVNRINESIKAQTKVRKKVMGVLDIYGFEIFENADNSFEQFIINYCNEKLQQIFIELTLKEEQEEYIREDIEWTHIDYFNNAIICDLIENNTNGILAMLDEECLRPGTVTDETFLEKLNQVCATHQHFESRMSKCSRFLNDTSLPHSCFRIQHYAGKVLYQVEGFVDKNNDLLYRDL

SEQ ID NO: 77678 - protein, 75 aa, Homo sapiens
LLKGVTIASGGVLPRIHPELLAKKRGTKGKSETILSPPPEKRGRKATSGKKGGKKSKAAKPRTSKKAGGWLEPRS

SEQ ID NO: 77679 - protein, 205 aa, Homo sapiens
MISRNHCVLKQNPEGQWTIMDNKSLNGVWLNRARLEPLRVYSIHQGDYIQLGVPLENKENAEYEYEVTEEDWETIYPCLSPKNDQMIEKNKELRTKRKFSLDELAGPGAEGPSNLKSKINKVSCESGQPVKSQGKGEVASTPSDNLDPKLTALEPSKTTGAPIYPGFPKVTEVHHEQKASNSSASQRSLQMFKVTMSRILRLKIQ

SEQ ID NO: 77680 - protein, 109 aa, Homo sapiens
MAQLGKLLKEQKYDRQLSTSLRLADVLWNSQIPLLICRTYGLVGYMRIIIKEHPVIESHPDNALEDLRLDKPFPELREHFQSYDLDHMEKKDHSHTPWIVIIAKYLAQW

SEQ ID NO: 77681 - protein, 172 aa, Homo sapiens
MSDTAVADTRRLNSKPQDLTDAYGPPSNFLEIDIFNPQTVGVGRARFTTYEVRMRTNLPIFKLKESCVRRRYSDFEWLKNELERDSKIVVPPLPGKALKRQLPFRGDEGIFEESFIEERRQGLEQFINKIAGHPLAQNERCLHMFLQEEAIDRNYVPGKSFSQCCPGWSAVA

SEQ ID NO: 77682 - protein, 91 aa, Homo sapiens
MAAPGPALCLFDVDGTLTAPRQKITKEMDDFLQKLRQKIKIGVVGGSDFEKVQEQLGNDAPLTSPSLKQNLQHRTPKNQRGLLTPSLESLT

SEQ ID NO: 77683 - protein, 54 aa, Homo sapiens
MGLLVFVRNLLLALCLFLVLGFLYYSAWKLHLLQWEEDSKYDRLGFLLNLDSKL

SEQ ID NO: 77684 - protein, 323 aa, Homo sapiens
MTEQVIGANSVPGIIAPDNVHVIQPSNPVASGNHLQPSEVTTYPISPKVIHCDTGRANLQNLLVVNQNSAAGVQSQPIGYQRQYPVGTASLQTVPGVIQYTQGTTNLQTWPGDLQNPLNANPGLTHTSNSSQWNTSFASFTSFNPKKFINEEVRTLGAIQILIGLTHIFSAINPVLYYYPFVTWLSGYPLWGGLSYIVSGSLSVWAAKDPSPCVVNSSISFNIISALFAFAGIFIIITDLSLYYVTTYSKAVSGGLLPFALLEFILTCVVSHFGCQATCCRQFENVAVIPTVFSFNPANTTTSPVNATTGPVNAATGPVSATN

SEQ ID NO: 77685 - protein, 187 aa, Homo sapiens
MSDKSELKAELERKKQRLAQIREEKKRKEEERKKKETDQKKEAVAPVQEESDLEKKRREAEALLQSMGLTPESPIAEQPLRVVTADTCLFHYLVPPPMSPSSKSVSTPSEAGSQDSGDGAVGSRRGPIKLGMAKITQVDFPPREIVTYTKETQTPVMAQPKEDEEEDDDVVAPKPPIEPEEEKTLKK

SEQ ID NO: 77686 - protein, 1163 aa, Homo sapiens
MKKFFDSRREQGGSGLGSGSSGGGGSTSGLGSGYIGRVFGIGRQQVTVDEVLAEGGFAIVFLVRTSNGMKCALKRMFVNNEHDLQVCKREIQIMRDLSGHKNIVGYIDSSINNVSSGDVWEVLILMDFCRGGQVVNLMNQRLQTGFTENEVLQIFCDTCEAVARLHQCKTPIIHRDLKVENILLHDRGHYVLCDFGSATNKFQNPQTEGVNAVEDEIKKYTTLSYRAPEMVNLYSGKIITTKADIWALGCLLYKLCYFTLPFGESQVAICDGNFTIPDNSRYSQDMHCLIRYMLEPDPDKRPDIYQVSYFSFKLLKKECPIPNVQNSPIPAKLPEPVKASEAAAKKTQPKARLTDPIPTTETSIAPRQRPKAGQTQPNPGILPIQPALTPRKRATVQPPPQAAGSSNQPGLLASVPQPKPQAPPSQPLPQTQAKQPQAPPTPQQTPSTQAQGLPAQAQATPQHQQQLFLKQQQQQQQPPPAQQQPAGTFYQQQQAQTQQFQAVHPATQKPAIAQFPVVSQGGSQQQLMQNFYQQQQQQQQQQQQQQLATALHQQQLMTQQAALQQKPTMAAGQQPQPQPAAAPQPAPAQEPAIQAPVRQQPKVQTTPPPAVQGQKVGSLTPPSSPKTQRAGHRRILSDVTHSAVFGVPASKSTQLLQAAAAEASLNKSKSATTTPSGSPRTSQQNVYNPSEGSTWNPFDDDNFSKLTAEELLNKDFAKLGEGKHPEKLGGSAESLIPGFQSTQGDAFATTSFSAGTAEKRKGGQTVDSGLPLLSVSDPFIPLQVPDAPDLQRESNPCPVITVEHFKESLGVKGLPLYPDPSRVPGTKTQNNLESDYLARDGPSSNSSFHSSEEEGTDLEGDMLDCSGSRPLLMESEEEDESCRPPPGKLGGAVPFAPPEVSPEQAKTVQGGRKNQFQAFTQPATDGLSEPDVFAIAPFRSSRVPNDDMDIFSKAPFVSKSSMAPSQPEESDVFLRAPFTKKKSMEELTVIQCTSQELPAQTGLLSQTGDVPLPAGRERAVYTSVQAQYSTAGFVQQSNLLSHSVQAADHLDSISPRGSCLESGGHSNDRNKGPQLQKEAVSGPMAGKPFRPQSLSKYSRHYSPEDEPSPEAQPIAAYKIVSQTNKQSIAGSVSITSLSSRTTELPAADPFALAPFPSKSGKKP

SEQ ID NO: 77687 - protein, 42 aa, Homo sapiens
MRAPGRPALRPLPLPPLLLLLLAAPWGRAGYSRPLLGLWAKV

SEQ ID NO: 77688 - protein, 108 aa, Homo sapiens
MAHSQNSLELPININATQITTAYGHRALPKLKEELQSEDLQTRQKALMALCDLMHDPECIYKAMNIGCMENLKALLKDSNSMVRIKTTEVLHITASHSVGRSSDRKGE

SEQ ID NO: 77689 - protein, 2624 aa, Homo sapiens
MFRRARLSVKPNVRPGVGARGSTASNPQRGRESPRPPEPATDSASKPAEPTDVPTVDFGGAEPQEKAPRSSTEKTGGDNDVEESSRSSSTVSQRRKRISSTSSLVKSSVSVPSESHPLSTINQEAPQPTATSTKEKQPCSDRYRIYKAQKLREMLKEELRKEKKQWKNKYAINESQRPPDRSKMTMRDFIYYLPDNNPMTSSLEQEKKTEKPSTPVQTREQEGKSTPNAEDNEMEEETDDGPLLVPRVKVAEDGSIILDEESLTVEVLRTKGPCVVEENDPIFERGSTTTYSSFRKNYYSKPWSNKETDMFFLAISMVGTDFSMIGQLFPHRARIEIKNKFKREEKTNGWRIDKAFQEKRPFDFDFFAHLLQKVLAEEEKRKQKSVKNHSLKEKKSTKPRKNVKVKKVACEGVNNDPDESMSSRISDTERSQKDAQTVEEESLTLSREDAEQVALEVDLNQKKRRRKKQDGANELGVNNLLENATVQAGPSKGEKHKNKCQAIRPELKEGECSKEQMLSCTQNIDGIVGFASTEKVEKRTDPILSLSNQQDATSVATESSESSTSDLPSFEVGIRALCEVNNAEGSCIEERNVDLKNNSLEIDQTENVKPMLRGRFQRPKPNLSRAGKKSVLSQGKTESESKNSHSKTSVEKNHVEKDKMNTLDILRMETTERENPEAETVSVLGEKNCLQEGSQLKALRPVQVRGRLQKPKPNAGKAAERKEILISQEEIGANVEKNENESCADRDTPQHMEDQSRKDFEEEDVILQPEKNDSFQNVQPDEPKVLNECLSVQENNKANKLNQVPILRTRFQKPKPNIGRGTGRREISSKEEVLEKILVSGEMAAALRETVRLDTSPKEMVPAEINTKEMQSDLKETGRRAISPREKILDVIDDTIEMETGLKAMGREICLREKTPEVIDATEEIDKDLEEAGRREISPQKNGPEEVKPLGEVETDLKATGNESSPREKTPEVTDATEEIDKNLEETGRRKISPRENGPEEVKPVDEMETDLNATGRESSPREKTPEVIDATEEIDLEETEREVSPQENGLEEVKPLGEMETDLKATGRDSFPRGKTPEVIDAIEEIEIDLEETEREISPQENGLEEVKPLGEMQTDLKATGREISPREKTPEVIDATEEIDKDLEETGRREISPEENGPEEVKPVDEMETDLKTTGREGSSREKTREVIDAAEVIETDLEETEREISPQENGPEEVKPVGKMETDLKEIREEISQREKVLAEFSAIREKEIDLKETGKRDIPIMEKVSGKMAVVEEMEADLKETGKENFRERGSEEICVTEEKVAELKQTGKTDISPRENELEETSTSRQTDTHLMQSGSNDFSAVPSLDIQNISSEVLSMMHTPVEEKRNSEKEVSSHFSHFKISSQTHESDKTEVQGIQSPDVPEQFSDINLSKSLPQEQKPLEIKPAPFVRSRFKRPKPNLARAALKRETTESEKYIYEKKSETKKMETIVMQENNEQTDTLPSQHDEASLMISREKDTLGHRNEEAVILPCTQTERNLSPSNSCEPKEESQSAPVQKNDSVVSVGTNNVNTFQQEMKESVIQTARQVRGRLQRPRPNIRKTGQRQIVDKGEAKGIIKEGRTILPKDETEKKVLTVSNSQIETEIEVPSSAVPEHRMYENQSQVVLVENLHVNKTNETIRHENKPYVPSSAQMTRRKFQKAKPNLGRAHSKKEEPVLEKVTTDQSKEGKPEDHLLQKGASNTQLLLKEKAELLTSLEVSARKDCVGSKESALAKIDAELEEVGPSRRVGEETVGDNSPSSVVEEQYLNKLTSCPQPLNETSYSKIALDGKTTISSTSEYERNRGERRSHKKFKPNVTRGRGSKRVRGKTSKKEPRASKAMLVTLRASQEEDDDADDFESDYEEESYHLAPEEVNKAPVFVPVGLRSPEPVSAQIEETMEELEITVNVPDVGCIAVVEHELPNTDVTTEEMKQEENLSVPFEMTTSEHIQDEPGTNDGSTEAAITLLTMGDLVLQSEISSEQGDVGVCIIPHVHSKDKSHIPSSLDNVNHKIVHECQELSSPVITTSPASFEENKIVLEEQSSREEISLMEKVKENATPTRNTISKVTSNLRIRSRLAKPKPNLEKTLGTNRLDDYQEVSSLCVTKGAEMETQRETEKNASKATELENKNLGPVTTAENKDQSKLACVHGIKGTSISSEVNLTERNENQEESSQEVHMLSVAPVASSETGPCTLGLDRGLGENSVEEPQIKDSKGDSVLTLPVPEYTPTSIPEVQQENIINPQDLTVNLVANVPQDGEDEQAFILTLVEIPANAVEEFTDATAQFMPNPLLPAPILVKSVNTEERGDMSICLPATSVGQDAMGLSISGRDNSKKPPDNLDLVSRKRFQCRLDKNDHIPPAKKRSLTLRDDCQEYTTEVHSKELTNVFEETGESHKGQDIFLTSGSTLTTPEPQRQQVEAAFQSRGSRSPDACMDKNVPQLPQDEMIVSDKEERTDAAPKSQQMDSRTSSSKASLSRPGRRPLGFLSLICSKNSLESDEPMQVHSKKRLKPLIPGLRKKLKRSNPFNESQEKNRESSDLLPSPSVITTQSENISSSATQVSCDQPLLKEGYKSAQKRAPQGEATTVSEYFFNDIFIEVDETE

SEQ ID NO: 77690 - protein, 198 aa, Homo sapiens
MRTLEDSSGTVLHRLIQEQLRYGNLTETRTLLAIQQQALRGGAGTGGTGSPQASLEILAPEDSQVLQQATRQEPQGQEHQGGENHLAENTLYRLCPQPSKGEELPTYEEAKAHSQYYAAQQAGTRPHAGDRDPRGAPGGSRRQDEALRELRHGHVRSLSERLLQLSLERNGARAPSHMSSSHSFPQLARNQQGPPLRG

SEQ ID NO: 77691 - protein, 213 aa, Homo sapiens
MATETVELHKLKLAELKQECLARGLETKGIKQDLIHRLQAYLEEHAEEEANEEDVLGDETEEEETKPIELPVKEEEPPEKTVDVAAEKKVVKITSEIPQTERMQKRAERFNVPVSLESKKAARAARFGISSVPTKGLSSDNKPMVNLDKLKERAQRFGLNVSSISRKSEDDEKLKKRKERFGIVTSSAGTGTTEDTEVKIYLERFIDLEGKLE

SEQ ID NO: 77692 - protein, 95 aa, Homo sapiens
SELCPRLPRAGARERVRGFLTQTRVRSAQSPEMESSSSDYYNKDNEEESLLANVASLRHELKITEWSLQSLGEELSRCFHLLPLWIRRLKAFERN

SEQ ID NO: 77693 - protein, 67 aa, Homo sapiens
MGWSQDLFRALWRSLSREVKEHVGTDQFGNKYYYIPQYKNWRETGSRYFVQAGVEPQASSCPPTLAY

SEQ ID NO: 77694 - protein, 96 aa, Homo sapiens
MSTVGLFHFPTPLTRICPAPWGLRLWEKLTLLSPGIAVTPVQMAGKKDYPALLSLDENELEEQFVKGHGPGGQATNKTSNCVVLKHIPSGIVVKVD

SEQ ID NO: 77695 - protein, 169 aa, Homo sapiens
MEELDGEPTVTLIPGVNSKKNQMYFDWGPGEMLVCETSFNKKEKSEMVPSCPFIYIIRKDVDVYSQILRKLFNESHGIFLGLQRIDEELTGKSRKSQLVRVSKNYRSVIRACMEEMHQVAIAAKDPANGRQFSSQVSILSAMELIWNLCEILFIEVAPGDHLGAAGPAG

SEQ ID NO: 77696 - protein, 101 aa, Homo sapiens
MGDMANNSVAYSGVKNSLKEANHDGDFGITLAELRALMELRSTDALRKIQESYGDVYGICTKLKTSPNEGEFYYACFWFFVQRVLYIWLINEHAYIILAIV

SEQ ID NO: 77697 - protein, 134 aa, Homo sapiens
MQNNEIIKPAKYFSELEKSILLALVEKYKYVLECKKSDARTIALKQRTWQALAHEYNSQPSVSLRDFKQLKKCWENIKARTKKIMAHERREKVKRSVSPLLSTHVLGKEKIASMLPEQLYFLQSPPEEEPEYHP

SEQ ID NO: 77698 - protein, 284 aa, Homo sapiens
MSDIEEVVEEYEEEEQEEAAVEEQEEAAEEDAEAEAETEETRAEDEEEEEAKEAEDGPMEESKPKPRSFMPNLVPPKIPDGERVDFDDIHRKRMEKDLNELQALIEAHFENRKKEEEELVSLKDRIERRRAERAEQQRIRNEREKERQNRLAEERARREEEENRRKAEDEARKKKALSNMMHFGGYIQKTERKSGKRQTEREKKKKILAERRKVLAIDHLNEDQLREKAKELWQSIYNLEAEKFDLQEKFKQQKYEINVLRNRINDNQKVSKTRGKAKVTGRWK

SEQ ID NO: 77699 - protein, 56 aa, Homo sapiens
MSRFKFIDDLQDVIGRAVEIGVKKFMITGGNLQDSKDALHLAQTNGILIFLLPKKK

SEQ ID NO: 77700 - protein, 47 aa, Homo sapiens
MDQRQRRILGQPLSIPTSQPKQKRTSMISFFSKKELGTPVLKSVTWQ

SEQ ID NO: 77701 - protein, 92 aa, Homo sapiens
MPEVEFPDQFFTVLTMDHELVTLRDVVINFSQEEWEYLDSAQRNLYWDVMMENYSNLLSLDLESRNETKHLSVGKDIIQNTGSQWEVMESSK

SEQ ID NO: 77702 - protein, 65 aa, Homo sapiens
MSAQGDCEFLVQRARELVPQDLWAAKAWLITARSLYPADFNIQEGQRAMLDELGAFWAGVSDQGA

SEQ ID NO: 77703 - protein, 142 aa, Homo sapiens
MAVPETRPNHTIYINNLNEKIKKDELKKSLYAIFSQFGQILDILVSRSLKMRGQAFVIFKEVSSATNALRSMQGFPFYDKPMRIQYAKTDSDIIAKMKGTFVERDRKREKRKPKSQETPATKKAVQGGGATPVVGAVQGPVP

SEQ ID NO: 77704 - protein, 48 aa, Homo sapiens
  MOD_RES (1)..(1): Any amino acid
XDDEEGKACIRCPSPPVWVPAPARASASPAMGVILCVRELLSVPLAEA

SEQ ID NO: 77705 - protein, 155 aa, Homo sapiens
KSIWDEFISDEADEKTYNDALFRYNGTVGLWRRCITIPKNMHWYSPPERTESFDVVTKCVSFTLTEQFMEKFVDPGNHNSGIDLLRTYLWRCQFLLPFVSLGLMCFGALIGLCACICRSLYPTIATGILHLLAAQYYKERFTIMTLQSWETYHKI

SEQ ID NO: 77706 - protein, 135 aa, Homo sapiens
MGIQGLLQFIKEASEPIHVRKYKGQVVAVDTYCWLHKGAIACAEKLAKGEPTDRYVGFCMKFVNMLLSHGIKPILVFDGCTLPSKKEVERSRRERRQANLLKGKQLLREGKVSEARECFTRSINITHAMAHKVIK

SEQ ID NO: 77707 - protein, 167 aa, Homo sapiens
MERPAPWTLWVTTSWWYIWALRSSVTFLPDFEDDDLYGQSVEDDYCISPSTAAQFIYSRRDKPSVEPVEEYDYEDLKESSNSVSNHQLSGFDQARLYSCLDHMREVLGDAVPDEILIEAVLKNKFDVQKALSGVLEQDRVQSLKDKNEATVSTGKIAKGKPVDSQTS

SEQ ID NO: 77708 - protein, 107 aa, Homo sapiens
MAASKTQGAVARMQEDRDGSCSTVGGVGYGDSKDCILEPLSLPESPGGTTTLEGSPSVPCIFCEEHFPVAEQDKLLKHMIIEHKIVIADVKLVADFQRRTRELFFVM

SEQ ID NO: 77709 - protein, 120 aa, Homo sapiens
MAGDTHCPAEPLAREGTLWEALRALLPHSKEDLKLDLGEKVERSVVTLLQRATELFYEGRRDECLQSSEVILDYSWEKLNTGTWQDVDKDWRRVYAIGCLLKALCLCQAPEDANTVAAAL

SEQ ID NO: 77710 - protein, 137 aa, Homo sapiens
MHGDYTLTLRKGGNNKLIKIFHRDGKYGFSDPLTFSSVVELINHYRNESLAQYNPKLDVKLLYPVSKYQQDQVVKEDNIEAVGKKLHEYNTQFQEKSREYDRLYEEYTRTSQEIQMKRTAIEAFNETIKIFEEQCQT

SEQ ID NO: 77711 - protein, 159 aa, Homo sapiens
MFPLKDAEMGAFTFFASALPHDVCGSNGLPLTPNSIKILGRFQILKTITHPRLCQYVDISRGKHERLVVVAEHCERSLEDLLRERKPVSCSTVLCIAFEVLQGLQYMNKHGIVHRALSPHNILLDRKGHIKLAKFGLYHMTAHGDDVDFPIGYPSYLAP

SEQ ID NO: 77712 - protein, 49 aa, Homo sapiens
MDPIRSFCGKLRSLASTLDCETARLQRALDGEESAFIKIQLKPSYSNSN

SEQ ID NO: 77713 - protein, 141 aa, Homo sapiens
  MOD_RES (1)..(1): Any amino acid
XEEQLARAGVTLCVNVSRQQPGPRAPGVAELRVPVFDDPAEDLLAHLEPTCAAMEAAVRAGGACLVYCKNGRSRSAAVCTAYLMRHRGLSLAKAFQMVKSARPVAEPNPGFWSQLQKYEEALQAQSCLQGEPPALGLGPEA

SEQ ID NO: 77714 - protein, 62 aa, Homo sapiens
MAEPGEGLPEEVLALIFRHLSLRDRAAAARVCRAWAAAATCSAVWHDTKIRFHPVADATEIF

SEQ ID NO: 77715 - protein, 18 aa, Homo sapiens
MLQQELLSRTSLETQKLD

SEQ ID NO: 77716 - protein, 139 aa, Homo sapiens
  MOD_RES (1)..(1): Any amino acid
XAGNAFCQAAQLHLQLQSKHDAATCFVDAGNAFKKADPQEAINCLMRAIEIYTDMGRFTIAAKHHISIAEIYETELVDIEKVGTNAMDSPLLKYSAKDYFFKAALCHFCIDMLNAKLAVQKYEELFPAFSDSRECKLMK

SEQ ID NO: 77717 - protein, 187 aa, Homo sapiens
  MOD_RES (1)..(1): Any amino acid
XHLRDEEKSCPCLAQEGPQGDLLTKTQELGRDYRTCLTIVQKLKKMVDKPTQRSVSNAATRVCRTGRSRWRDVCRNFMRRYQSRVTQGLVAGETAQQICEDLRLCIPSTGPTTCSGCRLASRMCLWVPSEPSHLVLWKKHRLLSSDPGNLSNLCRLLASSIQNPLSSLPPLTPSAVLPSHENKVSSK

SEQ ID NO: 77718 - protein, 269 aa, Homo sapiens
FSAQPPPSLQWLFEDETPITNRSRPPHLRRATVFANGSLLLTQVRPRNAGIYRCIGQGQRGPPIILEATLHLAEIEDMPLFEPRVFTAGSEERVTCLPPKGLPEPSVWWEHAGVRLPTHGRVYQKGHELVLANIAESDAGVYTCHAANLAGQRRQDVNITVASEHLCPEGQGEVEGNTGLGVMDRGFPAVPSWLKKPQDSQLEEGKPGYLDCLTQATPKPTVVWYRNQMLISEDSRFEVFKNGTLRINSVEVYDGTWYRCMSSTPAGSI

SEQ ID NO: 77719 - protein, 281 aa, Homo sapiens
MRVVVIGAGVIGLSTALCIHERYHSVLQPLDIKVYADRFTPLTTTDVAAGLWQPYLSDPNNPQEADWSQQTFDYLLSHVHSPNAENLGLFLISGYNLFHEAIPVAREGADVIVNCTGVWAGALQRDPLLQPGRGQIMKVDAPWMKHFILTHDPERGIYNSPYIIPGTQTVTLGGIFQLGNWSELNNIQDHNTIWEGCCRLEPTLKNARIIGERTGFRPVRPQIRLEREQLRTGPSNTEVIHNYGHGGYGLTIHWGCALEAAKLFGRILEEKKLSRMPPSHL

SEQ ID NO: 77720 - protein, 78 aa, Homo sapiens
MPKLVKNLLGEMPLWVCQSCRKSMEEDERQTGREHAVAISLSHTSCKSQSCGDDSHSSSSSSSSSSSSSSSSCPGNSG

SEQ ID NO: 77721 - protein, 76 aa, Homo sapiens
MAEEKKLKLSNTVLPSESMKVVAESMGIAQIQEETCQLLTDEVSYRIKEIAQDALKFMHMGKRQKLTTSDIDYALK

SEQ ID NO: 77722 - protein, 770 aa, Homo sapiens
HVSTIINICLKYLTYDPNYNYDDEDEDENAMDADGGDDDDQGSDDEYSDDDDMSWKVRRAAAKCLDAVVSTRHEMLPEFYKTVSPALISRFKEREENVKADVFHAYLSLLKQTRPVQSWLCDPDAMEQGETPLTMLQSQVPNIVKALHKQMKEKSVKTRQCCFNMLTTVKALTLIAGSPLKIDLRPVLGEGVPILASFLRKNQRALKLGTLSALDILIKNYSDSLTAAMIDAVLDELPPLISESDMHVSQMAISFLTTLAKVYPSSLSKISGSILNELIGLVRSPLLQGGALSAMLDFFQALVVTGTNNLGYMDLLRMLTGPVYSQSTALTHKQSYYSIAKCVAALTRACPKEGPAVVGQFIQDVKNSRSTDSIRLLALLSLGEVGHHIDLSGQLELKSVILEAFSSPSEEVKSAASYALGSISVGNLPEYLPFVLQEITSQPKRQYLLLHSLKEIISSASVVGLKPYVENIWALLLKHCECAEEGTRNVVAECLGKLTLIDPETLLPRLKGYLISGSSYARSSVVTAVKFTISDHPQPIDPLLKNCIGDFLKTLEDPDLNVRRVALVTFNSAAHNKPSLIRDLLDTVLPHLYNETKVRKELIREVEMGPFKHTVDDGLDIRKAAFECMYTLLDSCLDRLDIFEFLNHVEDGLKDHYDIKMLTFLMLVRLSTLCPSAVLQRLDRLVEPLRATCTTKVKANSVKQEFEKQDELKRSAMRAVAALLTIPEAEKSPLMSEFQSQISSNPELAAIFESIQKDSSSTNLESMDTS

SEQ ID NO: 77723 - protein, 161 aa, Homo sapiens
MAALTRDPQFQKLQQWYREHRSELNLRRLFDANKDRFNHFSLTLNTNHGHILVDYSKNLVTEDVMRMLVDLAKSRGVEAARERMFNGEKINYTEDVMPEVNKVLDKMKSFCQRVRSGDWKGYTGKTITDVINIGIGGSDLGPLMVTEALKPYSSGGPRVWY

SEQ ID NO: 77724 - protein, 115 aa, Homo sapiens
MASRGDSTKVDKLVRDIYGGDYERFGLPGWAVASSFGNMMSKEKREAVSKEDLARATLITITNNIGSIARMCALNENINQVVFVGNFLRINTIAMRLLAYALDYWSKGQLKALFS

SEQ ID NO: 77725 - protein, 172 aa, Homo sapiens
MLVLNSWPQVILPPWPPKALKLQMERAFQTALWLLQPEVVFILGDIFDEGKWSTPEAWADDVERFQKMFRHPSHVQLKVVAGNHDIGFHYEMNTYKVERFEKVFSSERLFSWKGINFVMVNSVALNGDGCGICSETEAELIEVSHRLNCSREQARGSSRCGPGPLLPTSAPV

SEQ ID NO: 77726 - protein, 267 aa, Homo sapiens
MVLLHVKRGDESQFLLQAPGSTELEELTVQVARVYNGRLKVQRLCSEMEELAEHGIFLPPNMQGLTDDQIEELKLKDEWGEKCVPSGGAVFKKDDIGRRNGQAPNEKMKQVLKKTIEEAKAIISKKQVEAGVCVTMEMVKDALDQLRGAVMIVYPMGLPPYDPIRMEFENKEDLSGTQAGLNVIKEAEAQLWWAAKELRRTKKLSDYVGKNEKTKIIAKIQQNVQTRGPWKTMPEMRLRHREAEQKTGALSERREGPHSPNAQEPPP

SEQ ID NO: 77727 - protein, 166 aa, Homo sapiens
MQRTVQALQTASHLSQQADLRSIVEEIEDLVARLDELGGVYLQFEEGLETTALFVAATYKLMDHVGTEPSIKEDQVIQLMNAIFSKKNFESLSEAFSVASAAAVLSHNRYHVPVVVVPEGSASDTHEQAILRLQVTNVLSQPLTQATVKLEHAKSVASRATVLQKT

SEQ ID NO: 77728 - protein, 45 aa, Homo sapiens
MPRARSGRRSRGAGGREEVDLSASTSQPADPTECSDWENETEEAR

SEQ ID NO: 77729 - protein, 205 aa, Homo sapiens
MDKDSQGLLDSSLMASGTASRSEDEESLAGQKRASSQALGTIPKRRSSSRFIKRKKFDDELVESSLAKSSTRAKGASGVEPGRCSGSEPSSSEKKKVSKAPSTPVPPSPAPAPGLTKRVKKSKQPLQVTKDLGRWKPADDLLLINAVLQTNDLTSVHLGVKFSCRFTLREVQERWYALLYDPVISKLACQAMRQLHPEAIAAIQS

SEQ ID NO: 77730 - protein, 136 aa, Homo sapiens
MAATMKKAAAEDVNVTFEDQQKINKFARNTSRITELKEEIEVKKKQLQNLEDACDDIMLADDDCLMIPYQIGDVFISHSQEETQEMLEEAKKNLQEEIDALESRVESIQRVLADLKVQLYAKFGSNINLEADERNT

SEQ ID NO: 77731 - protein, 65 aa, Homo sapiens
MASRGATRPNGPNTGNKICQFKLVLLGESAVGKSSLVLRFVKGQFHEFQESTIGVTLEVIKAVSL

SEQ ID NO: 77732 - protein, 111 aa, Homo sapiens
MSQRQGKEAYPTPTKDLHQPSLSPASPHSQGFERGKEDISQNKDESSLSMSKSKSESKLYNGSEKDSSTSSKLTKKESLKVQKKNYREEKKRATKELLSTITDPSVIVMAD

SEQ ID NO: 77733 - protein, 105 aa, Homo sapiens
QWTASTATITKEKQDQPKKDISNYQVEQAQVLLKREKEIPPTVFPNRSPWCQNPYVSAHPYCPLIEPHNTSTAGGRLDRQPRTRSTRPNRASGSKKKKTSESQKQ

SEQ ID NO: 77734 - protein, 47 aa, Homo sapiens
METMKAVAEVSESTKAEAVAAVQRQCQEEVASLQAILKEPSSESDPA

SEQ ID NO: 77735 - protein, 70 aa, Homo sapiens
MLSDELESKPELLVQFVQNTSIPLGQGLVESEAKDITCLSLLPVTEASECSRLMLPDDTTNHSNSSKEVP

SEQ ID NO: 77736 - protein, 83 aa, Homo sapiens
KAVKFLANFYINGGKHWTHGHLRQTQPEPTQPKASVLLLGPEPGMAWDETQPPKMKEIPVGLRLQTGTPQESLPTYTQTLREL

SEQ ID NO: 77737 - protein, 132 aa, Homo sapiens
MQALVLLLCIGALLGHSSCQNPASPPEEGSPDPDSTGALVEEEDPFFKVPVNKLAAAVSNFGYDLYRVRSSTSPTTNVLLSPLSVATALSALSLGAEQRTESIIHRALYYDLISSPDIHGTYKELLDTVTAP

SEQ ID NO: 77738 - protein, 252 aa, Homo sapiens
MASRLTLLTLLLLLLAGDRASSNPNATSSSSQDPESLQDRGEGKVATTVISKMLFVEPILEVSSLPTTNSTTNSATKITANTTDEPTTQPTTEPTTQPTIQPTQPTTQLPTDSPTQPTTGSFCPGPVTLCSDLESHSTEAVLGDALVDFSLKLYHAFSAMKKVETNMAFSPFSIASLLTQVLLGAGENTKTNLESILSYPKDFTCVHQALKGFTTKGVTSVSQIFHSPGGAAAALPQSEFGDPGTPEPETSS

SEQ ID NO: 77739 - protein, 39 aa, Homo sapiens
MCDAFVGTWKLVSSENFDDYMKEEWALPPGKWLAWPNLT

SEQ ID NO: 77740 - protein, 12 aa, Homo sapiens
MCVTYHNGTGYC

SEQ ID NO: 77741 - protein, 147 aa, Homo sapiens
  MOD_RES (1)..(1): Any amino acid
XDHRRGLNGGITPLNSISPLKKNFASNHIQLQKYARPSSAFAPKSWMEDSLNRADNIFPFPDRPRTFDMHSLESSLIDIMRAENDTIKGRLNYSYPGSDSSLLINGQSSLFPMEDGFLDDGRGDQPLHSGLGSPHCFSHQNGERVER

SEQ ID NO: 77742 - protein, 314 aa, Homo sapiens
MRPEGSLTYRVPERLRQGFCGVGRAAQALVCASAKEGTAFRMEAVQEGAAGVESEQAALGEEAVLLLDDIMAEVEVVAEVEVVAEEEGLVERREEAQRAQQAVPGPGPMTPESALEELLAVQVELEPVNAQARKAFSRQREKMERRRKPQLDRRGAVIQSVPGFWANVIANHPQMSALITDEDEDMLSYMVSLEVEEEKHPVHLCKIMLFFRSNPYFQNKVITKEYLVNITEYRASHSTPIEWYPDYEVEAYRRRHHNSSLNFFNWFSDHNFAGSNKIAEILCKDLWRNPLQYYKRMKPPEEGTETSGDSQLLS

SEQ ID NO: 77743 - protein, 102 aa, Homo sapiens
IVKLKELKQVASPFTLIIDDPSGNSFVENPHAPQKDDALVITHYNRTRQQEEMLGLQEEAPAEKPEEEDLRNEVLQFSTNCPECNAPAQTNMKLMVVLFAWK

SEQ ID NO: 77744 - protein, 210 aa, Homo sapiens
  MOD_RES (1)..(1): Any amino acid
XYDACLQHLACLQDINKDDYKIILNTAVAEFFKSNQTTTDNLRQTLNQLKNQVHSAVEEMDGLDDVENSMLYYNQAVILYHLRQYTEAISVGEKLYQFIEPFEEKFAQAVCFLLVDLYILTYQAEKALHLLAVLEKMISQGNNNKNGKNETGNNNNKDGSNHKAESGALIEAAKSKIHQYKVRAYIQMKSLKACKREIKSVMNTAGNVNA

SEQ ID NO: 77745 - protein, 226 aa, Homo sapiens
MAGLVVRGTQVSYIGQDCREIPEHLGRDCGHFAKRLDLSFNLLRSLEGLSAFRSLEELILDNNQLGDDLVLPGLPRLHTLTLNKNRITDLENLLDHLAEVTPALEYLSLLGNVACPNELVSLEKDEEDYKRYRCFVLYKLPNLKFLDAQKVTRQEREEALVRGVFMKVVKPKASSEDVASSPERHYTPLPSASRELTSHQGVLGKCRYVYYGKNSEGNRFIRDDQL

SEQ ID NO: 77746 - protein, 138 aa, Homo sapiens
MDGRTPRPQDAPARRKPKAKAPLPPAETKYTDVSSAADSVESTAFIMEQKENMIDKDVELSVVLPGDIIKSTTVHGSKPMMDLLIFLCAQYHLNPSSYTIDLLSAEQNHIKFKPNTPIGMLEVEKVILKPKMLDKKKP

SEQ ID NO: 77747 - protein, 152 aa, Homo sapiens
MPEGPELHLASQFVNEACRALVFGGCVEKSSVSRNPEVPFESSAYRISASARGKELRLILSPLPGAQPQQEPLALVFRFGMSGSFQLVPREELPRHAHLRFYTAPPGPRLALCFVDIRRFGRWDLGGKWQPGRGPCVLQEYQQFRVSLCCLG

SEQ ID NO: 77748 - protein, 184 aa, Homo sapiens
MDFFRVVENQPPATMPLNVSFTNRNYDLDYDSVQPYFYCDEEENFYQQQQQSELQPPAPSEDIWKKFELLPTPPLSPSRRSGLCSPSYVAVTPFSLRGDNDGGGGSFSTADQLEMVTELLGGDMVNQSFICDPDDETFIKNIIIQDCMWSGFSAAAKLVSEKLASYQAARKDSGSPNPARGHSV

SEQ ID NO: 77749 - protein, 28 aa, Homo sapiens
  MOD_RES (1)..(1): Any amino acid
XIEVYLGRAGASSLPQGHQSLWLLLSPS

SEQ ID NO: 77750 - protein, 102 aa, Homo sapiens
MLSVRRVSEDICSRIYESAQRIDSITFLPSSGFHLKWKIQTRIANEKYLRTHKEVEWLISGFFREIFLKRPDNILEFAADYFTDPRLPNKIHMQLIKDKKAA

SEQ ID NO: 77751 - protein, 1154 aa, Homo sapiens
MPEPTKKEENEVPAPAPPPEEPSKEKEAGTTPAKDEEEVSPPSALPPDWTLVETPPGEEQAKQNANSQLSILFIEKPQGGTVKVGEDITFIAKVKAEDLLRKPTIKWFKGKWMDLASKAGKHLQLKETFERHSRVYTFEMQIIKAKDNFAGNYRCEVTYKDKFDSCSFDLEVHESTGTTPNIDIRSAFKRSGEGQEDAGELDFSGLLKRREVKQQEEEPQVDVWELLKNAKPSEYEKIAFQYGITDLRGMLKRLKRMRREEKKSAAFAKILDPAYQVDKGGRVRFVVELADPKLEVKWYKNGQEIRPSTKYIFEHKGCQRILFINNCQMTDDSEYYVTAGDEKCSTELFVREPPIMVTKQLEDTTAYCGERVELECEVSEDDANVKWFKNGEEIIPGPKSRYRIRVEGKKHILIIEGATKADAAEYSVMTTGGQSSAKLSVDLKPLKILTPLTDQTVNLGKEICLKCEISENIPGKWTKNGLPVQESDRLKVVHKGRIHKLVIANALTEDEGDYVFAPDAYNVTLPAKVHVIDPPKIILDGLDADNTVTVIAGNKLRLEIPISGEPPPKAMWSRGDKAIMEGSGRIRTESYPDSSTLVIDIAERDDSGVYHINLKNEAGEAHASIKVKVVDFPDPPVAPTVTEVGDDWCIMNWEPPAYDGGSPILGYFIERKKKQSSRWMRLNFDLCKETTFEPKKMIEGVAYEVRIFAVNAIGISKPSMPSRPFVPLAVTSPPTLLTVDSVTDTTVTMRWRPPDHIGAAGLDGYVLEYCFEGSTSAKQSDENGEAAYDLPAEDWIVANKDLIDKTKFTITGLPTDAKIFVRVKAVNAAGASEPKYYSQPILVKEIIEPPKIRIPRHLKQTYIRRVGEAVNLVIPFQGKPRPELTWKKDGAEIDKNQINIRNSETDTIIFIRKAERSHSGKYDLQVKVDKFVETASIDIQIIDRPGPPQIVKIEDVWGENVALTWTPPKDDGNAAITGYTIQKADKKSMEWFTVIEHYHRTSATITELVIGNEYYFRVFSENMCGLSEDATMTKESAVIARDGKIYKNPVYEDFDFSEAPMFTQPLVNTYAIAGYNATLNCSVRGNPKPKITWMKNKVAIVDDPRYRMFSNQGVCTLEIRKPSPYDGGTYCCKAVNDLGTVEIECKLEVKVIAQ

SEQ ID NO: 77752 - protein, 185 aa, Homo sapiens
  MOD_RES (1)..(1): Any amino acid
XKRRKASAWQRNLGYPLAMLCLLVLTGLSVLIVAIHILELLIDEAAMPRGMQVVLIFYLMVSSVVGFYSSPLFRSLRPRWHDTAMTQIIGNCVCLLVLSSALPVFSRTLGLTRFDLLGDFGRFNWLGNFYIVFLYNAAFAGLTTLCLVKTFTAAVRAELIRAFGLDRLPLPVSGFPQASRKTQHQ

SEQ ID NO: 77753 - protein, 1181 aa, Homo sapiens
MFTLSLLSRGHGKLGQDKQKLEVYFEPEDYLNWRSPEDYVPVSKPQDKNNASQHSWSLFLPKTFSTRKGALILYSEGFAISAWTPKERRKGPYCPRGPWRKLDLELHTLQDLKEAILAYGRQQGEQDRAWQPYLHFRSQLESQAQRQIQPGHSAKRYLRGLLRTWPPDAMYRLWCAGYIKDSVLLQDSQLNVPKKLRPQQDLSGVPPKYHLLPVFPSFWIQQGKSFEQRQQGLDEGEAGAAGHVDQGPLAKNHGSQGTRLPPRRKQPWQEDETQAEDTSIENHLCLYASKESYNEKTQQTSRKAFGHGRIDHSWLPSDKSHITFCGGAFPNRKADLSDKQRNVKLHKARSSHLLQVLPAERSLFPPVASATGSRIITPGEVKKKKAPKALKLPPISEEPPRVLEPLKSQFKANEPPTELFILPVEIHYHTKQPPKEKAHRRGAPHPESEPESSEESTPVWRPPLKHASLETPWELTVHLPVDASRDTLSPQDDDAPPHDVAPPLDLLPPIKGKKSPESQKGVDSPRTSDHNSPPSLPNMRVPRRALPAAQEDSSDPTLGHFLLGPDGEKVCLSLPGHTQTEALPSGKAYESVNSNISHEEEGPSSQHFLKANTEPRANLHMNLYETSPLTQTTEKQGAQQSLEAAAQKTGEPQSCINKALICSNRKEFYTRKLHIDMTPFLKESGNALDYQEEAGRPLRETHHNDQDPEPRSMTLDSPRASRTEHIQTPEADIVQKVGRDYDVHHLHRGLLGYGPESPERLSAVYTSLLPREREGKAEPRLFSQETSANISHERDLINEAKRKEKPKKDKTKGPKSEREGKVYGQAEAAIGKSKDSKAKKKLEKKTRPQRKRTQKERNLEIAAELSGPDVSYEETEDTSNRGSFASDSFVEDPWLSPKYDAQESQVSLDGRSSPSQIATVTGNMESKEERRCEDPSKALLTKREQEKASWDRLRAERAEMRWLEVEKKRREQEEQRQLQQEQLERAKKMEEELELEQQRRTEEIRLRKQRLQEEQQRQEEEERKQQLRLKAAQERARQQQEEFRRKLRELQRKKQQEEAERAEAEKQRQEELEMQLEEEQKHLMEMAEEERLEYQRRKQEAEEKARLEAEERRQKEEEAARLALEEATKQAQEQARQKAALEKHFHFYQELHKEASGLQWTQNISRPWVYSYFQFLQIPRP

SEQ ID NO: 77754 - protein, 495 aa, Homo sapiens
MNPPSGPRVPPSPTQEPSCMATPAPPSWWDSSQSSISSLGRLPSISPTAPGTWAAAWVPLPTVDVPDHAHYTLGTVILLVGLTGMLGNLTVIYTFCRAVLRGVTVMMQSRSLRTPANMFIINLAVSDFLMSFTQAPVFFTSSLYKQWLFGETGCEFYAFCGALFGISSMITLTAIALDRYLVITRPLATFGVASKRRAAFVLLGVWLYALAWSLPPFFGWSAYVPEGLLTSCSWDYMSFTPAVRAYTMLLCCFVFFLPLLIIIYCYIFIFRAIRETGRALQTFGACKGNGESLWQRQRLQSECKMAKIMLLVILLFVLSWAPYSAVALVAFAGYAHVLTPYMSSVPAVIAKASAIHNPIIYAITHPKYRVAIAQHLPCLGVLLGVSRRHSRPYPSYRSTHRSTLTSHTSNLSWISIRRRQESLGSESEVGWTHMEAAAVWGAAQQANGRSLYGQGLEDLEAKAPPRPQGHEAETPGKRRASSGRSQRPERQRAAP

SEQ ID NO: 77755 - protein, 56 aa, Homo sapiens
MLGWIKRLIRMVFQQVGVSMQSVLWSRKPYGSSRSIVRKIGTNLSLIQCPRVQFQL

SEQ ID NO: 77756 - protein, 125 aa, Homo sapiens
GPFPPGPQFALGPMSLQANLGSVAGSSVLQSLFSSVPAAAGLVHVSSAATRLTNSHAMGSFSGVAGGTVGGVFNHAVPSASAHPFGARVGRGAACGSATLGPSPLQAAASASASSFQAPASVETR

SEQ ID NO: 77757 - protein, 97 aa, Homo sapiens
MQAFLKGTSISTKPPLTKDRGVAASAGSSGENKKAKPVPWVEKYRPKCVDEVAFQEEVVAVLKKSLEGADLPNLLFYGPPGTGKTSTILAAARELFG

SEQ ID NO: 77758 - protein, 1367 aa, Homo sapiens
MKSCGVSLATAAAAAAAFGDEEKKMAAGKASGESEEASPSLTAEEREALGGLDSRLFGFVRFHEDGARTKALLGKAVRCYESLILKAEGKVESDFFCQLGHFNLLLEDYPKALSAYQRYYSLQSDYWKNAAFLYGLGLVYFHYNAFQWAIKAFQEVLYVDPSFCRAKEIHLRLGLMFKVNTDYESSLKHFQLALVDCNPCTLSNAEIQFHIAHLYETQRKYHSAKEAYEQLLQTENLSAQVKATVLQQLGWMHHTVDLLGDKATKESYAIQYLQKSLEADPNSGQSWYFLGRCYSSIGKVQDAFISYRQSIDKSEASADTWCSIGVLYQQQNQPMDALQAYICAVQLDHGHAAAWMDLGTLYESCNQPQDAIKCYLNATRSKSCSNTSALAARIKYLQAQLCNLPQGSLQNKTKLLPSIEEAWSLPIPAELTSRQGAMNTAQQNTSDNWSGGHAVSHPPVQQQAHSWCLTPQKLQMRPTGVAQVRSTGIPNGPTADSSLPTNSVSGQQPQLALTRVPSVSQPGVRPACPGQPLANGPFSAGHVPCSTSRTLGSTDTILIGNNHITGSGSNGNVPYLQRNALTLPHNRTNLTSSAEEPWKNQLSNSTQGLHKGQSSHSAGPNGERPLSSTGPSQHLQAAGSGIQNQNGHPTLPSNSVTQGAALNHLSSHTATSGGQQGITLTKESKPSGNILTVPETSRHTGETPNSTASVEGLPNHVHQMTADAVCSPSHGDSKSPGLLSSDNPQLSALLMGKANNNVGTGTCDKVNNIHPAVHTKTDNSVASSPSSAISTATPSPKSTEQTTTNSVTSLNSPHSGLHTINGEGMEESQSPMKTDLLLVNHKPSPQIIPSMSVSIYPSSAEVLKACRNLGKNGLSNSSILLDKCPPPRPPSSPYPPLPKDKLNPPTPSIYLENKRDAFFPPLHQFCTNPNNPVTVIRGLAGALKLDLGLFSTKTLVEANNEHMVEVRTQLLQPADENWDPTGTKKIWHCESNRSHTTIAKYAQYQASSFQESLREENEKRSHHKDHSDSESTSSDNSGRRRKGPFKTIKFGTNIDLSDDKKWKLQLHELTKLPAFVRVVSAGNLLSHVGHTILGMNTVQLYMKVPGSRTPGHQENNNFCSVNINIGPGDCEWFVVPEGYWGVLNDFCEKNNLNFLMGSWWPNLEDLYEANVPVYRFIQRPGDLVWINAGTVHWVQAIGWCNNIAWNVGPLTACQYKLAVERYEWNKLQSVKSIVPMVHLSWNMARNIKVSDPKLFEMIKYCLLRTLKQCQTLREALIAAGKEIIWHGRTKEEPAHYCSICEVEVFDLLFVTNESNSRKTYIVHCQDCARKTSGNLENFVVLEQYKMEDLMQVYDQFTLAPPLPSASS

SEQ ID NO: 77759 - protein, 151 aa, Homo sapiens
MSRQEPKMFVLLYVTSFAICASGQPRGNQLKGENYSPRYICSIPGLPGPPGPPGANGSPGPHGRIGLPGRDGRDGRKGEKGEKGTAGLRGKTGPLGLAGEKGDQGETGKKGPIGPEGEKGEVGPIGPPGPKGDRGEQGDPGLPGVCRCGSI

SEQ ID NO: 77760 - protein, 91 aa, Homo sapiens
  MOD_RES (1)..(1): Any amino acid
XPTPGIVINRPNGTDVYQGVPKDYTGEDVTPQNFLAVLRGGVRSLRCSGPPGEPPLQGSLQDLLHKMTCSLLPASPVFSEKLQIRVGKALY

SEQ ID NO: 77761 - protein, 2209 aa, Homo sapiens
MVNENTRMYIPEENHQGSNYGSPRPAHANMNANAAAGLAPEHIPTPGAALSWQAAIDAARQAKLMGSAGNATISTVSSTQRKRQQYGKPKKQGSTTATRPPRALLCLTLKNPIRRACISIVEWKPFEIIILLTIFANCVALAIYIPFPEDDSNATNSNLERVEYLFLIIFTVEAFLKVIAYGLLFHPNAYLRNGWNLLDFIIVVVGLFSAILEQATKADGANALGGKGAGFDVKALRAFRVLRPLRLVSGVPSLQVVLNSIIKAMVPLLHIALLVLFVIIIYAIIGLELFMGKMHKTCYNQEGIADVPAEDDPSPCALETGHGRQCQNGTVCKPGWDGPKHGITNFDNFAFAMLTVFQCITMEGWTDVLYWMQDAMGYELPWVYFVSLVIFGSFFVLNLVLGVLSGEFSKEREKAKARGDFQKLREKQQLEEDLKGYLDWITQAEDIDPENEDEGMDEEKPRNMSMPTSETESVNTENVAGGDIEGENCGARLAHRISKSKFSRYWRRWNRFCRRKCRAAVKSNVFYWLVIFLVFLNTLTIASEHYNQPNWLTEVQDTANKALLALFTAEMLLKMYSLGLQAYFVSLFNRFDCFVVCGGILETILVETKIMSPLGISVLRCVRLLRIFKITRYWNSLSNLVASLLNSVRSIASLLLLLFLFIIIFSLLGMQLFGGKFNFDEMQTRRSTFDNFPQSLLTVFQILTGEDWNSVMYDGIMAYGGPSFPGMLVCIYFIILFICGNYILLNVFLAIAVDNLADAESLTSAQKEEEEEKERKKLARTASPEKKQELVEKPAVGESKEEKIELKSITADGESPPATKINMDDLQPNENEDKSPYPNPETTGEEDEEEPEMPVGPRPRPLSELHLKEKAVPMPEASAFFIFSSNNRFRLQCHRIVNDTIFTNLILFFILLSSISLAAEDPVQHTSFRNHILFYFDIVFTTIFTIEIALKMTAYGAFLHKGSFCRNYFNILDLLVVSVSLISFGIQSSAINVVKILRVLRVLRPLRAINRAKGLKHVVQCVFVAIRTIGNIVIVTTLLQFMFACIGVQLFKGKLYTCSDSSKQTEAECKGNYITYKDGEVDHPIIQPRSWENSKFDFDNVLAAMMALFTVSTFEGWPELLYRSIDSHTEDKGPIYNYRVEISIFFIIYIIIIAFFMMNIFVGFVIVTFQEQGEQEYKNCELDKNQRQCVEYALKARPLRRYIPKNQHQYKVWYVVNSTYFEYLMFVLILLNTICLAMQHYGQSCLFKIAMNILNMLFTGLFTVEMILKLIAFKPKGYFSDPWNVFDFLIVIGSIIDVILSETNPAEHTQCSPSMNAEENSRISITFFRLFRVMRLVKLLSRGEGIRTLLWTFIKSFQALPYVALLIVMLFFIYAVIGMQVFGKIALNDTTEINRNNNFQTFPQAVLLLFRCATGEAWQDIMLACMPGKKCAPESEPSNSTEGETPCGSSFAVFYFISFYMLCAFLIINLFVAVIMDNFDYLTRDWSILGPHHLDEFKRIWAEYDPEAKGRIKHLDVVTLLRRIQPPLGFGKLCPHRVACKRLVSMNMPLNSDGTVMFNATLFALVRTALRIKTEGNLEQANEELRAIIKKIWKRTSMKLLDQVVPPAGDDEVTVGKFYATFLIQEYFRKFKKRKEQGLVGKPSQRNALSLQAGLRTLHDIGPEIRRAISGDLTAEEELDKAMKEAVSAASEDDIFRRAGGLFGNHVSYYQSDGRSAFPQTFTTQRPLHINKAGSSQGDTESPSHEKLVDSTFTPSSYSSTGSNANINNANNTALGRLPRPAGYPSTVSTVEGHGPPLSPAIRVQEVAWKLSSNRMHCCDMLDGGTFPPALGPRRAPPCLHQQLQGSLAGLREDTPCIVPGHASLCCSSRVGEWLPAGCTAPQHARCHSRESQAAMAGQEETSQDETYEVKMNHDTEACSEPSLLSTEMLSYQDDENRQLTLPEEDKRDIRQSPKRGFLRSASLGRRASFHLECLKRQKDRGGDISQKTVLPLHLVHHQALAVAGLSPLLQRSHSPASFPRPFATPPATPGSRGWPPQPVPTLRLEGVESSEKLNSSFPSIHCGSWAETTPGGGGSSAARRVRPVSLMVPSQAGAPGRQFHGSASSLVEAVLISEGLGQFAQDPKFIEVTTQELADACDMTIEEMESAADNILSGGAPQSPNGALLPFVNCRDAGQDRAGGEEDAGCVRARGRPSEEELQDSRVYVSSL

SEQ ID NO: 77762 - protein, 215 aa, Homo sapiens
MLERPPALAMPMPTEGTPPPLSGTPIPVPAYFRHAEPGFSLKRPRGLSRSLPPPPPAKGSIPISRLFPPRTPGWHQLQPRRVSFRGEASETLQSPGYDPSRPESFFQQSFQRLSRLGHGSYGEVFKLLFPPRDTSKRSPGVSAGRPWLLRRWVSTDPARGMEVRSKEDGRLYAVKRSMSPFRGPKDRARKLAEVGSHEKVGQHPCCVRLEQAWEE

SEQ ID NO: 77763 - protein, 422 aa, Homo sapiens
MAAAAAATAAAAASIRERQTVALKRMLNFNVPHIKNSTGEPVWKVLIYDRFGQDIISPLLSVKELRDMGITLHLLLHSDRDPIPDVPAVYFVMPTEENIDRMCQDLRNQLYESYYLNFISAISRSKLEDIANAALAASAVTQVAKVFDQYLNFITLEDDMFVLCNQNKELVSYRAINRPDITDTEMETVMDTIVDSLFCFFVTLGAVPIIRCSRGTAAEMVAVKLDKKLRENLRDARNSLFTGDTLGAGQFSFQRPLLVLVDRNIDLATPLHHTWTYQALVHDVLDFHLNRVNLEESSGVENSPAGARPKRKNKKSYDLTPVDKFWQKHKGSPFPEVAESVQQELESYRAQEDEVKRLKSIMGLEGEDEGAISMLSDNTAKLTSAVSSLPELLEKKRLIDLHTNVATAVLEHIKKTVEDKGQ

SEQ ID NO: 77764 - protein, 252 aa, Homo sapiens
MCSRGWDSCLALELLLLPLSLLVTSIQGHLVHMTVVSGSNVTLNISESLPENYKQLTWFYTFDQKIVEWDSRKSKYFESKFKGRVRLDPQSGALYISKVQKEDNSTYIMRVLKKTGNEQEWKIKLQVLDPVPKPVIKIEKIEDMDDNCYLKLSCVIPGESVNYTWYGDKRPFPKELQNSVLETTLMPHNYSRCYTCQVSNSVSSKNGTVCLSPPCTLGKKDPWELRGAQGNWSCFEQRKAGGPIQPPCTVWW

SEQ ID NO: 77765 - protein, 190 aa, Homo sapiens
KISDIPIPERAPKHVLFQRFAKIFIGCLAAVTSGMMYALYLSAYHERKFWFSNRQELEREITFQGDSAIYYSYYKDMLKAPSFERGVYELTHNNKTVSLKTINAVQQMSLYPELIASILYQATGSNEIIEPVYFYIGIVFGLQGIYVTALFVTSWLMSGTWLAGMLTVAWFVINSCTDPWYSVGGDNTGY

SEQ ID NO: 77766 - protein, 43 aa, Homo sapiens
MEFPGGNDNYLTITGPSHPFLSGAEPLLQKGPGIEQRRKGKLS

SEQ ID NO: 77767 - protein, 245 aa, Homo sapiens
MAQPCCPLVISLNGMKRSRGSAGGHGSRSQKELPTEPPYTAYVGNLPFNTVQGDIDAIFKDLSIRSVRLVRDKDTDKFKGFCYVEFDEVDSLKEALTYDGALLGDRSLRVDIAEGRKQDKGGFGFRKGGPDDRGMGSSRESRGGWDSRDDFNSGFRDDFLGGRGGSRPGDRRTGPPMGSRFRDGPPLRGSNMDFREPTEEERAQRPRLQLKPRTVATPLNQVANPNSAIFGGARPREEVVQKEQE

SEQ ID NO: 77768 - protein, 142 aa, Homo sapiens
  MOD_RES (1)..(1): Any amino acid
XGEGKDMYLILENDMLSLVDPMDRSVLHSQPIVSIRVWGVGRDNGRERDFAYVARDKDTRILKCHVFRCDTPAKAIATSLHEICSKIMAERKNAKALACSSLQERANVNLDVPLQDFPTPKTELVQKFHVQYLGMLPVDKPV

SEQ ID NO: 77769 - protein, 631 aa, Homo sapiens
MHRGKLDCAGGALLSSYLIVLMILLAVVICTVSAIMCVSMRGTICNPGPRKSMSKLLYIRLALFFPEMVWASLGAAWVADGVQCDRTVVNGIIATVVVSWIIIAATVVSIIIVFDPLGGKMAPYSSAGPSHLDSHDSSQLLNGLKTAATSVWETRIKLLCCCIGKDDHTRVAFSSTAELFSTYFSDTDLVPSDIAAGLALLHQQQDNIRNNQEPAQVVCHAPGSSQEADLDAELENCHHYMQFAAAAYGWPLYIYRNPLTGLCRIGGDCCRSRTTDYDLVGGDQLNCHFGSILHTTGLQYRDFIHVSFHDKVYELPFLVALDHRKESVVVAVRGTMSLQDVLTDLSAESEVLDVECEVQDRLAHKGISQAARYVYQRLINDGILSQAFSIAPEYRLVIVGHSLGGGAAALLATMLRAAYPQVRCYAFSPPRGLWSKALQEYSQSFIVSLVLGKDVIPRLSVTNLEDLKRRILRVVAHCNKPKYKILLHGLWYELFGGNPNNLPTELDGGDQEVLTQPLLGEQSLLTRWSPAYSFSSDSPLDSSPKYPPLYPPGRIIHLQEEGASGRFGCCSAAHYSAKWSHEAEFSKILIGPKMLTDHMPDILMRALDSVVSDRAACVSCPAQGVSSVDVA

SEQ ID NO: 77770 - protein, 188 aa, Homo sapiens
MASPGSGFWSFGSEDGSGDSENPGTARAWCQVAQKFTGGIGNKLCALLYGDAEKPAESGGSQPPRAAARKAACACDQKPCSCSKVDVNYAFLHATDLLPACDGERPTLAFLQDVMNILLQYVVKSFDRSTKVIDFHYPNELLQEYNWELADQPQNLEEILMHCQTTLKYAIKTGIVSSKIIKLFFRLQ

SEQ ID NO: 77771 - protein, 244 aa, Homo sapiens
  MOD_RES (1)..(1): Any amino acid
XQYTSAVTENIKALFPTEIHSGLLEVISPSPHFYPDFSRLRESFGDPKERVRWRTKQNLDYCFLMMYAQSKGIYYVQLEDDIVAKPNYLSTMKNFALQQPSEDWMILEFSQLGFIGKMFKSLDLSLIVEFILMFYRDKPIDWLLDHILWVKVCNPEKDAKHCDRQKANLRIRFKPSLFQHVGTHSSLAGKIQKLKDKDFGKQALRKEHVNPPAEWEHRAPGGQALQHVCGGAALRQPSVRQGGP

SEQ ID NO: 77772 - protein, 509 aa, Homo sapiens
MRLHLLLLLALCGAGTTAAELSYSLRGNWSICNGNGSLELPGAVPGCVHSALFQQGLIQDSYYRFNDLNYRWVSLDNWTYSKEFKIPFEISKWQKVNLILEGVDTVSKILFNEVTIGETDNMFNRYSFDITNVVRDVNSIELRFQSAVLYAAQQSKAHTRYQVPPDCPPLVQKGECHVNFVRKEQCSFSWDWGPSFPTQGIWKDVRIEAYNICHLNYFTFSPIYDKSAQEWNLEIESTFDVVSSKPVGGQVIVAIPKLQTQQTYSIELQPGKRIVELFVNISKNITVETWWPHGHGNQTGYNMTVLFELDGGLNIEKSAKVYFRTVELIEEPIKGSPGLSFYFKINGFPIFLKGSNWIPADSFQDRVTSELLRLLLQSVVDANMNTLRVWGGGIYEQDEFYELCDELGIMVWQDFMFACALYPTDQGFLDSVTAEVAYQIKRLKSHPSIIIWSGNNENEEALMMNWYHISFTDRPIYIKDYVTLYVKNIRELVLACGKMPDTIDLTNTC

SEQ ID NO: 77773 - protein, 144 aa, Homo sapiens
  MOD_RES (1)..(1): Any amino acid
XNKADESIQWLEIHKKKSQAMSKSVTLRAKAMDPHKSLEEVFKAKLKENRNNDRKRAKEYKKELEEMKQRIQTRPYLFEQVAKDLAKKEAEQWYLDTLKQAGLEEDFVRNKGQGTRAVQEKETKIKDFPRCVFFGGDRVTITWA

SEQ ID NO: 77774 - protein, 1708 aa, Homo sapiens
MAGASVKVAVRVRPFNSREMSRDSKCIIQMSGSTTTIVNPKQPKETPKSFSFDYSYWSHTSPEDINYASQKQVYRDIGEEMLQHAFEGYNVCIFAYGQTGAGKSYTMMGKQEKDQQGIIPQLCEDLFSRINDTTNDNMSYSVEVSYMEIYCERVRDLLNPKNKGNLRVREHPLLGPYVEDLSKLAVTSYNDIQDLMDSGNKARTVAATNMNETSSRSHAVFNIIFTQKRHDAETNITTEKVSKISLVDLAGSERADSTGAKGTRLKEGANINKSLTTLGKVISALAEMDSGPNKNKKKKKTDFIPYRDSVLTWLLRENLGGNSRTAMVAALSPADINYDETLSTLRYADRAKQIRCNAVINEDPNNKLIRELKDEVTRLRDLLYAQGLGDITDTNTVPGGPKLTNALVGMSPSSSLSALSSRAASVSSLHERILFAPGSEEAIERLKETEKIIAELNETWEEKLRRTEAIRMEREALLAEMGVAMREDGGTLGVFSPKKTPHLVNLNEDPLMSECLLYYIKDGITRVGREDGERRQDIVLSGHFIKEEHCVFRSDSRGGSEAVVTLEPCEGADTYVNGKKVTEPSILRSGNRIIMGKSHVFRFNHPEQARQERERTPCAETPAEPVDWAFAQRELLEKQGIDMKQEMEQRLQELEDQYRREREEATYLLEQQRLDYESKLEALQKQMDSRYYPEVNEEEEEPEDEVQWTERECELALWAFRKWKWYQFTSLRDLLWGNAIFLKEANAISVELKKKVQFQFVLLTDTLYSPLPPDLLPPEAAKDRETRPFPRTIVAVEVQDQKNGATHYWTLEKLRQRLDLMREMYDRAAEVPSSVIEDCDNVVTGGDPFYDRFPWFRLVGRAFVYLSNLLYPVPLVHRVAIVSEKGEVKGFLRVAVQAISADEEAPDYGSGVRQSGTAKISFDDQHFEKFQSESCPVVGMSRSGTSQEELRIVEGQGQGADVGPSADEVNNNTCSAVPPEGLLLDSSEKAALDGPLDAALDHLRLGNTFTFRVTVLQASSISAEYADIFCQFNFIHRHDEAFSTEPLKNTGRGPPLGFYHVQNIAVEVTKSFIEYIKSQPIVFEVFGHYQQHPFPPLCKDVLSPLRPSRRHFPRVMPLSKPVPATKLSTLTRPCPGPCHCKYDLLVYFEICELEANGDYIPAVVDHRGGMPCMGTFLLHQGIQRRITVTLLHETGSHIRWKEVRELVVGRIRNTPETDESLIDPNILSLNILSSGYIHPAQDDRQFLDSDIPRTFYQFEAAWDSSMHNSLLLNRVTPYREKIYMTLSAYIEMENCTQPAVVTKDFCMVFYSRDAKLPASRSIRNLFGSGSLRASESNRVTGVYELSLCHVADAGSPGMQRRRRRVLDTSVAYVRGEENLAGWRPRSDSLILDHQWELEKLSLLQEVEKTRHYLLLREKLETAQRPVPEALSPAFSEDSESHGSSSASSPLSAEGRPSPLEAPNERQRELAVKCLRLLTHTFNREYTHSHVCVSASESKLSEMSVTLLRDPSMSPLGVATLTPSSTCPSLVEGRYGATDLRTPQPCSRPASPEPELLPEADSKKLPSPARATETDKEPQRLLVPDIQEIRVSPIVSKKGYLHFLEPHTSGWARRFVVVRRPYAYMYNSDKDTVERFVLNLATAQVEYSEDQQAMLKTPNTFAVCTEHRGILLQAASDKDMHDWLYAFNPLLAGTIRSKLSRRRSAQMRV

SEQ ID NO: 77775 - protein, 495 aa, Homo sapiens
  MOD_RES (1)..(1): Any amino acid
XNRKLGYNSGLFLEDELDIFGKNSDIGQAAERRLMMCQSTFLPQVEGTKKPQEPPISLLLLLQNQHTQPFASLNFLDYISSNNRQTLPCVSWSYDRVQADNNDYWTECFNALEQGRQYVDNPTGGKVDEALVRSATVHSWPHSNVLDISMLSSQDVVRMLLSLQPFLQDAIQKKRTGRTWENIQHVQGPLTWQQFHKMAGRGTYGSEESPEPLPIPTLLVGYDKDFLTISPFSLPFWERLLLDPYGGHRDVAYIVVCPENEALLEGAKTFFRDLSAVYEMCRLGQHKPICKVLRDGIMRVGKTVAQKLTDELVSEWFNQPWSGEENDNHSRLKLYAQVCRHHLAPYLATLQLDSSLLIPPKYQTPPAAAQGQATPGNAGPLAPNGSAAPPAGSAFNPTSNSSSTNPAASSSASGSSVPPVSSSASAPGISQISTTSSSGFSGSVGGQNPSTGGISADRTQGNIGCGGDTDPGQSSSQPSQDGQERKGENRNSHGA

SEQ ID NO: 77776 - protein, 170 aa, Homo sapiens
MHRLPLLGEKQEAKENGTNLTFIGDKTAMHEPLQTWQDAPYIFIVHIGISSSKESSKENSLSNLFTMTVEVKGPYEYLTLEDYPLMIFFMVMCIVYVLFGVLWLAWSACYWRDLLRIQFWIGAVIFLGMLEKAVFYAEFQNIRYKGESVQGALILAELLSAVKRSLARTL

SEQ ID NO: 77777 - protein, 438 aa, Homo sapiens
MSLTVVSMACVGFFLLQGAWPLMGGQDKPFLSAWPSTVVPRGGHVALQCHYRRGFNNFMLYKEDRSHVPIFHGRIFQESFIMGPVTPAHAGTYRCRGSRPHSLTGWSAPSNPLVIMVTGNHRKPSLLAHPGPLLKSGETVILQCWSDVMFEHFFLHREGISEDPSRLVGQIHDGVSKANFSIGPLMPVLAGTYRCYGSVPHSPYQLSAPSDPLDIVITGLYEKPSLSAQPGPTVQAGENVTLSCSSWSSYDIYHLSREGEAHERRLRAVPKVNRTFQADFPLGPATHGGTYRCFGSFRALPCVWSNSSDPLLVSVTGICRHLHVLIGTSVVIFLFILLLFFLLYRWCSNKKNAAVMDQEPAGDRTVNRQDSDEQDPQEVTYAQLDHCVFIQRKISRPSQRPKTPLTDTSVYTELPNAEPRSKVVSCPRAPQSGLEGVF

SEQ ID NO: 77778 - protein, 144 aa, Homo sapiens
MSRRKQAKPRSLKDPNCKLEDKTEDGEALDCKKRPEDGEELEDEAVHSCDSCLQVFESLSDITEHKINQCQLTDGVDVEDDPTCSWPASSPSSKDQTSPSHGEGCDFGEEEGGPGLPYPCQFCDKSFSRLSYLKHHEQSHSDKL

SEQ ID NO: 77779 - protein, 947 aa, Homo sapiens
METQELRGALALLLLCFFTSASQDLQVIDLLTVGESRQMVAVAEKIRTALLTAGDIYLLSTFRLPPKQGGVLFGLYSRQDNTRWLEASVVGKINKVLVRYQREDGKVHAVNLQQAGLADGRTHTVLLRLRGPSRPSPALHLYVDCKLGDQHAGLPALAPIPPAEVDGLEIRTGQKAYLRMQGFVESMKIILGGSMARVGALSECPFQGDESIHSAGEQTKALVTQLTLFNQILVELRDDIRDQVKEMSLIRNTIMECQVCGFHEQRSHCSPNPCFRGVDCMEVYEYPGYRCGPCPPGLQGNGTHCSDINECAHADPCFPGSSCINTMPGFHCEACPRGYKGTQVSGVGIDYARASKQVCNDIDECNDGNNGGCDPNSICTNTVGSFKCGPCRLGFLGNQSQGCLPARTCHSPAHSPCHIHAHCLFERNGAVSCQCNVGWAGNGNVCGTDTDIDGYPDQALPCMDNNKHCKQDNCLLTPNSGQEDADNDGVGDQCDDDADGDGIKNVEDNCRLFPNKDQQNSDTDSFGDACDNCPNVPNNDQKDTDGNGEGDACDNDVDGDGIPNGLDNCPKVPNPLQTDRDEDGVGDACDSCPEMSNPTQTDADSDLVGDVCDTNEDSDGDGHQDTKDNCPQLPNSSQLDSDNDGLGDECDGDDDNDGIPDYVPPGPDNCRLVPNPNQKDSDGNGVGDVCEDDFDNDAVVDPLDVCPESAEVTLTDFRAYQTVVLDPEGDAQIDPNWVVLNQGMEIVQTMNSDPGLAVGYTAFNGVDFEGTFHVNTVTDDDYAGFLFSYQDSGRFYVVMWKQTEQTYWQATPFRAVAQPGLQLKAVTSVSGPGEHLRNALWHTGHTPDQVRLLWTDPRNVGWRDKTSYRWQLLHRPQVGYIRVKLYEGPQLVADSGVIIDTSMRGGRLGVFCFSQENIIWSNLQYRCNDTVPEDFEPFRRQLLQGRV

SEQ ID NO: 77780 - protein, 15 aa, Homo sapiens
MFMEEGANKTVEPRA

SEQ ID NO: 77781 - protein, 88 aa, Homo sapiens
MLLSLVLHTYSMRYLLPSVVLLGTAPTYVLAWGVWRLLSAFLPARFYQALDDRLYCVYQSMVLFFFENYTGVQLTGLLLTSWPSGRMR

SEQ ID NO: 77782 - protein, 323 aa, Homo sapiens
VTAEAISWNESTSETNNSMVTEFIFLGLSDSQELQTFLFMLFFVFYGGIVFGNLLIVITVVSDSHLHSPMYFLLANLSLIDLSLSSVTAPKMITDFFSQRKVISFKGCLVQIFLLHFFGGSEMVILIAMGFDRYIAICKPLHYTTIMCGNACVGIMAVAWGIGFLHSVSQLAFAVHLPFCGPNEVDSFYCDLPRVIKLACTDTYRLDIMVIANSGVLTVCSFVLLIISYTIILMTIQHCPLDKSSKALSTLTAHITVVLLFFGPCVFIYAWPFPIKSLDKFLAVFYSVITPLLNPIIYTLRNKDMKTAIRRLRKWDAHSSVKF

SEQ ID NO: 77783 - protein, 330 aa, Homo sapiens
MWGLKVLLLPVVSFALYPEEILDTHWELWKKTHRKQYNNKVDEISRRLIWEKNLKYISIHNLEASLGVHTYELAMNHLGDMTSEEVVQKMTGLKVPLSHSRSNDTLYIPEWEGRAPDSVDYRKKGYVTPVKNQGQCGSCWAFSSVGALEGQLKKKTGKLLNLSPQNLVDCVSENDGCGGGYMTNAFQYVQKNRGIDSEDAYPYVGQEESCMYNPTGKAAKCRGYREIPEGNEKALKRAVARVGPVSVAIDASLTSFQFYSKAGEKTGETKDISSWLEIRTTPVALPTWPASPRCDSSQPNPSCSSISSTMVQCNDALWKGVGVLFLKQMW

SEQ ID NO: 77784 - protein, 1262 aa, Homo sapiens
MTFKTFRPAAMLIERSSDFGKTWGVYRYFAYDCEASFPGISTGPMKKVDDIICDSRYSDIEPSTEGEVIFRALDPAFKIEDPYSPRIQNLLKITNLRIKFVKLHTLGDNLLDSRMEIREKYYYAVYDMVVRGNCFCYGHASECAPVDGFNEEVEGMVHGHCMCRHNTKGLNCELCMDFYHDLPWRPAEGRNSNACKKCNCNEHSISCHFDMAVYLATGNVSGGVCDDCQHNTMGRNCEQCKPFYYQHPERDIRDPNFCERCTCDPAGSQNEGICDSYTDFSTGLIAGQCRCKLNVEGEHCDVCKEGFYDLSSEDPFGCKSCACNPLGTIPGGNPCDSETGHCYCKRLVTGQHCDQCLPEHWGLSNDLDGCRPCDCDLGGALNNSCFAESGQCSCRPHMIGRQCNEVEPGYYFATLDHYLYEAEEANLGPGVSIVERQYIQDRIPSWTGAGFVRVPEGAYLEFFIDNIPYSMEYDILIRYEPQLPDHWEKAVITVQRPGRIPTSSRCGNTIPDDDNQVVSLSPGSRYVVLPRPVCFEKGTNYTVRLELPQYTSSDSDVESPYTLIDSLVLMPYCKSLDIFTVGGSGDGVVTNSAWETFQRYRCLENSRSVVKTPMTDVCRNIIFSISALLHQTGLACECDPQGSLSSVCDPNGGQCQCRPNVVGRTCNRCAPGTFGFGPSGCKPCECHLQGSVNAFCNPVTGQCHCFQGVYARQCDRCLPGHWGFPSCQPCQCNGHADDCDPVTGECLNCQDYTMGHNCERCLAGYYGDPIIGSGDHCRPCPCPDGPDSGRQFARSCYQDPVTLQLACVCDPGYIGSRCDDCASGYFGNPSEVGGSCQPCQCHNNIDTTDPEACDKETGRCLKCLYHTEGEHCQFCRFGYYGDALQQDCRKCVCNYLGTVQEHCNGSDCQCDKATGQCLCLPNVIGQNCDRCAPNTWQLASGTGCDPCNCNAAHSFGPSCNEFTGQCQCMPGFGGRTCSECQELFWGDPDVECRACDCDPRGIETPQCDQSTGQCVCVEGVEGPRCDKCTRGYSGVFPDCTPCHQCFALWDVIIAELTNRTHRFLEKAKALKISGVIGPYRETVDSVERKVSEIKDILAQSPAAEPLKNIGNLFEEAEKLIKDVTEMMAQVEVKLSDTTSQSNSTAKELDSLQTEAESLDNTVKELAEQLEFIKNSDIRGALDSITKYFQMSLEAEERVNASTTEPNSTVEQSALMRDRVEDVMMERESQFKEKQEEQARLLDELAGKLQSLDLSAAAEMYCA

SEQ ID NO: 77785 - protein, 402 aa, Homo sapiens
MTTSGHACPVPAVNGHMTHYPATPYPLLFPPVIGGLSLPPLHGLHGHPPPSGCSTPSPATIETQSTSSEELVPSPPSPLPPPRVYKPCFVCQDKSSGYHYGVSACEGCKGFFRRSIQKNMIYTCHRDKNCVINKVTRNRCQYCRLQKCFEVGMSKESVRNDRNKKKKETSKQECTESYEMTAELDDLTEKIRKAHQETFPSLCQLGKYTTNSSADHRVRLDLGLWDKFSELATKCIIKIVEFAKRLPGFTGLTIADQITLLKAACLDILILRICTRYTPEQDTMTFSDGLTLNRTQMHNAGFGPLTDLVFTFANQLLPLEMDDTETGLLSAICLICGDRQDLEEPTKVDKLQEPLLEALKIYIRKRRPSKPHMFPKILMKITDLRSISAKGAERVITLKMEI

SEQ ID NO: 77786 - protein, 231 aa, Homo sapiens
MLRLPTVFRQMRPVSRVLAPHLTRAYAKDVKFGADARALMLQGVDLLADAVAVTMGPKGRTVIIEQSWGSPKVTKDGVTVAKSIDLKDKYKNIGAKLVQDVANNTNEEAGDGTTTATVLARSIAKEGFEKISKGANPVEIRRGVMLAVDAVIAELKKQSKPVTTPEEIAQVATISANGDKEIGNIISDAMKKVGRKGVITDGKTLNDELEIIEGMKFDRGYISPYFINTSK

SEQ ID NO: 77787 - protein, 141 aa, Homo sapiens
MKGEDDALSDKHGCPAYVSPEILNTTGTYSGKAADVWSLGVMLYTLLVGRYPFHDSDPSALFSKIRRGQFCIPEHISPKARCLIRSLLRREPSERLTAPEILLHPWFESVLEPGYIDSEIGTSDQIVPEYQEDSDISSFFC

SEQ ID NO: 77788 - protein, 98 aa, Homo sapiens
MVVLWKIPSKELRVRLTLPHSIRSDSEDICLFTKDEPNSTPEKTEQFYRKLLNKHGIKTVSQIISLQTLKKEYKSYEAKLRLLSSFDFFLTDARIRRL

SEQ ID NO: 77789 - protein, 333 aa, Homo sapiens
MEREKEQFRKLFIGGLSFETTEESLRNYYEQWGKLTDCVVMRDPASKRSRGFGFVTFSSMAEVDAAMAARPHSIDGRVVEPKRAVAREESGKPGAHVTVKKLFVGGIKEDTEEHHLRDYFEEYGKIDTIEIITDRQSGKKRGFGFVTFDDHDPVDKIVLQKYHTINGHNAEVRKALSRQEMQEVQSSRSGRGGNFGFGDSRGGGGNFGPGPGSNFRGGSDGYGSGRGFGDGYNGYGGGPGGGNFGGSPGYGGGRGGYGGGGPGYGNQGGGYGGNYGSGNYNDFGNYNQQPSNYGPMKSGNFGGSRNMGGPYGGGNYGPGGSGGSGGYGGRSRY

SEQ ID NO: 77790 - protein, 155 aa, Homo sapiens
MHEFSAKDIDGHMVNLDKYRGFVCIVTNVASQCGKTEVNYTQLVDLHARYAECGLRILAFPCNQFGKQEPGSNEEIKEFAAGYNVKFDMFSKICVNGDDAHPLWKWMKIQPKGKGILGNAIKWNFTKFLIDKNGCVVKRYGPMEEPLVIEKDLPH

SEQ ID NO: 77791 - protein, 123 aa, Homo sapiens
  MOD_RES (1)..(1): Any amino acid
XGLDGTETYLPPLSMSQNLARLAQRIDFSQGSGSEEEEAAGTEGDAQEWPGAGSSADQDDEEGVVKFQPSLWPWDSVRNNLRSALTEMCVLYDVLSIVRDKKFMTLDPVSQDALPPKQSCCNH

SEQ ID NO: 77792 - protein, 322 aa, Homo sapiens
MAVLAALLRSGARSRSPLLRRLVQEIRYVERSYVSKPTLKDVMVAGGMESMSNVPYVMNRGSTPYGGVKLEDLIVKDGLTDVYNKIHMGSCAENTAKKLNIARNEQDAYAINSYTRSKAAWEAGKFGNEVIPVTVTVKGQPDVVVKEDEEYKRVDFSKVPKLKTVFQKENGTVTAANASTLNDGAAALVLMTADAAKRLNVTPLARIVAFADAAVEPIDFPIAPVYAASMVLKDVGLKKEDIAMWEVNEAFSLVVLANIKMLEIDPQKVNINGGAVSLGHPIGMSGARIVGHLTHALKQGEYGLASICNGGGGASAMLIQKL

SEQ ID NO: 77793 - protein, 115 aa, Homo sapiens
MASATDSRYGQKESSDQNFDYMFKILIIGNSSVGKTSFLFRYADDSFTPAFVSTVGIDFKVKTIYRNDKRIKLQIWDTAGQERYRTITTAYYRGAMGFILMYDITNEESFNAVQD

SEQ ID NO: 77794 - protein, 93 aa, Homo sapiens
MTVELWLRLRGKGLAMLHVTRGVWGSRVRVWPLLPALLGPPRALSSLAAKMGEYRKMWNPREPRDWAQQYRERFIPFSKEQLLRLLIQSLDVV

SEQ ID NO: 77795 - protein, 88 aa, Homo sapiens
  MOD_RES (1)..(1): Any amino acid
XFNLQVPQLYKIKRYQPFSVHKSSTSYRPQKLARALKQGAEDEVTTITALPKQDSTTQLSGKTSVLSMKPPEALAMSLDYDPLYVFTS

SEQ ID NO: 77796 - protein, 251 aa, Homo sapiens
  MOD_RES (1)..(1): Any amino acid
XELEPEPREDDVEAPPPPEPTPRVRKAQAGGKPGKRPGTAAEVPPEKTKDKGKKGKKDKGPKVPKESLEGSPRPPKKGKEKPPKATKKPKEKPPKATKKPKEKPPKATKKPKEKPPKATKKPPSGKRPPILAPSETLEWPLPPPPSPGPEELPQEGGAPLSNNWQNPGEETHVEAREHQPEPPVKPLLPPLPPDYGDGYVIPNYDDMDYYFGPPPPQKPDAERQTDEEKEELKKPKKEDSSPKEETDKWAV

SEQ ID NO: 77797 - protein, 69 aa, Homo sapiens
LKDHRPRMVWDSQASEHFFEYKKSRSGRHVVFYPTLKSLQVRLELARELGVGVSIWELGQGLDYFYDLL

SEQ ID NO: 77798 - protein, 144 aa, Homo sapiens
MAQFDTEYQRLEASYSDSPPGEEDLLVHVAEGSKSPWHHIENLDLFFSRVYNLHQKNGFTCMLIGEIFELMQFLFVVAFTTFLVSCVDYDILFANKMVNHSLHPTEPVKVTLPDAFLPAQVCSARIQENGSLITILVIAGVFWI

SEQ ID NO: 77799 - protein, 132 aa, Homo sapiens
  MOD_RES (1)..(1): Any amino acid
XTNPFQTNARGATGLSGAMHSQVFPHAHFAATFGTASMSMPTGFGTPAPYSLPTSFSGSFQQPAFPAQAAFPQQTAFSQQPNGAGFAAFGQTKPVVTPFGQVAAAGVSSNPFMTGAPTGQFPTGSSSTNPFL

SEQ ID NO: 77800 - protein, 145 aa, Homo sapiens
  MOD_RES (1)..(1): Any amino acid
XQWKAFTKPEEACSFILSADFPALVVKASGLAAGKGVIVAKSKEEACKAVQEIMQEKAFGAAGETIVIEELLDGEEVSCLCFTDGKTVAPMPPAQDHKRLLEGDGGPNTGGMGAYCPAPQIKNRPGAVAHACNPSTLGGRGRWIT

SEQ ID NO: 77801 - protein, 89 aa, Homo sapiens
MFSLMASCCGWFKRWREPVRKVTLLMVGLDNAGKTATAKGIQGEMGSPYVAQAGLECLASSYSSALASKSAGITGMSHHAQPGQNTLKM

SEQ ID NO: 77802 - protein, 565 aa, Homo sapiens
  MOD_RES (1)..(1): Any amino acid
XGSENHSAAYRVDQGVLNNGCFVDALNVVPHVFLLFITFPILFIGWGSQSSKVHIHHSTWLHFPGHNLRWILTFMLLFVLVCEIAEGILSDGVTESHHLHLYMPAGMAFMAAVTSVVYYHNIETSNFPKLLIALLVYWTLAFITKTIKFVKFLDHAIGFSQLRFCLTGLLVILYGMLLLVEVNVIRVRRYIFFKTPREVKPPEDLQDLGVRFLQPFVNLLSKGTYWWMNAFIKTAHKKPIDLRAIGKLPIAMRALTNYQRLCEAFDAQRKDIQGTQGARAIWQALSHAFGRRLVLSSTFRILADLLGFAGPLCIFGIVDHLGKENDVFQPKTQFLGVYFVSSQEFLANAYVLAVLLFLALLLQRTFLQASYYVAIETGINLRGAIQTKIYNKIMHLSTSNLSMGEMTAGQICNLVAIDTNQLMWFFFLCPNLWAMPVQIIVGVILLYYILGVSALIGAAVIILLAPVQYFVATKLSQAQRSTLEYSNERLKQTNEMLRGIKLLKLYAWENIFRTRVETTRRKEMTSLRAFAIYTSISIFMNTAIPIAAVLIRAKAKRVPVQCRDP

SEQ ID NO: 77803 - protein, 88 aa, Homo sapiens
  MOD_RES (1)..(1): Any amino acid
XKRIGVRDVRLNGSAASHVLHQDSGLGYKDLDLIFCADLRGEGEFQTVKDVVLDCLLDFLPEGVNKEKITPLTLKEESHTTTYFLNIS

SEQ ID NO: 77804 - protein, 92 aa, Homo sapiens
MPEIRVTPLGACPVLSWNLVLPPGRGSRAPSSTDTRTGFHVLPHGGPARTWAEAASWSPLRARMSCWTVECTWASMTTDASLTSPTSPRTAA

SEQ ID NO: 77805 - protein, 110 aa, Homo sapiens
MAAPSQQRLVVVSVSPQSRASLAARFQLNPTDTARKLTSFFKKIGVHFVFDTAFSRHFSLLESQREFVRRFRGQADCRQALPLLASACPGWICYAEKTHGSFILPHISTA

SEQ ID NO: 77806 - protein, 2341 aa, Homo sapiens
MKNIYCLIPKLVNFATLGCLWISVVQCTVLNSCLKSCVTNLGQQLDLGTPHNLSEPCIQGCHFWNSVDQKNCALKCNDTYATVCERESCEVGCSSAEGAYEEEVLENADLPTAPFASSIGSHNMTLRWKSANFSGVKYIIQWKYAQLLGSWTYTKTVSRPSYVVKPLHPFTEYIFRVVWIFTAQLQLYSPPSPSYRTHPHGVPETAPLIRNIESSSPDTVEVSWDPPQFPGGPILGYNLRLISKNQKLDAGTQRTSFQFYSTLPNTIYRFSIAAVNEVGEGPEAESSITTSSSAVQQEEQWLFLSRKTSLRKRSLKHLVDEAHCLRLDAIYHNITGISVDVHQQIVYFSEGTLIWAKKAANMSDVSDLRIFYRGSGLISSISIDWLYQRMYFIMDELVCVCDLENCSNIEEITPPSISAPQKIVADSYNGYVFYLLRDGIYRADLPVPSGRCAEAVRIVESCTLKDFAIKPQAKRIIYFNDTAQVFMSTFLDGSASHLILPRIPFADVKSFACENNDFLVTDGKVIFQQDALSFNEFIVGCDLSHIEEFGFGNLVIFGSSSQLHPLPGRPQELSVLFGSHQALVQWKPPALAIGASPSAWQNWTYEVKVSTQDPPEVTHIFLNISGTMLNVPELQSAMKYKVSVRASSPKRPGPWSEPSVGTTLVPASEPPFIMAVKEDGLWSKPLNSFGPGEFLSSDIGNVSDMDWYNNSLYYSDTKGDVFVWLLNGTDISENYHLPSIAGAGALAFEWLGHFLYWAGKTYVIQRQSVLTGHTDIVTHVKLLVNDMVVDSVGGYLYWTTLYSVESTRLNGESSLVLQTQPWFSGKKVIALTLDLSDGLLYWLVQDSQCIHLYTAVLRGQSTGDTTITEFAAWSTSEISQNALMYYSGRLFWINGFRIITTQEIGQKTSVSVLEPARFNQFTIIQTSLKPLPGNFSFTPKVIPDSVQESSFRIEGNASSFQILWNGPPAVDWGVVFYSVEFSAHSKFLASEQHSLPVFTVEGLEPYALFNLSVTPYTYWGKGPKTSLSLRAPETVPSAPENPRIFILPSGKCCNKNEVVVEFRWNKPKHENGVLTKFEIFYNISNQSITNKTCEDWIAVNVTPSVMSFQLEGMSPRCFIAFQVRAFTSKGPGPYADVVKSTTSEINPFPHLITLLGNKIVFLDMDQNQVVWTFSAERVISAVCYTADNEMGYYAEGDSLFLLHLHNRSSSELFQDSLVFDITVITIDWISRHLYFALKESQNGMQVFDVDLEHKVKYPREVKIHNRNSTIISFSVYPLLSRLYWTEVSNFGYQMFYYSIISHTLHRILQPTATNQQNKRNQCSCNVTEFELSGAMAIDTSNLEKPLIYFAKAQEIWAMDLEGCQCWRVITVPAMLGKTLVSLTVDGDLIYWIITAKDSTQIYQAKKGNGAIVSQVKALRSRHILAYSSVMQPFPDKAFLSLASDTVEPTILNATNTSLTIRLPLAKTNLTWYGITSPTPTYLVYYAEVNDRKNSSDLKYRILEFQDSIALIEDLQPFSTYMIQIAVKNYYSDPLEHLPPGKEIWGKTKNGVPEAVQLINTTVRSDTSLIISWRESHKPNGPKESVRYQLAISHLALIPETPLRQSEFPNGRLTLLVTRLSGGNIYVLKVLACHSEEMWCTESHPVTVEMFNTPEKPYSLVPENTSLQFNWKAPLNVNLIRFWVELQKWKYNEFYHVKTSCSQGPAYVCNITNLQPYTSYNVRVVVVYKTGENSTSLPESFKTKAGVPNKPGIPKLLEGSKNSIQWEKAEDNGCRITYYILEIRKSTSNNLQNQNLRWKMTFNGSCSSVCTWKSKNLKGIFQFRVVAANNLGFGEYSGISENIILVGDDFWIPETSFILTIIVGIFLVVTIPLTFVWHRRLKNQKSAKEGVTVLINEDKELAELRGLAAGVGLANACYAIHTLPTQEEIENLPAFPREKLTLRLLLGSGAFGEVYEGTAVDILGVGSGEIKVAVKTLKKGSTDQEKIEFLKEAHLMSKFNHPNILKQLGVCLLNEPQYIILELMEGGDLLTYLRKARMATFYGPLLTLVDLVDLCVDISKGCVYLERMHFIHRDLAARNCLVSVKDYTSPRIVKIGDFGLARDIYKNDYYRKRGEGLLPVRWMAPESLMDGIFTTQSDVWSFGILIWEILTLGHQPYPAHSNLDVLNYVQTGGRLEPPRNCPDDLWNLMTQCWAQEPDQRPTFHRIQDQLQLFRNFFLNSIYKSRDEANNSGVINESFEGEDGDVICLNSDDIMPVALMETKNREGLNYMVLATECGQGEEKSEGPLGSQESESCGLRKEEKEPHADKDFCQEKQVAYCPSGKPEGLNYACLTHSGYGDGSD

SEQ ID NO: 77807 - protein, 114 aa, Homo sapiens
MADHNPDSDSTPRTLLRRVLDTADPRTPRRPRSARAGARRALLETASPRKLSGQTRTIARGRSHGARSVGRSAHIQASGHLEEQTPRTLLKNILLTAPPSPWCFCSPRIFHPDA

SEQ ID NO: 77808 - protein, 284 aa, Homo sapiens
GKARPAGNTGAWAPAEQFFPASNRTREGGGLWPPLPLQSSPAAPTMLDSSAAEQVTRLTLKLLGQKLEQERQNVEGGPEGLHLEPGNEDRPDDALQTALKRRRDLLQRLREQHLLDELSRAQAWSGPSRGALGSALPPELPPTGILPTASPSPLAPDPPRIILPTVPQPPATIIQQLPQQPLIAQIPPPQAFPTQRSGSIKEDMVELLLLQNAQVHQLVLQNWMLKALPPALQDPPHVPPRVPRAARPRLPAVHHHHHHHHAVWPPGAATVLQPAPSLWTPGPP

SEQ ID NO: 77809 - protein, 130 aa, Homo sapiens
VILPGPAPWGFRLSGGIDFNQPLVITRITPGSKAAAANLCPGDVILAIDGFGTESMTHADAQDRIKAAAHQLCLKIDRGETHLWSPQVSEDGKAHPFKINLESEPQDGNYFEHKHNIRPKPFVIPGRSRS

SEQ ID NO: 77810 - protein, 143 aa, Homo sapiens
MAGNFWQSSHYLQWILDKQDLLKERQKDLKFLSEEEYWKLQIFFTNVIQALGEHLKLRQQVIATATVYFKRFYARYSLKSIDPVLMAPTCVFLASKVEEFGVVSNTRLIAAATSVCKCKKYICFKDVILKKAPEYIDFFFFSL

SEQ ID NO: 77811 - protein, 162 aa, Homo sapiens
MTPQSLLQTTLFLLSLLFLVQGAHGRGHREDFRFCSQRNQTHRSSLHYKPTPDLRISIENSEEALTVHAPFPAAHPASRSFPDPRGLYHFCLYWNRHAGRLHLLYGKRDFLLSDKASSLLCFQHQEESLAQGPPLLATSVTSWWSPQNISLPSAASFTFSFH

SEQ ID NO: 77812 - protein, 79 aa, Homo sapiens
MKVRKSSTPEEVKKRKKAVLFCLSEDKKNIILEEGKEILVGDVGQTVDDPYATFVKMLPDKDCRYALYDATYETKESKK

SEQ ID NO: 77813 - protein, 192 aa, Homo sapiens
MGNWVVNHWFSVLFLVVWLGLNVFLFVDAFLKYEKADKYYYTRKILGSTLACARASALCLNFNSTLILLPVCRNLLSFLRGTCSFCSRTLRKQLDHNLTFHKLVAYMICLHTAIHIIAHLFNFDCYSRSRQATDGSLASILSSLSHDEKKGGSWLNPIHPHITPTVYMFTVTFDMVLSSVNSNLFLFLLIKK

SEQ ID NO: 77814 - protein, 314 aa, Homo sapiens
PYIGSKISLISKAEIRYEGILYTIDTENSTVALAKVRSFGTEDRPTDRPIPPRDEVFEYIIFRGSDIKDLTVCEPPKPQCSLPQDPAIVQSSLGSSTSSFQSMGSYGPFGRMPTYSQFSPSSLVGQQFGAVGVAGSSLTSFGTETSNSGTLPQSSAVGSAFTQDTRSLKTQLSQAEVHKVSRPENEQLRNDNKRQVAPGAPSAPRRGRGGHRGGRGRFGIRRDGPMKFEKDFDFESANAQFNKEEIDREFHNKLKLKEDKLEKQEKPVNGEDKGDSGVDTQNSEGNADEEDPLGPNCYYDKTKSFFDNISCDDN

SEQ ID NO: 77815 - protein, 92 aa, Homo sapiens
MDSGTRPVGSCCSSPAGLSREYKLVMLGAGGVGKSAMTMQFISHRFPEDHDPTIEDAYKIRIRIDDEPANLDILDTAGQDSRQSLQPCGTSI

SEQ ID NO: 77816 - protein, 209 aa, Homo sapiens
  MOD_RES (1)..(1): Any amino acid
XVGPGEQPCLRTGDIPWDDKDFRMFFLWTALFWGGVMFYLLLKRSGREITWKDFVNNYLSKGVVDRLEVVNKRFVRVTFTPGKTPVDGQYVWFNIGSVDTFERNLETLQQELGIEGENRVPVVYIAESDGSFLLSMLPTVLIIAFLLYTIRRGPAGIGRTGRGMGGLFSVGETTAKVLKDEIDVKFKDVAGCEEAKLEIMEFVNFLKNP

SEQ ID NO: 77817 - protein, 251 aa, Homo sapiens
  MOD_RES (1)..(1): Any amino acid
XDTTSANTTLVHQTTPSHVMPPNHHQLAFNYQELEHLQTVKNISPLQILPPSGDSEQLSNGITVMHPSGDSDTTMLESECQAPVQKDIKIKNADSWKSLGKPVKPSGVMKSSDELFNQFRKAAIEKEVKARTQELIRKHLEQNTKELKASQENQRDLGNGLTVESFSNKIQNKCSGEEQKEHQQSSEAQDKSKLWLLKDRDLARQKEQERRRREAVEFRSCRPAWNAMVQSQLTATSTSLVQVILLPQPPK

SEQ ID NO: 77818 - protein, 60 aa, Homo sapiens
  MOD_RES (1)..(1): Any amino acid
XKFLIYACLLLFSVLLALRLDGIIQWSYWAVFAPIWLWKLMVIVGASVGTGVWARNPQYR

SEQ ID NO: 77819 - protein, 60 aa, Homo sapiens
MGRPLLLPLLLLLQPPAFLQPGLCEPALSELDRGSGERLPQDLKPAEGGPVCVFLPSRAG

SEQ ID NO: 77820 - protein, 98 aa, Homo sapiens
  MOD_RES (1)..(1): Any amino acid
XQARVSQELKKAAKRTVSISEGPDTLGDGMRERRETLALAPEPEPLEKEACEKWKRPFRGPHCTQVIPVQGRVTSLSLSHDQLHLLSCSRDNTLKVID

SEQ ID NO: 77821 - protein, 303 aa, Homo sapiens
MMRVCWLVRQDSRHQRIRLPHLEAVVIGRGPETKITDKKCSRQQVQLKAECNKGYVKVKQFEEEAKNPGLETHRKRKRSGNSDSIERDAAQEAEAGTGLEPGSNSGQCSVPLKKGKDAPIKKESLGHWSQGLKISMQDPKMQVYKDEQVVVIKDKYPKARYHWLVLPWTSISSLKAVAREHLELLKHMHTVGEKVIVDFAGSSKLRFRLGYHAIPSMSHVHLHVISQDFDSPCLKNKKHWNSFNTEYFLESQAVIEMVQEAGRVTVRDGMPELLKLPLRCHECQQLLPSIPQLKEHLRKHWTQ

SEQ ID NO: 77822 - protein, 132 aa, Homo sapiens
MIEESGNKRKTMAEKRQLFIEMRAQNFDVIRLSTYRTACKLRFVQKRCNLHLVDIWNMIEAFRDNGLNTLDHTTEISVSRLETVISSIYYQLNKRLPSTHQISVEQSISLLLNFMIAAYDSEGRGKLTVFSV

SEQ ID NO: 77823 - protein, 36 aa, Homo sapiens
MSRKQNQKDSSGFIFDLQSNTVLAQGGAFENMKEKV

SEQ ID NO: 77824 - protein, 148 aa, Homo sapiens
  MOD_RES (1)..(1): Any amino acid
XVLLVIDEPHTDWAKYFKGKKIHGEIDIKVEQAEFSDLNLVAHANGGFSVDMEVLRNGVKVVRSLKPDFVLIRQHAFSMARNGDYRSLVIGLQYAGIPSVNSLHSVYNFCDKPWVFAQMVRLHKKLGTEEFPLIDQTFYPNHKEMVLL

SEQ ID NO: 77825 - protein, 818 aa, Homo sapiens
MPGHPGSWEMGPLTFMDVAIEFCLEEWQCLDIAQQNLYRNVMLENYRNLVFLGIAVSKPDLITCLEQEKEPWEPMRRHEMVAKPPVMCSHFTQDFWPEQHIKDPFQKATLRRYKNCEHKNVHLKKDHKSVDECKVHRGGYNGFNQCLPATQSKIFLFDKCVKAFHKFSNSNRHKISHTEKKLFKCKECGKSFCMLPHLAQHKIIHTRVNFCKCEKCGKAFNCPSIITKHKRINTGEKPYTCEECGKVFNWSSRLTTHKKNYTRYKLYKCEECGKAFNKSSILTTHKIIRTGEKFYKCKECAKAFNQSSNLTEHKKIHPGEKPYKCEECGKAFNWPSTLTKHKRIHTGEKPYTCEECGKAFNQFSNLTTHKRIHTAEKFYKCTECGEAFSRSSNLTKHKKIHTEKKPYKCEECGKAFKWSSKLTEHKLTHTGEKPYKCEECGKAFNWPSTLTKHNRIHTGEKPYKCEVCGKAFNQFSNLTTHKRIHTAEKPYKCEECGKAFSRSSNLTKHKKIHIEKKPYKCEECGKAFKWSSKLTEHKITHTGEKPYKCEECGKAFNHFSILTKHKRIHTGEKPYKCEECGKAFTQSSNLTTHKKIHTGEKFYKCEECGKAFTQSSNLTTHKKIHTGGKPYKCEECGKAFNQFSTLTKHKIIHTEEKPYKCEECGKAFKWSSTLTKHKIIHTGEKPYKCEECGKAFKLSSTLSTHKIIHTGEKPYKCEKCGKAFNRSSNLIEHKKIHTGEQPYKCEECGKAFNYSSHLNTHKRIHTKEQPYKCKECGKAFNQYSNLTTHNKIHTGEKLYKPEDVTVILTTPQTFSNIK

SEQ ID NO: 77826 - protein, 189 aa, Homo sapiens
ESLVPSGENLASETKTESAKTEGPSPALLEETPLEPAVGPKAACPLDSESAEGVVPPASGGGRVQNSPPVGRKTLPLTTAPEAGEESPKLPQQSYNFDPDTCDESVDPFKTSSKTPSSPSKSPASFEIPASAMEANGVDGDGLNKPAKKKKTPLKTDTFRVKKSPKRSPLSDPPSQDPTPAATPETPPV

SEQ ID NO: 77827 - protein, 133 aa, Homo sapiens
MIEDSGKRGNTMAERRQLFAEMRAQDLDRIRLSTYRTACKLRFVQKKCNLHLVDIWNVIEALRENALNNLDPNTELNVSRLEAVLSTIFYQLNKRMPTTHQIHVEQSISLLLNFLLAAFDPEGHGKISVFAVK

SEQ ID NO: 77828 - protein, 129 aa, Homo sapiens
MADSEALPSLAGDPVAVEALLRAVFGVVVDEAIQKGTSVSQKVCEWKEPEELKQLLDLELRSQGESQKQILERCRAVIRYSVKTGHPRFFNQLFSGLDPHALAGRIITESLNTSQYTYEIAPVFVLMEE

SEQ ID NO: 77829 - protein, 409 aa, Homo sapiens
  MOD_RES (381)..(381): Any amino acid
MDSPIQIFRGEPGPTCAPSACLPPNSSAWFPGWAEPDSNGSAGSEDAQLEPAHISPAIPVIITAVYSVVFVVGLVGNSLVMFVIIRYTKMKTATNIYIFNLALADALVTTTMPFQSTVYLMNSWPFGDVLCKIVISIDYYNMFTSIFTLTMMSVDRYIAVCHPVKALDFRTPLKAKIINICIWLLSSSVGISAIVLGGTKVREDVDVIECSLQFPDDDYSWWDLFMKICVFIFAFVIPVLIIIVCYTLMILRLKSVRLLSGSREKDRNLRRITRLVLVVVAVFVVCWTPIHIFILVEALGSTSHSTAALSSYYFCIALGYTNSSLNPILYAFLDENFKRCFRDFCFPLKMRMERQSTSRVRNTVQDPAYLRDIDGMNKPVXLVVEMSSYSSSGREEFNDLGLTQITTAV

SEQ ID NO: 77830 - protein, 579 aa, Homo sapiens
MDDSKQESTTSKEEETNIISSIVPSTQDIYQRQNSSDVHKSLLPAVDETTCGHTHFQQMIDKYINEANLIPEKTDLQELEHIFPNLHHQLFKPLEPHPDFDLSSSSSGISPDNRDFYQRSDSSSESHCATGLSKSTVYFTALRRTSMHSSLNTSPNQQPDTNLAHVGAHSFATENIIGGSEQCFEQLQPEYSSQEESQHADLPSIFSIEARDSSQGMKNQNYPSEEHTEILQNKKKIVHFQLSIGNLSSVYSSSDEANVFDQLNVQHSTPCGSNSSECSTKHQLESRKESMGFEELSKRGVVTMLQSQGLIEDNKNETCRVLDINPQVEETDSRLCVRTVEMGTSIQAPYSLTTQNEKYFENSAETDIPKITKKLSQLGESELFASSGSFSLQSSIPVWETETGHGIMEEPELTLISTTDTSIAEMDFANLTLEEKSENEAKCFFQVSEFLPLVSATEASDYPAVSELSIEKPRTASTAETPRRLTPVPGSLQEAFIKRKKSFMERSHQRQKEIRNKIHVSENSQIKTVKEKPSISSSVSRLKGVNKVRASFPEDRKTTQALRHQRGLRLYNQLAEVKQ

SEQ ID NO: 77831 - protein, 122 aa, Homo sapiens
MKTVLMVAEKPSLAQSIAKILSRGSLSSHKGLNGACSVHEYTGTFAGQPVRFKMTSVCGHVMTLDFLGKYNKWDKVDPAELFSQAPTEKKEANPKLNMVKFLQVEGRGCDYIVLWLDCDKEG

SEQ ID NO: 77832 - protein, 239 aa, Homo sapiens
  MOD_RES (1)..(1): Any amino acid
XLVPCLNDCGPYGQCLLLRRHSYLYASCSCKAGWRGWSCTDNSTAQTVAQQRAATLLLTLSNLMFLAPIAVSVRRFFLVEASVYAYTMFFSTFYHACDQPGEAVLCILSYDTLQYCDFLGSGAAIWVTILCMARLKTVLKYAYRCGHRRQCYPTSWQRWAFYLLPGVSMASVGIAIYTSMMTSDNYYYTHSIWHILLAGSAALLLPPPDQPAEPWACSQKFPCHYQICKNDREELYAVT

SEQ ID NO: 77833 - protein, 788 aa, Homo sapiens
MAKAKKVGARRKASGAPAGARGGPAKANSNPFEVKVNRQKFQILGRKTRHDVGLPGVSRARALRKRTQTLLKEYKERDKSNVFRDKRFGEYNSNMSPEEKMMKRFALEQQRHHEKKSIYNLNEDEELTHYGQSLADIEKHNDIVDSDSDAEDRGTLSAELTAAHFGGGGGLLHKKTQQEGEEREKPKSRKELIEELIAKSKQEKRERQAQREDALELTEKLDQDWKEIQTLLSHKTPKSENRDKKEKPKPDAYDMMVRELGFEMKAQPSNRMKTEAELAKEEQEHLRKLEAERLRRMLGKDEDENVKKPKHMSADDLNDGFVLDKDDRRLLSYKDGKMNVEEDVQEEQSKEASDPESNEEEGDSSGGEDTEESDSPDSHLDLESNVESEEENEKPAKEQRQTPGKGLISGKERAGKATRDELPYTFAAPESYEELRSLLLGRSMEEQLLVVERIQKCNHPSLAEGNKAKLEKLFGFLLEYVGDLATDDPPDLTVIDKLVVHLYHLCQMFPESASDAIKFVLRDAMHEMEEMIETKGRAALPGLDVLIYLKITGLLFPTSDFWHPVVTPALVCLSQLLTKCPILSLQDVVKGLFVCCLFLEYVALSQRFIPELINFLLGILYIATPNKASQGSTLVHPFRALGKNSELLVVSAREDVATWQQSSLSLRWASRLRAPTSTEANHIRLSCLAVGLALLKRCVLMYGSLPSFHAIMGPLQALLTDHLADCSHPQELQELCQSTLTEMESQKQLCRPLTCEKSKPVPLKLFTPRLAGLEFPTSGNPPALAPQL

SEQ ID NO: 77834 - protein, 189 aa, Homo sapiens
  MOD_RES (1)..(1): Any amino acid
XSSLIDLCDSPVSPAEASRTPGRAEGAGRPPPATPPRPPPSTSAVRRVDVRPLPASPARPCPSPGPAAASSPARPPGLQRSKSDLSERFSRAAADLERFFNFCGLDPEEARGLGVAHLARASSDIVSLAGPSAGPGSSEGGCSRRSSVTVEERARERVPYGVSVVERNARVIKWLYGLRQARESPAAEG

SEQ ID NO: 77835 - protein, 1243 aa, Homo sapiens
MPSSLMLEVPALADFNRAWTELTDWLSLLDQVIKSQRVMVGDLEDINEMIIKQKATMQDLEQRRPQLEELITAAQNLKNKTSNQEARTIITDRIERIQNQWDEVQEHLQNRRQQLNEMLKDSTQWLEAKEEAEQVLGQARAKLESWKEGPYTVDAIQKKITETKQLAKDLRQWQTNVDVANDLALKLLRDYSADDTRKVHMITENINASWRSIHKRVSEREAALEETHRLLQQFPLDLEKFLAWLTEAETTANVLQDATRKERLLEDSKGVKELMKQWQDLQGEIEAHTDVYHNLDENSQKILRSLEGSDDAVLLQRRLDNMNFKWSELRKKSLNIRSHLEASSDQWKRLHLSLQELLVWLQLKDDELSRQAPIGGDFPAVQKQNDVHRAFKRELKTKEPVIMSTLETVRIFLTEQPLEGLEKLYQEPRELPPEERAQNVTRLLRKQAEEVNTEWEKLNLHSADWQRKIDETLERLRELQEATDELDLKLRQAEVIKGSWQPVGDLLIDSLQDHLEKVKALRGEIAPLKENVSHVNDLARQLTTLGIQLSPYNLSTLEDLNTRWKLLQVAVEDRVRQLHEAHRDFGPASQHFLSTSVQGPWERAISPNKVPYYINHETQTTCWDHPKMTELYQSLADLNNVRFSAYRTAMKLRRLQKALCLDLLSLSAACDALDQHNLKQNDQPMDILQIINCLTTIYDRLEQEHNNLVNVPLCVDMCLNWLLNVYDTGRTGRIRVLSFKTGIISLCKAHLEDKYRYLFKQVASSTGFCDQRRLGLLLHDSIQIPRQLGEVASFGGSNIEPSVRSCFQFANNKPEIEAALFLDWMRLEPQSMVWLPVLHRVAAAETAKHQAKCNICKECPIIGFRYRSLKHFNYDICQSCFFSGRVAKGHKMHYPMVEYCTPTTSGEDVRDFAKVLKNKFRTKRYFAKHPRMGYLPVQTVLEGDNMETPVTLINFWPVDSAPASSPQLSHDDTHSRIEHYASRLAEMENSNGSYLNDSISPNESIDDEHLLIQHYCQSLNQDSPLSQPRSPAQILISLESEERGELERILADLEEENRNLQAEYDRLKQQHEHKGLSPLPSPPEMMPTSPQSPRDAELIAEAKLLRQHKGRLEARMQILEDHNKQLESQLHRLRQLLEQPQAEAKVNGTTVSSPSTSLQRSDSSQPMLLRVVGSQTSDSMGEEDLLSPPQDTSTGLEEVMEQLNNSFPSSRGHNVGSLFHMADDLGRAMESLVSVMTDEEGAE

SEQ ID NO: 77836 - protein, 83 aa, Homo sapiens
  MOD_RES (1)..(1): Any amino acid
XSFKDVVVGFTQEEWHRLSPAQRALYRDVMLETYSNLVSVGYEGTKPDVILRLEQEEAPWIGEAACPGCHCWALKVLRELQPR

SEQ ID NO: 77837 - protein, 196 aa, Homo sapiens
MDPLFQQTHKQVHEIQSCMGRLETADKQSVHIVENEIQASIDQIFSRLERLEILSSKEPPNKRQNARLRVDQLKYDVQHLQTALRNFQHRRHAREQQERQREELLSRTFTTNDSDTTIPMDESLQFNSSLQKVHNGMDDLILDGHNILDGLRTQRLTLKVGSLLGDREKASCFSLIQQGLRRRSLTLPTCWACPTQ

SEQ ID NO: 77838 - protein, 89 aa, Homo sapiens
AAAHANTGPEESENEDDGYDVPKPPVPAVLARRTLSDISNASSSFGWLSLDGDPTTNVTEGSQVPERPPKPFPRRINSERKAGSCQQVS

SEQ ID NO: 77839 - protein, 295 aa, Homo sapiens
MGLSHSKTHLRVIKVAPLQNKEVETPSAGRVDFAFNQNLEEKTSYSLARLQDQNKALEGQLPPLQENWYGRYSTASRDMYFDIPLEHRETSIIKRHPPQRLQKLEPIDLPRVITSGRLLSQREARTMHKAKVLEKKMQTPMYTSENRQYLHKMQVLEMIRKRQEAQMELKKSLHGEARINKQSPRDHKAKKTLQSTPRNDDHDLLTMLPDEILNRGPGNSKNTEFLKHQAVNNYCPWKIGKMETWLHEQEAQGQLLWDSSSSDSDEQGKDEKKPRALVRTRTERIPLFDEFFDQE

SEQ ID NO: 77840 - protein, 60 aa, Homo sapiens
VSREAGFSYSHAGLSNRLARDNELRENDKEQLKAISTRDPLSEITEQEKDFLWSHRCIAW

SEQ ID NO: 77841 - protein, 236 aa, Homo sapiens
MSAHNRGTELARWLENPTTQKTKPKTNNPQADLSWISKIQVNHPAVLRRAEQIQARRTVKKEWQAAWLLKAVTFIDLTTLSGDDTSSNIQRLCYKAKYPIREDLLKALNMHDKGITTAAVCVYPARVCDAVKALKAAGCNIPVASVAAGFPAGQTHLKTRLEEIRLAVEDGATEIDVVINRSLVLTGQWEALYDEIRQFRKACGEAHLKTILATGELGTLTNVYKASMIAMMAGSD

SEQ ID NO: 77842 - protein, 426 aa, Homo sapiens
MAAPALGLVCGRCPELGLVLLLLLLSLLCGAAGSQEAGTGAGAGSLAGSCGCGTPQRPGAHGSSAAAHRYSREANAPGPVPGERQLAHSKMVPIPAGVFTMGTDDPQIKQDGEAPARRVTIDAFYMDAYEVSNTEFEKFVNSTGYLTEAEKFGDSFVFEGMLSEQVKTNIQQAVAAAPWWLPVKGANWRHPEGPDSTILHRPDHPVLHVSWNDAVAYCTWAGKRLPTEAEWEYSCRGGLHNRLFPWGNKLQPKGQHYANIWQGEFPVTNTGEDGFQGTAPVDAFPPNGYGLYNIVGNAWEWTSDWWTVHHSVEETLNPKGPPSGKDRVKKGGSYMCHRSQEYYDPYFQDVASEMLRRHTASRWKAFSSLEPCCSIRRHQQYAAIERLTCGKFELRCASLRKIDCLNTNIACSYSMRQDGPRLHCVD

SEQ ID NO: 77843 - protein, 75 aa, Homo sapiens
  MOD_RES (1)..(1): Any amino acid
XKQDSLVILTIMATLKIRNSNFYTVAVTSLSSQIQYMNTVVSTYVTTNVSLIPPRSEQLVNFTGKAEMGGPFSYV

SEQ ID NO: 77844 - protein, 146 aa, Homo sapiens
MADSEALPSLAGDPVAVEALLRAVFGVVVDEAIQKGTSVSQKVCEWKEPEELKQLLDLELRSQGESQKQILERCRAVIRYSVKTGHPRFFNQLFSGLDPHALAGRIITESLNTSQYTYEIAPVFVLMEEEVLRKLRALVGWSSGDG

SEQ ID NO: 77845 - protein, 477 aa, Homo sapiens
MDSELMHSIVGSYHKPPERVFVPSFTQNEPSQNCHPANLEVTSPKILHSPNSQALILALKTLQEKIHRLELERTQAEDNLNILSREAAQYKKALENETNERNLAHQELIKQKKDISIQLSSAQSRCTLLEKQLEYTKRMVLNVEREKNMILEQQAQLQREKEQDQMKLYAKLEKLDVLEKECFRLTTTQKTAEDKIKHLEEKLKEEEHQRKLFQDKASELQTGLEISKIIMSSVSNLKHSKEKKKSSKKTKCIKRRPPWQICSKFGALPFVAEKSTSASCSVNASMQNFLQMRQHRDPHILQKPFNVTETRCLPKPSRTTSWCKAIPPDSEKSISICDNLSELLMAMQDELDQMSMEHQELLKQMKETESHSVCDDIECELECLLKKMEIKGEQISKLKKHQDSVCKLQQKVQNSKMSEASGIQQEDSYPKGSKNIKNSPRKCLTDTNLFQKNSSFHPIRVHNLQMKLRRDDIMWEQ

SEQ ID NO: 77846 - protein, 446 aa, Homo sapiens
MGLEALVPLAMIVAIFLLLVDLMHRHQRWAARYPPGPLPLPGLGNLLHVDFQNTPYCFDQLRRRFGDVFSLQLAWTPVVVLNGLAAVREAMVTRGEDTADRPPAPIYQVLGFGPRSQGRPFRPNGLLDKAVSNVIASLTCGRRFEYDDPRFLRLLDLAQEGLKEESGFLREVLNAVPVLPHIPALAGKVLRFQKAFLTQLDELLTEHRMTWDPAQPPRDLTEAFLAKKEKAKGSPESSFNDENLRIVVGNLFLAGMVTTSTTLAWGLLLMILHLDVQLRVQQEIDDVIGQVRRPEMGDQAHMPCTTAVIHEVQHFGDIVPLGVTHMTSRDIEVQGFRIPKGTTLITNLSSVLKDEAVWKKPFRFHPEHFLDAQGHFVKPEAFLPFSAGRRACLGEPLARMELFLFFTSLLQHFSFSVAAGQPRPSHSRVVSFLVTPSPYELCAVPR

SEQ ID NO: 77847 - protein, 756 aa, Homo sapiens
VSFVQYSDEVKSEFKLNTYNDKALALGALQNIRYRGGNTRTGKALTFIKEKVLTWESGMRKNVPKVLVVVTDGRSQDEVKKAALVIQQSGFSVFVVGVADVDYNELANIASKPSERHVFIVDDFESFEKIEDNLITFVCETATSSCPLIYLDGYTSPGFKMLEAYNLTEKNFASVQGVSLESGSFPSYSAYRIQKNAFVNQPTADLHPNGLPPSYTIILLFRLLPETPSDPFAIWQITDRDYKPQVGVIADPSSKTLSFFNKDTRGEVQTVTFDTEEVKTLFYGSFHKVHIVVTSKSVKIYIDCYEIIEKDIKEAGNITTDGYEILGKLLKGERKSAAFQIQSFDIVCSPVWTSRDRCCDIPSRRDEGKCPAFPNSCTCTQDSVGPPGPPGPAGGPGAKGPRGERGISGAIGPPGPRGDIGPPGPQGPPGPQGPNGLSIPGEQGRQGMKGDAGEPGLPGRTGTPGLPGPPGPMGPPGDRGFTGKDGAMGPRGPPGPPGSPGSPGVTGPSGKPGKPGDHGRPGPSGLKGEKGDRGDIASQNMMRAVARQVCEQLISGQMNRFNQMLNQIPNDYQSSRNQPGPPGPPGPPGSAGARGEPGPGGRPGFPGTPGMQGPPGERGLPGEKGERGTGSSGPRGLPGPPGPQGESRTGPPGSTGSRGPPGPPGRPGNSGIRGPPGPPGYCDSSQCASIPYNGQGYPEPYVPEGGAYLPEREPFIVPVEPERTAEYEDYGADEPAEEPPEPHRRWRRALPHGPGQ

SEQ ID NO: 77848 - protein, 536 aa, Homo sapiens
MSTRAPMPAAHSREDPPAVTAERESLLAAANRPAEQPPPPECEGKEAAREERAAAATSAGARGEPSPALVLGRSVPQAAVPVRPLALHLAHKARGPGGPFGGEPPPPPPPPSPLPPLLRDPPAEDAREEVAAGPAEKRQPPLLPPKGNPWTKKPPQHLSPDTTGPPPPPLETLEAEFGSLKIIKAGKLKTKKSNKASDFSDMENWPTPSELVNTGFQSVLSQGNKKPQNRKEKEEKVEKRSNSDSKENRETKLNGPGENVSEDEAQSSNQRKRANKHKWVPLHLDVVRSESQERPGSRNSSRCQPEANKPTHNNRRNDTRSWKRDREKRDDQDDVSSVRSEGGNIRGSFRGRGRGRGRGRGRGRGNPRLNFDYSYGYQEHGERTDQPFQTELNTSMMYYYDDGTGVQVYPVEEALLKEYIKRQIEYYFSVENLERDFFLRGKMDEQGFLPISLIAGFQRVQALTTNLNLILEALKDSTEVEIVDEKMRKKIEPEKWPIPGPPPRSVPPTDFSQLIDCPEFVPGQAFCSHTVRVMIF

SEQ ID NO: 77849 - protein, 138 aa, Homo sapiens
  MOD_RES (1)..(1): Any amino acid
XRREREHLEMELEKAEMERSTYVTEVRELKAQLNETLTKLRTEQNERQKVAGDLHKAQQSLELIQSKIVKAAGDTTVIENSDVSPETESSEKETMSVSLNQTVTQLQQLLQAVNQQLTKEKEHYQVLDTMVGDAAAIL

SEQ ID NO: 77850 - protein, 35 aa, Homo sapiens
MSADGAEADGSTQVTVEEPVQQPSVVDRVASMPLI

SEQ ID NO: 77851 - protein, 53 aa, Homo sapiens
MAPVVTGKFGERPPPKRLTREAMRNYLKERGDQTVLILHAKVAQKSYGNEKRC

SEQ ID NO: 77852 - protein, 191 aa, Homo sapiens
MNKLQPGSVPKINRSMQNWHQLENLSNFIKAMVSYGMNPVDLFEANDLFESGNMTQVQVSLLALAGKAKTKGLQSGVDIGVKYSEKQERNFDDATMKAGQCVIGLQMGTNKCASQSGMTAYGTRRHLYDPKNHILPPMDHSTISLQMGTNKCASQVGMTAPGTRRHIYDTKLGTDKCDNSSMSLQMGYTQG

SEQ ID NO: 77853 - protein, 54 aa, Homo sapiens
FCAFLGSWLVPFAYLTVLDLSKSLSAALLTAALLTFGHHLFAQGLQQPVDYQET

SEQ ID NO: 77854 - protein, 167 aa, Homo sapiens
MYKETVYSAFNLLMHYPPPSGAGQHPQPQPPLHKANQPPHGVPQLSLYEHFNSPHPTPAPADISQKQVHRPLQTPDLSGFYSLTSGSMGQLPHTVSWPSPPLYPLSPSCGYRQHFPAPTAAPGAPYPRFTHPSLMLGSGVPGHPAAIPHPAIVPPSGKQELQPFDRN

SEQ ID NO: 77855 - protein, 160 aa, Homo sapiens [sequence omitted]

SEQ ID NO: 77856 - protein, 436 aa, Homo sapiens
  MOD_RES (1)..(1): Any amino acid
XKKREDYESQSNPVFRRYLNKILIEAGKLGLPDENKGDMHYDAEIILKRETLLEIQKFLNGEDWKPGALDDALSDILINFKFHDFETWKWRFEDSFGVDPYNVLMVLLCLLCIVVLVATELWTYVRWYTQLRRVLIISFLFSLGWNWMYLYKLAFAQHQAEVAKMEPLNNVCAKKMDWTGSIWEWFRSSWTYKDDPCQKYYELLLVNPIWLVPPTKALAVTFTTFVTEPLKHIGKGTGEFIKALMKEIPALLHLPVLIIMALAILSFCYGAGKSVHVLRHIGGPESEPPQALRPRDRRRQEEIDYRPDGGAGDADFHYRGQMGPTEQGPYAKTYEGRREILRERDVDLRFQTGNKSPEVLRAFDVPDAEAREHPTVVPSHKSPVLDTKPKETGGILGEGTPKESSTESSPDQGSTYSPARGVAGPRGQDPVSSPCG

SEQ ID NO: 77857 - protein, 50 aa, Homo sapiens
  MOD_RES (1)..(1): Any amino acid
XPHLQDLPRAGCRPEPGAAAGRRHPVGERHRPAPGHPRPGRAGAEARGQG

SEQ ID NO: 77858 - protein, 143 aa, Homo sapiens
  MOD_RES (1)..(1): Any amino acid
XYYEGLQDKLAQIRDARGALSALREEHREKLRRAAEEAERQRQIQLAQKLEIMRQKKSTWRCRGSWPSSACRSRRRSGRCGWSSRSRRSRCARRCPPSPCPTPSSRPCPQPEVCSTSPRDQPASPAPSALPARWRAPQCTACT

SEQ ID NO: 77859 - protein, 193 aa, Homo sapiens
MTPALTALLCLGLSLGPRTRVQAGPFPKPTLWAEPGSVISWGSPVTIWCQGSLEAQEYQLDKEGSPEPWDRNNPLEPKNKARFSIPSMTQHHAGRYRCHYYSSAGWSEPSDPLELVMTGFYNKPTLSALPSPVVASGGNMTLRCGSQKGYHHFVLMKEGEHQLPRTLDSQQLHSGGFQALFPVGPVTPSHRRV

SEQ ID NO: 77860 - protein, 261 aa, Homo sapiens
MERRRITSAARRSYVSSGEMMVGGLAPGRRLGPGTRLSLARMPPPLPTRVDFSLAGALNAGFKETRASERAEMMELNDRFASYIEKVRFLEQQNKALAAELNQLRAKEPTKLADVYQAELRELRLRLDQLTANSARLEVERDNLAQDLATVRQKLQDETNLRLEAENNLAAYRQEVRELQEQLARQQVHVELDVAKPDLTAALKEIRTQYEAMASSNMHEAEEWYRSKFADLTDAAARNAELLRQAKHEANDYRRQLQSLT

SEQ ID NO: 77861 - protein, 209 aa, Homo sapiens
PDSLRGTDKRRNGPEFSNDIKKRKVDDKDSSHYDSDGDKSDDNLVVDVSNEDPSSPRASPAHSPRENGIDKNRLLKKDASSSPASTASSHEKASTPVLKSSTPTPRSDMPTPGTSATPGLRPGLGKPPAIDPLVNQAGLDFHLELVPGNGKFGLKEKSWILSRKSSFEIKSAGLRTPLAVPGPYPAPFGMVPHAGMNGELTSPGAAYAS

SEQ ID NO: 77862 - protein, 107 aa, Homo sapiens
  MOD_RES (1)..(1): Any amino acid
XQGTSGSANDSQHDPGKMFIGGLSWQTSPDSLRDYFSKFGEIRECMVMRDPTTKRSRGFGFVTFADPASVDKVLGQPHHELDSKTIDPKVAFPRRAQPKSSLQDNLI

SEQ ID NO: 77863 - protein, 58 aa, Homo sapiens
GHITSDLQLSTYLDPALELGPRNVLLFLQDKGGVGRLMGRPVVNASVGMATASEMAPT

SEQ ID NO: 77864 - protein, 801 aa, Homo sapiens
MGQKGSSGLFRAVSAFGVVGFVRFLEGYYIVLITKRRKMADIGGHAIYKVEDTNMIYIPNDSVRVTHPDEARYLRIFQNVDLSSNFYFSYSYDLSHSLQYNLTVLRMPLEMLKSEMTQNRQESFDIFEDEGLITQGGSGVFGICSEPYMKYVWNGELLDIIKSTVHRDWLLYIIHGFCGQSKLLIYGRPVYVTLIARRSSKFAGTRFLKRGANCEGDVANEVETEQILCDASVMSFTAGSYSSYVQVRGSVPLYWSQDISTMMPKPPITLDQADPFAHVAALHFDQMFQRFGSPIIILNLVKEREKRKHERILSEELVAAVTYLNQFLPPEHTIVYIPWDMAKYTKSKLCNVLDRLNVIAESVVKKTGFFVNRPDSYCSILRPDEKWNELGGCVIPTGRLQTGILRTNCVDCLDRTNTAQFMVGKCALAYQLYSLGLIDKPNLQFDTDAVRLFEELYEDHGDTLSLQYGGSQLVHRVKTYRKIAPWTQHSKDIMQTLSRYYSNAFSDADRQDSINLFLGVFHPTEGKPHLWELPTDFYLHHKNTMRLLPTRRSYTYWWTPEVIKHLPLPYDEVICAVNLKKLIVKKFHKYEEEIDIHNEFFRPYELSSFDDTFCLAMTSSARDFMPKTVGIDPSPFTVRKPDETGKSVLGNKSNREEAVLQRKTAASAPPPPSEEAVSSSSEDDSGTDREEEGSVSQRSTPVKMTDAGDSAKVTENVVQPMKELYGINLSDGLSEEDFSIYSRTPISAFSQDNIYEVQPPRVDRKSTEIFQAHIQASQGIMQPLGKEDSSMYREYIRNRYL

SEQ ID NO: 77865 - protein, 128 aa, Homo sapiens; identical to SEQ ID NO: 44672
  MOD_RES (1)..(1): Any amino acid

SEQ ID NO: 77866 - protein, 81 aa, Homo sapiens
  MOD_RES (1)..(1): Any amino acid
XAKQLVRGEPNVSYICSRYYRAPELIFGATDYTSSIDELRAVRPPARTGTTRTGQDWDLKADLTPESIPALEPPCQPSVLS

SEQ ID NO: 77867 - protein, 299 aa, Homo sapiens
  MOD_RES (1)..(1): Any amino acid
XAVMAPRTLVLLLSGALALTQTWAGSHSMRYFFTSVSRPGRGEPRFIAVGYVDDTQFVRFDSDAASQRMEPRAPWIEQEGPEYWDGETRKVKAHSQTHRVDLGTLRGYYNQSEAGSHTVQRMYGCDVGSDWRFLRGYHQYAYDGKDYIALKEDLRSWTAADMAAQTTKHKWEAAHVAEQLRAYLEGTCVEWLRRYLENGKETLQRTDAPKTHMTHHAVSDHEATLRCWALSFYPAEITLTWQRDGEDQTQDTELVETRPAGDGTFQKWAAVVVPSGQEQRYTCHVQHEGLPKPLTLRWV

SEQ ID NO: 77868 - protein, 56 aa, Homo sapiens
  MOD_RES (1)..(1): Any amino acid
XSQGNDIKVTAESTGEHASSLPLPLHQPPHWMDSLPVQHAVLHRFHGPDCVPRGSL

SEQ ID NO: 77869 - protein, 195 aa, Homo sapiens
  MOD_RES (1)..(1): Any amino acid
XTWNGRLLAATFTLIGVSFFALPAGILGSGFALKVQEQHRQKHFEKRRNPAAGLIQSAWRFYATNLSRTDLHSTWQYYERTVTVPMYRLIPPLNQLELLRNLKSKSGLAFRKDPPPEPSPSQKVSLKDRVFSSPRGVAAKGKGSPQAQTVRRSPSADQSLEDSPSKVPKSWSFGDRSRARQAFRIKGAASRQNSE

SEQ ID NO: 77870 - protein, 175 aa, Homo sapiens; identical to SEQ ID NO: 45445

SEQ ID NO: 77871 - protein, 32 aa, Homo sapiens
MVDKNIYIIQGEINIVVGAIKRNARWSTHTPL

SEQ ID NO: 77872 - protein, 4416 aa, Homo sapiens
  MOD_RES (1)..(1): Any amino acid
XTTEDTLITGSKTAAPVTSTGSTTATLEGQSTAASSRTSNQDISASSQNHQTKSTETTSKAQTDTLTQMMTSTLFSSPSVHNVMETAPPDEMTTSFPSSVTNTLMMTSKTITMTTSTDSTLGNTEETSTAGTESSTPVTSAVSITAGQEGQSRTTSWRTSIQDTSASSQNHWTRSTQTTRESQTSTLTHRTTSTPSFSPSVHNVTGTVSQKTSPSGETATSSLCSVTNTSMMTSEKITVTTSTGSTLGNPGETSSVPVTGSLMPVTSAALVTFDPEGQSPATFSRTSTQDTTAFSKNHQTQSVETTRVSQINTLNTLTPVTTSTVLSSPSGFNPSGTVSQETFPSGETTTSSPSSVSNTFLVTSKVFRMPTSRDSTLGNTEETSLSVSGTISAITSKVSTIWWSDTLSTALSPSSLPPKISTAFHTQQSEGAETTGRPHERSSFSPGVSQEIFTLHETTTWPSSFSSKGHTTWSQTELPSTSTGAATRLVTGNPSTGTAGTIPRVPSKVSAIGEPGEPTTYSSHSTTLPKTTGAGAQTQWTQETGTTGEALLSSPSYSVTQMIKTATSPSSSPMLDRHTSQQITTAPSTNHSTIHSTSTSPQESPAVSQRGHTQAPQTTQESQTTRSVSPMTDTKTVTTPGSSFTASGHSPSEIVPQDAPTISAATTFAPAPTGDGHTTQAPTTALQAAPSSHDATLGPSGGTSLSKTGALTLANSVVSTPGGPEGQWTSASASTSPDTAAAMTHTHQAESTEASGQTQTSEPASSGSRTTSAGTATPSSSGASGTTPSGSEGISTSGETTRFSSNPSRDSHTTQSTTELLSASASHGAIPVSTGMASSIVPGTFHPTLSEASTAGRPTGQSSPTSPSASPQETAAISRMAQTQRTRTSRGSDTISLASQATDTFSTVPPTPPSITSTGLTSPQTETHTLSPSGSGKTFTTALISNATPLPVTYASSASTGHTTPLHVTDASSVSTGHATPLPVTSPSSVSTGHTTPLPVTDTSSESTGHVTPLPVTSFSSASTGDSTPLPVTDTSSASTGHVTPLPVTSLSSASTGDTTPLPVTDTSSASTGHATSLPVTDTSSVSTGHTTPLPVTDTSSASTGHATSLPVTDTSSVSTGHTTPLHVTDASSASTGQATPLPVTSLSSVSTGDTTPLPVTSPSSASTGHATPLLVTDTSSASTGHATPLPVTDASSVSTDHATSLPVTIPSAASTGHTTPLPVTDTSSASTGQATSLLVTDTSSVSTGDTTPLPVTSTSSASTGHVTPLHVTSPSSASTGHATPLPVTSLSSASTGDTMPLPVTSPSSASTGDTTPLPVTDASSVSTGHTTPLHVTDASSASTGQATPLPVTSLSSVSTGDTTPLPVTSPSSASTGHATPLLVTDTSSASTGHATPLPVTDASSVSTDHATSLPVTIPSAASTGHTTPLPVTDTSSASTGQATSLLVTDTSSVSTGDTTPLPVTSTSSASTGHVTPLHVTSPSSASTGHATPLPVTSLSSASTGDTMPLPVTSPSSASTGDTTPLPVTDASSVSTGHTTPLPVTSPSSASTGHTTPLPVTDTSSASKGDTTPLPVTSPSSASTGHTTPLPVTDTSSASTGDTTPLPVTNASSLSTGHATPLHVTSPSSASTGHATPLPVTSTSSASTGHATPLPVTGLSSATTDDTTRLPVTDVSSASTGQATPLPVTSLSSVSTGDTTPLPVTSPSSASTGHASPLLVTDASSASTGQATPLPVTDTSSVSTAHATPLPVTGLSSASTDDTTRLPVTDVSSASTGQAIPLPVTSPSSASTGDTTPLPVTDASSASTGDTTSLPVTIPSSASSGHTTSLPVTDASSVSTGHATSLLVTDASSVSTGDTTPLPVTDTNSASTGDTTPLHVTDASSVSTGHATSLPVTSLSSASTGDTTPLPVTSPSSASSGHTTPLPVTDASSVPTGHATSLPVTDASSVSTGHATPLPVTDASSVSTGHATPLPVTDTSSVSTGQATPLPVTSLSSASTGDTTPLPVTDTSSASTGHAPHLPVTGLSSASTGDTTRLPVTNVSSASTGHATPLPVTSTSSASTGDTTPLPGTDTSSVSTGHTTPLLVTDASSVSTGDTTRLPVTSPSSASTGHTTPLHVTDASSVSTGHTTPLPVTDTSSASTGQATSLLVTDTSSVSTGDTTPLPVTSTSSASTGHVTPLHVTSPSSASTGHATPLPVTSLSSASTGDTTPLPVTDTSSVSTGHTTPLPVTSPSSASTGHTTPLPVTDTSSASKGDTTPLPVTSPSSASTGHTTPLPVTDTSSASTGDTTPLPVTNASSLSTGHATPLHVTSPSSASTGHATPLPVTSTSSASTGHATPLPVTSTSSASTGHATPLPVTDNSSVSTGHATPLPVTGLSSATTDDTTRLPVTDVSSASTGQATPLPVTSLSSVSTGDTTPLPVTSPSSASTGHASPLLVTDASSASTGQATPLPVTDTSSVSTAHATPLPVTGLSSASTDDTTRLPVTDVSSASTGQAIPLPVTSPSSASTGDTTPLPVTDASSASTGDTTSLPVTIPSSASSGHTTSLPVTDASSVSTGHATSLLVTDASSVSTGDTTPLPVTDTNSASTGDTTPLHVTDASSVSTGHATSLPVTSLSSASTGDTTPLPVTSPSSASSGHTTSLPVTDASSVSTGHATSLPVTIPSSASSGHTTPLPVTDASSVPTGHATSLPVTDASSVSTGHATPLPVTDASSVSTGHATPLPVTDTSSVSTGQATPLPVTSLSSASSTGDTTPLPVTDTSSASTGQDTPLPVTSLFSVSTGDTTPLPVTSPSSASTGHATHLLVTDASSVSTGHATSLLVTDASSVSTGHATALHVTDASSLSTGDTTPLPVTSPSSASTGDTTPLPVTDTSSVSTGHATSLPVTDTSSASTGHATSLPVTDTSSASTGQATPLPVTSPSSASTGHAIPLLVTDTSSASTGQATPLPVTSLSSASTGDTTPLPVTDASSVSTGHATSLPVTSLSSVSTGDTTPLPVTSPSSASTGHATPLHVTSPSSASTGHATPLPVTSLSSASTGDTTPLPVTSPSSASTGHATPLHVTDASSVSTGDTTPLPVTSPSSASSGHTTPLPVTDASSASTGDTTPLPVTDTSSASTGHATHLPVTGLSSASTGDTTRLPVTDVSSASTGHATPLPVTSTSSASTGDTTPLPGTDTSSVSTGHTTPLLVTDASSVSTGDTTRLPVTSPSSASTGHTTPLPVTDTPSASTGDTTPLPVTNASSLSTRHATSLHVTSPSSASTGHATPLPVTDTSAASTGHATPLPVTSTSSASTGDTTPLPVTDTSSASTGHATPLPVTNTSSVSTGHATPLHVTSPSSASTGHTTPLPVTDASSVSTGHATSLPVTDASSVSTGHATPLPVTDASSVSTGHATPLPLTSLSSVSTGDTTPLPVTDTSSASTGQATPLPVTSLSSVSTGDTTPLPVTDTSSASTGHATSLPVTDTSSASTGHATPLHVTSPSSASTGHATPLPVTDTSSASTGHATPLPVTSLSSVSTGDTTPLPVTSPSSASTGHATPLLVTDASSASTGQATPLPVTSLSSVSTGDTTPLPVTSPSSASTGHATSLPVTDTSSASTGDTTSLPVTDTSSAYTGDTTSLPVTDTSSSSTGDTTPLLVTETSSASTGDTTPVPVTDTSSVSTGHATPLPVTGLSSASTGDTTRLPVTDISSASTGQATPLPVTNTSSVSTGDTMPLPVTSPSSASTGHATPLPVTSTSSASTGHATPVPVTSTSSASTGHTTPLPVTSPSSASTGHTTPLPVTDTSSASTGDTTPLPVTNASSLSTGHTTPLHVTIPSSASTGDTSTLPVTGASSASTGHATPLPVTDTSSVSTGHATPLPVTSFSSVSTGDTTPLPVTDASSASTGHATPLPVTDTSSASTGDTTPLPVTDASSASTGQATPLPVTSLSSVSTGDTTPLPVTIPSSASSGHTTSLPVSDTSSASTGQATPLPVTSLSSVSTGDTTPLLVTDASSVSTGHATPLPVTDTSSASTGDTTRLPVTDTSSASTGQATPLPVTSLSSVSTGDTTPLLVTNTSSVSTGHATSLPVTIPSSSSSGHTTPLPVTSTSSVSTGHVTPLHVTSPSSSSTGQATPLPVTSTSSSSTGQATPLPVTSTSSASTGHATPLPVTDASSVSTGHATPLPVTDTSSASTGDTTPLPVTDTSSASTGQATPLPVTSLSSVSTGHATPLAVSSATSASTVSSDSPLKMETSGMTTPSLKTDGGRRTATSPPPTTSQTIISTIPSTAMHTRSTAAPIPILPERGVSLFPYGADAGDLEFVRRTVDFTSPLFKPATGFPLGSSLRDSLYASQAGTLWPWWLRSGTMLTSPLVGGPHFIRATPTKPSSPRTGAGPMPCFSTRAVGCSGTWPSAQASRCSWASLVEMAISKTAH

SEQ ID NO: 77873 - protein, 118 aa, Homo sapiens
MAPWLQLLSLLGLLPGAVAAPAQPRAASFQAWGPPSPELLAPTRFALEMFNRGRAAGTRAVLGLVRGRVRRAGQGSLYSLEATLEEPPCNDPMVCRLPVSKKTLVSDEALGVPRPEAE

SEQ ID NO: 77874 - protein, 28 aa, Homo sapiens
  MOD_RES (1)..(1): Any amino acid
XCPALLVVGDSSPAVDAVMPLSRGSLTK

SEQ ID NO: 77875 - protein, 225 aa, Homo sapiens; identical to SEQ ID NO: 43850
  MOD_RES (1)..(1): Any amino acid

SEQ ID NO: 77876 - protein, 684 aa, Homo sapiens
MVAERTHKAAATGARGPGELGAPGTVALVAARAERGARLPSPGSCGLLTLALCSLALSLLAHFRTAELQARVLRLEAERGEQQMETAILGRVNQLLDEKWKLHSRRRREAPKTSPGCNCPPGPPGPTGRPGLPGVKGQPGEKGSPGDAGLSIIGPRGPPGQPGTRGFPGFPGPIGLDGKPGHPGPKGDMGLTGPPGQPGPQGQKGEKGQCGEYPHRLLPLLNSVRLAPPPVIKRRTFQGEQSQASIQGPPGPPGPPGPSGPLGHPGLPGPMGPPGLPGPPGPKGDPGIQGYHGRKGERGMPGMPGKHGAKGAPGIAVAGMKGEPGIPGTKGDPGAEGKPGPPGLLGKRGQRGEKGAEGSPGLPGLLGQKGEKGDAGNSIGGGRGEPGPPGLPGPPGPKGEAGVDGQVGPPGQPGDKGERGAAGEQGPDGPKGSKGEPGKGEMVDYNGNINEALQEIRTLALMGPPGLPGQIGPPGAPGIPGQKGEIGLPGPPGHDGEKGPRGKPGDMGPPGPQGPPGKDGPPGVKGENGHPGSPGEKGEKGETGQAGSPGLQGVPGPKGEAGLDGAKGEKGFQGEKGDRGPLGLPGASGLDGRPGPPGTPGPIGVPGPAGPKGERGSKGDPGMTGPTGAAGLPGLHGPPGDKGNRGHRGFKGEKGEPGLPGLDGLDAPCPLGEDGLPVQGCWNK

SEQ ID NO: 77877 - protein, 98 aa, Homo sapiens
MEHSTFLSGLVLATLLSQVCQSCVELDPATVAGIIVTDVIATLLLALGVFCFAGHETGRLSGAADTQALLRNDQVYQPLRDRDDAQYSHLGGNWARNK

SEQ ID NO: 77878 - protein, 435 aa, Homo sapiens
MESESESGAAADTPPLETLSFHGDEEIIEVVELDPGPPDPADDLAQEMEDVDFEEEEEEEGNEEGWVLEPQEGVVGSMEGPDDSEVTFALHSASVFCVSLDPKTNTLAVTGGEDDKAFVWRLSDGELLFECAGHKDSVTCAGFSHDSTLVATGDMSGLLKVWQVDTKEEVWSFEAGDLEWMEWHPRAPVLLAGTADGNTWMWKVPNGDCKTFQGPNCPATCGRVLPDGKRAVVGYEDGTIRIWDLKQGSPIHVLKGTEGHQGPLTCVAANQDGSLILTGSVDCQAKLVSATTGKVVGVFRPETVASQPSLGEGEESESNSVESLGFCSVMPLAAVGYLDGTLAIYDLATQTLRHQCQHQSGIVQLLWEAGTAVVYTCSLDGIVRLWDARTGRLLTDYRGHTAEILDFALSKDASLVVTTSGDHKAKVFCVQRPDR

SEQ ID NO: 77879 - protein, 174 aa, Homo sapiens
MGGQVSASNSFSRLHCRNANEDWMSALCPRLWDVPLHHLSIPGSHDTMTYCLNKKSPISHEESRLLQLLNKALPCITRPVVLKWSVTQALDVTEQLDAGVRYLDLRIAHMLEGSEKNLHFVHMVYTTALVEDTLTEISEWLERHPREVVILACRNFEGLSEDLHEYLVACIKNI

SEQ ID NO: 77880 - protein, 78 aa, Homo sapiens
MDLIKRNSGWVFENPSIGVLELWVLATNFRDYAIIFTQLEFGDEPFNTVELYSLTETASQEAMGLFTKWSRSLGFLSQ

SEQ ID NO: 77881 - protein, 46 aa, Homo sapiens
MKFLLTTAFLILISLWVEEAYSKEKSSKKGKGKKKQYLCPSERLYH

SEQ ID NO: 77882 - protein, 313 aa, Homo sapiens
MGDRGTSNHSEMTDFILAGFRVRPELHILLFLLFLFVYAMILLGNVGMMTIIMTDPRLNTPMYFFLGNLSFIDLFYSSVIEPKAMINFWSENKSISFAGCVAQLFLFALLIVTEGFLLAAMAYDRFIAICNPLLYSVQMSTRLCTQLVAGSYFCGCISSVIQTSMTFTLSFCASRAVDHFYCDSRPLQRLSCSDLFIHRMISFSLSCIIILPTIIVIIVSYMYIVSTVLKIHSTEGHKKAFSTCSSHLGVVSVLYGAVFFMYLTPDRFPELSKVASLCYSLVTPMLNPLIYSLRNKDVQEALKKFLEKKNIIL

SEQ ID NO: 77883 - protein, 27 aa, Homo sapiens
MGQLYQEHHEEDFFLYIAYSDESVYGL

SEQ ID NO: 77884 - protein, 158 aa, Homo sapiens
MTTRQATKDPLLRGVSPTPSKIPVRSQKRTPFPTVTSCAVDQENQDPRRWVQKPPLNIQRPLVDSAGPRPKARHQAETSQRLVGISQPRNPLEELRPSPRGQNVGPGPPAQTEAPGTIEFVADPAALATILSGCSGLCIFGPQNPHPPTGPCQGFLLL

SEQ ID NO: 77885 - protein, 53 aa, Homo sapiens
MRHSKRTHCPDWDSRESWGHESYRGSHKRKRRSHSSTQENRHCKPHHQFKESD

SEQ ID NO: 77886 - protein, 194 aa, Homo sapiens
MHPLVGAPCPRACKELVPSALTIFLLVHVQPGYITRPSLRSVVLRWAPAPPKAEAKAKALKAKKAVLKGVHSHKKKKIRTSPTFRRPKTLRLRRQPKYPRKSAPRRNKLDHYAIIKFPLTTESAMKKIEDNNTLVFIVDVKANKHQIKQAVKKLYDIDVAKVNTLIRPDGEKKAYVRLAPDYDALDVANKIGII

SEQ ID NO: 77887 - protein, 350 aa, Homo sapiens
MAPGRAVAGLLLLAAAGLGGVAEGPGLAFSEDVLSVFGANLSLSAAQLQHLLEQMGAASRVGVPEPGQLHFNQCLTAEEIFSLHGFSNATQITSSKFSVICPAVLQQLNFHPCEDRPKHKTRPSHSEVWGYGFLSVTIINLASLLGLILTPLIKKSYFPKILTFFVGLAIGTLFSNAIFQLIPEAFGFDPKVDSYVEKAVAVFGGFYLLFFFERMLKMLLKTYGQNGHTHFGNDNFGPQEKTHQPKALPAINGVTCYANPAVTEANGHIHFDNVSVVSLQFGNTESRPGWKKRAKFMYLFEGAQTVRNRDDCLDDNALRCPPQFHRWPGDWGFLHLVSPSGTQYFHSNPM

SEQ ID NO: 77888 - protein, 464 aa, Homo sapiens
MDVPGPVSRRAAAAAATVLLRTARVRRECWFLPTALLCAYGFFASLRPSEPFLTPYLLGPDKNLTEREVFNEIYPVWTYSYLVLLFPVFLATDYLRYKPVVLLQGLSLIVTWFMLLYAQGLLAIQFLEFFYGIATATEIAYYSYIYSVVDLGMYQKVTSYCRSATLVGFTVGSVLGQILVSVAGWSLFSLNVISLTCVSVAFAVAWFLPMPQKSLFFHHIPSTCQRVNGIKVQNGGIVTDTPASNHLPGWEDIESKIPLNMEEPPVEEPEPKPDRLLVLKVLWNDFLMCYSSRPLLCWSVWWALSTCGYFQVVNYTQGLWEKVMPSRYAAIYNGGVEAVSTLLVYIMDTVGNIWVCYASYVVFRIIYMLLITIATFQIAANLSMERYALVFGVNTFIALALQTLLTLIVVDASGLGLEITTQFLIYASYFALIAVVFLASGAVSVMKKCRKLEDPQSSSQVTTS

SEQ ID NO: 77889 - protein, 142 aa, Homo sapiens
MSLRCGDAARTLGPRVFGRYFCSPVRPLSSLPDKKKELLQNGPDLQDFVSGDLADRSTWDEYKGNLKRQKGERLRLPPWLKTEIPMGKNYNKLKNTLRNLNLHTVCEEARCPNIGECWGGGEYATATATIMVGPASTSMALV

SEQ ID NO: 77890 - protein, 457 aa, Homo sapiens
MNRYTTMRQLGDGTYGSVLMGKSNESGELVAIKRMKRKFYSWDECMNLREVKSLKKLNHANVIKLKEVIRENDHLYFIFEYMKENLYQLMKDRNKLFPESVIRNIMYQILQGLAFIHKHGFFHRDMKPENLLCMGPELVKIADFGLARELRSQPPYTDYVSTRWYRAPEVLLRSSVYSSPIDVWAVGSIMAELYMLRPLFPGTSEVDEIFKICQVLGTPKKSDWPEGYQLASSMNFRFPQCVPINLKTLIPNASNEAIQLMTEMLNWDPKKRPTASQALKHPYFQVGQVLGPSSNHLESKQSLNKQLQPLESKPSLVEVEPKPLPDIIDQVVGQPQPKTSQQPLQPIQPPQNLSVQQPPKQQSQEKPPQTLFPSIVKNMPTKPNGTLSHKSGRRRWGQTIFKSGDSWEELEDYDFGASHSKKPSMGVFKEKRKKDSPFRQQVKMAVISLSAHQFPTL

SEQ ID NO: 77891 - protein, 125 aa, Homo sapiens
MSNPSPQVPEEEASTSVCRPKSSMASTSRRQRRERRFRRYLSAGRLVRAQALLQRHPGLDVDAGQPPPLHRACARHDAPALCLLLRLGADPAHQDRHGDTALHAAARQGPDGQQSFGKSLLCRRP

SEQ ID NO: 77892 - protein, 295 aa, Homo sapiens [sequence omitted]

SEQ ID NO: 77893 - protein, 75 aa, Homo sapiens
MLDINALFAEAKHYHAKLVNIRKEMLMLHEKTSKLKKRALKLQQKRQKEELEREQQREKEFEREKQLTARPAKRM

SEQ ID NO: 77894 - protein, 74 aa, Homo sapiens
MSASQDSRTEPNPEERPREAPGAHPAPGGRVHFAAQAGLLANCGWAGPPSFGGERPEIQRQWPRWDGARRRHRE

SEQ ID NO: 77895 - protein, 154 aa, Homo sapiens
MALCYGTFWGYPKMLEAANLMEGLVDIGPWVTLPRGQPEVLEWGLPKDQDSVAFEDVAVNFTHEEWALLGPSQKNLYRDVMRETIRNLNCIGMKWENQNIDDQHQNLRRNPRLSETWLQNFILIHYGHLVALSDGGLLQFSTGQGLPVTQAGVQ

SEQ ID NO: 77896 - protein, 410 aa, Homo sapiens
MSLMVVSMACVGFFLLEGPWPHVGGQDKPFLSAWPGTVVSEGQHVTLQCRSRLGFNEFSLSKEDGMPVPELYNRIFRNSFLMGPVTPAHAGTYRCCSSHPHSPTGWSAPSNPVVIMVTGVHRKPSLLAHPGPLVKSGETVILQCWSDVRFEHFLLHREGITEDPLRLVGQLHDAGSQVNYSMGPMTPALAGTYRCFGSVTHLPYELSAPSDPLDIVVVGLYGKPSLSAQPGPTVQAGENVTLSCSSRSLFDIYHLSREAEAGELRLTAVLRVNGTFQANFPLGPVTHGGNYRCFGSFRALPHAWSDPSDPLPVSVTGNSRHLHVLIGTSVVIIPFAILLFFLLHRWCANKKNAVVMDQEPAGNRTVNREDSDEQDPQEVTYAQLNHCVFTQRKITRPSQRPKTPPTDTSV

SEQ ID NO: 77897 - protein, 157 aa, Homo sapiens
MEEAQRKRTQLREAFEQLQAKKQMAMEKRRAVQNQWQLQQEKHLQHLAEVSAEVRERKTGTQQELDRVFQKLGNLKQQAEQERDKLQRYQTFLQLLYTLQGKLLFPEAEAEAENLPDDKPQQPTRPQEQSTGDTMGRDPGVSFKAVGLQPAGDVNLP

SEQ ID NO: 77898 - protein, 862 aa, Homo sapiens
MVAVVGEQFTLECGPPWGHPEPTVSWWKDGKPLALQPGRHTVSGGSLLMARAEKSDEGTYMCVATNSAGHRESRAARVSIQEPQDYTEPVELLAVRIQLENVTLLNPDPAEGPKPRPAVWLSWKVSGPAAPAQSYTALFRTQTAPGGQGAPWAEELLAGWQSAELGGLHWGQDYEFKVRPSSGRARGPDSNVLLLRLPEKVPSAPPQEVTLKPGNGTVFVSWVPPPAENHNGIIRGYQVWSLGNTSLPPANWTVVGEQTQLEIATHMPGSYCVQVAAVTGAGAGEPSRPVCLLLEQAMERATQEPSEHGPWTLEQLRATLKRPEVIATCGVALWLLLLGTAVCIHRRRRARVHLGPGLYRYTSEDAILKHRMDHSDSQWLADTWRSTSGSRDLSSSSSLSSRLGADARDPLDCRRSLLSWDSRSPGVPLLPDTSTFYGSLIAELPSSTPARPSPQVPAVRRLPPQLAQLSSPCSSSDSLCSRRGLSSPRLSLAPAEAWKAKKKQELQHANSSPLLRGSHSLELRACELGNRGSKNLSQSPGAVPQALVAWRALGPKLLSSSNELVTRHLPPAPLFPHETPPTQSQQTQPPVAPQAPSSILLPAAPIPILSPCSPPSPQASSLSGPSPASSRLSSSSLSSLGEDQDSVLTPEEVALCLELSEGEETPRNSVSPMPRAPSPPTTYGYISVPTASEFTDMGRTGGGVGPKGGVLLCPPRPCLTPTPSEGSLANGWGSASEDNAASARASLVSSSDGSFLADAHFARALAVAVDSFGFGLEPREADCVFIDASSPPSPRDEIFLTPNLSLPLWEWRPDWLEDMEVSHTQRLGRGMPPWPPDSQISSQRSQLHCRMPKAGASPVDYS

SEQ ID NO: 77899 - protein, 190 aa, Homo sapiens
MGVLFGKVFSQTTICRFEALQLSFKNMCKLRPLLQKWVEEADNNENLQEICKAETLVQARKRKRTSIENRVRGNLENLFLQCPKPTLQQISHIAQQLGLEKDVVRVWFCNRRQKGKRSSSDYAQREDFEAAGSPFSGGPVSFPLAPGPHFGTPGYGSPHFTALYSSVPFPEGEAFPPVSVTTLGSPMHSN

SEQ ID NO: 77900 - protein, 396 aa, Homo sapiens
MAPVPLGPLGETYCEEHGEKIYFFCENDAEFLCVFCREGPTHQAHTVGFLDEAIQPYRDRLRSRLEALSTERDEIEDVKCQEDQKLQVLLTQIESKKHQVETAFERLQQELEQQRCLLLARLRELEQQIWKERDEYITKVSEEVTRLGAQVKELEEKCQQPASELLQDVRGTIVTCEMKTFVSPEAISPDLVKKIRDFHRKILTLPEMMRMFSENLAHHLEIDSGVITLDPQTASRSLVLSEDRKSVRYTRQKKNLPDSPLRFDGLPAVLGFPGFSSGRHRWQVDLQLGDGGGCTVGVAGEGVRRKGEMGLSAEDGVWAVIISHQQCWASTSPGTDLPLSEIPRGVRVALDYEAGQVTLHNAQTQEPIFTFTASFSGKVFPFFAVWKKGSCLTLKG

SEQ ID NO: 77901 - protein, 77 aa, Homo sapiens
MDADEGQDMSQVSGKESPPVSDTPDEGDEPMPIPEDLSTTSGGQQSSKSDRVVVTYGADDFRDFHAIIPKSFSLLEL

SEQ ID NO: 77902 - protein, 498 aa, Homo sapiens
MASTTTCTRFTDEYQLFEELGKGAFSVVRRCMKIPTGQEYAAKIINTKKLSARDHQKLEREARICRLLKHPNIVRLHDSISEEGFHYLVFDLVTGGELFEDIVAREYYSEADASHCIQQILESVNHCHLNGIVHRDLKPENLLLASKSKGAAVKLADFGLAIEVQGDQQAWFGFAGTPGYLSPEVLRKDPYGKPVDMWACGVILYILLVGYPPFWDEDQHRLYQQIKAGAYDFPSPEWDTVTPEAKDLINKMLTINPAKRITASEALKHPWICQRSTVASMMHRQETVDCLKKFNARRKLKGAILTTMLATRNFSAKSLLKKPDGVKESTESSNTTIEDEDVKARKQEIIKVTEQLIEAINNGDFEAYTKICDPGLTAFEPEALGNLVEGMDFHRFYFENALSKSNKPIHTIILNPHVHLVGDDAACIAYIRLTQYMDGSGMPKTMQSEETRVWHRRDGKWQNVHFHRSGSPTVPIKPPCIPNGKENFSGGTSLWQNI

SEQ ID NO: 77903 - protein, 190 aa, Homo sapiens
MEQQDQSMKEGRLTLVLALATLIAAFGSSFQYGYNVAAVNSPALLMQQFYNETYYGRTGEFMEDFPLTLLWSVTVSMFPFGGFIGSLLVGPLVNKFGRKGALLFNNIFSIVPAILMGCSRVATSFELIIISRLLVGICAGVSSNVVPMYLGELAPKNLRGALGVVPQLFITVGILVAQIFGLRNLLANVD

SEQ ID NO: 77904 - protein, 159 aa, Homo sapiens
QGKLLADLARRLGLHYVVYSGLENIKKLTAGRLAAAHFDGKGEVEEYFRDIGVPMTSVRLPCYFENLLSHFLPQKAPDGKSYLLSLPTGDVPMDGMSVSDLGPVVLSLLKMPEKYVGQNIGLSTCRHTAEEYAALLTKHTRKVVHDAKELTGHRVKFLA

SEQ ID NO: 77905 - protein, 305 aa, Homo sapiens
MAPRRARGCRTLGLPALLLLLLLRPPATRDARDRLAVLAGRSRISESFNHEVQTHEACVRLRTMENCPQCHHHRTSRQQAGITCPPPMSVEHADIWVKSYSLYSRERYICNSGFKRKAGTSSLTECVLNKATNVAHWTTPSLKCIRDPALVHQRPAPPSTVTTAGVTPQPESLSPSGKEPAASSPSSNNTAATTAAIVPGSQLMPSKSPSTGTTEISSHESSHGTPSQTTAKNWELTASASHQPPGVYPQGHSDTTGRKQHLLPDFQASFQRDCINKHIEDKECWTVASFLLFCTMFVSTCWYTL

SEQ ID NO: 77906 - protein, 315 aa, Homo sapiens
MPKVSGSRDTVSQLLSMLHQGQYQPRPSFRGNKYSRSYRYALQDMDKFSLKDSGRGDSEAGDSDYDLGRDSPIDRLLGEGFSDLFLTDGRIPAAMRLCTEECRVLGHSDQCWMPPLPSPSSDYRSNMFIPGEEFPTQPQQQHPHQSLEDDAQPADSGEKKKSFSTFGKDSPNDEDTGDTSTSSLLSEMSSVFQRLLPPSLDTYSECSEVDRSNSLERRKGPLPAKTVGYPQGVAAWAASTHFQNPTTNCGPPLGTHSSVQPSSKWLPAMEEIPENYEEDDFDNVLNHLNDGKHELMDASELVAEINKLLQDVRQS

SEQ ID NO: 77907 - protein, 157 aa, Homo sapiens
MFETFNTPAMYVAIQAVLSLYASGRTTGIVMDSGDGVTHTVPIYEGYALPHAILRLDLAGRDLTDYLMKILTERGYSFTTTAEREIVRDIKEKLCYVALDFEQEMATAASSSSLEKSYELPDGQVITIGNERFRCPEALFQPSFLGMESCGIHETTF

SEQ ID NO: 77908 - protein, 426 aa, Homo sapiens
MLGSFSGTTVPALLNSTSNQLYLHFYSDISVSAAGFHLEYKTVGLSSCPEPAVPSNGVKTGERYLVNDVVSFQCEPGYALQGHAHISCMPGTVRRWNYPPPLCIAQCGGTVEEMEGVILSPGFPGNYPSNMDCSWKIALPVGFGAHIQFLNFSTEPNHDYIEIRNGPYETSRMMGRFSGSELPSSLLSTSHETTVYFHSDHSQNRPGFKLEYQAYELQECPDPEPFANGIVRGAGYNVGQSVTFECLPGYQLTGHPVLTCQHGTNRNWDHPLPKCEVPCGGNITSSNGTVYSPGFPSPYSSSQDCVWLITVPIGHGVRLNLSLLQTEPSGDFITIWDGPQQTAPRLGVFTRSMAKKTVQSSSNQVLLKFHRDAATGGIFAIAFSDHCRYFNQKSGKLDFTPSSTLGQLCKTLHRSLPHLRLQFLHL

SEQ ID NO: 77909 - protein, 205 aa, Homo sapiens
MLDNNTGSGNETGILSEDALLRISIPLDSNLRPEKCRRFVHPQWQLLHLNGTIHSTSEADTEPCVDGWVYDQSYFPSTIVTKWDLVCDYQSLKSVVQFLLLTGMLVGGIIGGHVSDRWLVESARWLIITNKLDEGLKALRKVARTNGIKNAEETLNIEVVRSTMQEELDAAQTKTTVCDLFRNPSMRKRICILVFLRKKNLKEKA

SEQ ID NO: 77910 - protein, 234 aa, Homo sapiens
MGLLSDPVRRRALARLVLRLNAPLCVLSYVAGIAWFLALVFPPLTQRTYMSENAMGSTMVEEQFAGGDRARAFARDFAAHRKKSGALPVAWLERTMRSVGLEVYTQSFSRKLPFPDETHERYMVSGTNVYGILRAPRAASTESLVLTVPCGSDSTNSQAVGLLLALAAHFRGQIYWAKDIVFLVTEHDLLGTEAWLEAYHDVNVTALIHLLLQACSRLPCRAELGPFRQPWPWS

SEQ ID NO: 77911 - protein, 403 aa, Homo sapiens
MLRPEAGLVGLHGPAQENSALPGRRDSASELRALSGLEVDPGEGWGRVVLISPRTVRFRVLSPGVREEGHVQNNGQNQARPARGVTGAGGWGSAAVCRGRALRGREPALPSASFPDVAACPGSLDCALKRRARCPPGAHACGPCLQPFQEDQQGLCVPRMRRPPGGGRPQPRLEDEIDFLAQELARKESGHSTPPLPKDRQRLPEPATLGFSARGQGLELGLPSTPGTPTPTPHTSLGSPVSSDPVHMSPLEPRGGQGDGLALVLILAFCVAGAAALSVASLCWCRLQREIRLTQKADYATAKAPGSPAAPRISPGDQRLAQSAEMYHYQHQRQQMLCLERHKEPPKELDTASSDEENEDGDFTVYECPGLAPTGEMEVRNPLFDHAALSAPLPAPSSPPALP

SEQ ID NO: 77912 - protein, 123 aa, Homo sapiens
MQAFLKGTSISTKPPLTKDRGVAASAGSSGENKKAKPVPWVEKYRPKCVDEVAFQEEVVAVLKKSLEGADLPNLLFYGPPGTGKTSTILAAARELFGPELFRLRVLELNASDERGIQVVREKV

SEQ ID NO: 77913 - protein, 168 aa, Homo sapiens
  MOD_RES (1)..(1): Any amino acid
XQVIHQLGPGLRSKMAIQTQQSKFVNWQVDGEYRGSDFTAAVTLGNPDVLVGSGILVAHYLQSITPCLALGGELVYHRRPGEEGTVMSLAGKYTLNNWLATVTLGQAGMHATYYHKASDQLQVGVEFEASTRMQDTSVSFGYQLDLPKANLLFKGKGLGSPTRETGRR

SEQ ID NO: 77914 - protein, 338 aa, Homo sapiens
MRWRTILLQYCFLLITCLLTALEAVPIDIDKTKVQNIHPVESAKIEPPDTGLYYDEYLKQVIDVLETDKHFREKLQKADIEEIKSGRLSKELDLVSHHVRTKLDELKRQEVGRLRMLIKAKLDSLQDIGMDHQALLKQFDHLNHLNPDKFESTDLDMLIKAATSDLEHYDKTRHEEFKKYEMMKEHERREYLKTLNEEKRKEEESKFEEMKKKHENHPKVNHPGSKDQLKEVWEETDGLDPNDFDPKTFFKLHDVNSDGFLDEQELEALFTKELEKVYDPKNEEDDMVEMEEERLRMREHVMNEVDTNKDRLVTLEEFLKATEKKEFLEPDSWESPSI

SEQ ID NO: 77915 - protein, 94 aa, Homo sapiens
MMGDEGSAYWIAHQAVKIVFDSIDNLEAAPHDIGYVKQAMFHYFQVPDRLGILTHLYRDFDKCRFAGFCRKIAEGAQQGDPLSRYIFRKAGEML

SEQ ID NO: 77916 - protein, 453 aa, Homo sapiens
  MOD_RES (1)..(1): Any amino acid
XWPRQIVSSIGLCRYGGRIDCCWGWARQSWGQCQPVCQPRCKHGECIGPNKCKCHPGYAGKTCNQDLNECGLKPRPCKHRCMNTYGSYKCYCLNGYMLMPDGSCSSALTCSMANCQYGCDVVKGQIRCQCPSPGLQLAPDGRTCVDVDECATGRASCPRFRQCVNTFGSYICKCHKGFDLMYIGGKYQCHDIDECSLGQYQCSSFARCYNIRGSYKCKCKEGYQGDGLTCVYIPKVMIEPSGPIHVPKGNGTILKGDTGNNNWIPDVGSTWWPPKTPYIPPIITNRPTSKPTTRPTPKPTPIPTPPPPPPLPTELRTPLPPTTPERPTTGLTTIAPAASTPPGGITVDNRVQTDPQKPRGDVFIPRQPSNDLFEIFEIERGVSADDEAKDDPGVLVHSCNFDHGLCGWIREKDNDLHWEPIRDPAEILQGTQFREIFIGCILSASCVTSYLGC

SEQ ID NO: 77917 - protein, 79 aa, Homo sapiens
MTSDQDAKVVAEPQTQRVQEGKDSAHLMNGPISQTTSQTSSIPPLSQKTLLSYRCQRTVLFGDGMIETDSSYQQLRFQS

SEQ ID NO: 77918 - protein, 297 aa, Homo sapiens
MADNSSDECEEENNKVLREGMPQAPGHRGKDMDPVPPAPASLKCHQTPSHVLERVGWYRESQKHRKEKKKTSQLTPQRGFSENEDDDDDDDDSSETDSDSDDDDEEHGAPLEGAYDPADYEHLPVSAEIKELFQYISRYTPQLIDLDHKLKPFIPDFIPAVGDIDAFLKVPRPDGKPDNLGLLVLDEPSTKQSDPTVLSLWLTENSKQHNITQHMKVKSLEDAEKNPKAIDTWIESISELHRSKPPATVHYTRPMPDIDTLMQEWSPEFEELLGKVSLPTAEIDCSLAEYIDMICAF

SEQ ID NO: 77919 - protein, 691 aa, Homo sapiens
MQSNMVRKKNPPLRNVASEGEGQILEPIGTESKVSGKNKEFSADQMSENTDQSDAAELNHKEEHSLHVQDPSSSSKKDLKSAVLSEKAGFNYESPSKGGNFPSFPHDEVTDRNMLAFSSPAAGGVCEPLKSPQRAEADDPQDMACTPSGDSLETKEDQKMSPKATEETGQAQSGQANCQGLSPVSVASKNPQVPSDGGVRLNKSKTDLLVNDNPDPAPLSPELQDFKCNICGYGYYGNDPTDLIKHFRKYHLGLHNRTRQDAELDSKILALHNMVQFSHSKDFQKVNRSVFSGVLQDINSSRPVLLNGTYDVQVTSGGTFIGIGRKTPDCQGNTKYFRCKFCNFTYMGNSSTELEQHFLQTHPNKIKASLPSSEVAKPSEKNSNKSIPALQSSDSGDLGKWQDKITVKAGDDTPVGYSVPIKPLDSSRQNDVLLFHYESVHESQASDVKQEANHLQGSDGQQSVKESKEHSCTKCDFITQVEEEISRHYRRAHSCYKCRQCSFTAADTQSLLEHFNTVHCQEQDITTANGEEDGHAISTIKEEPKIDFRVYNLLTPDSKMGEPVSESVVKREKLEEKDGLKEKVWTESSSDDLRNVTWRGADILRGSPSYTQASLGLLTPVSGTQEQTKTLRDSPNVEAAHLARPIYGLAVETKGFLQGAPAGGEKSGALPQQYPASGENKSKDESQSLLR

SEQ ID NO: 77920 - protein, 110 aa, Homo sapiens
KKTKPIIFVSDRANSNKELGVDQESEEGKGKTSPDKQKQSPQPQPGSSDQESEEQQQFRNIFKQIAGDDMEICADELKKVLNTVVNKHKDLKTHGFTLESCRSMIALMDP

SEQ ID NO: 77921 - protein, 74 aa, Homo sapiens
  MOD_RES (1)..(1): Any amino acid
XVPVIKWKKDGIHLALGMDERKQQLSNGSLLIQNILHSRHHKPDEGLYQCEASLGDSGSIISRTAKVAVAGLCS

SEQ ID NO: 77922 - protein, 76 aa, Homo sapiens
MAAAAALRAPAQSSVTFEDVAVNFSLEEWSLLNEAQGCLYHDVMLETLTLISSLERVHSPAVLQQEHTEQRRQGHL

SEQ ID NO: 77923 - protein, 802 aa, Homo sapiens
MSMLKPSGLKAPTKILKPGSTALKTPTAVVAPVEKTISSEKASSTPSSETQEEFVDDFRVGERVWVNGNKPGFIQFLGETQFAPGQWAGIVLDEPIGKNDGSVAGVRYFQCEPLKGIFTRPSKLTRKVQAEDEANGLQTTPASRATSPLCTSTASMVSSSPSTPSNIPQKPSQPAAKEPSATPPISNLTKTASESISNLSEAGSIKKGERELKIGDRVLVGGTKAGVVRFLGETDFAKGEWCGVELDEPLGKNDGAVAGTRYFQCQPKYGLFAPVHKVTKIGFPSTTPAKAKANAVRRVMATTSASLKRSPSASSLSSMSSVASSVSSRPSRTGLHVLELEAKMDQLRTMVEAADREKVELLNQLEEEKRKVEDLQFRVEEESITKGDLETQTKLEHARIKELEQSLLFEKTKADKLQRELEDTRVATVSEKSRIMELEKDLALRVQEVAELRRRLESNKPAGDVDMSLSLLQEISSLQEKLEVTRTDHQREITSLKEHFGAREETHQKEIKALYTATEKLSKENESLKSKLEHANKENSDVIALWKSKLETAIASHQQAMEELKVSFSKGLGTETAEFAELKTQIEKMRLDYQHEIENLQNQQDSERAAHAKEMEALRAKLMKVIKEKENSLEAIRSKLDKAEDQHLVEMEDTLNKLQEAEIKASSITRELQGRELKLTNLQENLSEVSQVKETLEKELQILKEKFAEASEEAVSVQRSMQETVNKLHQKEEQFNMLSSDLEKLRENLADMEAKFREKDEREEQLIKAKEKLENDIAEIMKMSGDNSSQLTKMNDELRLKE

SEQ ID NO: 77924 - protein, 867 aa, Homo sapiens
MEQLNELELLMEKSFWEEAELPAELFQKKVVASFPRTVLSTGMDNRYLVLAVNTVQNKEGNCEKRLVITASQSLENKELCILRNDWCSVPVEPGDIIHLEGDCTSDTWIIDKDFGYLILYPDMLISGTSIASSIRCMRRAVLSETFRSSDPATRQMLIGTVLHEVFQKAINNSFAPEKLQELAFQTIQEIRHLKEMYRLNLSQDEIKQEVEDYLPSFCKWAGDFMHKNTSTDFPQMQLSLPSDNSKDNSTCNIEVVKPMDIEESIWSPRFGLKGKIDVTVGVKIHRGYKTKYKIMPLELKTGKESNSIEHRSQVVLYTLLSQERRADPEAGLLLYLKTGQMYPVPANHLDKRELLKLRNQMAFSLFHRISKSATRQKTQLASLPQIIEEEKTCKYCSQIGNCALYSRAVEQQMDCSSVPIVMLPKIEEETQHLKQTHLEYFSLWCLMLTLESQSKDNKKNHQNIWLMPASEMEKSGSCIGNLIRMEHVKIVCDGQYLHNFQCKHGAIPVTNLMAGDRVIVSGEERSLFALSRGYVKEINMTTVTCLLDRNLSVLPESTLFRLDQEEKNCDIDTPLGNLSKLMENTFVSKKLRDLIIDFREPQFISYLSSVLPHDAKDTVACILKGLNKPQRQAMKKVLLSKDYTLIVGMPGTGKTTTICTLVPAPEQVEKGGVSNVTEAKLIVFLTSIFVKAGCSPSDIGIIAPYRQQLKIINDLLARSIGMVEVNTVDKYQGRDKSIVLVSFVRSNKDGTVGELLKDWRRLNVAITRAKHKLILLGCVPSLNCYPPLEKLLNHLNSEKLISLIFHQENMKVFATYWVTFKENKTLFPLPFHTRAVSPLASAHTENSITIQNLMQYLCFKAQVYRKL

SEQ ID NO: 77925 - protein, 81 aa, Homo sapiens
MSQFKRQRINPLPGGRNFSGTASTSLLGPPPGLLTPPVATELSQNARHLQGGEKQRVFTGIVTSLHDYFGVVDEEVFFQLR

SEQ ID NO: 77926 - protein, 274 aa, Homo sapiens
MPALRPALLWALLALWLCCAAPAHALQCRDGYEPCVNEGMCVTYHNGTGYCKCPEGFLGEYCQHRDPCEKNRCQNGGTCVAQAMLGKATCRCASGFTGEDCQYSTSHPCFVSRPCLNGGTCHMLSRDTYECTCQVGFTGKECQWTDACLSHPCANGSTCTTVANQFSCKCLTGFTGQKCETDVNECDIPGHCQHGGTCLNLPGSYQCQCPQGFTGQYCDSLYVPCAPSPCVNGGTCRQTGDFTFECNCLPETVRNKRNRALGKGQASLEWKRTR

SEQ ID NO: 77927 - protein, 368 aa, Homo sapiens
MEPSSWSGSESPAENMERMSDSADKPIDNDAEGVWSPDIEQSFQEALAIYPPCGRRKIILSDEGKMYGRNELIARYIKLRTGKTRTRKQVSSHIQVLARRKSRDFHSKLKDQTAKDKALQHMAAMSSAQIVSATAIHNKLGLPGIPRPTFPGAPGFWPGMIQTGQPGSSQDVKPFVQQAYPIQPAVTAPIPGFEPASAPAPSVPAWQGRSIGTTKLRLVEFSAFLEQQRDPDSADLNCNIQDDAGAFYGVTSQYESSENMTVTCSTKVCSFGKQVVEKVETEYARFENGRFVYRINRSPMCEYMINFIHKLKHLPEKYMMNSVLENFTILLVVTNRDTQETLLCMACVFEVSNSEHGAQHHIYRLVKD

SEQ ID NO: 77928 - protein, 60 aa, Homo sapiens
MPEAGFQATNAFTECKFTCTSGKCLYLGSLVCNQQNDCGDNSDEENCLLVTEHPPPGIFN

SEQ ID NO: 77929 - protein, 60 aa, Homo sapiens
MLVGNKSDLRHLRAVPTDEARAFAEKNNLSFIETSALDSTNVEEAFKNILTGGRGPDGCG

SEQ ID NO: 77930 - protein, 128 aa, Homo sapiens
TSGHWSLTRPGVFYIGREDGYIDIWDLLEKTHEPAQSQNICITMITYIKPWIFSSKQQFIATADYYGTLHILEIPWTLSRPSTNEMASVNHYFEREVKHLEYVEQRKKIREQEKKEMELEMAKKKVVS

SEQ ID NO: 77931 - protein, 438 aa, Homo sapiens
MSAANPETPNSTISREASTQSSSAAASQGWVLPEGKIVPNTVFVGGIDARMDETEIGSCFGRYGSVKEVKIITNRTGVSKGYGFVSFVNDVDVQKIVGSQIHFHGKKLKLGPAIRKQKLCARHVQPRPLVVNPPPPPQFQNVWRNPNTETYLQPQITPNPVTQHVQAYSAYPHSPGQVITGCQLLVYNYQEYPTYPDSAFQVTTGYQLPVYNYQPFPAYPRSPFQVTAGYQLPVYNYQAFPAYPNSPFQVATGYQFPVYNYQAFPAYPNSPFQVATGYQFPVYNYQAFPAYPNSPFQVATGYQFPVYNYQAFPAYPNSPVQVTTGYQLPVYNYQAFPAYPNSPFQVATGYQFPVYNYQAFPAYPNSPVQVTTGYQLPVYNYQAFPAYPNSAVQVTTGYQFHVYNYQMPPQCPVGEQRRNLWTEAYKWWYLVCLIQRRD

SEQ ID NO: 77932 - protein, 1263 aa, Homo sapiens [sequence omitted]

SEQ ID NO: 77933 - protein, 173 aa, Homo sapiens
MLQDLSASVFFPPCSQHRTLAQVPDNDEQFVPDYQAESLAFHGLPLKIKKEPHSPCSEISSACSQEQPFKFSYGEKCLYNVRFRRQLSEPCNSFPPLPTMPREGRPMYQRQMSEPNIPFPPQGFKQEYHDPVYEHNTMVGSAASQSFPPPLMIKQEPRDFAYDSEVPSCHSIY

SEQ ID NO: 77934 - protein, 420 aa, Homo sapiens
MGDEKDSWKVKTLDEILQEKKRRKEQEEKAEIKRLKNSDDRDSKRDSLEEGELRDHCMEITIRNSPYRREDSMEDRGEEDDSLAIKPPQQMSRKEKVHHRKDEKRKEKCRHHSHSAEGGKHARVKEREHERRKRHREEQDKARREWERQKRREMAREHSRRERDRLEQLERKRERERKMREQQKEQREQKERERRAEERRKEREARREVSAHHRTMREDYSDKVKASHWSRSPPRPPRERFELGDGRKPGEARPAPAQKPAQLKEEKMEERDLLSDLQDISDSERKTSSAESSSAESGSGSEEEEEEEEEEEEEGSTSEESEEEEEEEEEEEEETGSNSEEASEQSAEEVSEEEMSEDEERENENHLLVVPESRFDRDSGESEEAEEEVGLPERRGVPVPEQDRGGHLWSGLQSKRQENR
